United States Patent Application Publication US 2014/0057251 A1 - sequence listing, part 30

SEQ ID NO: 31896 - DNA, 1179 bp, Cannabis sativa
caaaatttcattgaaatatgacataatgatttataataataaccatttcaaaaaaaatagcaaattaatagaataggaatgattttagtgactttagtacaaacaaaaaaaaaagtgaaaaatatttattatatgacgtatttatgtgaatgaatataacttttaaataaaaaaatatttttatggggtaatggagctaacagagtagcaagaaacggaagtaaccaaaaaagttaagtggattaattgactgagaaaataaaaatatgtggcatttatttattggagggacaaagctgagataaggtaattgggacaggtgattctttttcttttttttttcatggttaaaactattaaatcactttattccaagtcagatgctcttgcttttagctcataatcattaaatgcacgccgaaaattcatttgaaattatatacagaggcataagccacataatctaaacaaaacagtttttgcatgtactcatacttagtaggattgatacctaaatttttttttcaacgatcttcagaaatgccatttgagtattctgttagaaaattaaataactcaagatacaatttgtatataatctagaacacaatgctatatggctcaggtgaacttgtcatagtgtattgagaaactatacaattttcttgtaagtactcagtaaaaggctccatgtgttgtccagattctgtataacgaccataatattttcctccacgatccgaatgaacaatcttaattactccccctaattgtttctcaacctcattaatttgaaatattttgagcttatcaagagcatcagatttttctttgatcaagtaggtgaagtgagaaaaatcctctatgaaagttataaaatacttatttttgcataacatattagaataaggtccattgatgtcagtgtggataatttctaataaagattgactacagttagcagttttctttcttattttagtcaattttttacaagtacaatcagcacaagtatcccaactaaaagcattaagaggaggaagaaatttagctctaatgaatcaatcaacccttgctttagaaatatgacccaatcttttatgccataataataaggatgttaccttaatatacgatctcttacctacattactcaaaaaaatgaaagagaaagctaag

SEQ ID NO: 31897 - DNA, 1929 bp, Cannabis sativa
aagatgattcctagcaaccactgcaatacacatattgtcaaaacccactcttacatcacaattcagcttgatccaatccttgggggaggggaccaagcttccttgagatgcggagcaggactagggaataacgaagcatgcagatcaaaataagaagtactaatatcatcaacacattttttcatatcaactgggcagttattatggactctatcattccgaaccctccaaacagtatccacaattatcgaagcatataagaaaacatcctcgacttgaattcctcggtgctttagatcccaaatgaacttaacccaatcccaaacttggatgcctgtattacaaataggataaatgccccaaggggaagaccgccataagtgaaaagccacctcacaagaaaggaacaggtgctccatggattcttcccttgttccacaaagagggcagctagtgtcctcaatttgaaatctcttactgatcacagatcttataggtaaggcattagacaggctacaccaccacaagaccttatgacgttccataactttgctattccaaagtttattccaaagattcggagccacctcacactggggcgctctttccaaggcttgaaccagataagccgatttgcacgagaatcgcccattacttgtcagagtccaaatccatcggtcagagccctgacctgaaggatgtcctccttttaaaatagatgccactgtttcctgatcaaagctttctttcagtttattaatgtcccagtatccattgggtaacaacaaatctgctactcgatatcgcccctgcttggttttggacaaaaacctttaaagtgagggatccagggatctctccaaacatttgtattcgctccatttgtcacgatcttgcaggcaccccttctcaaaattgtatttgcattcacaacactcttccagaaccaagagtctgagtttttatacttgtgattgagaaagtcatttccttttaagtacttggctgccagaactttacagcacaatgattggctaccagttaggatattccatccccattttgctaaaaaagcttggttcatttctctcgttttccggaatccaaggccgccaagagattttgggaggcagagcttgtcccacacttttaggtgaatcccatgatttcctttttcaaaaccccgccagaaatctctaactaatccatcaatccgattgaccattcggtttgagagtttggtagtttgcatagcgtacatagggaaagacaagcccactgattttatcagggtagctctgcccgctttggacaacgtcttatccttccaaccctatagctttgccgagagattatcaagaatgaaattaaaatctgcgtccttttgtctagaccggaaaagaggtagccctaaatatttgatgcaaccttcaggagattcaatcccaagagtctccttaatctctttcctgattcccatcggggtgttcttactgaaaaagactgaggtttttagcctattaacctgttggccagaccaagagcagaaattctcaaggcatctccagaaaccattgacctcatttaaattggcttttcccaccaaaattaagtcgtccgcaaagaaaatatgggaaagggtcgggccacccctgcttagctttataccttgaatgttgcccagagcaagagctttatgtaataatctggataacacatccgctgcccatataaacaggtagggttagagggggtcgccttgtcgtaaaccacatgaagggttaatctttccaacccgactcccattaagacagatgttgagagtcgtggtggaaatgcattgtgagatccaattacagaacctcacgggtgttcctaggcattccatcacatggtcaataaatctccagctcatcctatcataagctt

SEQ ID NO: 31898 - DNA, 2186 bp, Cannabis sativa
caatgctcgcccctagttgaagacgtgatataccccagtgatctttctttcacaaaaaataacatgcacgcaagagtcttattgaatttttatgaagcaagcttcgacttcagtgagggatggctgaagttgcataaaaattcaagcttggactttgcttgaaaatattcgaagggtaaagaatcacgtggagtaaggcagacttcaagcaatccttctattctaagaaggagggttgaagacctgccatacccgaagtgatctttcttatgcgaaaacaatgtgcacgcgagagtcctacggaatttttatgaagcaagcttcgacttccacgagggaaggctgaagatgcataaaaattcaagcttagagtttgcttgaaaagatcaaaagaggaaagcatcacgaggaatacggtagacttcaagcagtccttcaattatgggaggaggctgaagacgtgccatacccccagtggtctttcttgcacaaaaaacaacgtacacacaagagtcctggtgaattttaatgaagcaagctttgcctttcgcgacggaaggctaaagttgcataataattcaagcttagactttgcttgaaaagatcagaagggggaagcatcacggggagtaaggcagactataagcagtctttccattccgagaaggagggttattaattaatccaataactactaaaaaatgaaaatgttgaaaaatgatatttttctcccaaacagcccacgttttggctttttcatctttttttatatataaattaaatctaaattacttcactttttggatatatatatacactatattttttgattttttaatatctttttctgtcacttacagaatatatatatatatataaatcctaaactatttttatttaatttcataattcagtttactacttaccttctctcttcttctctcatgatgaggtgttcttttcttaccaacttaaacactgatagatataattggagctgattagagtttgtagaatttggaaatctcttaatactaagaagaatggagaattgataagtcttgatacgatttttattgataagaatgtgattattattttattcatattttctctctattacttttttttttttttatcaattatcaattatgaaatactcaatgtgtttaccatttatcttacaaaaaaatctaatgcatgcaataatataaaaaaaatttaatttctaagtttaagaagctattgagtgaaggttttttgtattgtctacaaaatttaaaaattgtagcaaccacaaatgagtagaggtcactttcattactattttattgctatcatatttgattttatttctattatgtcaatgtcaattttactcatgtaattttttagactcttttcctcttagttgtgttttatttatatcatgttgattgttgttattaattatttgtattagtgattaatattgatatttggtaccacaaaaatcactatgttcataaagattggtggacttcggtttggtcctccaatatccctctcctaaaattaaacactttgtttgaaaagtgtgtttaaccacatccttccttccaatcttaatcttttccatcgtaagtctgcgccctccccttactgctccatttgtcactctcatcttgactccaacactcactctctcattcaatgttccagggcaggtaaaatgtgaaaaaactcatcttttcgtcacttttattttaataatagaaattgtgatattaaggaatttttgctcagaggttttgattgttttgataaagatcaatttactacttttttgggtttgatttgggccacttggaataacagaaacagagccatattccattctaacagtatcactgattttagattggagaattctgtcagttgttatttacaggaatacagggatgctcagaaccgcatttctacatcgtcttccagtttccatcagcctcatgcaagactacaagtcccaagtacaatgtttcagcttattgtggatgcagccctttctccttcttccaataagcatgggtacggagctgctgtctccgattgtcatggtaaagtcattgccacccttatggctcctgcaaattcaggccttcctccgatttttgctgaagctgaagctctcaactggacgttacttt

SEQ ID NO: 31899 - DNA, 3041 bp, Cannabis sativa
  modified_base (1384)..(1386): a, c, t, g, unknown or other
  modified_base (1762)..(1766): a, c, t, g, unknown or other
  modified_base (2995)..(3014): a, c, t, g, unknown or other
tgacttcactttctccaactcgattacttcttcttctatcttctcccttatccaaaacaaccgaatatcaatgtgttttgtcttctcgtgatacattagattcttgcacaaatgaatcgaggattggctgtcaaaatatacccttgcctttccaactagaagcttcgactccttcagaattccttgtagctatattgcttctttgaatgcctctgtggtcgccatgaattcttcctctgtagttgaaagtgctactacgaattggacttgtaatttccaactaatacaatctccattagtttgaaacacataagaggtagtagatcttctagtaccttgcttgatgcataatcagcatccacatatcctttcaatgttactttctctgaaactctcttgtaagtcaatccaatatccgatgtccctctcaaatatctcaacaaccatttgagtgccttccaatggtttatcccaggatttgacatgaacctactcaatatgcttaaatcatgagtaatgtcaggtctagtgctaaccatgacatacatgagacatcccaaagccattgcatatggaatttcttccatttcttctttctcttcggctgtcatagggctttcttccttggttaatacaaattgtcctccaagaggtactgaagtgctcttagaatcttgcttcttgaactttgttaggatcttctcaatgtaattcttttgcttcaaatgcatgactccaccactcttggatctatgaacttctaaaccaagtatcttctttacttgtcccaattctttcatgtcaaatcctgacttgagtttatctttaattcatttgattactgtcttgtctttgcccattattaacatatcatctacatagagtagaagatacacaactattgactcttctaggtgcttaaaatacaaacagtgatcaaactttgaccttgtgaaagaaatctcctgaacatagctatcaaatcgtttgttccattatcgtggtgattgcttaaggccatatagggacttttccaacttacaaactatttcttttccatcttgttccatctgaaatccaggtgattgctccatgtatatctcttcatctagataaccatttagaaacatagttttaacatcaagctgctccacttctaaaccttgctgagttgccattgacaacataagtctaatggtcttatacttcaccacaggtgagaacacctcggtgttatctatcccttccacctgagtgaaacctttggcaactaatcttgccttaaaccttactggctcatcttctgtcacactttctttaatctttagaatccatttacatgaaatcaccttcttgtactcaggtcttggaaccaatacccatnnnttgttctttctaagtgagcttaattcatcatccacagcccaagaccactccttcttgtactttccatttaaagcctcttttatactcaatggttctggtatgtcacatgaatgatctattgacaaagcataggcaatcagaccagcttctgcaaaccttgctggtatatggatttctcttctggttctatctctagcaagctggtagtcagatagatctggttgttcctcagtctcatctggagctgtgtctgtgctgtcattcttctcacttgctggttcaaatcctttgagctcaatttcaaactctgccaaatcttccctcttgccagatgaatctgcatcaggtaaaacactgcctttctcggctttcaagnnnnnaaaatcattttcattaaacacaacatttctagaaataatcaccttaggctttccattctgatttatgcaaattctataaccttttgtgcctataggattatcctagttctctttatataggccaaggaacccaatatacaaattgttttttttttatagttaaattagttaaagactaactaactaaccgaatcttggttgttggggttaaaggaataataccacaattgcctatcctgtatgtttttattttttatgatgataaaaattctgtgttaaacttacgatcatatatgatatatgttgtctccagctaatatataattaggagaagtcacattgtgcttttataaaaaccagcaagatgtgttattgcgtaaagaactctccaaacaaatttgctaaataaatcagtacactatatagtatatagcacagttgagattgaaaatgcgaaagatggtgtccttgacgctgatcctcgtaccaagtctgaaccaaaaatgacttggatcacataatggtaattagtaataattaatttcaatattatcttttaagatgcaatatactttgtactttaatatatattaaaatgagaaaaagaaaaagaaaattcttcaatttccaaatactcacttgacagctaattatacaagcttttatattgtttggttaagcttataacgaatcagcttcttaatttcatgcgtgcatatataataacttgtactcgatatatacatacttcgattgatcagattattaattattatatacatatttaaatgtacattatgtattatgtattatacatccatcaagcatcgagaaaagtcaagaattcatatgtttgtagtttggttggggttgtccttttctagtattaatattagttatatacgtgcctcactattttatatcacaaagtctatacgcaaattttcttgacatgatatgtaaatccctacacaaaaatgagattgaaattataaatataaatgttttttttttctttgtttaatatcgatcaggagattgatattataaatgttttttttttgtactttattgtaaagagtgaacaatattttataataattttttaaactaaaatgtgtgatgaacttaattaattgcatgatcattaatagtagtatatgactgtctatgataaattaaacttataagtactgaagtatacggcttgtttggaacgccgtattagnnnnnnnnnnnnnnnnnnnnattatattgaattgtattttatgcaat

SEQ ID NO: 31900 - DNA, 1653 bp, Cannabis sativa
tttgttatttttcttttatttcttttctcatttggtttcttaatttttttccattttctatttattttctttttcttttttcttcataatttttattcttttccttttgcattttcccttcttttaagattttaattttttattttctcttaatcttccaccgtttctagcttttcttatttatttatttttcttttatttgttttcaaaatttaatattacatagttatgctaacatttattttttattaattattgtattttttttttttttacattgctcaattataattggggttccttcgtggctattcttatgatacactcatcataagagctttatcatccaatataagtagacccaaaatataactaattgattacttaagatattatagttacccaaaatataagtatattgttattcaaaatataagtacctagttacctaaaatataagtgtcgggttacccaaaatataagtaatcgattttttaattaagatagtgtaattatctaaaatataagtatcatgttatccaaactataaatatctagttacttaaaataaaagtacttggctgtcaaaaatataagtacatagttacccaaagtataagtacttgattactcaaaatataagtaattggttatctaaaatagttcttatagttacacaaaaaaaaaaaagtacttgattatacctaggttacccaaaatataagtacctagttacccaaaaagtaactagtacaattacctaaaatataagtacctagttatccaaaatataaatagatagttactcacgttacccaaaatataagtacttagttgcttaaaatataagtagatggttacctaagataatatacttggttacccaacttgtttaagtacttagttttccaaaatataagtacatggttctcaaaatatatgttattggttactcaagatagtacttatgtagtcaccaaaaatataagtacttgaatatccaaaatataagtatctagttacctaaaatataagtacttggttacctagaatgacgatagctagttacccaagatagcaatttgatagtaaaaatataaaaaatttacagtcgtaatttgttactaacatattaatttgtgtgctaagaatatcacaaaaattgtttactttactttaaagaatctcacaaaagattgatataatgcccattcgtaacctaactttaaatacctttactaaaatattataaaatgatatatgtaacttattactcacaaaaaaattgtagttatggatatcaagatctaaaaaaaattatacatgaaaactcaaaatagttagttactttacacaatttttttaaaaaaaaaaaattcgaagggaaattaactcattctaaaaattctgaaaaaaaaaaactgtaaaaataaaaaaataaaaagtagattttttacctacattaataaaagttatggaaaaaaaataaataaattagaaaaatatgaatgccattcttgcatatatatgaactagacagagccgtctcaaggtactgagaggcctagggcagaatttaaaatgagacctttctctttacaaaaatttaaaatatatattatttaaatattgacacaatatcaattttaactc

SEQ ID NO: 31901 - DNA, 2050 bp, Cannabis sativa
  modified_base (1154)..(1157): a, c, t, g, unknown or other
  modified_base (1186)..(1191): a, c, t, g, unknown or other
aaaaaaataaaaagacaaaagaaagaaaacaaagcaaagtgatcaaaataataaggtgataatgagtgaattaaaaaaataaaaaaattaataattggcgtggaaatagatagagaatagactttaccgaatatgaatacaattttttttttttttatgaaaataaactcttattaacaacaaccaagagtttaatacatatatgaataagaaaagatgaataatcctcaatctaagctaattcaccatccaccctaagtgcacaactaattcatgagaaacgaacatgaactaaggatgccttaagaaaattggaaagcaaactagcaaaaaacctaaaaatcctagctcatttcaagagaaagagcgcatttgaaaaatagaaaccaaagctaaataatcagactccacataacaaagagaaagaaaaacctgtaaaaccaatccagcactatcattaagactaaagcttctgcttgaatgactaagaagtaaccaatgagatcagcactcttctacaatatgtgaacttttcgtgtttagaaatatagataaacaacctacgttaaaatactaaaatagataaataagataagaaattaacttatagaaaataaaccaaatttaaaaactaaaatttcaatatatatacttatataggaattaaaatatgaagaaaaacttatcttttatattcgttgatcctctaataatctttaatgtctccaaaaatctatacatttaaaaaaaaaataacacaacaaaatacactaacaaactgataaaatattgagaacataatatcactttcctttatgtacaaaataaataaaatatggtgaaaatataattttgaaaaagaaaattgttaagaagtaatattataagcaaaataataccgttcaaaatataactcaatagatatgatatcaaaattaacattatgagtaaactaaaatgagtagaaattaatacaatattttttatactattgaaataaaagaattttaaaaagaagtcattatattttattttggacaaaaatatttaatttataaaatttgacgaaaataggaaaataattatagattacgattatttaaaataaaatcatgaagactacatttagttaagtaataataataataataatnnnnataataataagggtaaatagcggcataannnnnnaaagttttgagtttgtaagcggtataaaaccaatgatttttttttagtggcataagtattaaatgtttgtaaaactgtaatttttctctattttcaccagtaaaagctccgttttaaatttattaaataaggatttggaagttactgatactacatatttttcgtccaaatcaaataatctaaaatttgggtcttatatgtgtcttgtttaagacaataacagaatctgtactgatgaaactaaaagaaaattacatttttataaacatatggtacttatgccactaaaaaaaattactaagtttatgccgcttacaaacctaaaactttgggtacttaattatgtcactatttaccctaagtagttacaaaatagcgagacgatctccccaccccatgaaaagcggactaccacttgagccactattcatatgaatacaatttaaaagatatgcgttaattaaatggtaaacgttatctaagtaaataaaataaaatttgcttaattatatgtaattaatccataatatatattgtgtgtaattaatgtgtgaaaatttaaatttatgtagcattattcatattaaaatgcatttataataacagtatgatactacctagtatttagcacgcaccttaaagtccctttctcattattattgtattaaaattttttttaataatttgaaattagcttaccccaatagagtgtaatatttacaaattacaactatagtcaccaaatcatcatagtctaaacaaagttttaatgctttcacacatatcacaatactctataaaaacaacctcaaaagatgaaaaaataaatgaacaaaacgagcaaaacttaaaacaaata

SEQ ID NO: 31902 - DNA, 3018 bp, Cannabis sativa
gttggttggagttggctaaggattgcgactatgaaatcctttaccatcctaggaaggccaatgtagtggaagatgcccttagtagaaagggtcccgggcaagtgactagtataatcgagttttcacctcacgtagtagatgatatggtcaggaaaggtattgtgtttattgtgggaaaacttaatactttgacattgcaatgagatctattagacaggattaaagctgctcaattagctcatccagaactagtgaagattcgagaagaggttatacattgtcgggtaatgggatgctattgtttagaactagagtttatgttccaggtagtgcgggacatagacaataaattctcaagtaagctcataccactacttattcattacatcctggcactaccaaaatgtatcaggatttaaaatctttctagtggtggtgcaggatgaagaaagatgtggtagagtttgtattttgatgtttaacttgccagcagattaaggctgaacatctgagacctacaggattattgcagccacagacacttcctgtgtggaagtgggaagatgtcactatagatttcgtgattgggttacctaaaactacggggatgtatgattctatttaggttgtggtagattgatttacaaactctgcccattttctactagtaaaaacaacctttatagtggatcagtatgcagagttatacgtgaaaaaaaatagtgaggttacatgggacttcaaagtctattatatcgtatagagatccgaagttcacctcaaaattttgacagagtctccaactagccatgggtaccaaactaaagttcagtacaacgttcaatcctcagactgatggacagttatgtgcctgtgtgttagattttgaaggctcctagtgcaggtatctaccactgatagagttctcatacaacaacagttatcagagtaccatatggaggggatagctccctatgagatgttatatgacagaaagtgctgatctccaattcactgggatgaaattggagaaaggaaatacttcggtttggaatcagttcaacggaccaacgagactatagaaaagatcaaggccagaatgcttgcctctcagagtaggcagaagagttatgctgaccctaagcgcagatcccactcatgtgctgagctatgaaaacttagaacttcagccggatttgtcatacgaagaacaaccagttcagattcaagataaaaaagataaagtccttcggaataagaccatagcatttgtcaaggtgctctggagaaacaataaggtggaggaagccacctgggagttggagtccgacaagagggctcaatatctagagttgttcaggttagattttgaggatgaaatccttttaacgggggataattgtaaagaccactttaattttaatatgataaattcgcagataattagtgcttaattatgaaaattagagttctaaatatgatttatgaatttatggagatttatttaaattctaagtgtgttatttatgctataattaaaattttatgtttttcatgttttatgcccaacaacattggaacgcggtgtttggccaatagaatcacattttagtatgttagtaatagcgcggtgacttagttatacattgggaatatcaagaatatttgaggtttttgaaatgaccaaattacctctaggtgacaagtatgctttttagtgtgcgcttgggcaaaatggtcgttttgccatttgactttctttgtcttttagtaagaataaattaagtagtgtatgcttattattccattatcttagttagataaacacaatcaatcaataattcattttattcaaattagaaaatcaaagaaaaagccattttctcttcaagctctctctctctcttcttgagctctctagaaccagcaagggtttaagaatttttagcttcatttcagagtatatagcaattatttggtgtatccaattgaaggtaaaccatttagcacctttcccctttgatttcctaagctttaagtttgttttccttgcatgattttaggattagggttctgtgttgctatatagtgtttgaatttgtattccgtagttaaattattattatttgagttgatttggagttatttgatggcttcgatatgtgtttggacaaggtttgagctttagagctcaaactttgatctttaatggtgatttgagtttctggaattgattctagtttttattgcttggagtatgtttgttgtgatctattttgcaggtctggaaggtttggtggcatttggaatcaatttgaggtgttggtggtgttttggatgtttctcgcactaaaccgatcgaccgattcagtgggacctataggaattgaaattttggttagtccttaggaaaccccacagaatggtcttctggttggggaatcggtctatcggttggggctttttagggaaccctagcttttcctgtttttgcaatatttaaggtattgccatattatccatcgataaggaaagttttagtttcgattttaagtccccgaaaagtgatttagcacttcactcattagttttacgaatattgtgatttaggagcctgtaaatcatcgagcagcacagttccactctggttgaccggcacacttgaatttggaaatgagataaggttagtatagtgatatgcatatgtgtttacatgtatagcgtacatgttattaaacctgttaaattacatcaatagtggtatcaacatacatagagttatattggataccgatagatgtatgtttggcataaatattgatctatgctatcatattggtacgactagagtatgactagagtatcgagtatagactgatattatggttgatagtattgtcgtacatatgttctagactcaatactgtgttaggcacggggatagggttatggttgggtgtatgggcacctaattataatccgggttatatttatgattatgattatacttttcttact

SEQ ID NO: 31903 - DNA, 3582 bp, Cannabis sativa
aagcctccttggtgatgctctaaggagcagaaaattaaaaacatatttttttcagtgaggatactcatttctggttttgattagattgctttaaaacaagtagtatattggaggcttgattttgattttgattttgactggaaaagatgtagatgtagatgttttaagaccctatcaaaataaatgggttatttctgtttgagttggaataataagtgggattgtttatttgcgattctttgttgcaattattcaaattttaaatcgtattaggagaaagtgtctaaaaaatgttcatgtttggtgatgcatattataagtggactcgttgtgatgctcttcctcaaaacttcaagctattagttttagaatttggctgatcatacatagtttctaagttaattatggacagtgtaagtgaattttcattagcttaccaaagttcatgtagtagtacaggtaaaggtctagcatttagtttagtggaaaataggagtagactcagagtcagagggagctatttttttttttttttggttctgacatgatcatgcttgtctttataagtgaactgttttaatctattacatattatgaaataaaatgctagacccgattttatttctttcatttgattttctattgcagtatttggagtgataaacttagttgaacacgtgcttatattaaactgatttggcaagtattagcgaatattgataatgttatgtaccccaaaagtaattgagatggagaagtagttggttcaccattttcatgatatggcttctctcttttaatatccatgctgcttgacaaatgtaattttctctttaatcttgttggatttgttgggttcatttatgaattgtggatcttagctgggaagttgaagatgagaactgttcgagcactgcctgacaaggctttgttgaattacactgtaattactattttagacaagacattattttattgatgttctagtaagtaattcgagattttactcttatctgtgttgtgtgagctttggtagtatctctatttagctttcaaaggttttgagattgatacatcaaaggatggtaatttggatgacaataatgatgttcctatggaagaaaatcaggtgaacggtcgtgcatttgttcgtttattctttccacttcttagtaaaatttaataatgcagttttctttcaagtagaaccttgcatgaagtgcctttttattcattaggcctaacattcacttgaattttcactactctcaggacacaaattaggtagtaggccaggatctgaatgaaagtactttggatctgagcttgggattgaatgctcacgacagcaatcccaattcaaaagctgatcacatagattgctagttgaaagagtgaagtttactgtattgtacctaatggagattggaagccttgcatcattttttgatcatttagattagttgcccatagatttcttctgccctacttatatgccgagtatcatttgtagtttctattgctgagtcatttgtcatacattactcattctttagcactgaacaatcgatttttttagcttcttgaaattagctggtactgctggacgtactggactttacatgagtgtaatgacattaactattaatttactattcacatatctttgttaatatatattatgaatcaacaatggctctgccatttacgcaccgttttgtgctgaaaatgtaccaagaaaaccatatcaaggcacttacgaagttttctgcatgtaaaatatgctcccaaaacaaatattttattagatatgaggaggctcttgaatattcaaattgccacaaaattctcaattgtttaattttaaacagcagaaagaagtgtaaggaatgaaacgtaggtaatatcaaatatttaacacccttccccattccaacaatgggatatacgaagttaaaaattacaaacaaaagaagcgacttgttacccctatatcatagttcggcatatttatcgtcatcattcttttgcaataacagcttctggttcagaggagtaatcatgcctgcattaccaccaaaaaaaaaattcattgtgaattatatggccacatttcaggtcatgttcaggtaaaatatacatcaactcgataaatcgcgctattacacaactcagtaaccataacattcggaagagataggcaccaatgtttaatcattaataaacttttaatctcgtcagctcttcacataggcctgactggttcacaattgacgaatcatatacttaaaactatgtataagtggtgagacaaacccaacaaaggaaacagtataacctcttcaagttttatacaaaaacaaaatgaacttactgcactttgcgataaagttggtagagtcctgtcccagccattgcaacgtttacactaaaaagattccagtttttctgcattccaaagattaccaaaattcgaagtattaagtaaatatcagtccataaaattttccataacaaacataatcctgaagaagaaacagaaataacaaacttaatatttgtgttcgatatgattgatgctagaaagagaagggatgctggggactataacatttaagcactctaaaagaaaataactgttctgttccctcaaccaagtgcagtgtgtaattagtagctactttcattcgtccacataacatataaatagcttacaggtttacaaaaaaagctcatttaagaaaactcaagatggtccaaaacagaaaagaacaaactgacatgtgattccagcataaatatccaatttcttcagagtgacttgctaataatttttcttttttaaattgttcacaatattcccaagtcaatgacaatccaacaaaataacagtttgtttagcaaaggcgtgcttagtaacataagatgtagaaatataaccaccctcttttatttgcttactaaagtcttacttattataatatgtagaatggtattggattggactaagaaaaataattcatactaattataaatttaacaatattagcttatgaggaattaagttggatacaaaatcataaatcttttgtctaacaatgtatatgaagatgagaaaatgggtagaatagaattattccaaatttattgatcgacagaattatctcatagtagaagttttttgagattttacttatcccctccaattacataactgaatcacaaaagaaaaatcatcctatctaatactacttccgaaatatgacctaagaagtttaatgaaatactcaaacaaaggtcaaactaacagtatgtcctctaaaataaccaacacaaagaaatcaaacttaccggggtgatgacagtgctgtaacgtgaccagacgattccagtgcaagcaaccgctagaaaacaaagagagtgaaaacttactctgttacaccattgtagcatcatatgaagatttgaaaacttaaatcagtaaatggaaatcagttttctcggccacccacatatgtgtctgcaagtgctttatcagcatcggattgaaacaatctataagcaactgagtaagaacatacc

SEQ ID NO: 31904 - DNA, 2163 bp, Cannabis sativa
ccagcataattagcatcgcagtagtcaatgatcttaacctcatcccctttcttatagaagagaccatagttaatggtatctttgacatatctcagtattcgtcgtactacttctaaatgtgacttctttggttgttacatatatcggctcactactccaactgcataagaaatatctggtcgagtcaatgtaaggtagattaggctacctacaagttttcgataccttgcttagtcttgcaagtcattcccagcatgagcacatagcttaacattagcttccataggtgttgagatgggcttgcactcgagcattccaaatctttacagcaaatctttagcatacttttgttcacaaagaaataagtcttccttagctcggtcaacttctaatccgaggaagtgtttcaattgtccaagttccttcatttgaaagcgtattgataggttctcctttgtttgacaaatttttgcgtcatcatctctagtgataatgagatcatcgacatataccagaacagtcgtgatttttgcttcccttactttaacgaataagcttgaatctgcatgtgtcatagaatcttcgctttctactaagaactcggtaatctttccataccatgcttgtggagcttgctttaatccatagagcactttttttagtttgcaaacatagtagggatgtgctctatcaacaaatcctcttagtttcaccatgtatatctctcggtccagctctccatgtagaaaggtattcttcacatccatctaccatagcatccagtctttactagttgcgagtgctaatagaactcgcattgttgtaatgttagcgactgcgactgagctaaaggtctcgtcataatctagcccatactattgagagaatcctcaagctactaacaagccttgtatctttcaattgagccgtcaggatgaatttttaatttgtagacccatttgcacgaaatgggtctcacttcctccggctttggcaccaactctcaagtttgattctttgctagcgcacttatttcttctttcatagctcctagctacttggagttttggtatacctcttcatatgactctagttctttgaacttttcttcttcagatacagcaacattaacatatttcatatttggctttcgcgctcttattgatctttgatgttttggttggctatcatcatgttttgctctttgatgcacccctatttgccatggattatgaggtgtcttgtcctcgatgcttccttcttcatctgtatctcgagttggaggtaacttaataatttgctcctccattttcttctgcaattcgtcttctatttctttagaatttggtaatgcttccttttgcgatgaccaccatgatgatgtctcatcaaagaccaaattccttgatgtataacacttttcagttgtaggtttgcagcatctccaccctttccgttgattttcgtatcccacaaagatacatcgtatcgcctttttgtcaaatttgctatgtaggtgacttggcacgaatacgtaacacacacagccaaatactcaaaagtgacttgctataggtttacaaccccacaatttttcaatgggtgaaatgaaccctaactttttgtgaggaagtctattgatgacatgagctgctattttcattccttctacccaaaacctccctgaaacgttctttgcatgtagcatgcttcgacatctctctgctaggtggcaattcttctgctcagctactccattctgttgtggtgtatttgcacatgtgaattgatggcatatgcggcattctcgaagatactcaagaaattcatctaaggtatatttgccaccgttgtttgtttggaggcattgaattttcttcctgacttctccttccactatttctttaaactctttaaattttgaaaaagcttcggatttttctttcataaaaaaaaactcatacgtaccttaagaagtcgtcgaatgtaaccatgtaccgcatgtccctgattgatggttgtttgactcgcctaaacacattagaatggaccatctccaatggtgcttttgctttgaactttgaatcttcatatggtaattgatgcgccttaccgtattggcagccagcacatacgatctctgttctaacctcgagttgagga

SEQ ID NO: 31905 - DNA, 1074 bp, Cannabis sativa
aaaaaaatacaccaaaaaaaaatacacttaaaaaaaaaaaaaaaaaaaacaactaaaaaattgctattagataaaaaaaaaattctgaaaatcacataaaataactaaaaaataacataaaaataatttaataaatgcacacatatatacaataaaaagtaggatgattgcggcataactctaaatactttcactttgcttgcactacagttaaccccaaaatttaaattttagcggttaaaaccccaaaattagcaaaccgttagtaatttatagtttctatccattttaagtgttaatgccatgtttggatgtccatgtgtatatttacgcagacatggtgtacacataacacaattttattggtccacgtaaaaaattatttaaatttaaaaaaaaaataaaaaaaataataatttgaaattaaaaatattgttaataaaaatatatatatatggtttttgataattattttgccaaaagtatatttcgaatgagaaaaattattttattattctaattgatattaaaaaaaatatttgtgatcctaaaatgtgaattggcattttatttttacatcagaaatttaatttaataaaatataaaagaaaagaaattgtacaaaacaaaaattagaaaactctaatttgaaaacctaactaatctctttctcctctcttctacttgcagcagccataccacaaaccaacccttgctggcgtcggtggtccaaatggaccacacctccttgcagccctaaaaaaaaaccaaaaacctccatatctctctctctacttctcgtcggtttcaccctcgctcgaactctctttatttctctctcaattttctcagtgggagccaccctcgtccggtgaagggctaaacggaggccgtggctgacctcaacaagccacaaaacctgaggaacttatgttctctgatccctctctcgctcttggaccctatctctctcgtcatgtcaagctcggcccaacgccgaagggtgtctctggccatccatagaaaaagtggaagcaacaaatggcttcaccgtcacttcgaggccttaacccc

SEQ ID NO: 31906 - DNA, 5989 bp, Cannabis sativa
  modified_base (651)..(651): a, c, t, g, unknown or other
attgaatgaaattagataaaaatcattaaatccaacaatctcaatagttcatgggcatttttaacgactttaaaagtttaagggacatgatttggtacatgtcaaagttcagggaccgaaatctaattggccttataataaatatacttgtgcctactttaaataaattcataaccatttttactaaatttatataattttgagggaattcaattattaaaaaaatatttgtgggcacttatttacattttgtgtataattatgaagttaaaaaaatattgaagtttttaaatataattcttttgaagtggggttagatacaattacaagggtttgttccaataatttttaggttaattattttatatgctttattttattttattttattttatttttaaatttacggtttgggttactctggtggtttcaatgtgagtagttatacagattttggttgcaatttaggttgcttctataattgctataagaatttttgtgtagaattccctaatttttattaggctaattaggatttttttccccctaaactttaacatgtactaaatcatactttctaaacttttctggcagttaaaaattccctctaaactattgagattgttagatttaaggatttttgtctaattncattcaattttactattttagtgtctgtttatgtactaaatcatgctcctcagactttgatatctaccaattcatgcccctcaaatttttacatgtactaaatcatgtccatgttagatttttttaccaaaatttgacaaaagtccttaaatctaacaatctcaatagttcagagggcatttttaacgattttaaaagttcggggaatataatttgagacatgtcaaaatacaaagagcaaaaatcctaatttaaatttttcaaaagttttataaagaagtgtaactatttagacacatatacaacacaaaaaggtacacccatacacttatttttaggattgcatcctaaaattttcttatattttatgcataaatttgtccaacaagcaaaggtaatgtaaaggaatgcaattcgatttactattgagaaaggttgactaaccatagaataatggttcatttagatgagaaagtgatgacaacacatactattgtacacatgaaaaataataggaggtagtaatgatgcatgacaagaggaatgctttgttgacctcaataagcataatttgagcatgtaccctgccatgccattgacatttattggcatcattgcttattctatttataactatgaccaattgcggctatgttataacgtaagggaacctctaaacaactgacattaatatataaaaaacttaatgtgtcccaatatttgtgcattaattataatatctaattagggtcacggtttgcctcactgcctcggaatcggatgtagaggatttaagaatatgcctctaatagattctttaggagaccatttaaaaatatttcccaaaatattatatcatattattaatatattatacaataattattgagtaataatgttttataatcatacataaagatatgacaatacttgaatgggattatttggcggtttagaatgattttttgtctttttctaaactgagtttattttatttattagtttaagatttgggatgataattctttgaaagatatgcatatgtgcatataaagggaaatcaacaaacaatataacttgaaagatataacttattagtagattatgtaagagagctttgtttccactcaataaatacaagctaatagtatagtaataaatacatatgcatggtgaactatgtgtttgtcattatatagtagtaattaattaataaattatatttaattaaggtggtggaatggatcttttaatgtgccaatctgaaatgagagagtggagatagttattagggatgaggaagttgtgtttgagctttaagtttgtcatgggtgaagtatcctttcccattctcatccaagcttcaatagcttccttttcatatgaaaacccatctgccgctacatgtggatttctcatcacatcctgaactcataagaactactcatcaaatttgggttcattaattaattaatccttgttcccaattaaacacaaatcaaataagagtaattaatgatagtttgtctcaacataataataatgtaggccactaatatggtatcctgaatttttgctaaatacaacaatgaaccccaagtttttataaatataacaagagaccttctgtaaaatggtaaaaataagttcattcaacttagttttaatgaaataaatttttaaaaagaccaaaataccttctttaatattattttttatttttttaaaaatttaaaaataaccaattaataaccttaataaatattaaacaaaaaaaatgattccttttataaagagctctattctacgatacatattaagatatttttttctccttgaaaattattgttaaagagtctttcacatgatcttctccttcataagctcttaattttttctccatatctctttaaagtaaatgtatttctttaagtttctttcttcttgggttatatagggttcatattcatatagtaatttcatcttccactgaaattttagggttatttaaattttaggattttaatagatgattatttgactaggttttttatcttgttttggtgtcaacacattattaatgtgaaactctctaacatccctctcaagatggtaattattttttttttttgctcaccaatcttgcacgtctcgatcacaagtggttctttttggctcacaacgactatttttttagttcactatcccagaatcacaagcaactctttttggctcgtctttttagaccgatatttggatttgaattggatattcattagattttttttagtttatctctgataccatgttaggatgcgaaagtatatggttatgtatgatattagtttcatcacattatcaatgtggaactctctaacaaaaattaatattgttgattatgatatgtgcaattattttcgattctcttgacctgctactatagaatatatagatgtttttttatttagtaactataagtcactataaatacatttatgtatctaaatataaatataagttatttgccttattgaatctagaactaaaattaatttttttttattcatatatgtagattaagctttctctaatgtagatatagttcttagttatattaagctttctctaatgtagatatggttcttagttttgttttggttcaaattgttttctcattttcattttccttgctagttatttttgttaatttttatggtttaaaattaaaagactattggtgtaataatgcttagattttaaaatggtcaaaatctatttgagatttcactactacaaaaagaagtttgtgccagtcaacgtatctggttaaactcgttgatcgatacaaaagtcaactattacttttttacttcgattgttaacagacataaataataattaatacgtcgattgttacttcaacacaaaacaaaaaccgacgctaaagatgaacttttaaaagaaaattacacaaatgaagggttgaattttgtgtcaatattgcccaaacacaatatttagcaacagtttacatgttttttgtgtcagttgtgcaccgacgcaaattttgcatcaatgcacaaccgacgctaaattacttgaaaaaaaaaatcacaatcacttatttcaagcccatttaaaataccctaaaatgaaaacctaaacctaagtgatatataataacctaactgttggctttaactcattctctctgtctctctctatgtctccatcttcatccttgatggcttgaactcgagaagctccagcgcccaagcttcaaaaatcccaaccacaccgaccacaaaagctctgacggccccagcacccaagcccaaaaattccaagcagcgcctcggtatttctaaacctcatttagttttctttttttttttttaattctttctttgatctcatttttagatctcttcttttaatttttcccctctttttctaactttagaattgtgatataaattgtattttcgttttaagatctattgtgtttatatgttctttctgggttggttctatatttcgttcaaatctgaatggtttgatgtggtggcggtggtggttatcgtggtgattcaaattttttttattgttttactttggttcataatcaaagcaaaaaaactaatttgcatcgctacggattactatttgttttggttatgaaccgaaacaaaaatattttagtgtctgttaataagtgaagcaaaaaatgtcagtatttacatctacggctatagcattagttacaccaactgaagaatatcttatatgttacttaaaaactaaactaaaaagtcttttttgtagtagtactgttttaatacccattgcccaaactcaacccccattccgtgtactttgattttaaatagtcaaaatcaaaactttcatcaattattcagatttgtttagacctaatgagatgaacttaaaccttactttactttcagagcaagaacagatcaggtatatcactcaccgtcgtgcatcgtattttcttctactttcgtcgtctttgctaacttctttcatcctttgtcgtgatctctgactttctttgatgtcgtcgctgactgaaagcactctaaagagcactataagtggagaagggagtcttgtagaagacattttgattcgtatagagggtattttggtcattttaaaaaattacttcattaaaactaagttaaaggatttttcttttgttttttgtttttttaacataacaaggtgccttatttagtttatgaaaacttggatcctttgttgtatttagcaaaaattcagggaccatattagaataaatctaacaatgtatggaaccacatcactaatgatatagtacacaagtgtgtcacacacaatcattgttagatagttatataagttttcatctattttaaaaaaattgaaacttagactttaaaactaatatgatccaatttcaatatctaattaaatcctaaaaataaaaataaaattaataattttaaattaattacctaatgaatttagagaatgatacctattacctattgctaagagtatatacggatgagatttatgtcatgttacaaaacaaaactcaacgatcttacttaccttgtatatagggcaaaggaacacacatggtatttcacaagactcatgtccttctcctccatcagtgctgctaatctcacctcttcttctatcaactaattcaacacactttttcttcaactcttcaagctcttccatcaccacttccaccttcaactttgtggggcccaaacatctaaatgccaacaaggcaagtctctccacaatatccaatggccacgctccacctgtctcatccaagacctggacaagggcagccttatcaacaagcatagcatcgtccacaagcccagcccaattcctaccagtcaacagctgaataagcaaaagcccaaaggcctgcacatctgatacaacgtgggattcatgatgggcttgtgaaagcccaaatccaccaatcttggcaacaaggttgcggtcgagaaaaatgttggagattgtgagttgggaatggacaatgggtatgggcttggccaggtggagataggagaggccagagcaaatctgtgctgcaacatggatccgagtgtgccatgagagagccctaattgctccacatgaagaagatgagaatatagtgtccttcaaagaaccattgtgcatgtattcgaaaacaatgcattggggctctaggcaaaagcccatcataccaagcaaatgagggtgtctaatcttgccaagaaacttcacctgcataaaaagtaaataaataaataaa

SEQ ID NO: 31907 - DNA, 1227 bp, Cannabis sativa
ttatttaagtcgggtctaggtctaaggtcggaatcaggttcggttgagaggtcgagttcagcaccaaggctgtggaggggatttgttcgtctggtcggagtccaaaatattaaataagaaaaaaaactgtttaaaaaaatattaaaagtaacctttttctgtttttgaaattttaattctcaattaaaaaattgaaaaaagaaaatagttttatagaacatgtttttgaaaaatatttttttattttaaaaaaagaaaaaactaattaaaaaagtgctaccaaacgctaccataattaatttagctacttaattaaattattaaagtgaaactggtcaacttttttcttatcatttttttattaactgaaaaacttttttttttaagtttttttcatcaatatcccacctcatataatataaaaaataagaaattttctaattaaataaattaattaaacataaaattttcaaattttcaaatactatccattcatagctaatactataaattaataattaatatattattaatatgtaccctctattatatatacctactagagattttattaaaatggaagaaaattaagatatattgcaactctattgtaaaataatacaaaaataaaaataagagattaattaaatatatgttacaatacacatatatacactatatatatattatataaatttatatatatgaaaggtagaaatgaagatagattatacaatattatataacaaatatataatatgaagaagaaaaagatcactcactcactaccttgagtgtagaatagtggggatcatgacttgaacaaggtattacacatttgtccaaaagcttatttcccttatctctaagcagtaagcactaagaaaactctctaggaaatagctttgagaattatcaagccttttagagttttctagcaaagtgcttttttgatagaatatttcttttttcttactctcaaaatgagcaccaaagacctcctttataatgtataagtgatcacttagaatattcaaataacacctcatttctctcatataaatgagtattaatataggttgtaacaactatattttataccatttgaatcctatcatcaaattgtgtaacaacctttctattacactaataatgtgtgatcaacacatgagttacaagcaataacaaattgtaactgttgctccagaattcgcccaaaatacgtgg

SEQ ID NO: 31908 - DNA, 1722 bp, Cannabis sativa
  modified_base (491)..(499): a, c, t, g, unknown or other
aagggtatatcaattgatgtggaatgggtaaaagttgtttgggattgggattgagagtgtgattctggctagctttagggccatttgaaaagaatcgtgtaaagaaagggatggttaacggagttaaaagaaaatttaaaaaaaatggtggatggtttttttgggttaaatttaacagaatattcttttatttgtaaagtatattctgttaaactaagaaatacagctaaatatgtacttttaatatataaatatataaatttatgttataaattataataattgaatatatttatatatatatttcaaaagtaagtatcgtggtttcacttggtaatataattaatttgtatggtattcctattaattagccacgtatccattattttctcaaaatcctattatctagctcttgattcattttattctcaaagtaagagcaacgtcttttgtgacgttagtgctctatatgcatgtatatatatatatannnnnnnnnatatatatatataaatataaaggtacatatacagtagcgcacatatacaatatatatatatatataattatttttggctgggttattatatttttgctatttctattttcctaattctcatattgtaattagaagatctgttaaattttgagggattactttgtaaatctttaaagacagtgtattgtttgcacgccttaggtgttatcattttattattgtaattattttttctaacaatttattgggtttctttcttgacacatcatccctagtcattggaatggtggtttatgtgtgtttataatctagatatactcgcttatagatgaaaaatacatccaataacaaacatttttttttttaaaaaaaaaacaaaaaaatattttgaaagaacataattattattttcaataattaattaaaatattaaaacaaataaaatccctcgaatcctcagtatgggatatgataaggccacaaagaaacacgatcccatggaaggaatgactaaacaaatatcgcaaataactacaaatccgcctagaaatcataatgacacaattataagctgatttatataaatgctagctggcactaatgtgatgtgagggtgcgtagtagagccaaacaaaaatagattaaaaaaaagaccaaatgtatgagtaaccatactcaagaccaaatgtgatgttagcttttaactattataattattcatttgttgtgacttgtgagtgcttaaaaacaaaaacaaaaaaccatttctcctacattctttttaattaatcactaataaaacaaaatttaacctgcccatgtataaattaatgtaagttaattttttggaaacaattaatatacatttttctttcgaacaaaaacaattaatatatatattaattaatcatactgggattttttttatttagttttttttgaatgaaagaaagagaaaaaaaaaagaaacaaatataagaatacaatttaaataaaaaaaatgtagtcccatctcaactctcaacccaacatgcacaattttgttgtaaatgtagtacaaaaggttgacaaggacaataataataataataaataaatacatatacaaaaataggaagtggtagcaatttacaagactgtagagagggaaacagagatgctgtctatttccgtgattttgaagtttcgataaacccaaagcatttttagagagagagagagag

SEQ ID NO: 31909 - DNA, 942 bp, Cannabis sativa
agtaatcctggattaggggattaggtttttgtaatcagttgtcgtggcgtgcctaattgttaaggcgttacaattttagtcaagttgttagtttcatgcgcttacctttctagtaatcctggattaggggattatggttttgtaattagttgtcgtggcgtgcctaattgttaaggataatattatcacatcctttactgcctcaacattgcgaacgagtaattggtactatgcaggatacaattagacaacaaggggaacagattcgagatctgagagagcaacttgctcgtcttgtgtctattcctatactactgacacttcctgttgtgccactggatgtggtgaaatatatggaaccaacttacgggcagctcaggaagtaaaaattaaataaaccaccaattgtgggatagaactaaaggttccagggtgaccaagatagcggtcaaggtgagagtaagaagtggtgaccctatcctgaatgtccaatatgtaaaaggtgccatttaggccaatgtaaaattaaatatttagagaagtgttaattacaacctcctattacaacctcttagtcagtcttcacacccgaaatcacataccagaatatttttttcttagcagtattcattatagttacagaatcatttttgtaaatttttgaatagtttacaataccgaaaatagaaatcctaattccagtttactacgcgcgttcaaaaaacttcaaacgtattttcggtattatcaactatttgaaaattttcaaaaatttacaggaatgatgttgtaagtataaaacaaacaccgccatgaaaaaaaaatttgaaaaaaatatttcgacatatattttcggacatagaattttaactaaaagattttaataaaaggttgtcaatagcactagcattccttaatttgcatttatttgtcagttattac

SEQ ID NO: 31910 - DNA, 1584 bp, Cannabis sativa
gtttccaatcctcacaactcgttatgcacgagctgcgtatgtgactatcgttgcccaataaagcgaacgataagtaagaaacctaaccgcagttttaacgactaattactcataacggtaatgaccgtttctaaccttacaactcgttatccacgagctgcgtatgtcactatcgttgctcggtaaagcaaacgataagtaagaaacctatctacagtttcaagaatgattgctcataaaggtaatgatcgtatcttaattcattcacaatcacggtgataaccatgttcattcctcaatcataaacaattcacaaacaacaataattgtttctcatcattaccttgattaccatcgagtcacaacaaatacatatcgttaacctcgattaagattaagtcctaatgaacacataccaggatcttgatgataatcgagactgtaacaatcataacattaccatatatcttaatatttttcttacctcaagtccaaagtcaagtatgtgggccgacctaagtggaacgatgctcgaccatttcgggtcctatgtcatgacaaatgtaaatcaataagggtctattcaaaaacactgtctaaaactcacataaaataaacctagggtttctaaacaaaacttatggtgaaatcaccctaaattaaaatacatatttttctttaatctatatctcatattgtggagcttttcataagcttcaaaacggtatatagattgtctaaaatggacacccgagtgaaaagttatggctaaaatacgaaaattggcgattcctgaaaaattgaccatccggaattccggttcactacagcagaaactccaaaatttcagatcttcaaagtcccaaaacttgctccaaacctaaccaattgttcccaaacttcacaaatagtataattacaataatacaacatatcccaagttctaaaacacaacaattcaatcattgaatgaaaatcatatctttaagtgaatgaaactcaactttttagcttcaactagaacaaatcaaaccaaatagccatagaaaccacttaaaaccatctccaacatactcaataacctaccataaacataccccaatattagtttaattcatacagccacaaaattacaaaaccctacctccaaaccaactcaaaacctaaagttttcaatccaaaaaggttaagaacttacctcaaagctcttgtaggttgacttggggcaagaatcagctttgaaatgaagggaaaaggcaaaagaaaatccttaaggtttgctggtttggcttgcacgaaggtgaagaagagaagaagaagcttggtgcctcagcttctaagttaactcaaaaatatataaggttttttttttctttttttgaatttaattgtcagcccacaaaactaaaagtcaaaatacctatataatgaaatgactaatctgcccctcacacaaaatttaaactttaaaataacctagggggattatggttattttactaatccaccaaaccgacattctaaaattctaaactagtccagaatatcctcaaaataatccatccattaatgtcgtgacatttc

SEQ ID NO: 31911 - DNA, 2634 bp, Cannabis sativa
ttaatttttcagggcataaatgaatttcaaattaagttttcgattaaacctaaacaaaatgttaataccaacatcttcctctgtcattattttgttctcacggataaaacctagtcctcttgtcggtacaccaaaaatatgaaccaccaagaagcattaatggaccatcgttttacgcagacccttcttttaattgtttagtgcttagtttctttattgatttggtattatatttttttgtattttgtttattttctcaaatctatttttagggttgcttgtgtgagttttgagtttctgaaatggagtgtttggcattgattattatagttgtgttgtgtattttgaaatgttggtattttttcatacctaaccacatgcctatacattcctatttggttggattcctcagttcatgttatgctctggacgcagcacgctctttccctaatagcagaaaggaggatagaattagtgcgctaccttctcccccaaggcctcctcggtcttccccttttttcggcctataaaacccaatttgatttccactccctaacttacaattttgttagcaattctgtagtgaataaataataaatttgacttgtgaaaatcaatcaaatcaaagtaattgatatgccaaaggtgcaaaatttcaagtgagaagtcaaaatgaaaagttcattgtcaaaaagatttgctaaatcaaattgttaaattaaatacttaaaacctaaaactaacccttttaataaaatagcaattccaatcatcagtagtagtaaatattttatgatccgaatggcttttgatcatattttagtgaaagtaataatgtcattttggaagctttatatatatgcgaggtgaattagaagcagagcaggagaagctaaaatacttggctataagtgtatggtgacaacgtcaatctacaacgagcttcctatttgttatactatatatatagttatgattgtatttgttatctccatacacataaaagttgaaatgaaattataattattgggaataattaataaaaaaaaaaatcgatgaaagatcaaaggagaaggaaagggacagtaaatgagctaagacatgcccaacttaaatctatttttttttttttttttataaaagataattgttccattaactcaaagcatccataactaaggatgaaatatcagttagaagaaataccctactaaagtgacaatcaacaatatgaagagaagtttgtactaagacatgcatcagaaaatgaaataaaagaaatgtctcacaataaaactttacaatccaaaatcacaacaccatatagagaaattatatcatttattaagggtccgtttggttggaggtaatgaaaacaatggaatactaatcaggcccattagtattccattccattcctttctggcccattaccatcaaccaaacgggccctaaattaaagtaatgaaaagttttatttgtatctcatagcattctaataataaaaaattattaacttaaattaatttttaaaaattatttttattttattttttcacattattttcattcaatatcaatagttagttttattttattttcacaatttttatttttctaaaatcatgtatgattttttataataaaatttcatataattttttattttaatttttatcgtaaaatttaaaatatattttatttttattttataagaatattttttagtaatatgacaaggaagaaaaaattaaaaaaaaaaatagtatcaattaaagatatatattttatataaaataaaaattattgaaatgggatgtacttataactttacgagtgcaaataaaattttcctatggaaatccatctctaacatcatatctctccaccctttatccaactcaaggcttcttgagtcctacaacctccaccataataacattaactattccaggttgactattttgtaaaacttcatgaacaaaacgagttgacatccaaatatattgtcccttgctttgagaaaaatgtgtggatgttccgttgatgtgtgaaatgtgtcgtggaggagctgagtctattattcatatcatggttgaatgtctgtttgcttcactttgctggcaacagtttgatgtttcagttcttaggacatcgtattttgactattttagctaatcttctaatgttctgactgtttctcaaagaataaggctagtctggtgacaatgatttgttgaaatttgtagcgtgctcgtagtgggttaatttggcaagggaagagttccgttattaatggagttgtttcatctgttattgcttattttaattaatagaaggatgctcaaaaaatatgacactaatgtaggagaatttacttcttcctctgctgttagtagcgagcattgaattttacttgttgaacatatgattaagatttataatcaatgttgatgcttctgttgttagtggaaatgatagctttaggattggtagggtaacccgtgaccatgagagaaatgtgctcattcaaagttattgcctggttgtgttcaatcaactatggtagaagtgggaatcaaagaggttcttagctagattaagcgtcagaatttttctcaaattattattaaa

SEQ ID NO: 31912 - DNA, 1676 bp, Cannabis sativa
gcatttaaggttaaaacaacatttcacacaaaaacacaatacaacttaaacaatttgctaaaaggtaagagcttacggaaccgtgagttgagctcgtaattggccttgattgtacatatcttgacggtcttcagtgaacaacttggtggctctgataccaaactgtaacgcccgtatttgaaaacttgataaactgaaattaatcttattatataatatttataaaacctcgtaagtcgggatcctaagtttaaaaccatgttgaaaatacatatgcaacatataaagttacaatatatatatatatatttataaataacatggcaatactaaaataaaactcaaaatgtgataagatcgaaaccctccaagttgcactaccgcgatatgtacaatccttaccgagctctaactcactgctccactagccaagcttaacccttacctacacaagatagcaaattgatgagtcgacagactcagtaagataagcatataacaaattataaaattgacttgtgtctaggcgcccatacacctattcacaagactaaccaaatgattaagaacattcttaatagttggtgctattgaccatgatatcacccactaccagtactatgattgtactgcgggaccgacactatgttcgtaccgctatgatatcatcaataacacctaagagtacaactggccatgatatcactcttaaccagtattgtgcccgtactaccgaatcgacacaatggttgtgccactatgatagcgccaattaatactctttggggtgaatatcactcttagccagtacgatgtctgtactgccgaaccgacataatggttgccctactatgatatcacccaaaacataagcaatcacaaacacaacatggatatataatatgttctatgctaatcttaccttgtttccgtgctcaagtgtgccggtcagcctgagtagaatagcagctcgacgtattacagggcccgataccacaatattcgaaattctgatgagagacacgttaaaacaattcttggggactttaaaatcaaactaggaataactttatcgatgaaagacatgcccataccctaaaaatcaacaatttggggaaaactagggttcctggaaaaaccccaaccggtaaactagtttattgggtttactgagggacaaaaccagtttactggtttctcaggtccccagtggagggaaacccaaaaatcgaccccctaaactcaaatcaacccccaaactctccaatactctccagaatacctgtataaactccaacaaaccaatatcaagcaacaaaacctaacaattagcacaaaatcctaaatgaccattagagagcaaggtttgagttctcaaacccaaactttgcttaaacctcaacacaacaaacaattccaacccaaattaacttaaacaatcacaaacaaacttcagaacaccaaaacaaacattaattcataacacaacaacctagaactaaaatgcaagcaatcaaacttaacttaaacttaaagaactcaatggaggagaagctaaatgtatttaccttgaatcacaacactcaagacttgctagaatcactcactagcaactgaaaaaacccgataccagctggttccttagagaattcgagagagagagagagagagggggg

SEQ ID NO: 31913 - DNA, 1182 bp, Cannabis sativa
taaaagaaaaatattttgtcaactaacttgccaaaaaaggactttacattctccccctttggcactttagatgaacaaaatattttttaaaacataagtacctgcaaataaaagttagcaagaacaaataacaactcccccttagtaacacaattgaaaatcaaaaacaacaaaaaaaacatgctaacttttaatccaaaatagttcacaagtaccaaacacaactcccctggaaaaagggtccagagttgataaaaacaagcagttaaaaacaaaatattactccccctttttgtttatctaagggccaaagataacaaacatgaaaatgtagaaatatgcccaacaaaatcaaaaaagaaagaaaaacttatgccccataaagcgtgatcaatgaggacagctgcttggacatctcttgttgaacctcctccatggcagtaagtcgattgttcaccaactgaacctcattcttgacctcctggacgtctgcagaagcagaactcgagcttgcaccaacagcagcagcaacaccatctttaggcctttttggaaaagctccatcaaaatactccgaggggttggaatatggttctagtcgggggaggctcaagagtttcatgagattgagccacatttttctgagaggacaaaatcttaaagattagattcggaaacacaagcttaaaagtgtgctttttacctcttcgaaaagaaataatctgattcaaaatgtgggaggccaggtcgatggattctcccgaggtgatacgaaagatgaatgaggccacatcttgagacaccacagtcttgtttgagttgggaagccaattgctaagagcaaacctcatgagagatgaatgagcataggtaagatgtgtaatgtgaagactctccttcaatttcaatttagcccacgcacctgtgagttcagtgagcatcaagtggcgatccatagacattatggcatttggtacattttctggcaattgtaaggcttgggaaatgtctttttcagagaaggaaaaccattgtcctcgaacaaacactttttgaaaaagtcttgaaaatcatcagataaattagtatagaattctttgacaatgttttcaatgtacccttcgaaaccagtgagagtgttctcccattgatggtattgaatgaacttaacaataccatata

SEQ ID NO: 31914 - DNA, 1642 bp, Cannabis sativa
  modified_base (1030)..(1033): a, c, t, g, unknown or other
ttaagaagctgcacaatcatgtttggctagccaaagggagtacataggctggccaagagaagcttgtatgaccggccaggttttgagcacaagctggctggccaaagggtgattgtcagaccaaagagggcctgtttgaccaaggaagcctaacctttacaaggaaagttgtacaaaggttggccaacacttgccaaagctggaaggaacttgacttgccagaccctgacagacacttagccagccaaacgctaccaggcattttagtcggccagcctgcacctggcaggcacttggtgtgcaaccttcatttgggacaacaagtcaagctgtgatttgggcgtcaaccacccataaaaattggggagaaatatcagctattcccctattcttaggggataactaacctatttattatttaattatgtaacaaatgctttatagttcttattttttagggatattaggttattagtctcttgtaagctctactatataaagagcattaatctaaccctagttctactaagtctcaatctctctaagctctcaagttctatgtctaaaaccttaattctatcttccattttctcatacatgccctaggctctctctcttacttgagatttatctactgattctcatattgtaattttaagagagccactttagaatccacaacctttgtgatcagagtggtattatctctattattaatacaaccaaaagaggagtaggtcattacccaccaactaagggggcatattgacctcatatttgaccaactgacaccgaagttgtattaattactgatgcttgctgcatgttacacaataagaacagaaaaataaataagacacaagattttatagaggttcagcccccttagttagcgggtaatgacctactgctcttttaattgtattgataccaaagataatactccttagatcacaggtgttgtagaatatccagtagctcttttaagattgtatatgagaacaaagttggcaaatctcaagtgatggannnngtgtgtgcgtgtgtgtgagagagaagatgaatgtcagacttagaccattagggttctaatgccctttatatagtagagcttacatccttaatatcccttaaaaataggtaaataaagctatatttacgtaataaattaataaagtttaaatgactaaattatcctccaaaaataggaaagttgctgatatgttctccctatttttgtaggttgctaaggcctaattcattgtttgacttgctatccatggatgaagtttgcataccaaaaacctgccaggtaaaagctggctggccatgcacctgctagagtgcatgctggtcgaccatattgtgcaaggaagctagccagcctatactggccatagggccggccaggggtggctgaccaacccccttgaggtggttggctcatcattttgtcatctctcctaagtacttggacccatcattggttgtagtgtggagtagatggcttgaccttcttgttggtgagttgtactctcacatgatattaatgttggccacgtggactgttgggttttgtgccctaaataaaaccatttacaatctgattagttatcaatataagaaatttgaagtgatttat

SEQ ID NO: 31915 - DNA, 1284 bp, Cannabis sativa
  modified_base (1241)..(1241): a, c, t, g, unknown or other
acccaaacccaaacccagacccggacccgaatccagacctgggtccgagattgggacccgagacccaaacccgaacccgaccccaacccgaacccagaccccgacctcgacctgggaccccaacccaaacccagaacccatacccaaacctagttacccaacccgaacccagaccccaacccaagacccgggactccgacctgaatccgaacccgtagttaatgttggggtcaagtgtattgaaaatatattataactttacacgatcaattaatacaagtcaatactaaatattgtattgtattaaataatactaccataatataatacaatacggcgtaccaaacaagccccaaaagaacattacatttaagacattattaggaagtgaggaagcctcgatggctcctgtaatgtatttatttttggaggaaaaggtcaaatgtaaacgtatgtacatatttttggtacatataaaaatgaatatgggtccatgtactgatgtacagactccaatacagtcatatactcatattaagtaagaaaaatacagcttctactccattattttttatttaaaattagcttaaaagagaagaaaattataagcttggaaaataatgaaagaaaagtgtcttgaaagttgtgcacatacattcttttggctggcacaatgatgctgtcacaaaacactttgacaactcatctttcatgtatgttgtgatgtgttatatcactcttgacattttccaatgctagaatgaatttttaaagactactcttttaattttttatttgaataatatgaaatatttttgttttgaattaatatatggattttatgttttattaaataataaaataaattttattttttttaaatagtataaataagattttgaaataaatttttatcaaaataaaatttaataataatccgatctaaaagtgttgtgataaaattttttattattttttgtatctgttcatgttaaaaattttcttcaaattaattatgttaaaaaaattatcaaaaattaattttacgatactatttttactattttaaaaaggctaattagtaattttttccttcgaactttgacatatattaaattatgtccctgaattttttttagcgttaaaaattctcctgaattattgaaattgttagatttatggatttttgtctaatattagtaaaaaaattctaacattgatgaaagttcaaggggcatganttagtacatattaaaatttaaggagcatgatttggtagatatc

SEQ ID NO: 31916 - DNA, 2764 bp, Cannabis sativa
gatatcgacgaggttttgaaatatttatataataaggcgtatatggttgtttatagaaattttagattaaatatataaatattaattgaacaatttaaaatttattttcatgtatatatattttttttaaaaaaaatatatatattaaaaatgataaatttatacagaaaaatttaaagaataataaaaatctaccatataattcttatatataataataataaaaaaaaaccgcacacaaaaaaatattttcaaatatatgttacggtgaaaaaattaaaaattgaacaatcctcgtacaaaataaaaaaaataataaatatataaaaaatttatcatataatgtaaatttattattttctttacataattgatcaagctatttcatcaatcaaaagtaaatgtgcatactttcacggtgctttatttaaaattatgttcacttcttaccataataactaataaaattatttattgttcaactaggttcgaacaattttagaattttgaggagaattttggactgttgttcgattatgagaaattaaagtctgcagatgataactctttgaagaattttcgtatcaatcttacaaacttaatgaagcactgtaagattttagatcttgacaataatgacctataccaagagttatatatgttgcgtcaaagtttaccaaaagaaacccaaagagctgtcgatgtgttgagctatataaaagaagtggatgacagttatctaaatactaggattgcttataggatctttcaaactattcctgtcaccgttgcccttgcagaaaggagtttttccaaattgaccttgatcaaatattatctttgttcaaccatgtctcaagaaagattaagcagtttaactatattattttttgaacatgatatagttgtaaaatttgattatgcaaatttaattaatacttttgcatttaaaaatgcaaaacttataatattatataatacattaaagtttataaatttagtgacgatttattagtttgaaatatatttatattactaaatattagtttaattttatttaaaattacatacattaaaaaaaatacatatataaaatggctcatttttttttttaatttactaaaaccctcttagatcttttttttagtgccaactctgagctaacttattaattctagattcttcttctaaaaggaaaattatacagtacaattagagatttttagactaattatgtctacaaatgtttaagaaaattcttaaataaacttttctacccatatctaactaattcattcactacaaatgtgcataaatttaaactataaagtatcttagaaatgtgtatcatactgtaataatatgagtaattagtttttgtaaaaaaggtgtttgattgagaaaaataaaaataaaaaaaccaataacacccttaatatatgtctctagtctactactactactagtgtagtagtataatcaactccaaatatcattaaaacaaacttccaacacaaagacaattacttggattaaacgaaattccatgcaatagatggtgatcacaacttactagacccatataatctaatcagaaggctagatttagtttgtgattaatattactttgactcatttaagaaagtaaattgtatttacactaaccctagttcatcaatgacacaattccaaactaaagcgggcgaatggcctccaccaccgcttctacgctgccgctgtgcgctgccatcaccgcctcacgtggtgcttctactcccaaatgtatatatagatatagtaagatttaagatgtaaagtttaaccaatggtagacaatatataatttctaatatatgaatggtcttagcaccaaattgtctctccaaagctgccttgatctacgctcatgtccatttcaaaaatgggcttattgggctgagagcccatgagtttgggcgaaggtgacccactattgcttgggctagctgggctcagcccatgactcgacaaggatgcattttgccggacccgcaagtgaaccacttcggcttgggccagtgctaattgggcctgaagcacatcaatttgttgttggagggaagaaatggctccaacgcagccgtagactgggtcgcgcaccctggcgttagcttcgtacaccatgctactaactgcatcacctcgatgctggactggtagctcctgaaaatgacaacataagcccaatgaagtgattgtttgggcccagacccaactacactacctgtggtgtgggcactacgtaatgataacatcatgttgtgacattagaagaaaaaaaacaagaaatgtacaatattccaaagtatgtctgctacatttgactattatttagtttgttttatttattttttccttacagcctctttttttggggccagtaacagaaaaatctagtgtcctgacagtttttcttttttgacttttatcaattttcgtaatatacctaaagaaagaaaaattacaatagataaaaaagtgctataatacaagacaaaagttccctacaaaagtaagtattgtattatattgttgtttcttcgtttttactgttttagttgtttaggctttatgattgtttcttttttccgctgttagaggtgcggtggagcaaataaaatgggttaaacaataaaaatacggttttacggaattttaaatatttttacgatttttttttattttatttacataaatacgatctttttatgttaaaattttgttc

SEQ ID NO: 31917 - DNA, 1721 bp, Cannabis sativa
  modified_base (464)..(465): a, c, t, g, unknown or other
acccacaacaactcataaaaaattaaaaaaactgacataacttttaaataaaaaagacatagtcttataatttagggtcatctgctatatttttttaaaatgaggacataaactaacataatcctatatataatttggggccatttactataatttccttttttttttccttctcatatttgtaatagccagcattataaattgttatatctaccaaatcatgtccctgtctattgaatttttatccatgttagagtttttttactaatattggacaaaaattcttaaattcaacaatctaatagttcagcggatatttttagtgaccttataagtttagggacataatttggtacatgtcaaattttaaggaaaaaaaatcctaattagccttaaaaaacgatgtaatgttcacattccagctaataattggagatctttttttagaaaaaaaaaagaaaaannaaaagaaaagaaaaaaagaaaatattggagatagtaaaccaattgtgtaaacacacccaaattccaaggtatattttcttttgacaaaatatttttgatagcacagctaataatgacagctattaataacatctgagttaccaatttatatgaaatttattaaggaccgttgttaaaatttaagtccaaatcatgtatatatattgtatttaacggactaaaatatttacatttgatccccctcctccccaataaaaatctcattacatcacaatcgatgatattcatatatataaatgtaaatatatttacagtagaacagatgcataaaaattttattctacatatgaatattcttatcatcacaagcaatattttttaatattccagctgtaaatgtgtcctgcccattataaaatttgtctccaaaaggagatcataaatgttgttgtaaaagaagaaccaagaaaaagagcaaaaattctaaactctctagtcatgttgttgaatccctaaatgaatgtatatatctaattgaggcctttgtgggggcaagcaacaaagaaataaaatcattaaataaacttaaggaattggttaaaacttcaaatcaaagggtcctcaaatagtttgtcttagagatctcttaggataccaaaaagaaagctaataattatgaaagatgcatgatggatggaatggaattgtaacaaccaaatacatcagtttcagagggaccccattactccttcaattgaccactttgtggtttaagtagtggtttttaggtaagaagctatagacatttttctcaacttgacacgtagcttataattgtaattacccttttcaactagtaatattaatgaggaaaacaaaagaagaaaaaatctaagaaggcaggtctttccatattgaaagtgctattaaaagtaagaaaaagcttgatgttagatttctaaaactagttatatatataatattactaagttgtgtacttgatgatatatacatatcattaacaatattattaattatttagtcatgtctgtttgtgtatgttttggggggaagtatccctaaaaagcttttacatcatcaactagtggttataaggcatcaaagggccctacaatatttaacatttggagagaaaagtcaaatgagtttatgtgtggaggaagtagtgcaaaagaagataaaaacacaagacatagcagaagatagtagtacttgcctctctctctctctctctc

SEQ ID NO: 31918 - DNA, 2988 bp, Cannabis sativa
atgcttaatcttagggttttacctctgtgtgagttggggttgtctaggaatgttttctgttgatattttaaggttaattaagttgttttgagaatgttttgttgggtgtagtagtgtttaagcttgagttaagttttcaagttcaagcttgaacctttaatggtaatttgtgttcaatggtttaatgatggttttttctgttagattatgttggatatagtttaaattgatgttctggagctttgtaggtgatttaggataggtttgtgtgagaaatgaggacttatgaaaatctgtaattaaaaacggtaggcctttttccaaaaacggtctaccatttttagcaggcagggattaagaaaaatggcctgccatttttaggggtgtttttgctgaagtctcattattttgtgattccttgatatttagggcactgccacgctatttattgatagaaaaacttttaatttgaagtttaagtccctgaaaagtgatttagcggatcacttatcagtttatgtatgttgtgacttaggggcctttacatcgtcgagcagtagtttccactcaggttgaccagcacacctgaattcaaaattgaggcaagactagtataatggttgcatatgtttaacgtgcttgttttatgattacctagtagataacatatcagtaagagcgatattagtgtacatagagatgcattgaataccaacatatatatgtttggcaaagtacagattaacactatcacatcggtacaactagagtaccgagtataggctgatattatggttaatcgtactgtcgtacgaacgttctaggactagtacgtgttggacgcgggatagggttgtgattgggtgtatgggcgcctggttacaatctggtttatgtttatgttatgtttatgcttttcttattaagtctgtcgactcacagatattgtcatatgtgtagataaaggcaaagcaaaggctgaacaatagtgagcctgggctagatgaagattgtacatatccaggtggtagacctggagtgttcgatcttcggggcagttaggctttattttggcagtcgctaggcgacaacttttgtaacttatatgttttaaaaaattgttgtaactttgtaaacgggatccctgatcatgtaatgtatttatatatttaagttttaagtttatttatgaaaatttaaactattcgcactttttcagtaaaccctttgattaacaaaggagtgcacagtaatttgaaagtgtttgaaccctagaattcgcctgagcaattgaggaaagagatttcaaccctttgcatgggttgtgttcttatatttatagtgatagggttcttctttgttttacactttgcccactgatggggtaaataaagataacatattgactagggcccatgaggtggagcccaatccatgagatgttgatggtaggctaatgtggatgccacatcatgttgctagttgtccatttcgtgcctataatcatgaataataaagacatattaaattcttgttactcacttactatctttccatatttggaagatatgattcgctggcgagatcttggcagttaaatcatgatttcgtgggagttgataattaatgaatatgatttggagttggaccccagacatgtgttggatacttcttcagatgctccaagtgtttttcttctggattctcgctatgttggaggactatctctcctagatgaattgtttatctgtgatctggaaggaatgtctctacttatgggtccgacccattatcttgcctggacccgctattgggcctaaagattgagctataattggctttggaaaatacatgtgtcctcatttgaaagcacgaataacatttactgcccaagcttccggaactgtagaggttgcggaagcttgcacccttcctcttggatgacatgaggataggttgaggctaaaggtgaaacttttttgaattccaaagaaagattgtttgtggttgacagctttatgctttttgaaatgaagcgacctgtggcattgtatctttgcctagtgggattacttttcttgatgaaacgtgtgcaatagggcttcatgaaacagtggttaattacgtcattgtgcgtatcgaggaaaatatcatcattcagatatcttcttcccaagcatcgcattaaatgcgtatttgacagctttaccgaaccattggatttgtcttattttttcttagatgtaatcttaaccattgatttgggatcatgaggatcgccacttttgtgtataaatatgatggaaatttcccacttatcatttttacccaaaatttcaaactgagttcgaacttgcagagagaagacgatgacgaacgagagaaccctggagtactacactgatcattgtattcatcttcttcttcaaattcgttggcgagagaatccaggagcaccacagctctaattttttattcttcaccgttcactgccatcaagaacactagatattcaagcggaggttgaagtgctcctccataagatttgtttgattcagtctagaatcctacgtctagaccagattccgtcgatggaagtttccttgcgactatcaccttacgttaatgtaatgtcctaatccgtaagggcaccacgtgtgcttttataaattagtttataataataaactaacagtttaaggaaaattgtggattaattaaaactttaccatctattccttaaaatataatttaaacccttttcaaaaagttactaagtcagggatccccttgttataaaattttaccaaagttaccaaagtaccaccatattattttattacaaaatatttgtacacattcaaaatactgcaaaacgtgatcctatcaactgagcacaaaggacgacggggttgatatgtacattcaccgaaaaccctttgactcgtggctgatctactttccctttgcccttacctgcaccacaaa

SEQ ID NO: 31919 - DNA, 1585 bp, Cannabis sativa
  modified_base (86)..(86): a, c, t, g, unknown or other
aacaactcaaatcaacagtagaacactagtaaaacaccaatagaacactagtgaaaacttaagacagtatactgcagtatgaaacntataaaaaaatacagtaaaaaaattaataaaaaataccgtctgtcagtatttttgtaaaaaaatagtaaaagttaatataccgtgtaaatttctctaaatatgtatttttttaatatatatgtgtaaatataaatttgaatgtattaatagatatgtggatatatatttatctgaatatatacgtgtgaatatgaatatcaatgtgaatatatatgtgtgtgaatgtgaatgtacgatgtttatttaggtgtaaatataatactaattattttttaaatgattattttatagaagttaatctctttttattggtgttctctatctttgggaagaacttgcattttaaaattagtattggttattttttaattaatatatgtattgtgaaatgttattttagtttaattgttatccttgttggttcttttaattgttggttttctctttaaatttttgaaaaatatctagttataaatgttatgttgcccaaattgtagtagaaaattaaaataaattataaattaattttgaacttcatttttaacttaataagatattgagatattaaaacttaagtaaacaattcaaaaaaatttaaattaatatctttatgattacataatttaataatttaataagtaagaaatttatatttaaattaatatgatgaatagttattaattaacttgtcataatatgctataattcttgatattgagaaaatgtgagatgtgagatacaaattaattaatgtaatatttctaaaagtttcattatcataagtaaatgattgtaaaaataatttatgatttctaaaaatatgaataattaaataattcatcataatagtcattttaatatggaaaaaaatatatgatgtgttaattattcaattgaaaagtttcataattttaaataatttttaaaaaataatttaaataaaaaactaattcttagtaattaaaataatttatcataataagtgaataactaatgaattcataatactaaaaataatttatcataataagtgagcataaattgtttaaaattcatcataataatcttcgtcatttaaaaaaaaatttaaatgacgattgataaaagttggataacaaaaaatcgttgtgatgatgcttattgggaaggtgttcaagcctttattgaatttgtatcgaaacatatagactctagtggaaagattttatgtccatgcgtgagatgtcgaaatacgagacgacatgatctattaaccgtggagacacatatttttgacaagggctttgaaagtagttatcaaaagtgaatttggcacggggaatcagatggacctcttgtcgacggtattcacgaggacaatgaagtggatttgaaagtagttacaaacattgcatgggctgaaatggcagacagatataagaagcgaaagatgttaagacatgttcatttcaaaaaatactataaaagtccggtggattttgataatgttgttgcccac

SEQ ID NO: 31920 - DNA, 4240 bp, Cannabis sativa
ctttatatacaaagaaagtgtcctttgattacacagagattgaattcattatcaatccgtttgtacattgaatataacaattaaatcaataaaaacgtaaattcaataaatgaagaacagttttggcccgattcactaaataaagcaacgtatgcaacttctatagtacgagttgtctgttcatgttcttgcataagctcgtaggcctaagatgcataaaagaccagtcgagtctgggatgtctgcgtcctattcgagttgcttatacaaatatcctataataactcgataacttaggacatgtgagtccttatcgggttatcgagattgttgggtcattcggaccggcttgctgaatacgaaagcaatcttttcctctttgcaggaagacctttatagtcctcacatatatctttgtttgtgcgagtcttaactcgttctttggtcctgctccatgcgagctactcgaatgcgactagaaactttcaaggtcacatcatcccgctgagtctagtttaggcgaggcttgaactcaagaagtctcactgacatctcagctctcctcaaggagagtgagtccacgtgtcatttttataggagtctggtctcgagtatctaggggagaaattctcactataacacatgcgcctagtttcgagactgataacttatgtcatgagagaaactataagcgagaggcaggcaaaagggtgtcacgagatggtgacctttggttgtctaattgagggtttcaaaaacatggctgtaagaattttatttaacccatttgggatgccacgtcatcaaaactcttcggagtccgtataggcgtggttatggataaccattggattgtgagaccttaggcattctcttgccacgtgtctccatcccaattaatgagggataatggtattaatgcttctaatacgaatgatccttcattttttcccgctcatttttgtttctctttctctcttattttcaaaacctcaaaaccctctttcacatttcttcttttctttcccagaaaaggtcttggaggcttctgattcttacagaattgactgaggaaatatcgacactttcaaggttagtgcgaaattgtttgcaacaattttccttttatattgaaaatcaatctatattttgcgctttagaaaatgcatgagataatattaagtacatatagcactttatttgccttcgatcaaaactggacatttctctgggaaatatggacctgaaacttgagtaatcacaggtttcagaaagagcaccttaagtattcgcatctttcttgttgagtattctgaatactcgcgagtttcaagatgaacaccgtggatactcgcatatacatttgaataatttagcaaatctaaaatttagcaattttaatccctgttagaacttagggtttatttttagccttttgatttatatatgcttttgttgcgaagactggatgagtcttttgaatggtgggtgtgtcatagtaacttaatgttcatgcgagtgtacggatgttccttggttcactgtgatacacccagccatttgagacatgcgaccagttttgacttttcttgctttttagtcgcatgttggaactgaccagatttctcaaaatggtggggtgtcccagtaactctatggccatgctaaaaacgcatgccccttgggtcactaggaaactcccagccatttttttaagacataatgttagttgcgcatgttcaacttataccttgggaggattaaatgagttctcaaaatggtgggtgtgtctcactaccttaattctcatgtagcggcacgatcattatgttattgagatacacccagccatttcttgagatgtatggttaatccttcatattttttgaattttttttatgcgggtgaggtcactggtgttattcttgcactttcaccacactgaaaagatcgtttatctttcagatgagcgacctgtcggatagtcagatgcttgatttggaggcggggccttcgctgatgaactggagaagagcgacagctttatacccacctcgatctctgaggaggaggttcctgacgctagggctatccgtcaaggctcactatccacggatgagattgataggatggttcaagaactcgctgaagcaggaacgatcgagattcgtgatagcaaatctacggtgtcagcccaagagtacctcactcactcaaggcatgcccctgacattgaagtcgaagaaataagagaagactttgaggttcctgaccgcgagtcggaggaggaagagaatgctgagggtagtgaaacagattcagttgacaatgctcaactgaatgaaccatttgcatgcgagaacctgctcacgcgagttaccaaatctgacctacatacatttgcacagttaaatttgttgtgaatagggaccatgcgtccttcagcatctcaaagacctcatctcccttttaccaaccctacgatcatcaccacgcaagacgtggttgtctcaatccctattcttcgaagtgggtatcttcaccttttcatcctttcgtaaaagtcgtccttagacattatgatgtctctcctttctaactaacaccgaatagttatcgcatagttctgggattttaggcgatgtatataaagtatgtccaaggggagtcaacgatggaggactttagctacttttacgatatagaaaatgtaggctatgacaatggcttttactgctttagtaaatgggcatattctgaaattaatggggtagaaggcatggtttccaatctgggggattagaaatctaagtggttctatgtgtttaaagtactaggaagtaggactgacttcaatcgtcgacctagtacgtcgcgtatctcaaaacttagtatatttttattaccttgcaaagccgctaatgtttatcttttgttgatcgcagataggccagctcgacctgttctggacactgctcgcagaaaaattgctgaggttctaggtagcttgcctgttcaagatcgcgattggcgattattacgattgccaaactgcaagaacatcagctaattcctgagaacgccagccatcagcgagagccagtatacaaggagccttttgaaaaacaaaaggaaagaataaacaaacatcaagaccaacatcgggtaatacattcagtatgtacatgttattttatagtataaaaattaaacttgtcttattgctttctcgcagaaatgacgttcttgaagcaagctccaattctcaacagaaagcctaaggctggaactgcaatgacctctcctgttatcctacaaaagaggaagagcgaggttgtaaggaaactgaatgtaaggaaactgaagtttgatgtgacttcgaaagagaaagacgccgaggacctcaaaaaggctaaggagaaggctaaataggcggaggacaaagccaagctctcagaggcacgagttgaggaattgacttatgatcgcgaggagtatgggaagagacagtatgatcaggctgtttctcactacatttacacgactttatccaaattgccttatttcgacttcacagtccttggggcagaagccagctaaaatagctgaggcttttcgtgctatgtcgcctaccaaactcgaggatatggtggcaaccttttccctaaagaggttgagaacgcagacacggaggaagtcgttgatgatgctgcaagcaaggtcgcagatgatcctaccactctagttccttaagtcctttttcataattgtcaaacttttaacttcttttagcagtacacgggtactcacattttgtactgcagacaaattttaattacttatctaacactatatcctttcgaggatatttacttttgcatatttatttttaagcggtacatggatactcgcataatctaaactgttattttgacgatatttctattcgcaatatttttattattacagcgtggtgtaataacttagaatgtaaaacttgcgaagagtttctaaaacttcgaaaatttcattataataagcaatagtacaatggtaagctatccccctatacttagtaaatttatcaaaataaattgactatgtataaatacaatgcgagtactactgataataatattttaaactctcgccattccaagctctcttaatcactgttcttgttggaatatgttttaccaggatctagatttactagcatgtatgttatttaacatcctaa

SEQ ID NO: 31921 - DNA, 1916 bp, Cannabis sativa
tgagacttcgacaggggtgaagttgttgggaagtataactcctcgtaaaggacagtctggaaggatctattcgtctactgtttggcccaaagtttgaacttgtggccttggattggacggctggccactatgagttagtgcggtatgtccagctccttaatcttttgacccacccaagggaatactagaggaagtagtcagttgttgattggtaacttggtaggcccttcttattagtacggtggcctcccttgtacgatcatcaatggctgccttctgagccctcatagtttccatatctcccagtccctccattataggaactggcatctttgctcatagaatgcatggtttatggttgctcggaggtccttctaatcatgatccaaagttttattataacctttcatgagcccaagtgatgtctgtaggttttggagttcagtgtcatctctaacgggcctttgagtattagtagtggacgggaccccagtgctgggaatggattgatcggctgccgaactggtgtttctaatctcttgtacgcctagtgtgatcccagccagaggggatgtcactctatggcctacagtaggatgttgtgtattaacctgctcggggtttgtcccaagtggtcctgtcgtgtttccaagagtttgcacgttgggatgtgtcaccattaagtcgccctgatcagcaaggcctcccctttgagtttatacaaccatcctattttacctgtcaaaacataagacaaagacttgtgctttttctctcaatcagagcaccaaaatgttgacctcgcttctagccaacgacagtgaatcaaaaataaagcgattaagataattaaaagaaagcaaaaaataataaaataaagtgaacaccatattttaaagaggttcggccccgtaagtgtggtaatggcctactccccttatattgtattgacttgagaaaaaggaacaaagtgttcttcctcttaaagctcttacaatggatctctgagtatatttctctcttagatcactcttttttctctagaatgtatttctacagcaattcttttgatccctttcatagtgaggttaggccactatttatagggacttaatacatgagggatgatttccctttttcttatagtgaataaaataggaaactccattaattctataattacaattcaagaaataggaaacttaaaatatgttgccattattctttgactcaatcctgtgattaagggattgtcttcgtgactggacacaacgagattaatctccaaagttgccatctctcgtactttgctcagcacaaacatgtccaaacctagtcagacatcttctccaaaatcctgctcagatgacagatgctggttagtcatttataggctgcgaggaataatttcctccgtctaggtatcaaaaatatgggacacgtattatttagttctattaccacgtcaaggcgccaaaaacaggataacaacaacagtctaacgtgggagtcaaaatatattcaaagtgaagaacaatgttcatgcattcatggaaaaataaacttaattaagtgaataacaggaatagaaagcttacctacaataagaaatcgttggtgaagaagacggaagcttggatcattgaaatggcgtgaaaatcccagagaatgatgctatgtgggttcggccctctagagagaaggagaagcttctttaaaagttactttctagtgagagaatgaaaagtgaaaattgaagagagtttccccccaaaagcacttaaatactatctgtgggaccactccttcacttgccacacatactcaacaaagagacatgtaaaagtagttagtttatagaaacaaatgagattcgacatccaagagcaaaatatttcacaaggctaaaaatgcag

SEQ ID NO: 31922 - DNA, 2111 bp, Cannabis sativa
agcagcttgtgaagatctattgccatctgattctggaaaaaaattggtttcagaaaaggcccgtgaagtaaagactgagaagcctgataaggtggttaataggaatcaagttaataagtctgaaaatcaaagaaatgaaccagaaggtaattctctaataacctcagagaaccagattgtaggtggcctaagttgtagtgtaactcaacaaagtagcaactctttgacacataacttcaaaagtaaagaggttgaacactgtgttgctgtcgagcaggtttctaacaagtgtccatctgcttgtgatgtgcatgatgcagaacaacttctgaagtccacggattccaagttgactggtatggaaaccaatgaagctggggagtgtgcatcaaaatgtgcagtcgatgcttcttctatctctgctgttggggggataggtacagatgcaaaggtggagtttgatttgaatgaaggatttaatgctgacgatggtaaaattggagaggtaaaaatctcagcacctggatgttcaccttctggtcatctgaatagcccatttcctttttcagtttcttctgtatctagttcccttcctgcttcagtaacggtgacagctgctgcaaaaggtccctttcttccacctgaggacctattacggagcaaaggggagcttggttggaagggttcagcagctacaagtgcctttcgtccagctgaaccaagaaaggttgtagatatgccttttggtgctgtgaacatctcacatcctgaatccactggtgggaagcaaggacgccctcctctcgatattgacttgaatgtacctgatgaaagacttctagaggatatgacatctcggtgttctgcccatgaaacaagttctgcatccaatgcaatgagtaaaagtggtcggacttgtgatcaatctacaagtgcagcaccttttcgtagttcaggaggacttgatcttgatttgaaccaggctgatgagactttagatatgggcagtttcactatcaacaatagtcgtcgaactgagattccaagtttggtaatcaattcttcatctaggggtactttagatggtgatataggtgttcggagggattttgatttgaatgatgggcctgcagtggatgagatgagttctgtaccaacacattttagtcaactagccaagagtagggctctatcccaaccacccgtttctggttttaggatgaacaatatggaagttgggaacttctcatcatggtttcatccagggaacaactcttactcagctgtttccatcccatctgttatttctgatagaggggagcagcctttccctattgttgcagctggtgggccacagaggatggttggtccccccagtggtggcaatgcgtttactccagatgtttatcgaggttctgttctgtcagcttcaccagcagtgccttttccttctacctcttttcaatatccagtcttttcatatggaaccagttactcaatgcccccaagcgctttcactggaggtccaactacgttcttggagtcatcttctggtggaagggtttgcttccctgctgcgcatccacaatttttgggaaccaatgccagtgcggtttcttccaactacccaaggccttttgttattagtctcccggatggtagcaataatagtagtggtgagagcagtagaaaatggggaaggcagggtttagatcttaatgcagggcctggaggcccagaaatggaggctagagatgaatcttttcatcttgcgccaaagcaactgtcggttgccagttcgcaacacctattggatgagcaaatgaggatgttccagatgccaggtggcactttgaagaggaaggagcccgacggagggtgggatggcttcaagcaatcgtcatggcagcagtaggatcgtgtgttagtgattctggtgacaagaaacttgtaagttgctaaatgtaattcttactgcagtgtgcaaggctgttgatttaatattttattgaatctgctgtcaacctcttgaaattgtctttagtcaaataatataatcatacgaagctttctttactgtttctccttgattggaattttctttagcacag

SEQ ID NO: 31923 - DNA, 2337 bp, Cannabis sativa
caatatgctcgcgatctcttgaaacatagcaaacacacccaaaaatatgaaaatgacttacatttggatggttacctttccaaatttcataagatgttttggatgtacctagatgaataaacactcgatttattgtatagcaagctgcgtttatagtctctacctgcaaacgttttgtcaacttcttgctatttaacatcactcttgcaatctcttgctaagtttgattttttctctctacaactccattttgttgaggagttttaagagctgaaaaatgagttatacctgtactcttacaaaaatcatcatatacagagttctcaaactccttaccatgatcactccaaatttgaacaattttaccaatgttgcatcctttttcaactcttaatctcaaacaaagtgttttaaaagcatcaaatgtgtcagatttttctcttaaaaaatcttcctaggtaaagcgagagaaattatcaacacacacaaaaatatatcgtttaccattcaaactttcaactttaattggacccataagatccatgtgaagcaattctaatacttttgtagtattgatatctcaaatacttttgtgagtgattttcaatttcttaccaagttgacaaggttcacactttccaacactttcttcacctagtttgggtagtccaccaataacacctgtattggaatttttatttttagattttataattaatatgtctaagttttgcatgtcacaaatcagtggtcctattaatatctaaatgacaagtgaacacagaagttagggtatagcaattatctttagatcaaaatccttgcaagatagattaattatcatcattaagtacataacaatgatcactatcaaaagagacagtatacccttggtcacatatttgactaaggctaagtaaattagcccttagtcccttaaccaacatcacatttttcaatctcggaaattcttcaaaattgagaattcccattccaatgacgttttcagctaagccattcctcaatgtgacttcgccaaactgcaatttcctgatgcttatcaaaaaatctttgtcacatgtcatatgtctagaggaaccacgatcaaaataccacatttgtgaagcaagacttttatcagaaaaatcagctagacaattttctttttcaatctatttttgtttcataacactatgtttcttttgaaaatatttcaaattatcaaaataatttgtttttttacatattctacatgattaaacatttaggcctaatatgtcacttactgccacaaaaatgacaaatagggacaaatctccttacttgagatcttactctttttgtaattactggagattttgcttctgcagattttggctttgcagcgatagactttgaatatgtaacaacaaactttaaatttgcaacaacaagaaaatttgttggaacagtagatttataaattttgtgattccagaactttaaataccatctcatccaagaccatcaaagcctcttggacctgcattctgaacttctcaaaaatagaggtccaaggttaagcatttgaacatttttatcgagattttcaagttccttctttaatagagtaatctttttcatctttaatgtaaatgtgaatctcataatcatttatttttaatttaaaagtttcaatctgatgagacaattgtttattgattttagacaagactttatttttagaagtaacttgtatccagttttcatacatgaccttacatgatgcagcgagggactcttcacagattttaaaatcatcttgttatccagttttttgcacattgacgtgtctagaggaccgagggacacgtgttctatatttttgataccttggcggaggtaaatgtccctagcagcctgcacataatttgtcagtatctataattgtaaattacccgagcagagttgtatagaagacatccgagcaggtagaagcctgttatgccgagcaacttacaagagataattacttcataatgatcttgttatgtctagacatgaagagaatccctataatcgtgggattgagtcagagaaatagggcaacttatatcagtttcctatttcatatcttgtaattatgtaatcattgtaatttcctattttatgcattataagcaaaagagaatccatccctcatgcattaagcccctataaatagtgacctagcctcactatgaagggaatcaaaagaattgcttcagagagagagagattctaaagagaaaatagtgatttaagagaattactgtgagatcagttgtaagagctttcaaaggggaagaacactttgtt

SEQ ID NO: 31924 - DNA, 1278 bp, Cannabis sativa
  modified_base (970)..(971): a, c, t, g, unknown or other
ctttttgttctatttgttagtagcgaattatttgagtactgattacgaaaatttcacttatgcatacaatattccagaattttagttcaattatgcccttcacacttcaatttaattttattcaactcatgaaaccatagaacgtgattaactagcaattgaacgactttatgcatgccaattacaaccatcaatccactaacccaaaattctatatgcttgcaatacttaatattctccactaatatttaaatcaatgcacaaccaagaatcaggaggtctttctaggcttgtagtgttaggcttaggtaaaagtagttgaaatggtcatttaggcttgtctataccataagcttctccaattatgtcatccaaatatattattttttttttcacacacaaacccaaaattccccttttcaacatgagagaattttttttttcaacaagattgcaacaactatatatttttttttcttgaattcgacactggttgtcatatttttctatcttttatcttttttttttttttttcaagttgttgccatttaattttttttcatcttctctcaattttcacagttattcccacacacacaaaacaaaatttccatccaaatttcccacaaactaaagatctacttatggtatacttagggttaaattttggatattcagggtttatcttttctaggctcaaaatatgaagaaacaaagaataagttaaggctcaaaagggataattaggataaaattacagggatgacttgaaaggtacaatcgatccaaaaaaaatgcctaaatcactttcttaatcatgcataatttattatttcgcctcaaatagcaaacaattgcaagcaagttctagaatttttcaaacaactttccacagttcacaattagcatacacaaactaattcaattactaaataattacctaatatgatttcatgttcttttaaagcannaaattgaaattagtcaagaatgtaatatcaccaagcacacagatttttcgaaaaaaaaatgaattttttaagtcatgttgtctacctactttcaaattgactcataataagtaaattgactcaaaacaataaaatctaaaactaagaaaaaattaaaaaaaaaattgaaagacttaaaaaaaaattaaaaatttaagttcaccccttaaactaaagtgacatattgttcccaatgtgacattaaagagcgaaaaaaaggaacttacttgagcgctacatcaaaaaaaaaaaaaattggccataactc

SEQ ID NO: 31925 - DNA, 1386 bp, Cannabis sativa
gttgttataagttcgaatatatgtccgaaatgtgcagaatcaacttgtggtggaggttaataatgcaaaaagttcatttggaacttcatttgtggccagatagatctttccatctgcacaacagaatccatttgtttcatggataaatctctttgctttacagtgtatgcatatggggaccgacggaagtgaaaatgcttcagatggcacattttgtagcaaatctcgaaataaatcaatcgagtgactgaccctcctattttgcttgcgattgacctatcatgatggatgaacggtttaattaggttaaagtagcatactgatattttgttattatgaatgtatactaatatgaaacaaatattgtgatgttggaataacacttacttctagaagttgttgacataattgtgtggctaattgagttctcgagatcaactgaatgtatctgtgtggaatttttattaggtggactgttgagaaaaaaccgaaggtaagatcaattagaaaaaagaaggcggtgttcagtatatacctgatcaaatctcccattattttcggaagataaattttggtagagactatttttaccactgcatccatttgaagaatccagaacttgataagaagatctcttgtcagtagagcttaagttggtatgatgattgcattgtctctttgatactctgtcaccatgtctatcttgtcgaacattgttaatattatcagcatgataacacgaatgttgcgtacttgtagatgccgcatgatcatcagtacatgggggtaaattgttacgattcaaataactcgaattagtcgtatcaatctgatagtttttcaatactttttgtttagcatatctctctcgttgttttctacgtatttcttccttctgctcttctggcaattctctatatgagattcttttagaagctcagttgttttgatcttcaaaaaaccaaatcgcaatacataaatgtttaatgaaatttgtggtttaatattatgtagatttgaatttaaatttttaagtatggtatctgtacaatcttaccatctccatgttgtctatcattgttaatattatcagcatgataatacgaatgttgtgtacttgtagatgccgcatgatcatcagtacataaaggtaaattgttacgattcaaataacttgaattagtcgtatcaatttggtagtttttcaatgctttttgtttagcatatctctctcgttgtttcctacgtatttcttccttcttatcttctggcagttctctatatgagattcttttagaagctcgtgtgttttgatcttcaaaaaatcaaatcgcaatacataaatgttttaagaaatttgttgtttaatattatgtagatttgaat

SEQ ID NO: 31926 - DNA, 1697 bp, Cannabis sativa
gccacatgttgctacttttgacacatcatcgtcgttaaaatttgggtaaacatcaagcatctatatacttaatctaccacatccttctttatacaacaccaccaataatagggtttcaagtcctggtatgtcttggtggtacaaggatgtaatgaatatggagttgtgtgcgcttcatctagtatctcttttctaagctcaacactgcatggaattcaaactcgagccttgtaaagtagcatcctattctcacactcagatatctttagcttcagcagctaagttttcaaattcagaatattccatttgagcacttttgattttttctaacaaatcagattgaagcatcaaattattgagttttccaaccacaaactcaatacctgctttaaccatgtttgccgctaattgaggagagagattagcgtagtactaaaaacctactcgggacctttcctacttagagcataagccactacattggccttcctcggatgatacaaaatctctaagtcataatctttggctaattccaacgatcgactctgtctcatattcaaatctttgtgggtgaagaaatacttgagacgcttgtggtctgtgtaaatcttacatttctctccgtagagataaggtcgccaaatctttagtgcaaacacaattgtagcaagctctaaatcataagttgggtaacgtttctcatactccttcaactgacaagaatcataagcaatggctctattagcttgcatcagaacgcaccccataccctgtctcaaggcatcacaataaatcacaaatttctctcgatctgacagcaaagccaacaatagagctataatcaatctttgcttcagctcttgaaaactagtttcacacttgtccgtccataagaatcgttgattcttctttgttaattctgtcaaaggcatggaaatcttggaaattccttccacaaaataatgataatacctaaccaatctatatacttcattttttgacaagttaggcatctatatacttagtctactgcatccttctttataccacattaccaataatagggtttcaagtcctggtacatcttggttgtaccaagatgtcatgaatatggagtggtctgcgcttcatctagtatctcttttctgagctcaacactgcatggaattcaaactcgagccttgtaaagtaacatcctattctgacactcagatttctttagcttcaacagctaaaatctcttctcgagttttcactaatttagaatcttccattagagcacttctgattctttctaacaaatcagattgaagcatcaaattattgagtttgccaacgacaaactcaatccttccttaaccatttctgccgctaactgaggagagattaccgtagcactaaaaacctacccgggacctttcctacttagagcatcagccacaacattggccttcttaggatgatacaaaatctctaagtcataatctttggctaattccaacgaccggctttgtctcatattcaaatttttgtgtgtgaagaaatacttgagactcttatggtctgtgtaaatctcacatttctctccatggagataatttcgccaaatctttagtacaaacacaattgcagcgagctctaaatcataaggtgggtaacgtttctcatactccttcaactgacaagaagcataagca

SEQ ID NO: 31927 - DNA, 2396 bp, Cannabis sativa
  modified_base (2363)..(2363): a, c, t, g, unknown or other
gtattctacagcaaagttccacttcttaaaactgtttatttgataagtttgatcatgttagaatagtatacttatactaacctttaaagagaagataactctcaatgtgaaaaatcatataacacatatatataatgtttcaacactaatatatcaattatttcaacacgtaacaaaatatgagataaaatcaaaaatttatcttcaaatactttgaaaactctactaacagatattcagaaattatgaaaaattgatattatgaaaaataaaaatttaccattataacacgtatttgatgagtaagctaattatagataaattaacaaattgtagtatatttttttgtttttttttttttaaaaaaaacccagaaattatctctatgttttttagccttttcttttaagagaaaaattaccaaacatgcatcagtccaagaaattgaaaaataaaaaattgaaatgaaaatatgtgtaaaagaagataaatttcatcaaaatggtaactggctgtaaattttatttatgacaaaaaattgacaaaatagaaataaattaggcatctcacatttttatatacagatagagagaaaaagaggtaaagaaattagggatttgaaaaaaaaaattaaaaaatttgaagaaaaaaattagggaatttacatttttatatacagataaagagaaagagaggtaaaagaattagggattttgaaatcaataaacatacctagtattaacatttaaatcaatctagagatgtgcatgtcgaagctgaagatttaccacaccacaccattcaaatccattcaaaatagatatactcttcacagaacaaaaaaaataatattaagtgtagatagaggttgtggttgaatcacccaaactcatcatcaccaacgtaatgtgaagacgaggtgtagttactaagaaatagaaggagagaagaagaggtagagaataaagtttatgggagttgacttggttgaattagtcaacaaaatggtgacattaataatatagaagaaaaaggaagaataatatgaccagccaacaaaggcaatattggtaatatctatttttaaaaagggcaaatttatcatcaactatcacaccaataatccatatttataattgtaaggattttcctctttctgtgttcagtttacagatgttgagtttgagagagagagagagagaagaatgtgtttctgtattattgatttgaatgaattattacacacactcataaataagtcaatatttatatatagcatattaaagaagccaattaattacagagttagttggatgacaacagagcaaactaaaaaaacaaataaatgaacaataacagtgtgagattttgagtattactgctagtccttgaagcggtggtacaaatctaaagagtaacaaaaagaacttaatatcacaacaagaaaggatcatttagagaaattttatgattttttttttttattttcaatgcaaaaatacacaagatcttacttcttactattataaaagtatcttaatcatgtgattgttagaataacatgattacatcaatttgtgtcatataattttgactttgccagtaaaaccttttaagtattctttcgtttgtccaaggcacaacctacaagcactcaccctaattttaatatgtcaataatttttattaaatctaaattagaaaaataaaaattcaataaaaaaaggtacatgtgcatcgacaccaatctatggatagaaagtcaaattttctatttaaaagagaaagaaaaaaaaggtagcagcagaggtatatatactattttagaatcaaatataaataattcaattcttaaaccaaaaatcaagtcgtcgaagaaaagtttaaataatatataaaattttaaaattaagccccatatatcagattcttaaaacatagagttgattattttagtgcaatatatacatttgtttaaactctatgagtcaaaacaaaagataagattgagttcaagaataccttttcaaaccccttaaagccaaaatttaaaatctttaacaataattggaatataacgagataaccaattattgtaaatatgttttacaattcaaaaaactgacctctaaatgtgtgagagaattttttaagtcaaacccaccaaaacagagttaaaacatgtctgtaaaaaagaaaaagaaaacagagaaagagatgttgagactcacaaatgcaactataagagtatataaataagaaagaaagacccaaaaggattcacaaagattcaatcagaaaccgagaacatacacatatatacccatcaaagcataaaacttaaatacataataataaatttnaccaaataaaatcatatatacatgaaagcatga

SEQ ID NO: 31928 - DNA, 2871 bp, Cannabis sativa
  modified_base (1168)..(1174): a, c, t, g, unknown or other
agaatggagaatgtcgctagctcgcggacatctttttcgtggtctcctcccgggaaggctcctctcgctaggacctgttctatgagttttatgctgctatcttcccagagcgcaaggcaaggaactttggtggcttaatgactcctcgtccttcctttattattatccatgtgtcatttctgcaaaaatgcgaataacatttacctcccaagcttcaggaacataccatggtccgagagcttgcagtatattctcttgagggattttctgcgcacgtgatgtttatgacaagtcctttaatgcgctacatcatcagccgtcaaagcgaagtgccattacgtgggagacatgatttctcccgctttcttgtcagagtgttaaatggtggcttttggatttctgcgcgcgtgctgggcgtgtgtccctgggaagctcaaaaaggcgacgatggattaggcagcctattctaaagtgttttttacgatgcacgcaatgatgggagctatctgttgggatgtgaggtaccctttcagcttctcacgtccaatcgtcggacatctcttggggcaaaccgaagcgtttccttctcacgaaatgtgccccttccagtcgtcccataaatacttgcaatggccattttatttttcactcttcttgcccatcaagtcataaattttgagttcccttcttcccagttgcattttttttgttggcgctgcatcaaaacctctgattccaacattcttccctcaatcgataagttctttgtttatttgctgttaagagctttggagggaatcttgaatagtgcagtgccctgcttctgggaatagcagtgtcacttctaggaattatggggtcaaacaatgaccatgttctttgttatttttgctccatattgtatgcttaaattaactctagttttcaaacaagcaaatacaaaaatgaaccaaaatagagaatgaagttagaagtttggttaataaatattgatataaaatttatatgtttgaactggattttaaagttagtatcatttttcaagtttggttattagacattgtgtatttttcattatgtagttgatgaaactagttttttttttgcctcttttaatatttagtttcttttaatattgatgaaattggtttttaaagttagtatcgtnnnnnnnttataattttttttcatcatcttgttgatgagattatttttttttctacttcttttagtgaaattattagtttcttttaatgtttgtgaaactgatttttaaagtttgtattatttttagattataattttttaaattgtattttttttcagtatgatgttgatgaagttaatttttttctgctgcttttaatgaaataattagtttcttttaatattaagaaaactggtttttaatttgatatcgcttttatattattattattattattattattattattttattaaactggttttagtttgtgattctcttggagatatttacctcatattgaattattaaatcaactttgatttttgagcaagcaaataagagattaaatgtcaaaacagagtttgaagttagatattgggtattaggtattcaaataaatttatatgttggaaactgatttttatagttgatgtcgtttttatttatattttttgcattgtatttttatttttttcattatgttgttgacgaaattggttttagtttctgattctctttgttatttttaccccattttgtatgcttaaatcaactttgctttttgagaaagcaaatggaagattaaacaaaataaagaataaagttagaagtttggttattaggtattcatatagaatttatacgttcgaaactggtttttaaagtttgtatcgcttttagattataatttttatattgtattttttttattatgttgttgatgaaactgtttttttttttttcttctagttttagtgaaataattaacttattttaatgttgataaaattaatttttaaaagttggtaatatttttagaatgagcattgctattaggcaccagtggtgcctagcaccttctcgacatgtcgcgttgcgattggctagcgatactccctaaaagctattatatttaactatatgggacccgatatttcgactaatagagatattgatacataagagggtgctagccctttagcatttctcttttagattataattttttgtatttgtttattatattgttaacaaaactgattttctttctgctgcttccggattatataagaaaaattaccccttacaatcacctgaaaattaattctcataaccatttttatttaaatgcaaatattctccttttgatgatcactggtacattttaggccttctgtgatttggaacactatataccaagcttcaaacaatctgcttctactcaaagtaaaagctgcctgtaaccctctctaaaactttcttaattaactccaattccaatttccaactccaattccagatggggaatcttaaattccagtcttaatggggtttgtttggcagttacatatactttctttacaataaatcttcataagagaactaagatgtgaatgagttttgcttgcaattcatttacttgaccaactcattcatatcttattccataacttagaagtactgtaaacatattattaatttttgtttcaagtttttaaaatatcaactacataaacactacttgaccaagacaaaccaatgactttaaatggcctgaaaagttggtaaatgaatttattattttttattttttgctgaatattagtacatgaatttattgatatctgtatctgtactatgttgatccaataatgcaacat

SEQ ID NO: 31929 - DNA, 3735 bp, Cannabis sativa
aaaattcagttttggtggttaagtgttacaaaccgtaaagtttaggtggtttagacgccaatatcccttttaaaattaataagtatatccgtatctctatattatatattagtattgttaaaattatttttattttaatattatgtctatattttgagttaatatggggtgatggtatacatattttgttatacagtatatttctttttttattgtataatatattattattcttagatgatatttatttaattattttatgtgtaatagtagtataaattttgttagcataatatatatattttgtaagggataaaaataatctcgagagtataaaaataattggtagggataacataaaacacactgtttcattaaaatgagaagttgagtagcaaactagagttgaaagagcgaatcaaagctcatatatcaagaggaacgaagcttaaagagcagagcgaaaaaggaagagaacgaggaaataagaagggcaagttagcgcagattagtcgcaacaaaggaagagagttgtttcacatctattctcgcctataaataggggatcccatcattcaaaaacaactcttgacacaccagaccagtctaaactctgccggaatacatctcctacatactacccacctcggaaataggaagcaaagaagggaaccaatatgaacctaggagaaattttgtaaactagcataattaaaatctgtgactggattaatcctggtgtaaataatttgaagttgaaataaaaaaaaaaattgagttaattttagcatcaacaactggcatcgtctatgggaatcacaagaacaaaaagttgaggactagcctacagcctaggatgggatctaagaaagtgccaaagaatgcacataaatcaaaagctccaaataaaggagataattcaaggcggatcaatgatcctacaactaatctggttgtgaaaatgaaacaaatgagtcaaaggatgattgggcgggataagcattgttaactcagaaacattccttggtgatgtggacatcaatgtttgacacgtggcatgaaggatgatatcacaaagctgagtagacccgagtcatagcagtcgacttaggagaggaccctagccctgcacccaggctgactctgggatcttcgggatggaagttcgaacttcaataactttccaacccactatctttcagtaatttgtaccatgaagacattgtgcaatctaatccaaggctcgggagctgaaattacacgaacatgcaaactggaagccaacctgggcacctagggtttccacccggtgccaagttaacatcctcaattagggtttcagtttttgaggctgtcttagtgcaaagtggtcaaaacttgcattgagacatcaactagacataccacaaacatatttgaggcattagaatcatatttagagaaagttgatttttgagaacccaacgcccaggttgaaaacctgacaatgtaggcaccttccaagtgtccgatcaaaaatctgacttttccattgaatctatcttcatcaaaatggggaaataggttattccaaaggaaaaacaataattcctgggcataaataacaaggcccagcgcccaggttgacacttggggctggccctgcgtccaggtttacaatttgccaacctaggccacaaaaatagagtttttcaggaattttttcgagcatcatctccatctttagaaaatattgagattcaactatttccggggaccaaatggaatttccaaaggggcaaaacttccaattcggttcaacaagaagtgctccagccattttttatcgtcataaaaataacaaagatcaaagtaaatttggggagaaaaccacaaacctaagtcccttaaaatagggcccatcgcccaggttgacctggtgttgggcccactacccaagttggacaatcaacatggggatgctaccttcaaatgctcaaatgccaaatccgatacgaccattgaatccagcatggtcaaaaatgggggaagagaccttgtcctcaagtttggtagccttagaagtatcaaaaatagaatcttgaaagcttggttcaaagggcccaacacccaggtcaataaatggcctggtttgctgggttttgctttatccaaatctgatgtcgttttgaccgttcgtctggtatttcacaagaacaatgatccatgaagttagaacagtcaaattcccaacttcaattttttgacaaattgacttattcagaaattagaagtttcgagtcttccatttttgtaaaacagcaacatctttgagaactggtgacttgcttccctaaaacatataaatggactaagtggtgtcaaattatcatataggcatcttaaaggacacaccttagatgtttctacacttatacaatgttcaggttgacgtagatgtcaacctggacattgggatgtcaacatgggcactggttgtcaacctgggtgctaggacctaaactaccttcagtataattgacataactcactcaatgtttatctgattgacgcggcttgcattttgaagcattatatcaagtcatgtctcacaccccatgcgtaattctaaagctatcattgtcaaaatttacccccaagagagttatgataataagctctaggtaacacgcagtggaacccgtcaggcaccaaaaattggccatcgctaccagatgctaattttcaccgttaaatcatcatcaatggtggaaaataatttatttttattttttttctatttttgtgggcctccttcacttataaaaggagagctttctcaactcttttttcacatttagaaaactacccacaaggttagagcttctctctttagactttatatctctagatttttgagtttctaacacttagtctattgttgtaattacaaatctcgtgagaaatttaaactaatagtaaacgtagtcctattactatcacgatataaggggtgaactactataaattattgtgtgtcccttattaattactcaacaaattattcattctcaccaatctagcaagcgggtgtggcttagaagtctaatccaaatttctgagtcaatattttggtgctttcattgagagccacaactcaagtaagttactaatgaagatggttgcatcacgttctacaagtgttgatagaaaaactccagcagctggccaaacaactggggacacgccaattgatggagttggaaccaggattacttctgtgcccaaagtgccaggagcaggcctcaaaaccatctcctcaacttgtcctccaaggccaccaccaactgctcttggggtggggctggcaacaatgactagatcccacctggggagccacacgtagatatagaagaccctgaggaggtcgatcctcaagtagcccagcttagccaaattgtggctgacttgcaacaatagctgtgagactctctcgataagcaacacaaacagttttaacactggtttgtgtaaaactggaagaaaattgaaagccaacgcgttgagcaagaatatcagagagccaacttgtctcaacggattagagaggcttatcgctctaatcgtggaactacttcccgaagaggtatttctgagttggtgaaagagacaccttgtctacccgttgatcatgtgggaactagtgcttaaggaaaaactcttaatgctcggaacaccactactacacctggtaat

SEQ ID NO: 31930 - DNA, 1519 bp, Cannabis sativa
attacattagatacagggaaagaatactacaaacaagaaaaaaaaataatggtatatataaaaagtcggaggcatctgtagtggacaccgtctaagtatatggtgatggtgatgaaagtagcccatttatatggtgatggtgtgttggatgataccattactttgactttaaagagtagaatattatttaaaaaagaaaaaaaaaaagtctagaatatcgccacttttttttttagaataaaactgttatatattagatgttcaattttaaaatacaacggttaaaaagaggaggtgttttccccaatcaaacacaatttgtgtccaccgaaagagcatacttaactagcttatgagcatgagtattagcagatctaacaacatgagaaatctgcactcttgaaaaattgctcacaagattacgaatatcagataaaatacaatgaaattcagaaactaagacattagaagattgcaatccttttaccactaaaagtgaatccgtttcaatgtaatgcaccagatattgaagatcaatcagcctctgaaggctatagaaaattgccaaagcctctgatatttctagtttgtagcatctttggaaaggaagggagaaggctgctaaagtctccccatcagagttatgcaaaatggctcctaaaccagcttttgttctattatattcatcgcaacaacggtattgagtttcagccgtcctgaaggaggattcatccattttggtgtagtagaaatgggtctttgattaagttcaatggcacgttgtcctcctttgttagtattacaatttgcagattgatattcagccacatagtttaaagcaaattgtaataagagatcaggcggctttgattttcttccatggaagtcattgtttcttcaagccacttgttccaattcttgcttggttagtaaatctgagatataaaagagaagtgacttacaagaagcatgatgattcattagctgtggtatatgaataccatacgaaagccacacttttttcgctcttttgcacgcaaaaagagcatgaaaagttgtttcttggtgataagaacaaagtgggcatttacttgaatcagcaatatgtcttctatgcaaagttgtagcaaccggaagaacatcatgaagaactcgccatagaaaaattttgatcttcgatggtacctttaaagaccaaatttttttccaccattttgattcggaagtggaggttgatccatcttcagttttgtgtagctgaagtgatacttgatatcccgatttgacattgtacattccatccgaagtgcagtgccaaatgtgttggtcatgatgaggagtgtaacttagagggatgtccaatattcgttgagtatcaaaaggaatgaaatatcgggacagtaaggagatgttcaatgtgcgatctggagtaatgaagttggagacatgcattgatatgtctgaatccagaaattgtagaggtttgaaaggtagttgttgttgggttttgtgccttaaa

SEQ ID NO: 31931 - DNA, 2392 bp, Cannabis sativa
  modified_base (1013)..(1014): a, c, t, g, unknown or other
actaatcagattgtaaagagttttatttagggcataaaacccaagaaatatgtagttgcaatcgattccaaattgatgaactaccgtgtgctcatgcgcttgttgtgataaaagagatgaacttaaatgtttacaactagtgttcacattattacacgacaagaacatggcttgaaacatacagtgggtcaacatattcggtacacaatcacacaacatgggatgtaccatcaaacaaaaaagatattcttgttctgccaccaaatcagaaaataagatctggaagaccaagaaaaagaagatttatagctgattgggatacaaaaaaatagaataggtgcaacaaatgcggtgaacatggtcacaaccgaaagacatgcaacaatcaagtaataaaatagatataacagaattatttgaattgtttaattctctatgagaattttgataggatgaaatgttatatttgatagattgctattaactggcaaagtttaaatagtttactagtagttgcaaaatagtttctgaacaattttgacacttataaagaacttattacataaagaatttccaaagaaatagtttgtaaaagtcagatatgaatttttataagttgtataataaggagaatgaaaaagttgcataacagtaggaaatatactgagataagatgtcagaaaactaattgacaagtattttgactaaaatagtctgtacacagttgcataataattttttttatagttgtacgcctaaaaataaaccaacaacattaaatgtaaaatcataacactgttgctgttaaaacataaaaaaatgaacatattataatggttaatttcaaatatcctataagttaataatcagttccataatataaaacgtatagagtacctacaaacataaaaaaaaaactaaaaaatttctgaaatgaaaagcaaccaagaacaataaagttttccttaaaatgaccctactttttcaatttagaagccttggaagacttgctnncttctcatcctcgctatcaatactttcatcatttttcctttgaccgtacgagaacaagagggcagcaagtcaagtgcgataaattcaatatcaaagtcaccaggagcatctttcccatggatgaagaactccgaaaatgcagccacaaatgctccgcaattactatttccaaaaaaggaaaagaaaaaaaattaaacaactattatacagcataaagtaaacttaaaaacaacaactcactatttttgctaagatggaagatagcaatctccacaactcttaaaggagctttagggtcaaaaccttaatcaggaacatgggacctattcttccaaaatccaaggagataaaaaaaaaagggagtaaaacagagtaagtcttcattgcattccttgctgtggaattcattttggcagtcctcaaagaattataaaaaaaaatataatcctctcattcaaatcaagatggccaaaaacccaatagctttctttcctaagatttatgatgaataggacctgatcggcttcataccaaggcttagaacacggaatttgcaggcctcttatataatgcgctattgggtgagcagcatggatgtgagacatcttagttttaattgcattggctttgcagaatttgtggtataacgattgaatggaatcatcgaaaaggcagtcagttgttacaaaattcagtgtaacaatagaagaatatttcccttttttcctaaggtaatagaagatagtgttcatatgctgaaacaaaacaacaaagaaacacaaaagaaaaagtgaacaaatattacaaaaacttaataacagtagctaaacttaaaagcatgtgataaaacaactatagaaaattttaaaaggaaaatgaaatattccgagtcattgataagcatgtcaaagcaagccaaatgataaaaccaggttttatcttcaacataatcaacacctaatctaaacccaggggaaattttcttcgcactatcctcgtaacaatggtaaggcctaaatcaacaaaaaaatgacaaaaaaacaacattgaattcaaataattggcaaaacaaaacgaaatgcaaacaaataaaaaaaataaaaaatagaataaagaaaattatcacctaggatgttttagcaatcctttgccaatccaagcatcaaactttgcctcaatttcaggagagacgggatcgacaaatgtatcgttaagagcgtaaaggtccttcacatacgtaaccatcttaaaatcccactcatttcctccagattgagaacctgaggacattacctccattagagtgctgctcacatcagccgacccaaaattaacaaaaggcgatttcaatgctggggcacgctttctcttatccaaa

SEQ ID NO: 31932 - DNA, 2130 bp, Cannabis sativa
gaagacggcgatctcttggaaccctagcagacggtgacctcctagatccctagcatacgacgaccgcctggaaccctagcagacggcgatcgcctggaaccctagcagacggcgatcgcctggaaccctagcagacggcgatcgcctggaaccctagtagacggtgactccttggaaccctagacggccactccttgggacactagacggtgactccttggaaccctaatgattattaaacaagctctttcattaatcataaagcaaaggggaattttgaattttttttttggaaaataagcattcattgataaataaaattagacctcacggtcactacaaaataaatcttgcggaatagaagagattcccaagttaccaaattttctgtgggtaaaggcccacttggccacattgtgagcggcaaagttacaaaatctgggtatacaagtaaacacgcagccatcaaaacatctggagagtttccaacacaaagaagaatagttctcaatctcccaaaccgaggacacttgattaagagcatcaatcaccactcttgagtcactctccacgatgatgaacttgtgccccttgagctttgtcgtttcaagagctaaacaacacgcagctgcctcgccaccacaagcatcagagaaatccaaccttgtcgtattatcccaaaccacctcaccagaatggtttttagccaccaccgcaatgcaagagctttccgatcccactctaacatcacaattaagttttagccaatcccgaggaggagacaaccaaacctctctctggatcgaggaaacaacaagaaggaaagcaccatttaaatcggcataagaatagcggatatcatcaatacattggttcacattataatgataattattgtgcaccttttcattcctgacacgccaaatagtatccaccataaccgaagcatataaaaagacttcatccgtattgatgcccttaaacttgaagccccatatgaacttgacccaatcccaaacacggataccagaggacaccgaaaaaataccccacggagaagagcgccaaaggtggaaagccaagttgcatttaagaaacaaatgttcggttgattcctcctccatcccacaaattgggaagttaacatcatccacatggaatctcttattgagaatggtcctcagacgtaaagcattagaaaggatactccaccaaagcaccttatgcctctccatgattctactgttccatagcttgttccaaaagggagggaacacctcgcaatgaggggctcttttaaatgcttgaataaggtatgatgatttgcacgagaaccgcccattatgctctttggtccatatccatttgtcctttcctaggccagatgggttacctcctttcaaaatagcaaagatggtatcgttgtcaaaaatactcttcaacttctgtaaatcccatttcccattgactgataaaaggtcagacaccatgtgtaaacccttagcaggtcgcccgttagaactaggataaaaggatttgccatgtgccacccacggatcatccaagattcttgtacttctaccatcagacaccactttacaagctccttctcttaagatctcattcgcttttatcacatttttcaaaaatcaagaatctgagtctttgtatttgtagttaagcagctcttttcctctgagatacttggctttcaagatcttacaatagagagattgattgtcatttaacaagttccatccccacttggccaagaaggtctgattcatctcttttgttttcctaaaaccaagtccacccctagacttggggagacacaatttatcccacgctttaaggtgaattctatggttatgggaattgagggtataatttacttttttatggcataaataaataaaactatagggttatgggttttttttttattatttttttatatttatatgggttttttttatgctatatttttgtaaaaaaaaaaagtagaaatctcatatttgtaaaacaacaataagttttgccagaaaagtcgccggcaccggaaaagtcaccggaaccgaaaaagtcgctgaaaaatcactgtcgccgggaaagtcactggaaaagtca

SEQ ID NO: 31933 - DNA, 2939 bp, Cannabis sativa
  modified_base (1399)..(1410): a, c, t, g, unknown or other
  modified_base (2898)..(2913): a, c, t, g, unknown or other
gaatgtcgctacatttgtggtgggggaagtggcatctatcccttaggctaatttaactcgtaggtgtgtggtgattgtttattccacctatgagggtgttagtccactatttttttccttggaggaaaccaccttgctcaagctaggggtaaaggtgatcgtcagacttatcttctaacgtacggtcatgacaatcggtcatgactttacacattctgcatcaactagtctctgtgtcctcgtgccacgtgtcatcattttttccacctcactattgtcaaaatttaggtaaacatttcccccaaatttttacgatatgactatatgatcgaattttttcggtgtagtctgcacttcaatttagttgttgatgacttaatggtacggtgacgagaatgtcatgcttatactagaataatattttaaacccaaaaaataattctcttacttttcatatttttacaacatattcaaatgaaaatttttccctttgtaaccaaaaataaattataaggaaaataaaatctaaatatttagaaagataaaatatataaattactcataacattataataatccttagaagctttaaggtttccatcttcatagcaggtaagttctttatatttcctcttgcaagttccttgcttgaaatttgaaattgatgaagtttttggcacttcttcttggtaatttttccacggctgttatagtgagatttttctcacttagaaactcgagaccaaacttctgtttggaggacacgcgtactcagtttccccaaggaaagctgagatgtcaatgggagactcctcgagtttaaacctcgcctgagctaaactcagcgagatggtgcgaacatgaccaagtctaaacgcattcgcgaggctcgcattatgtaggaccaaggaacggacttaactcgcatataccacaatatatgcgagtatcctctcaatcctcctgcgaaaacacagagatcgattctctataaagcgagctggtcccgatgacccaacagcctcgataaaccaatatagactcgcatgtctaggttctatcagctcgttatacgatgtccgtaagtgcgactatacaagaacgcagacatcttacactcaactaagtgttaggtgtattctaagcccacaagcttatgcaagaatacgaacagccaactcgcacattagaagtcgcatacgttgctgtatttagtgaatggaaactgttcactatttattaatgtttacgttttagtttaattattataaatcaatgtatgaatggattggcaatgaatgcaatccttgtgtaaataatcggacacttgcttcgtatataaaggagtgatccaccgtgaaatgagacacctacagaatccttgcaacagtggactaannnnnnnnnnnnctgactgaaccactatattcccttgtgttctttgtatttccagtttttgctaagtatttgtgttcccagttcgagtactcgctgttctaggttgaatactcgcacttgttcatcatattattattataattattattgttattatttatttttggtgttgcgaaattccatcaacaacaatggccaaaaatggcattgaatcattggattttttgagttttttatgaaatgtgagtgtttgatgattggttttgtagcataggctatgggtaatgagtttttagctctaatttgatgacatttggtgaagaaatgattgattttgaaacttttggttgcaagtgttcttgagctttagaaaaatatcaagaacatggagaattttaattttccctctcttgatgcttacattctcaaaaaattgagaaaaaaagtgtttgtgaagatagtatgcacctttaaaaaaattgttgaacaatcattgcttggagagtgttgtagttgtgactttgagtcgccttgtttttttcatgccgcaacaccacttcatggggtcagggtggctacctcgagatatctccttgggccttgatcgttacaaacatttgggtgtaccccaagataggccatctcacccaagatggggttgtctcggagtcagttttatttttaatgttgagctgaggtcggggtaatgggtgtacaccaccctgagaccaccatgttggggtcagggtgtaccaccccaagaccaccacatgggaatcgaggtgtggtaccctaaaataggcccccgtagtccaaaagatctcccacagagacctataccctgagatgggattgtttaagggtagtcggagattgccatttttttagagatggatgtggggggtgcaccacccctgagaccaccaagtggaagttggggtgcactaccccaagaccatctcatggagatcggggtgtggtaccctgagacaactgaaatgtagcttcatgggttggtgacaatggcctcttatctacctcttagggtcttacatatatacacttcatgtattatttttgctttacacaaatagtaaaattttgaagtgtgtaattgtcgttgttgcttcaggctactttgtcacttggaaccatggtcattttggctaaattgtttggaggttcagggtatactctaaaattgagaaatctcgaggtaccccaagctaaagtaaaaaaaaattgtgtcacccgagacgcatctgctcaggggttgggtgactgccattaggattgctataataaattagggttgccattttgctttatctcgagatggagggtcgaggttcaacccaaattgacccttttgttgtcgttgttatttttgttgttgttgttgttgttgttgttgttgtttttatacaccccaagattgggatttatggatgccccaccctgagaccaccatgtagttgttagtgttggaaatattttacnnnnnnnnnnnnnnnntaccatgtatgtttcattaacatcct

SEQ ID NO: 31934 - DNA, 1355 bp, Cannabis sativa
ggggggggggggggggggatgccactcctccttcaggctcgaagtaggggaaggaaaaatggaaccatgtgaatctgcaaatgaagtacgaatagagtcaatacacttcttcacatcaacagaagattgattatgtaccttgtcgtttcgtattcgccaaatggtgtcaacaacaactgaagcgtaaaggaaaacctcatcagcaggaattcctctctatttaagatcccagataaaatttacccagtcccacatgcgaataccagagtcacacacaggataaatactccaaggagaagaccgccaaagatggaaagccacttcacaggacaagaaaagatgttccataaactcctccaccaaaccatataaagggcatttgacatcctcaatatgaatccttttcctgatcacccccaagatattagtattcgtaccatcagccaccaatttacaggaacccttcattaaaattgacttggctttaacaacatttttccaaaaccaagaatctgaatttttatagctacagttaatgaattccttccctctaaggtatttagctgccaaaatccggcaacatagagactgagaaccattaagattgttccactcccacttcgcaagaaaagcctagttcatctccctagttttctagaaactaaggcccccaagagacttagggaggaaaagcttatcccatgcttttaggtgaagaccatggttgccttttttgaaactccgccagaaatcacacaccaaagcgtcaattcttgtgacgatttgattagagaatttagtagtttgcatagcatacaaaggcaaggacaggcccacagacttgataagggtatctcgccccgccttagataaggtctttgctttccaaccttgcaacttagaagtgagattatccagtatgaagttgaagtccgcataaagtggaaaaggggaagacccaagtacttaatgttacccctagagagccaatcctcaaagcttccttgatccctcatacaatctattggaagtatttttactgaagaaaattgaggtttttaatttgttaactcgttgctccgaccaagagcggaatctcttaagacaatgtcagtagcttctagcttccattaagttagctttgccaacaagaattaagtcatccacaaaaaagatatgtgagataattggacctcccatactcaacctaataccattaatatcgcattttctcagagcatcctctaacagtctagataaaactttaacagtccaaataaataggtaaggagacaaaggatcaccctgccaaagaccgcaagagtagggctgcacatttagacccgcaaacccaa

SEQ ID NO: 31935 - DNA, 1533 bp, Cannabis sativa
  modified_base (1105)..(1107): a, c, t, g, unknown or other
ttttaatgctgaagtaaccaaggttgagaaggcccccgagtctttgttagtttgtatgttgattacaggtgtcttgccaagaaccgatttctggaaagagttgcaggcacgaagactagaatcgttggtagaattcttcgccatggctgagccgcataagagaatcgagaattatcttgctaaactagaaagggggaaggagaagcacgagtcacccataccgcagtcacaatctcgaagtcctagaggaaagaatcccggaggtagaagcccgagaagacgtaaccctcagaggcagcgaagtccaaagcttgccaagtccccttccaagaaggaaacatctccaaagaggaaaggaggacctgctttgtcaactacactgaactgtccctcgatcatatttacgcgattgaggagaaaaatgaaggtttcagaaagcctcctccaattagaggaaatcacgacaaaagagatccgaagaagttctgaaagtaccataaggacatcggccatagcactctagaatgctggttcctacaggacgagattgaagaattgatcagacgagaaaaattcggtaagtacaagaaaaatggagaaaatcatccctaatcggatgataatgatgacacgaacaatgcaagtggttcacgaactcctcgcaatatcttaacgataattggaggaccccatattggtggagattccaaaaagtcgcaagaacattatgctatggaagcaaaggagaaactgcttgccgacataaacaacctaagtgagtgacctgagaagtttttcaagaaggaatgcgatgacataaccttcatggagagtgacgccaggtgggttcatcatccacatgcagacgcactcgtgatcgtcgcaaacattggagggaaaaaagataaaaaaaatctcacaaaaagaagatatataaaatagagaaaattgtgtaagaaaataaagctgaaacttcaagcctaaattagactatgttctgattagattttagaaaaattcaaaacataaaaggtatatatctctcttttatctttccagaacatcttgaatcatccaattttgagcaatatcgagagagttatgnnnaaaatattatcagtcgacgcagcagaaaacacactgccctttctaatcctaagcataataggttttctaatcctaaagagaataggttttcttttcagcgctttttttattattattatttttatcattttttggctataaaagaagtggacttcaatagttttaagaaggaatttagagggaaaaaggagtacgaattttagagacataagtcaatactggaggcattctgtagagagtttttagcattattttattctttatctttttctctttcttaaagttaatatgtgtgatttttcttccatgaacatgtatacctaaacactcgattagggtttagatggatattgtttgacattgctttatggttttaatatgatttattttccccctaatttctatgtattagatcggaagagcgtc

SEQ ID NO: 31936 - DNA, 871 bp, Cannabis sativa
caaacaaattgaaattaaaccctttaatccttttgccaactgcaacttcctaaccatacttatgttacgttcgcaataagctagattagtctttctccttctagagaatcggaattccaaaacttgtggcattttgaaatcaactcatctatcgattctttgaatagtttcattactgtcttttatgaggtttattgaaattgacacattcgtatgtcgaataaatggattctaagaaaaggaaaggtagagagaaagcaaagagtaatcgattctttgaagttcttgaaattggccctcagttttattgttatatttcttgtggaatgtttaaattgattcatattgaaatcaattccattcctatctttggagttggtaagtttttgatatacatgagatattataaatggtgtagaaacagagagaagcgtcaaggtgggttgcacatattgcttagatcttatttacataatatcatttttatttactattttcttaaatctgatctgatgctttaatattttattaacactacatatgtaatgtttattgcatatgatcttacagttctaaatagttaatttgaaaataattgctctgataccagtagggttccagctataagctaagcatcatcaagatcaaagataacttgagcaatgttctcacaagaatcagcacgacttacgacttttcagcgtgacttacgattatgaaggatagattgcttagtatctttacacttgagtgatacctaactcataacagtaataactattaagtatgacccataatgcacactatcactatcttagaaatctcttaaaaagaatttaaaagaacattttgttgggtttgatgccctaaa

SEQ ID NO: 31937 - DNA, 2665 bp, Cannabis sativa
  modified_base (39)..(47): a, c, t, g, unknown or other
atatatataataaatagattaaaataaatattagatgannnnnnnnnttaaataatgagctttattatgaggatatttgatctccattgttggttctacatagttcttgatctagtgagtaatcatccctaataaatgaacgttcattagcaattttcaggtatattttgaggacaaaattcttataaggaggggatggttgtaatattccaataagcctaatggtaaataattaggatttataattatatcatcagtaaataattaggatttataaatttaaatttgctataattggataaataagcataatttataaattacggagatttatatgacatatgcgaatgtaatatgagttaccggtgtaataaaaatatttttagttttagcgacctttgagactcgatcgggggccagaaatgtcataacgggtttaatttatagaattgatggaaatattgagataagttgattttaaaaataccgaggtattttgaggtactcgaagttggtcgaataccctagaaatagaggtttcttcgtggctaaataataataagataactattaataataaagttattattattattattattattaatatattattattataatattatttatatatatatatatataaaactttccttaaattagtattatatatattataagttatgttaacgtagattttcgttaaccaaatttgagcctcacgaatatgattcaacacagaaaaactataaaaatatgaacatcggatttttacgttgttttgcagttaaaattctgcatagtccacgagtgaatcttattcagatttctgagtatgtttttcagggcctctcgcgtaagagtcctttttctctcccttttttgatcttatctgccactatttataattgcatagtgacagttaattacaaagctgaccaaaatgtaattacagtcattatcccttaaattttgtgggatctgattacaaaatgtaaacgcggtacatgattttgaaagccatacagctgtgattttcccccttttactgggtcagaagtatcgtgtattaaacacgtctttaattgttgattctagagatgtctcggcagaaacttgattatagcgaccccaacggtgagttggaaccattcttatatccgagatcaacaagatatgttttatgttgattgcagatataaggaaatctgttgacttgccagggttatgagccttgctcctgttagatgggtggactatagggagcttccttgtagcgagatgaccatctcgcattgttgctctttgagccgattcgaattttacacttagtttgcttgttgcaagttagggtatgcgttactcttttcgggtgcctcgctattctcctttagccacatatggtttctcgttaatactttacgtaccagttcgtacattgattcctcgcctaagactttacagtcagcaggttgcaaatatagtctagtacttactcaattaatgagttattccataaaaagatacggcaccgatttacattctctttatcttgacacgtgtcctcaagctgaattttgggtataaccattgccccttaaaaagtccttttctagtaaaaagagctttttaataattacagagggcattttcatcaaaatcctttcttggaaaggacgcctcctttgattttggcggttgtatggtttcgaagatcattatgaattgcctattcatattctacacaattcctagccgttagatttcttaatctttggctctcttgtcactgtacttcgtgtataaaagggcagctcaagcttgtcatttttcataaaccttctggcttgaaatccattttcataatggattacttccttcctgtcaaaatgtcccttctaagatcagaagtttatctttccaggatcatattacccagatgcaccaaccaatttccatttgttcctacaaacttcaagtctcaactagagccagaaacaatggattccaaggctgaggagcttctgaccaatccaaactaggagaaccccgtgacctaccatggtcgattctcacaagtgatcctagagggtatagatcttgtgagcgatctcaaagatcctcctcaggctgatggagaattccaaaggaagatcggcatggtttcaggtaaatttggggaggaagttggcgtggtttctaccagagaaaccaaccaacttaagaccccatcctgtgccacaagatctttgcgtcatcctcttcagtgttgagagatttcttgaggctgggagataggtctcgacctcaggaaatgggatctgatgatgaggagaatagggtctgtgcagagatcaaggctctctacatgcagacggtctttctcgtctatgtgtagccagtctttctccaggctatgtgtagacggtctttctctctcatcctctgcttaagagaacgacataatggtttgcccctagtggcatttttgtaaagacaagtttgtaacaagtcttaggtttttcttatcttaaatgccttgtactttttttattttaacttaatacaattgtatttgctttcgttattattcacaatgtaaacaattatattttgatcgaatatacagaacttttgggcttttccattgcttgtaatcttc

SEQ ID NO: 31938 - DNA, 1734 bp, Cannabis sativa
  modified_base (1252)..(1263): a, c, t, g, unknown or other
aataattaagacattaaatataagtattattggtagaggttcaaaaagtaaaataaaaatactaaagtaaacatgcttttattgggattagaactcatgaccaatatactaaagcttattttatgtgtaaagatatcacttttatttataaatatatattgtaactaactaaaatgcatatatatttttttctcgattttttttttcagggtgggcgactgccccacctcgcctctatgtgggtctgcccttgagtgggaattttgtccaaaaaaacaaaaatgtgagagggggaggtggctgtaaaaaaatgagagttttgtcaaatataattaggtttaggtttaattagaatgatttagaattatacatatatttacatagatatttaaaaatatatatatttattttttgaaagcataaatttaaaataaatcaatacatatagagagttaattagttaattatataatattacattacatgtatagataattatgttaaatatttttataataaatgtattaaaataatagtaaattttcaatttatagatttatgctttaataaaatattaataataagagagaagaaaggagagaagaaaaaaataagtttgtaacgattttagacagtcacgtcactgtctcatacttctcatttatatgtatctatatatatatttgtactatatattcttatattatttaattttactaatttgtgatgtttttctattttatgaaaaaagtcttatagttttattttaattttaaaaaatctaaaaaatttcatgtatgtaaatataatttataatcaaattaaaaataataataatttaaataaaactcatggatgaaattttataggacatcacttttgtcaaaactttaaaaattatttaattattttaacagataaaaatattttattttttttgacgtttaagtttttaaaattatatttttttttttcatttataaaatatctaaaattcttgtgtttaaaaaaaaaatcaaattaaaaactaataatataaaataaatatctaagaaaattgtaagccccactttagttctacaagttggcgtcttatagttttatatttatttcaatattttatttaaattttatattatataaaattatataaatattatagtaacaaaaaaatatatacattatatttttataattgaaactttatttacactccaaaattttttaaaaatactttattttaataattttnnnnnnnnnnnnaatttatatatttaattgtactaagttcttttaaccttgtaattcatattcgtaaataatatacctattaaattaaaataaattatattttaaatattatgacaaaaaattaaaataaaaaattatataaaatgttctttaaaaaaaataaaaaaatatgtaaagagttagaaaaaaattatagaaatgaattcaaaataagtattgaaattaacataaaataatgtgagagaaaattttttaaaaaatattaaacgtaacttttaaaaattatttaagttttttttttttttaataatagagtatatttataattttatggagtgcaaataaaacttcaataatgagtcaaagcaaatgattcttacgaacagaaataaaaataaaaaagaataaaatgtgataaaataatatagaataatataaaatagatatgaagaaaagaagaagaagacgaagagagaaagagaa

SEQ ID NO: 31939 - DNA, 1346 bp, Cannabis sativa
caggaagaaggatataaaaaaatcatcattttttgcattcatgatctcatgcgagatgtgtgcctgtctaaagctcaagaagaaaacttccttcgttttattgattggcagaatagaagggaagagcccatagaaacaacggtacgaagagtttccatcaataatagtggaaaaactaattgtagtgattttattcatatggttagaaatatagatggctctctcagatgccttgctgtagatggaggaattgagtataattataaaagagtattgagacatgcatgcaatcactttttgaagcttagagttttgattattggtcatcaatataggtattccagatctagtttgaagttgccaaaagaaattgggaatctgatccatctaaggctattacttattcttagttgccatattgaaaagattccatcttcttttgggaatttaagatgcctgcagagtttgagagtaaggagcaagagtgataaaataccaagttcaatgtgcatgttggagcaactgaggcatctatatcttatcactgtagatggtaatggcatagaatttggtaatttcttgaggtcaactaagtctagaaatttacaaacattggtaggtattcgtactaaggatcttctactgagtgatattctacaacaggagagtctcaaaaaattacgaatttgtgtggatggaaattttgagacattcttacacaatccccaaactctcacattcactagtcttctctctttaaaagtagacagtttaattggtgtcaccgccatagatataattcccttgatattaagctgtcctcatatttataagcttaccctgtactcgcctatattaagattaccagaagtcaaccaattctccccaaatctcatcaagttacagttgagatttctccaacttaaggatgatccaatgccaacattaaaaaagctaccagaattaagagtccttgtgattgcctatgatagttttagaggggatgagatggtgtgctcaagaggaggtttccctcgacttgaatctcttgagcttagtactctacataacttgaaagagtggaaagtggaggagagtgcattgccttcacttgcctatttgcgtattgagaaatgcaggggattgaggagagttccaaatggagtaagaaacattgttacactcaatgagttggtcatatcttatatgcctaagaaattcaaagaaaggatggaggaaggaggagacgatttccacaaagtcaaccacgtaccctcacgtgtattcatggaatgtgataaaggtacatatctaatcatatctatcttttgttattaattctattc

SEQ ID NO: 31940 - DNA, 1339 bp, Cannabis sativa
ctagaattgttgcttgttttggtcaagattttttttttccgcataattttcctgtacgattacatactgttctgtacttgatttggcaaactcaagatgtatgaaggggagaggtggtattcgtgccaaaaatgccagcataggtatgtctttggttcaggcttaaggacgagtttgccaaattgacagccttagaacttaaaataagcaaaatggcattctttcattttaaaatttgtgcattaaatcatgggtttgtcgacacagaaaaatgttgggaaatacataattacatatggggctatgttattagtatcacaattgatatacttgatagcacattctttcaagagctttgattctttggtttatgttgcagacttgtaatgcctgttttcacaatgtcatagtcactttcacttagcagttgcatacactttttgtattcttgtataatttaccaatacacattctgggaatgaaggatgtgtcaggtacagtgcgtataaatttcaaagttggcatgtgtaattagttagaataatcaaatgtctagtcttttagaatttaaaaagtgacttgtttagaaacaacaatttctgcttgtgtatggccttgaaagatggttaaacaccttatttattagtttgacaaagataatataaaatatttcatcatgcagctgatggttgaatttgaaatatattctgacaaactatctgcatgttgcgtagtgtgaattattcattcatctccagggtttatgtctcttgctttctttgtattaaaattagtttccgtttgatgcttagctatgtttaagcattgtagtgatgatttccattcctatagattgaaacaatattgggcttcatttgataggcaattgcagttggtctactcaactcagagcacaattttatctttaattctttgatttgatgatatgtgttggttttagtgctttttttgttttctttaaaaaagaatgctttaatggattgtattaggtatatataggtagatcacttttgaaggattgtttctcaagtgaaagttttggtattgttacatgcacaatattaaaaatgttttactaatcactatctatatacatgcaaaaatttgttatgaacgattgagtctaaaatggaataagactaattcgagatattgtccttgtttaggtctagtgcacaaaacattacatacttaacagctatggttttagtgccatttgttaagtgtcattataattgttaggatattatataagtttattggaaatattaattatttagaatgctgaaatttgaatttaaatagtttgttgtatgtg

SEQ ID NO: 31941 - DNA, 1351 bp, Cannabis sativa
  modified_base (1292)..(1302): a, c, t, g, unknown or other
tatagttgtttgctctttgaagagtcataggttataacataaaaggttattgtgcaacaaaattcctgattcatcaaaaaaaaaaaaacaaaaaataacagaaataactaattttctaactaatcttcataggccccctcaaaatagagtgtagaaatctgtggcactcatcttggacaatatttttttgaaaggagcaatgaataaaggctttgttaggatgcctgcaaggttggcttttgaagaaacatggttcatctttagggtaccattggttatttttcacggatagtgtgacaatcgatctcgatgtgcttagtttgttcatgatagaccaggttttttgagatgtggatggttgcattattgtcgcagaatagtatcgaaggtagcttgatgttgatgttgaagtctttaaggatggatgtgagccaagtgagttcagaggtggcgtttgccattgctcgattttctgcttcgactgatgactttgagattgtttgctattttttcgatttccacgaaataagtgaaaggcctaagaaaatacagtaacctgagattgatcgtctggtgtcaagataggctccccaatcaacatctgcaaaggcttaaagtggaagagttggtggtttagaagcatggaagaagagaccttgtcttggggagtttttcaagtaatgaagaattctggttgcagcagtcatgtgtggttggtgaggagtgaaggaatcaacttaatttattcacaaaaaaacttatttcaggccgtgttattataagatagaggagtttgcaaattagactcctatattgagatggattttggagcgaattcccctgaattagtactgagtttaattttggttccataggagtggaaactggtttggaaccaaggctactagagtcttgcaagagttgaagggtgaaggtctttatgatactgagatgcctttaggacatcgagctatttcgagactaaggaagaaccgaagtgtgccaaggtcttttaatttaaaacgtgcaccattagtggctactattatgtcattgacatagatgagaagagcgaaaaaaacaccagattagtgtcgaatgagcaaagaatgatcatttttaaattgtgtaaaatgttgctgtaacactatggatctcaatttggcatacaattgccttaaagcttgtttgagaccatatcgacttttctgcagcttaaatacaacattgtgtggtacatttcctttgggagtgtaaccttggggaagcttctgttgggctttgtgccctannnnnnnnnnnatttcaatgtaatctttatcattctattatcaataaagaaacaaaagta

SEQ ID NO: 31942 - DNA, 2986 bp, Cannabis sativa
aacatgcctcttttaggaagaaaacgaatacgattaagttccttagaactgaggatggctcggtggtgaacactcacgaggggattgtgggtttaatcactgactatttccaaaatcttttttcaacccaaggcagtgatgtgcatgctgcttctactatcttttcttatcttaattctgggttagatgaaactgatgtcagttttcttgatcaggattttactcctgaagaagttaggagggctgtttttcaaatctctggtgataaggctgtaggccttgatggcttcaatgcctatttttatcagaagaattggtcggtcttgggatctgacttgactaaggctatcttggattgccttaatcatggtgcggatttttcctcaattaactcgtccctcatcgttcttattcctaaaaagcaacgtgctcagtctcttaaggatttcaggcctattagcctttgtaccaccctttataaaattatttcaaaaactcttgccaatcggctgaaggttgttttggataaaataatctcccctaaccaaagtgcttttatctcggggcgtattattttcgataacatacttcttgcgaatgaagttgtgcatgccattaacaataggaagattgggaaagtaggttgggcggcccttaagcttgatatgtcaaaagcgtttgatagggttgaatgggactttcttcaaagtctgatgtatcattttaactttcctgtaaagtttgtttctaatatcatgaaatgcctaactactgcgaccatttctttctctgttaatggggaggtttgtggtaaagtctttcctaccagagggcttaggcaaggagatcctctttctccttacctttttatcctctgttctgaaggactttctgcactccttcatcattctcagcgtcaaggagttcttaaaggtgttgctatctctcgcgctgccccttctctcactcatctgctgtttgcggatgatagtctccttttttgtatggctacaccgtcttcttgtgaagctttgaactcagctcttcatacctattctcaggcttcgggtcaattaatcaattttgataaatcatccattttgttttctcccaacactcaagacaatgttcgagatatgtttatgcatactctcagaatggtggataagccttttatctctaagtatctcggtcttccccaatgcttttctcgtgctaagtatcaatcttttgctttccttaaggataaggtcttgtctgttcttcaatcctggaatcataaatggttttctaaggctggaaaggaaattttagtcaaggctgtccttcaagctatcccttcttatgctatggcttgctttcgtatccctaccaaaatctgcaaggagcttgaatcaatggtatctaagttttggtggggctcttccctcaatcgcccctcaattcattggaaaaagtggtccatgatctgccaatctaaatttgtgggaggtataggttttaggtccctggttcattttaatcaggccatgttagcaaaacaggcttggagaattcttcaaacacctaactctttacttagtcttacccttcgagctagatatttcccacacacctcttttcttgatgctgttccaggtcatagcccttccttctcttggagaagtatcatatggggtagagatcttcttaagaaaggcctttgttggaaggttggtaatgggcaaactattaacacaattcatgatcgctggttgcccaattttatcatccaggattctgatttgatagccgctcttccttctccttctttatcctactttatttctccttcaggtgcttgggacttaaacaagctgcgtgatcattttcctgctttcattattgatcatatcttggaaattcctatagcaggtcattcgtgtcctgacgttttaatctggggaaaggataattctgggatctttaatgttaaatctgcatatcatcttgcgcttacttctagagatatcccctcctcttcatctcctttgggaaataaacgtttttggtctaaactctggttctctcccatccctgccaaggttaagcactgtgtttggcgtattcttctgaactctatccctgtagcttataacctttatcatagacacattatccctgcacctttatgccctctctgttatgtagattcagaaacggtcacacatgctttccttgaatgttctagagttaaaactgcctggaaaaattcctcctttaatattttttatgctgaaaacaaatctttgaatatttatgcctttatttcgaaagcagttgagactttagataaacacatgttatgtattttcttttgtttcctctggatggtgtggtcacaacgaaacaattatttgcatcatcagagatgtttgtctcccatgtttatatttgatcatgcagttgcgtatttgcaggagtttgaatctgctaacctcaaagctgaaggtttatgtactgtgcaacggtattcaatcagcccaatttcctcagtggctccctctagatacaagatcaatactgatgctgcacttgaccttaatttgaaaaagcatagtcttggtgtggtggtaagagatgatcaagatcaggtggttgctggtgttattgctcctttgacagggactgtgcctcctgatgttgcagaagccaaggctcttcttcttgcattggaatgggctcagagtgtgaatcttccagtggatgttgtacaatctgattgtaagggtttagtggagaaagttaatgggtcttttagcaacctttctgttatgagtgattttgtaattcgtattagacacttgctatcgttcagtcctacctgtattctttcttttgtgcctcgtgagttcaataaactggctcacaggtgtgctagggcagggttaggattagatggtgagtattgttggaatggttgtttgccttcctggcttacctgagg

SEQ ID NO: 31943 - DNA, 1190 bp, Cannabis sativa
ttattaatttaaaaaaaaaattaactattttctctggtttgaattaactttggattaattttagggtaaatttattctttaaattgttcataaaataaaaaatttaaaattattaatatcatatttatttaataaataattaaatttgaatatacatataaaatagggtaaattgcggcaaaactcttcaatacttttattttacttgcatttaactcttaaaattcaaattttggcgataaaaccccccaaaactcacatttcattagcaattagctattttcatccattttcatctgttttctgtcaagttggcagtctaagtgtatacaaggtactgttcacataaacatagcgtatacatggaataatattattggtccacataaataaatattaaaaataaaattaaaaattaaaaaaatcatttaaaataaaaaaaatgtaaatgaaaaagtatttttcaaacacaaaaaaaataaaaacaactttttttttcattttctttcttcttcattttttttttcaatttttttcacttcttcattttcagatataccatcatcaccaccacccaccaccattgccaccacaacccaccatcattttcagatataccatcaccaccaccacccaccatcaccgcaacaaccaccagcaccctacttttcaaatccaaatgtcgcagaaaaaataatttaacaaaactcacactaaatttaacaaaattaaatctaacaaacaaacacacttatatacacaaaaaatttagatctgagaactccactaccaccgaaaagaccaaccagaacaatccacctacaagatcttcacacgaacttacgaacacatgaactcgtccatccatgtctaaccagaatattgttcctgtcgaacccacaaactcatccccatcctcgtcgtaccacgaacccacaaatcccatccccatcccagttaaccacgaacccacaaaccccatccccatccccatctccgtcaaccacgaagtcctccccatccctgtcaaaccacgaacccacaaaccccattctcatccccgtcaaccacaaacccataaacctgtcccccatcccagtagagccacaaactccattctcatccctgtcaaccacgaacataatcctccttaaacttgcaaaaaaaatacagggagagagagaacgaga

SEQ ID NO: 31944 - DNA, 1376 bp, Cannabis sativa
  modified_base (353)..(356): a, c, t, g, unknown or other
tctattgctggtcatcatgggccacgagagtttggggctttgcaatttagtaaaagaataattagataaaacactatttgtaaaaaaattatattttcacatttaaagaattttttttttacatttttacggattattatagacacaacaagaaaattacataaaaataacatgaaaataacatttaaataacatcaaaacaacaacaaaaaataatatacagataacaaaaaatcaacaacaaatgaataaaagtacaacataaaaaaccatattttctgtaaataaaattaaaaaaattgttaaaatattaaaatttcgtgaaacagtattttgtaatttttttgttattnnnntgtatttgtgaaataatcccttatgtcaaactattttacaaatttccaagtggttaagttatttcttagtatggcgctagacacattttaggacaagagttcaagaatgagaaatttacataatatacttaaaatggatttttcttgaagaaattacattgtatatccactttattttatttgttttaatttttaacttcatttccatatttcttttagatatacctacttttatggatgatgtctctattaaacctttaagttatgtaattatatgctagacttaagtagatagtgaatattaggcaaccactaaaaaaagtgggtatattttagtaaaaaaaacaatgtgaggatatttttgattaatcgatacaaaaaaaagtatttctcaacttattccgtttttctttgaatttcttttcaaatatttttagggcttcttttttataaacaaatgtgggtcgaggcccattaactctcaacatccaaaccctaatatatgtatatctaagatcaatagaagaattgatgttcactaccaaacaaaacaaaaggacttgtttttgtcctatctctctttcttcttttttgtttttaatttatttttttaaaattttttatatattttttatttatatatttattaatttttttttacttttgtaatttttttaattgttattttttttttaattttttgattgttattttttatttagtttatttagtttattttttatttatttttcatttatttaatttttatttatttgttattttttttacctaggagtaagggaatcacatagtgccaattcttttctatacatttggttatttttgacaatttaaagactaccttcgttaatcaggtcatcgataataatgattttttttttctattcttttattttattgtttagtttttacgaatgattttttttttttttaaaaaataatctttttatactatttttttttctcgtaatatttttgtttttttatcaatgttttttt

SEQ ID NO: 31945 - DNA, 3409 bp, Cannabis sativa
gaatttgcctaattaggcaatgtgatatacaagctcacctgattaggtgatgtgatatatggatgccagactatgaatgggttttcctaattaagcaatgtaatatacaagtgtacctgattaggtgatgtgatatatggatgtcagactatgacatgggtttgtctgattaggcaatgtgatatacaagtgcacttgattaggtgatgtgatatatggatgctaagctatgtcatagactcatctgattaggagatgcggtatatgaatgccaggctatggcatgaattttcttaagtagacaatgtgatatgtggataccggtatttaggttgttcttgtgaggcaaccgttataaagtcataactataaactaaaagtgttgttaggtttcttcctgttggcgatgcttgtttaagcacggacggtagtgacacgtaagtgccatgctatggcacaaactaaaaccgttgttaggtttcttcctatcggcaatgcttgtttaggcaccagcgacagtaaattatgacattataggatacacatttttattctatttatatatcttatgaatttgtttgaaatgggtgtagttgacttgcaatttaacttaagaaaattttaagttattttatttttgatttcatatgtatcaacatttattttaccttaatcatatttacagaattagtgcataaagtcaacctgggcattaggtcaagttttaggccacctagaagttctgtttggtcctccaaaatagttgaatcttaatctttgatgaaaatagagaatatgctcgaaagacttttcgaaaaactcttcgaaattggcccaggctgacaaaatatcaacttgggcgctggtcccttgttgtggcacccaggatgggatgtttctttctcaaaatcacttgtttctccatttttgatgaagacgaagaagattcacgagtcagatttctgatttgatgcttggaagtgcccaggttgacaaattgtcaacctaagcactgggtcaatgaaagttctttgaatttgattctgatgcgtcaaatatgttcgtggtatttctagttcatgttccaatgcaaagtttgacccatttgcactaagatggtcccgaaaactaaaaccctagttggggttgtcaacttggacgctggatgaaacctaggtgcccaggtttatttttgaggtactaattcgtgtattttcggctcccggggcctggtcttggatgcttcatgtcttcatcgtatagaatactgaaagatagtgagttagaaacaacttatcagaatccgaacacccattccaaagttctcggagtcaacttgggggaaaggctagggaaggtcaaccactatgacttgggactactcaactcttagatgttatctttcttgccacgtgtcaaatattgatgttcacatcaccagggaaagtttccaagttaacacacacatacacaggtgtacatagtgatcatctagttggtatttaacagtgttatataactgacacctaaaatttacaaaaaaaaaaaaaaagataagggggttatgtgtataaaaattaaaatataaagaggtttcgccaccaattattctaataaatctttccaaataaaagaaggagagtttcccttagcatcatccaaaaagaattgcatatgaaatatttagcctttacaaaaaaatgaaatatttggtagcatttggtaatatttttttaattagaaagtgaaaatattttttaaaaaatatgttctttaaaactgttttcacttttcaatttattaactaagaatcaaaattgtaaaaattgtaaaaataattaaaaaaagtcactttcaaaaattttttaattgtttttttttcttaatcaatattatagactccaatcagacccagacttggacccagacctgaaccccagcccgaacttagaacccagcttcggaccccaaacttagccccgaaccccagacccgaccccgaacctcagacctcgatcctcggccctgacccgaacctagaccctaaacctggactcggaccaacacccaaacctggaccgagactaggaaccggacccaatcccagatcgcaaccccagactcgaccctaaacctcgtactcaatctcggaccccagccctggactcgaacccgaacccaaacttggccccaaccccagccctggaccctcgccccagacccagactctagccctgaactcgatcccagtcccgaacccagaccccggccctggcattgggcccagactcgaattcgacttaaataaaatcaaaaaataaaaataaactttatagaggacactttattttttatttttaaaatttgaaaataaaagtgattataaaacagatttttgtttcttagaaataatatctttaaaaataaaaaatctactttcatttttgtgattaaaaaattatataaaaaaatattacttaacgtcactttaacttttaaaaatcttgcgaaaagggaaccaagattattatttgttatttagttgtttgtgttttggtggtaaatttaggatgaaaaagaaatctaagattaattaataaaaaagaattagtgtatttttttttaaaaatgattagtaattgagtatttagcaatcttaagatacaccattttgaaagttaggtggcgtttgtgtgcttattaccctctcttactcaatggtgacaccatttttcttattcgtacacttttttttttctttctcattttaagattaaaattatttagcattcctttgttaatattttttttaattaaaaaaaataaaaatattttctaaaaacatgttctataaatttgcttttacttttcaattttttaactgactgaaaaaaaattcattttcaaaaattttttaaacaattttttttcttagtcaatactttggactacgacctcaacctgaaccttgagacccagactccggcctcactcctattcccggactaggaccacagccccggtcctaaacctgaatctggatgcaacttaaataaaatcaaaaaataaaaataaaaatataagttatagaacacacttttattttctatttttaaaagtaaaaaaaaaatagttatagaacacatttttgttttttaaaattaaattttcaaaaacacaaatttgatcactttcatttttgcaattaaaaaattaaaaaataaaaatgttaccaaacactcccttaatttttaatcattgtttaaggtaaaatcgttaggaaatatcttttgtacactctctaaaaggttgtttcagtagactttgtttcactatttagataaactgtttagtctaatttttttccgatcacctacattaattgtagctatttaggattgtaaatttt

SEQ ID NO: 31946 - DNA, 1005 bp, Cannabis sativa
gagcaccctagccaaagaaagtagatgtccatcatgcttgattcaagcaaccataccttacaaaaatgacaaaaaaaaaaacaaacaaacaaacaaattaaagacacgataaagttagaaaattccattactagctttcagtaattattgagcgaacatgaccattttggatgcaccagtgtaagaggcttctcactcaactttttgtgtagatcgcgagctagtggtggcatatagctcctcttcttcatagtaactgttaaaacctagaatttctttcatcttgtcaaaagatggcatgcttttatgaggaatatgaccctctttgatagaagcaagagcatcctgcagtttagtcactggagtcaccttcatgaagtaactattaatctagaactagaagtctaggttaatagcaatcattaaaacagaatgcaacaaagtacttataatttttgtaaagggtgtcactgaaattttattccaagtcaaaggtgtcaatgtggtttttccaaacaaaaatttcataacatagttactataaatttaaaacaaatcaaatcaaatgaagttttaaatgtgcaatgcgtagaacccttccttcaagattgtagggtttaatttgggactaaattggaaagtgaataaagttaagatacctaacctgcatagcttgcatagataccccaattaaggaaagtggataggccacgagcttaaatccaaagtcttcaagttcagaaggatcaagtattggtgtcttgccccctccttcaagcatgttggcctagcagaatcaagtagctctttcaattgccaaaagctaaatctaaatctgaatctgaatttgactctttcatgtgtattgcaattagcaaaagaacattatgaaagttaaatgtttaacattcaacaaaaatatgattgctcgtgatttggcatctaacaaagcaaaataaactataccagtttatgaattaagggagaaatttcacaaaaagctct

SEQ ID NO: 31947 - DNA, 1454 bp, Cannabis sativa
cctccctccattgggcttccttccagaattctttcctctcagccgccaggtccctcagactcttcatggcctcgtccatgccctcgaactcggacataacgtacccatgatctattaaagtctttgagaggcgaccggtctctgcagcgatctggcaagaaaatgagtttaagtatgagagatcagatgccacagagtggagcacaaacgaaaaggaaaaaccattaataaagactcactgcggtcatagcagcactgatatcctaaacctggtagattgagttcgtggaagcgcaggatgggtatcgtttggccagaagttgggtcagattggagacaaaatggctcgtcaactccgaggtgaaaggagcaagagtaggaccaacgaagcagttgaaccagtccgtcagagggtccatattcaggtcccaagcattcctaaaggcctctttgcgtaaggaattttactaagcctcccgtaggaccttttcagggcttccacctcggctttccccctcgtgtattcagccatggcatagttgtgcttggcaatccgaagttgctacctttcctcatcagcggggataagggtgatgctagggggtacagtatattcttcctcggcttcaggagggatcatcccggaatcagagctaacagccggaattgccaccctcctagacttcttggaagactcagcctccaccatcttgcccttgcgcttctggtccagcgggaccacaatctcaccatcctccttcttctcgacctccccgtcttcgtcgatcaagacgattgggcctaaggggacactggaagaagatctccccggggtcaccgtctgggcgggggccggaggaagagaagagtccgggctgtaggttttggcaagagtcgccaagaggtcttccattagcctagatgcttcaaaaagaattaaacaaagtgtcaaaatggccataagaaagtatgcacatgaaaacaaaacggtaaagctagttctaccctgattatctaactcagccctagcaaagtcttgccctacaatactggcttcgtcatcccccagaaagctgtccgaggggagaaattagctggaagacaaataagctgagtgatccagaagaatgggtgcaggaggtctgaaacccatccgggaccggcctaagaaattacctaagttggaaaaataaaaggccttggcatgatcagcccaccgagtgggggacatcctaaatctaagaagatgctcgtcaaatcctataggcctacaccaggaatattcttggacagaaggaacatgatgcaccgttaaggaagacttaccggatccggatgtactggcgtcgggagccccagtattaagaaccgggaccagcgacttaggcccagaaggcgtccgatctttgcccatctccagtcgaaggccaactcctgttccctctttaagaggt

SEQ ID NO: 31948 - DNA, 2458 bp, Cannabis sativa
  modified_base (58)..(58): a, c, t, g, unknown or other
tattacgaaaataggctcataatcgttaacgaaaatctgcgttaacagtttggtgctntcattgagagcctacgtgataaaagctcacaaaagtccctcctgatcgaagaaggaatttcatcaacatggctgataatggggaaaacaacaacaaccgtcctgaagagacaaatcgacgtcctggaaatgagccaatgggctcacgaaggccacccaattctcgaacaactcgttcaactcgatcaacacactcaagaagaagccgacgcgataatgacccagttccgagaatgagaaaatcaacactaatgctgatggttctactcctatgagtgagggttcctacgatcccactaggtacgtaccgttggttgagttggaaaatcgtcaactccagcaacgtctggctgaggcaaactgacaaaacgttgagttggaaagggaggcagccgcagctagggaaacacaagaaaataacacgcagaatcaacctgatcctggagtgagaaggaaacgaggtagacctcgaggttcatgaaccaggaggcaggagatagctcaggaaaacccctagactcaggaagaacaacctgggaaaactggggatgttcttgaagatgaacaaccaaatgaccaggcacctcgtcaagaagtgccttagagacctcagggattcacaacccaaggaaatgaaaataatgatttaccagagtcttctcgtagaaatgagaacagaaggtaaccccaaaccatgggccaagagatccctcgtgttaacgagagaaatcctaggactcaacctgggataggtgggttaccaccgagacaccgtcaacgtccttctcgcactgatagggaggaggagtatacacaccccagcaggggctatgtatcaaacctttcctagaggagaaggcctgtacgtgacgaggcaagttctagctcgggacgtacgagatctcgaggtcacagtagatctacgtgagggaataggtctcgtcgtaataatgatcaagaaagtataagtcatacaaggagtagccaatttgagagttactgaggtacaaggtcaacgagcaactacgatcgaagacgactggatctttgtgagcaactgaatcggaggaagccgtatttacgcaaacagctcaattccaatcaaaagcaagaggatccaatccaattacgaatcagtgagttagaaaataaatacaagaaataccaagatgggaaactgcttgattacgactccgatgaggagctcgaacctttccatccaaatattatgagcgctgaatttccctagggatttaaaagccctcacgtcttgtcatacgatgggactacggatccggtactttaatacaataatgcgagccagcaatgtcacgaataacttacattgtattttattccccacctcgctcactagggcagcgagcaactggttcaataaattcacccgtcactcaattacctcttgagaacagctgtctaaatatttcaagaaaaaatttcaggcagcaagagataggcgaactgaagcgtcttccttcactaacgtaaagtagcagtctggcgagtcgctcaaggcatacttgagtcgatttagtacaactgctgccttagttagaaacttgaacgactgtatacagcttactgctctttaaacaaggattacgactgatctctcaacaactggaggcgagctgtgggatgacatacagggtcgccatgtaaaaagcattagtgaatttaatgaaagagctcaggtgttcgtacgaaaagaggaagcaaggaacaagatgaaattgataaagactggctcaggaaataaactcaacactgtcttggcaagcaccgtctcaacgaaggctgacaatccaggagtctctaacactaagagaaaagatgactctaaggaatcagccaaagataagacaaaatagaagaaacatgataagtacgtgccaatctacaccatttataccgagcttaatgaaactcaggaaaatatctttctcgcacatgagcacagggttgcattttgcaaacctgagcccatgagacatgcgaggcacaaacaggatgcaacaaaattctgtagatttcacaaggacatagggcatacaacggatgaatgttgtcagtttaaagacgagatagaaagccttatcttgcgtggttatttttagcaatatctaaagcaacaagacaatggataaatccacccaataacccaggcaaccaaagattacaacctcctcatgtagaaggaaaggatatctagatcatcttgggagggccacatctcgctagagaaagtagcaatgcccaaaagagatatgtcaagaaaatcaagaatgaccagttagctttcgctccagaactgtcaaagaaagctaagactgaggaacccccaattgtgttcttagaggaagacacaaaacatgtgagg

SEQ ID NO: 31949 - DNA, 1647 bp, Cannabis sativa
  modified_base (957)..(957): a, c, t, g, unknown or other
tcgcaccaccacccacgaccctccttttctctagttttctccgatgagtggccgacgacccacgaccctccctctctctagttctctctggtgcgtgggtcgtcaacccacgaccaccaccgtcgaacggacagacaaacgatttgtagtattttttgtatccttcgtttattttttggtaaaaaattgaattttggtgaaatttgcattttttgtgatttttttttgtatgtagtttgatagtggttcgataatgtacgatggtagtggaatttgaaggttggagatgaaggttcgatagtgatccgatggtggtgcgatggttgataaagacacgatatggtctgatagtggtccgatggtggtagcagggctggtcctaaggtatatggggcctaaggcgaaatcaaattttggggtccttatatatatagtttaactattataaaaatgacagttctagtgcttagtgtaatggtaaaattttaaaagactttaagaggtcaaaggttcaatcccttataactacacattaaatatttttttaaaaaaatttaaaagtagaggttgggaaattgatcccatgacctcttactttaaagtaagacgtcggtcgatttggtcagtttatgctacattttattcaactcaatataaagattgggttacaaacatctaagtgcaacccacccaataaagaacaaagaaaatagtaacccgcccaataaaattagtcgttttagtcgggttaacccgtccaaatcgactactaatattttttttttaaaattttttaatttttacattcaattgttatattttagttaattgtaataataagacaaatatatatggatcgaattcaaagttcaaatcaaccaccataaaaaaaatcatattaaattcaacttcatattttttaaatagtcatgtaaattatatgatatataaatatanatatatatatatataaaaatctctcttaatcgagttagtcaggttagttcgggttgattgggcaggttgatattattttcaaccgtccaatataaagattgggcgggttatatttttgtcgagtttttcggtttatattgggtgagttgttcaagttgagcagtttacaaaaatttatgtacaaccctagatggtggtccaataggtgcttataattatgttatagaagaaagagagagtgtgtgaggtttttgatataagagggataatttggagagatatgaataataaacctacattgtcaatagtaatttaattttagtttagattattattttttgccaaatgtaagcatattttctcaaatttctctaattttattggttgtacaataaacatgaactaaaaatgtctctgaaaaactagtaagtaaactagcaatattatctagagcctaacttattacaaaagaggattgctttggaaaagcaaaaaccaactctaaacagctagactctacaagtaatgctaatatttctgtttgaatgattgaaaaattaccattaaatttatagtttctgcataaatatttcaacattctttttggttgtgatgagaagttaagttttggtaaggaaagaaaaaaaaaataaaaaaaatacaagaaaaaattggaaaataaaaaaaaaa

SEQ ID NO: 31950 - DNA, 2967 bp, Cannabis sativa
atccttgctattctaatttcatattgtaatgtggagaacagatttatttggcactataatgagtcaaaccttttctatgttaaaagtggtttttggaatgaaacttggtggctgggcaaggcaaatccttgctattctaatttcatatcgactaggccatcaccttggtggaaatatttatggtctcttaatatatattctactaaaggttaaaacttttgtttgaagggttgcttagaattttctccctacttagttaatctgagtaggtgtcctctcattgaatctttatcctatttttaataaggaaatgaaactacttctttggctttgctctaaacttaaatagtactcagatttggtggcaagctcaaggaatgccactgcacatgctttagttgatttagccattacacttgagcataccaaaacgtggtggcatgatgagctaccatcttgccttaggccataatgtttatgctttgaaactttgtattcttttggctattagcctgataatatcatattgatgttttctcaaaaaggaaaaacatacataatttgtggttcccttaaggcttcatttttcattgtaaagtctcttcttgtttgtactaagtcatcctttccctctaagtattgtactgaattggcattttcattatatgacattttcattaaataatatctagttgtggtacttgtttagtgacaattgaggctatttagagtcgatagttgatgaattcttaattttggagtagttgttaatgattgtagacacttgtttgtatatttgagtggagtttcttttttatttgtttatcattatttaacagaatgactcataatttagttagtaggtgagtttatgtccgtttatgtcaaagtttgggtacacaatttgttacatgttaaagtttaaggcatacaattcaatatgtgataatcttcatgttaagcgttcattagtaaaattaaataaaattaaacaaaaataattgcattaatttaggagaatttttaatagcataaaaagtctaaaggacacaatttaatacatttagaaaaattttgaggtacttcactacttaaaacgaaaaaggaaagggaaaacgggttttatggcgctcaaactggatatgagcaaggcgtatgataggatagaatggccctttcttgaagcaatgttaaggaaaatgggctttgtggaaaattggattcgtttaatcatgacttgtgttttgacagccaagtacaaaataatccatgatgcctatgaggttggcccaatatacctttctagaggcataaggcaaggggaccccttatctccctatctgtttattatctgtgcagagggtttatcatctttactttacaagtatgaaaggaatgggtggattcatggttgcaaatggtgctccaagaatatcgcatatgctttttgcggatgatagctacctttattgtaaagcaacactccaagaagcacaacgaattcaagagttacttcataaatttgagtgtgcttcgggtcaacaggtaaactttacaaagtcctccattttcttcagcatcaacactgaccccgtcatccaaacgcagatttgtaattacctccatatggctgtggccggagagggtagtttctatttggggttaccaagtacaatgagcagaaataaaacttcagtgttggggttcttgagggataaagtgaagaaaagactccaaagttgggaaggaaaatttctctctaaagggggtaaatagcctcttataaaatcagttgttcaagcgcttcccagctatgctatgaatgtgtttttacttcctcttgagattagtaatgatattgaaagagcaatgtgcaaattttggtggaaaacctcacaagatgataacaaaggtattcattggatggcttgggataaacttagccttcataaaagaggaggagggatgggctttcgtgatctctgagatttcaatctctctcttctaggcaaacaagggtggcgcatgcttactcgtcctcagtcattagcttcccgtttgttcaaggcgaggtattttcctaatggtaattttcttaatgctcaattgggttcgaacccgagttttgcgtggtgaagcatcttggaatctcagtcattattaagacatggtactagatggtgtgtgggggacggtagcaagattccaattctaggagagccatggctccccaatgaaggaaacccccaagttgtatcttatcacccgtccttggttaatgcctttgttaatgctcttatgaaaataggggagttaacttgggatgatgatgtactaaatgatctttttgaagaaaggtatcgtgacttgatcaaagccattcctctcaacatctctagaacttttgatcatttggtttggtccagagaaaactctggcatttactctgttaaaagtgcatatgctctcttgcaaaaattgaagggacactggtttgatgaatcagatgatgcgttttggtgtaggttgtggcaactgaagcttccttcaaagatgcaaaatttggtttggcgagcgtgtaacaactgcttgccaacggtggtccaattacatattaagcgtgttgaggttagtccaatctgcctgttatgccacagtgaggaagaaaccattatccatgcgttggtcacatgccgagaggtcaaaaaatgctgggatcgtgttggaattggcaccatagtgaattatggtgcaagcttcttcgactggtgcgctgctactttcagcaacaattctgctgctgttaattgcagaattgtggtcgtgtgttgggctgtttggggagccaggaacaacctggtttggaacaataatccgtttatctttgaagacgtggttgcttttgcatttcgctaccttaatcaatggaaagctgctcagatgtcttcggattcatcgtggcctatt

SEQ ID NO: 31951 - DNA, 2047 bp, Cannabis sativa
attttaatgattatattttaacggttaaattaacgattatattttaccggctatattataacgactatattttaacagctatattttaacggctatattttaacggttatattttaatggctatatcataatagctatattttaacggctctattttaacggctatattttaacacatcaaagtactcaccaagtttacatataccaagttctattcttcctttcacttacttctccattttatacattactttacactctcattcatctaacgttctcaattataatctactataaattaggcaatggattcagcaagttcttcagatccttttgagaatatgagtgttactgataacataattttggaatgtaatgataattccgatgaattttacctaaatgaatacttagctgcgggtagctcaagaaggcgaggaagaaaaagagcccatattgatagaggtcgtgtagaaggacacgaacgcttgttccgtgactacttttctgatgagccggtgtatacagaatatcattttcgaaaaagatttagaatgcgtagacatgtttttctacgcacagtgcaagctctagaacatcagtcagagtattttcagacaagatttgatgcaatcggtagaaaaggactttcaccactacataagtgtaccgctgctatgcaaatgttagcatacggagcaccagccgattacgttgatgagtatgttcaaattgatgaaaccactgctattgaatatctacttaattttgttcgttgagtgaatgaaatttttagggcagaatatttgagacgacccaatgccagtgacattcaccgctaacttcatatgagagaaagacgtggttttccaggcataatgggaagcattgattgtatgcattggaaatagaaaaattgcccagttgcatggaaagggcaattcacacgaggtgatcacggtgcaccgacaatcatgcttgaagcagttgcgtcacaagatctttggatttggcatgtattttttggtgttctcgaatccaatattgatctcaatattttaaatcaatcaccattactcactgacatcttacaagggcaagctctaagagttgagtttatgataaatggcacacaatacaacaaggggtattatctagcagatggtatctacctagaatggggtacatttgttaaaactatcccattgtctcaaggagagaagagaaaattattttcccaatgtcaagaagctgtacgcaaagatgttgagcaggtatttggagtacttcaatctcgttatgccattatacaaggtttgactcgattcaggcaaagagatgctcttaaagatattatgtattcatgtatcatattgcacaacatgactatcgaagatgaaagagaaacatatagttatttgattttaattacgatgaaggctccaccgataccccaacggttgaagtatgtcatggacctatttctgacttcttgactatgcttcaaagaaatgccgaaattcgtgacagaaacattcaccgcaatttttaggcagacttggttgaacacacatggtctaaatttaaaaataattttaattagtattttttttttattatgttggattagttaattattatgttatattttcacctatttttaaatttggtgtaatttaaatttcatgtaatatttatttttcttaatatatgaattttaatgtattattgtaatagtttttattattaaaatgaataatatattaaattatagtgtgtgagaccatgatagcaattttagagttgctaagcattgtagtactttttagtggtaagtagctaaaaattaatgtggatgagagagaaaataaaatattatattttaaagtgatgtggaattttgtgacaatttttagagttgcttgcattggagatgctcttacaaccatggagaatacatatatgctcttcatgtaaccccaagccaacccattacatggagagcttgttgggctttgtgcccaaataaaattctatttcaatgtaa

SEQ ID NO: 31952 - DNA, 1496 bp, Cannabis sativa
gtgtgagacatgacttgataaagtattgaattaacttcaaaacataagttgaatcacatcaatcggatcaatatgagtgagttatggctattttactgaaggtagtccatgacccagcacccaggttgacatcccaacgcctaagttgacatatgacgtcaacttggacgttaggtaagtgtaaaaccatccaagggatgtactctaagatgcctaagtgatattttgacatcaattagtctatttttgtgatattttctgcagacatgagggactcgaaactcttcatttccaagtgagtttcccatgatggaaatgagaaatgagaagttttgaatttgacttctctaactttatggatcttatttattgtgaaaaactagatggacggtcaaaacataatcctaattggatagcacacctgaccatttgtcaacctaggcgttgggtactcattcttaagcttctgggacctcattttgatactttcaaggttcttgaacttgaggacgaggtctcctaccctatttttgtttgaccattccagatttattgtggttgaattagatttggcatttgagtaatcaaaagcagcgcctaggtttattgttaataacttggtgggtgctggccccccagcaccaggtcaacctaggcacttggccctatttctagtggctcgagtttgtagttttttttcctgagttagcttgaatcttcattattttttatgaaaaaaaaattcctgaaacaatttttcatgagcttgatcgaaatagcctaggttgacaacatgtcaacctgggcactgggcctagtgccaagtgtcaacctaggcgctgggtcctagttatggccctttgaagttctatttgatccccaaaaatagttgaatctcaatattttttgaaaacagagaaaatgctcggaagagttctctgaaaacatcatcaaaattggcccaggttgataaaatgtcaacttgggtgcttggccttgcttttggcacccatgaagtgttgtttcttccccaaaagtacacgtttccccatttttcatgaagacgaagaagatgcaaaagttggatcgtcgatttgatacttggaaggcgctcagattgacaaattgtcaacttggcaactgggtgcccaggcatcggggccctaggtactcaaaaataaacttgctctaaatctaattctgatgcctcaaatatgtacatggtagtctacttgatgtccaaatgcaaagtttgatccatttgcactaagatggtcccaaaaattaaaaccctagttgggaatataaacctaggcattgggtgaaaccctaggtgcccaagttggcttccaggttgcaggtttgtgtagtttcaggtcttggggcttggattaggttgctccatgtcttaatggtacaaaatacttaaatattgtgagttggattcaagctattgaagtctgaacttccatctcgaagctctcgaagtcaacctg

SEQ ID NO: 31953 - DNA, 1784 bp, Cannabis sativa
ggcctttgatcgtgttgaatggcaatttgtgcaattgacaatggagaaaatgggttttgcttcaaaatggatatctttgattatgagttgccttacaataaaccaattcactttttttgtcaatggggaggttacaggctcactcaaaccaacaaggggtctctgtcaaggctgccctttatcaccatacttgttcctaatctgttctgaaggtctgtctcggttgctacaacacgaaaaaagtgctagaaacctacaaggctattccttgactcgacacactgctcccatatcgcacctattctttgctgatgacagtctccttttctgtaatgcaaccgaaagttcatgactggctattgaaagatgtcttgatatataccatagagcttcgggtcaacttctcaatcctaaaaattcggttatgtctttctcacccaatacgacactggcaagccaaatcttctttcatcgccacctcgccatgcctatcaacgagtgtcatgaaaaatatttggggcggccatcatattcaggtagaaacaagcagcttatgtttcaggatatcaaggacaaagtgtggaaactaatgaacaattagagcgaaaaaatcttttcagcagggggcaaggaagtcctgcttaaagcggtggttcaatccattcccaccttcgccatgagctgttttagactacctataacaacaagcaatcaacttgaatcaatgatggcaaaaatatggtggggcaagactgagtcggatgctcaaattcattggaaaaattagaagtttctttgcaaaacaaaatcaaatggaggaatggggtttcgttcttttgtgcatttcaatcaggcatttctagcaaagcaagcctggagaatactcaaccatccatcatcgatgcttagtagaatcctaaaagggagatactttcctcatacttccttcttggaagcttcacatggtcactccccatctctaacatggcagggtatactctatggaagagaacttctagaggctggtctctgatggaaagttggagatggtagacatattagctgtggttcgaacccatggatcccgggatttcatattaagctggcattctattcgggctctccttcagcggtggttgctaattatattactgatgaacgagagtgggatgtacctcttctacaaagttgtttctcaatggtggatgtggaaaaaatattaactatccctcttagtttttttcaaagtgttgatgctttgatatggcaccacaacaacactggtatttgtagtgttcagtcgggatatcaccttgccgctgctcttgaagacattgctcatccgtctgctacttcttctgcatcatgcaagtggaactttttttggtcgctgaatctcctgcaaaaaattaagatttttgtttggcgaatcctttaggatgcattaccggtggccacttctcttgtacgcagaaaagtcatcacggatgccacctgctctatttgtcatgtagcttgggagtcaattggccatgccttctttggctgtaaatatgcccgagcagtttggcgttatgctgatttcaacttggattggaattcctcttcaactatgcacaaaggggattatctactgcacctctcaacaatctatacaaaaccagaaatggagcatcttgtttgcattttgtggtgtatttggactgagcgcaatcgtgttgtccacagtagcaatgccgaaacctactaaaattgtagcctccttgctgctaattatctgctgt

SEQ ID NO: 31954 - DNA, 4389 bp, Cannabis sativa
  modified_base (445)..(449): a, c, t, g, unknown or other
  modified_base (1418)..(1438): a, c, t, g, unknown or other
  modified_base (1889)..(1889): a, c, t, g, unknown or other
  modified_base (1961)..(1967): a, c, t, g, unknown or other
  modified_base (2836)..(2839): a, c, t, g, unknown or other
  modified_base (4353)..(4357): a, c, t, g, unknown or other
agaagtataacatgaagctaaacatgaaaaaatgttcctttagagtttcctcaggaaaatttttgggattcatagttaacgcgaggggtattgaagcaaaccccgaaaaaatcaaggcactaatggacatgccatcaccgacaaagcctaaggaagtacaagccctgataagaagaatggatgtacttaacagattcatttcgaagtcaactgataagtgtgtgccgttcttcaatatattacgaggaaacaaaaagtttgagtggacaaaagagtgtgcagaggcctttcagaacataaaaaggcatctagcgatgcctctagttttggcgaaaccaataattggagagacactgtttctctttctggccatctcggaagatacgattagtgcagtcatagtgcgagaagagggtaagcaccagcaacctatttactatgtaannnnnaggttactaggggcagaatccaggtatcccccgctaggaaaactcgctttgtgcctagtccatgcgtctcgtaaactacagtcatatttctaggcgcactccataaaagtgttatctgatcagcccttgagacaagttttatcaaaaccagatgcttctggaagattgataaaatggtcaattgaactggggcagtttgacataacataccatcctcgaacatccatcaagggccaagccttgcctgatttcttgatagaaagtataactccaaaagaaattccacccgttcaacgagatgtgaaaacttgaaagttatacatggatggtgcatccatcaagaagggttcaggtgcaggggtaatattaatatcgccagaaggctttaagtttcactatgctctgaggtttcaatttcacgcttcaaataacgaggctgagtatgaaggcttgatcgctggcttaaagatagttgaggaattgaaagtcaaaaacctcatagtgattcacaactgattgtgaaccaggtcctcagggaataccaggccaaaggcttgataatggcgaagtatttagagaaagtttggaagaacttggaaagattcgattactttaaaattgaacaaattctgagagaacaaaactccaacgccgatgccttagcaaaactggcctcgtagaacgacttggatgaattgaacttagttccgatggaaatgctaagcggccaagcatatgtgaaatggaagacgtcgagatgatagacagtgctcctacatgaatgactcctattatcagttatttactcaacgagcaacttccaaatgacaaaaatgaggtacaaaaactattgtattcagtgcctcgctacacaataattgaaggcaaactatatagaagagggtattcgatgcccctattttggtgtgttctccttgcagaagtgaatgaaatcatcagagaaattcnnnnnnnnnnnnnnnnnnnnnatgcaggttggcaaagtctatctaaaaatatcattagacaaggatattactggccaacaatcaataaggacacccatgagtttgtcaaaaaatgtgataagtgtcagatgttttcacatatacctcgcgtgccgccaacagaattaagaatgatgaccttgccctacccatttgccgtatggggaattgacttaattgaggcattacctactgggcgaggaggagccaagtatgcggtagtagcacttgacttcttcactaaatggacagagaccgaaccccttgttttaataacctacaagaaagtcctcgaatttgtcatcaagaacattgtctgtaggtttggaattcccatgaagatagtatccgataatggaaccctatttgatggtgacttgttcactgaattctacgagaggaacaaaattatcaaaagcttctcgtcagtatncaggcctcaggcgaatgggcaagtggaagctgttaaaaccttaaagaatactatcaagaagaagttagacgnnnnnnnaggcaggtgggtcgacgagctacctcaggtactctgggcccacagaactaccaagaagacgaaaatgggacacactctgttctcactagcatttggctcggaggcaatgctgtctgttgaagtgaacatatcgactcacagaagagagttttataatcaagaagaaaaccaggaacttctaaaattgtccttggatctagttgaggaaaaatgaactgagtcgaaaatcaccaacgcagcataccaacaatgagttacaagatacttcaacagaagagtcaagaaaatactattcaatgttggagacttagtgctaaggcgagtatttgcaaatacgagagatgcatctgcaggagtgttcaacccaaattgggagggtccatatgtcatcgaaacagtagttggaattggagtttataaattggcttgactcaacggctcgctaataaagaactactgaaacgtggaacatttgcgaccctactaccaataaataaatgatataactcgcattactgatgtaaaatttaaacttcagttatgaataaagagaaacatttatattaagtaattacaaagttttattctttaaaattacttaaggggcatttatgtatgattaaccgaaattcatctgaaaatacatggtataatgcaaacccgccatttcaaaaattttttttgaaatgtaaaggttctcgactaaacctctttgacaaaagaggagtcgaactgttataactccctgaccaaacctttttgatgaaagaggggttgaattgttatagcatcttgatcaaacttttttgacgaagaagggatcaaacaactataattttttattaaaaacctatctgacgagaaaggannnnaaaagttataactcgcatataaaactgactactaacggttcttgcgagctaggtaagtacgaaacgaaacattaaggtgtcttgacaaaagtacttgaacctagaaattggatagataacctaactatttatgtaagcaaatctgaaatatacaaagtgataaaatcatgagaggtatattcaagattgcttaaggcagattataactaccatagcgaggcagaattgatagctgctcgaaaattaaaaagttttggtagataactaactacctaaacaagaagattacgagcaatggaaaaacccaaaagtactatacatttgatcaaaatatagttgtttacattgtgaataaaaacaacgcacaagaattgttgtattaagttcgaatgaaaatagtacaaggcatataagataagaaaacccaaattgggttacgaacttgtctttacaaaaatgccactaggggcaaaccattaagtcatcttcctaagcaaagaatgcaaggggagggttgctaaactcaagaaagatcgtcttcatatagcttcgagaaagaccgtctacacatagcttgtagaaagaccgactacacgtagctcgagaaagaccgtctacatgtagaaggctcaacctcagcatagacctcattcccctcatcagaagatcccattttctgcagccgagaccttattcccaaccacaggaaatttctcgataccagagagaggttggcacaaaggtcttatggtgcaggtttgggtcttgggttggttggattccctaatagaaaccacgccaacttccctcctggattcatccgaaactgcgccaacttttctctgggattccctgtcagcctaggaagaacgtctaagatcgctcacaagagctatgtctactcttgtggagacaaagaaaaaggtcaacggagcaacaaaaaaacatataaattaataatatgtctaatccaactcaaaccaccattcacaagggataatacttaccctcaagaatcacttgtgaagatcgtccgtaatgatctaacgggttcccctagtttggattggtcgaaagctcctcagccttggatccatcatttccggctccaatggtggtttgaagtctttgggaacgaatggagaagaaaaatggttggtgcatcctggtgtaatgaatttgggaggatgaacttcaaaactcaaatgggacattctggcaagaaagagacaatccattctcaagatggatctcaccaaaaagacagaagtttgtgaaatatgacaagctaagttgcccttttatacacaaagtccagtgacaagaaggccaaggattaggagatctaacggtcaggagtggggcagaatatgaagagacgattcatgatgacccttgaaaccgtacaaccgccaaaatcaaaggacgcgtttttccaaaaagggattttgacagaaatgctctctgtaattattaaaaagcacttttttactaaaaaagaactttttaagggnnnnntgttatacccaaaattcggctgccatctcaat

SEQ ID NO: 31955 - DNA, 5798 bp, Cannabis sativa
ttcctcaaatgaaaataagattaactacattaatcttttggctaaaaatagaagctaggtgtcaacacctaagggaaccaccaaatcacccatgtggcaaattactaaaatacccttctttttttataacttaagtattttcaagactaggggtaaaatggtcaaaatccatgacctcgctcaaccccactactctattttctccaatatacattccactaagaaataaggttctagacttacccatgcgatcaaactagccatccatcgcatttttcgttgtcaccgagcaaaaattataaaaattgcataattcacatataatacaaataatactcttagagtttaataaaatctttgaaattgagaaattataactctaatgccattttctaacaatggaacccacaaataattaaatccactaataattataaaaataccgataattagtgctaattgcctttactaatccatattatgaaatgcggtcattacagtcatcatattatttgatggcaatcttcccagttccaatcaccttgcaagaatgatcattttctgttaggactttatctccataaaataatccataattaaaaaatggttctcgacttagacacatgtgataagtgcatccaagaattagaatccattccatgttcattgaagattttgagatggagaataattctccatctgtggcgcagtcgtcactatctttcatgattgaagcagaatccttcccatggtgatggtgtcggaagtccttcctatctccattgtgagatttgttgaagccttgttgctccttgtacttcttacaaaatctttgtaagtgtcacgaccttccacaaaagttaacacttcccttgattccttctctctggacttcgatcttgattgagtgtaatggtgtttactctttgtacttcctttcttgggcgatcttcctcttgccaagtacacttcttctttcttagattcattctccaattataatttgaaatcttttgacttgagtttggcaagaacatcttccaaagcaataatatctctgccataattgatggctttaagtataattctttaaatttattctaaaatcctttttctatcttctctgcgatgactttccttcgaacactatttgatagatacatgatgatcgtgtagtacaccatctcctccatttctactttttacttttgtttcttttctaccaataaattctcgtgtccaagaactttggagactttttggtacattaggattcctttcaaactttctgtccatagcgtaaagtccctagttccattgaacttctccaattcaaatctcgtcattgatgacattcaaagtttctttaagaatttcaacggaatgaatcttgattctgcgttcttgatcaattactaagctttgatttgtgagaaaattataaccaatagtgtagaatcaagttatcaaaactttaaacaatcaaatgattatcaatgacaagattaatatatcaagaacaacaatcgaatgaaaaataagagagagcagagtatggaaaacaaaaatcagtcaatgcaaaaaaataaagaaattaacaccaagatatatactaggataggatagaaccaactagagttcactctactccaggatcacagaccaaaggtactcactaacgaagcattcggataggatagaaccaactagagttgactttctagaacttccttctagggagaatatctagttgtctggaactcttttctagaggagggctagctatcctgaagactgaatccaaagtgggcatgatagtcatctgggaactcccttttggactcaaatatcattccacaagactcttctaggatggacaagttagctgtccgagaataacatcttggagatgcttaactttccaagaacgaattttggaaatcttttcatttggtggaactataccacaatactctctatatatttctattctacttatgtgttattgtaatgattatgcaagaaataattcttgcacatctagtagttcaagttcatcaattaaccttggaaattttcatgacacttcaaataaattggggcagtttcctgcaacattatggagtaccacacttgaaagtaattggaagattgccacaatttgtcaaaggttgtcctggtttaggtctcttatttcctaaacaatttgaaatttaactcaaagcctacatagattctaatttaggatctcatcaagacttaaggaggtccactttaggtttctatgtgttacttgaaaagtctttgatatgatggaataccaagaaataacatacaacttctaggtcttcaattgaaacagaatatagaactatgaaaaacactacttgtgaaattgtttctttatttttttgtcctaaaggagcttaaacaagactacaagggaccatttaagttgttttatgacaatcaagaagctcttcacattgttgtaaacccagtgttccatgaaacaacaaagaatatagagattgattgccacttggttcaaaagaagactccatccaacttattaagacatctcatgtttcttcttgtttaccaagttttttggaaacctaatattatgaaagaataagcgaaagaaaatagattaagaaataaaataacacacaaatttaacgtggtttgtgaatgagccttagtccacgaggcagttttatcatcttttagcaatggagttttgacagctctagtatttttctaggttgtgaaccttttgcatggaagagataataacttatttataggcagccatgctaaatggattggacgaatttgggcctaactagggttgttgtagggaaaaacccactgatggagtaaaatacatcatttgagcattatgttgatttatcaggtcgtaaaggtgaggcccgattcttgaaagcaatctgccagacaaagtgtagtactattgatagtgataggcgaggttgtgcacaatcgtttgaaataggaatgtaaaagttaaggtgcacccctaaaaaaggtgctctccctttttttttttttttttgtgtgtgcctttgcgaaggtcggtagaagggacaagttcttaaatttcttaggatcgtgtcagaggtgtgacacgtaagtagctctcaagaccatagactatctaagacacctttccagcttccattcccggaagaccgttgagggcatttcttccgattaaggattcttataagtctcattaatattttgaggtgtgtacttatcaattttgggaaccttgaattatatttgatctgattatatttttaaaattgaattttcaccccaattcttcaatattttcttccatttagtcctgaattatttgttccacaaacacacctaaaagtacataaaattaataaaaataataaaatcaaattaaaagtaaataacgcattatataattagataaaatagctataaaaatacactataaactatgaaatgaaaataaatctaataaattataaaaaaaaaaatactcaataacttaataaattaactaaaagcataaatactgaactattttcaacttataaaatgtgataaagtaactctaatttctaagattatcatgtagagtagataatttaggtaaataacagaattagttaaatgtgtttaactaagaactaacttaaccaaaaggctaactaactaactaagagcatccctaataaagatacatataagtgatataagttaaaatataactcatttagcaaaaaatatactctaatgatgtggcaaaaggtgatttgaatttggcacataaaaatcttgtatcaaatttgacactacatttgttataatgaaaaatttacatttaaatgcactactttttttttgtttacacttataccatttatattattttattagtatctttaactatagcattaaattataaaatatttatattatttttttattgtttacataaaaataataaaattaattacaaagttattttttaaatatttgtaataaaaatattaacaaaaaaaatatcgtttcgtaattgtgtattgaagcacaatattaaaagttgttgcaaatctatcacaaagctaatacatatctatatattatagggataattacatataatatactattttttgtaatattttttatatttttacgttcattttttttatatatatatttttacggtgttctataaaaataataccaaaacaacaagaaaattacaaaaataataagaaaataacatacaaagaacaaaaagttaacaaaaaatcaacaactagaagagtataacataaaaatacattaaaataccgtataaactgtaaataaaatcttaagaatatttaaaattttgtacaactgtatttttgtaattttttttttgttatttttgtatacatttgtgaaataattatgtaaattttttgtcatttttaagaatttattaaaatatctcataatttattagttttatatgttgtaattagccatcttcactgttatcaattaaattaaaatataaaagattctttagttttattctctccctctctttccattctcaactttcaaacatattaacatgttacggtggccttagagcatctccaaggaggacactaaatttggtgtcacactatcatcaaattttagtgtcaaaaattatttctactccaaccataacaccaaaatttacactaaaaaaatattccatattattatattaattttttaataatattaaaaaaatttaatattatattaatttaataaaatcactacaattgttaaaagataataatactgtaaaatcggtaaaactcaataatgtcccgtaagattataatccatattatcattatctcgtagatcaaaaaataatctttcacaatattgaattgtttttgtctctcgattgccgaaacaagtaagagtatatcagtataccacttttaaagatgtgcattgaaaattatttttattaccgtaaaaataatttatagtattcatatttaaatttacacacaataagttaaaaggtgcttttacaatgcactctccaaataaaaaagttacccgtgtaatagacagtttgaaccttattttcggcgtgttaaatttatctgaatttttcaaaattttacaggatgttttaaatacgtataatgtatgctactatataaaaaaaactctcaaattttgaaacaggtaaaagtacatcggtgtactacttttaaaaagatacattgtaatttaataaatacaattaataatataaacatatataaaaattaattatataaagaaaagtatgtcgtgtgaacagtgcacagcatatatgccgtgcactgtaacacacactacaatttagtgtaatctttgcagctacattggagggccaattccacggcatcaccaaatatgaagcctcgttggtgatgctcttaggattaaaaaagtaaaattaaaaaataaaaatattacatcgtggcactagaaatatgaaatcttattttgaatacgttatgaaatcctaaaattttaaaaacttactaaaaattctcaatctcaataaatataataaatattgctaatgtaaaaaattaaaatatgttgtttatttggtgttagagattttattatattaattaaataaaattaagataattacaaattttattgtagtataaaatacaagggttaacaaagaaaataactaaatattacaacaatatttaaac

SEQ ID NO: 31956 - DNA, 1698 bp, Cannabis sativa
  modified_base (1423)..(1430): a, c, t, g, unknown or other
tttctcaataatggtctataattttttttatgacccactaaaattcaaggctgatcctaattatataaaaactcatataaaatcatcattatacttattaaaatttgaagatttacttataaatactcaaatttttaactgacactatacaaataaatgaatataatattttattttacattttctaaaattttaattatataattataatatgtgctgttatatttaagttttattattattgttttttaattaatataccatgtcgtgcacacatattttttgtattttgatgccaatttgtagcttcgtgttgtgttatgtcgtgttgtgtacaaacagatattctttcgtacttgttcatgatcgtgccacccaagttcataatgtgtaaaaaagtccggtctgtatttatagcactggctacaaccacccctattggtattgttggtcctccaagagcagcttcttcggctcaagctcatcagccacaacaattggtaactttgatgcgtgtcataatttattaatagtttatttgattctaatacttctaattatttcattataaaaataagtacgggtctatcccacaagaattatgtttactctattattcaaaattaaataacaattaaaagggaaattgtttttaattttatttagaagaaaattaccaattcaaattaagagaataaataaaatgtgatactacagtattcaaaaaatagttcaaaaggttaatctccaccctcaacaacaatcatccttaaatactaataacgaatgttatttcaattttccaattaaatattaatctcccagattaggctaaagcaaacaactattccaatctccatattgcaagtaatcaagaaggtgaagaaaaacactctcaataattaactcttttaactaagtaataaatctacgaaacgtacaatttatttaacttagataaatgtttgacttcaatagagatagattaatctagacaataaattaatgaagcgtatagttcatttaacctaggttctattcttctacaattaaaaatacttataataatattcaaaattataatttatcataaacacttagaaaccttaaactattaggtgaatagtaatcctaagatgattatagattaaagtaaaatctaatttagtaatcatctaaacaagattaaagaaataatcatagcattagaatagaaaaatagaagcaattcaatatattagaaactaagaaaataacattcatcatagaaattaagaattcatgtcttgagcattgaaataacccttaactgaaaagaaattactccaaactaaatcataataaaaataaaagactaaggagaagaaaagaaactataatgatgaacaattaataacgtcttcttcttcttctctctctctcnnnnnnnntctctctctctctctatttctttctttgagtttctctctcaaaaatgaagtctaaagtgcctaaaaataaaccttaaaagtcctatttatatttcataaaaattcctttgatttaattaaaaaaaatttaaatctcagaaatcgcactctcatcgtggcgaaggtttatgctcactgcggcaagagtgtaacgccctgtccaacagggacgccacgtgtgtgcactttatttaaaataccaataattatataagatgtaattatacta

SEQ ID NO: 31957 - DNA, 1207 bp, Cannabis sativa
aaaaaagtcactttcaaaattttagactatgacctactgttgtaagtttgtgcgtgtcgtgcacccatatttattcgtgcttttcaaaaaacgggacgtgtcgtgtcgtgccacagaaaaatatggatcgtgtcttgtcgtttgaatatttttaaagggtaagctcaacatgacttataggtctggtattttcgtgttgtgttcagatttgtgtcatgctttgctcgtgccagtccgtatttcttaaacacgtcagctcgttttcatatccaatcttaaatttgagctttacattttcatatattttttttacaattacgaaattatatgtatattttaaagttttaatcatatttatataacttttgatataaaataattattaacatcattaaaatttaaatttttacttataaatacttaaatttttatcacaccctataaataaattaatatataattttaatttttcatatcttagttatagaattataatattcagtattatatttaaattttattattatttttacttatttataattaataaattcatattttattattattattaataaactataaagtttttaaatatattgtgtcttgctttttggacttgtcgcgtgttgtacttttcgagctactttattcgtacttacatttcatgtctttcgtgcttctcatgttgtggcgtgcttaaggacatatttttcatgtcgtaccgtgccaatttgtcgcatcgtgtcgtgttcaagcctatattttcgtgcttaatcatacttgtgccaatttcttgccgtgttaaaaatcccggactgtatttacaacactaatctaaccccaatctagcccttgggacccagaccccgcaccccaaatctcgcactcggactcatacccatacccgagcgtggacttggactcggaactggatttggacccaaaccccggccctgaatccaacttaaataaaatcaaataaaatttatagaacaaacttttgttttctatttttaaaattaaaaaactaaagtggttataaaacacaattttgtgaaattttaaaaataaaaatttacttttatgtaattaaaaaatttaaaaataaaagtgtttccaaaagttatctattatatgttaatgagtggctaaagataaatttagaaaattttataatatctaacaagattacataactaattgc

SEQ ID NO: 31958 - DNA, 1599 bp, Cannabis sativa
aaaaaaaaaaaagcaaaaagaaaagaaaaagaaagacaagatcaacttgtattaaaatcaaaaagatgtttactcaaaaaaaaaaaataataaaaaagatgcttgaattggatctaaactcgacagaagggtagcctattgcttaccatggccctgatcctatcctctaaagttgtccaaatgcctaaatttacattgttttcaatcaatatttattaacatatgccaatttttagtgttttttgtgtaaataattggtttacattttaaagtgtacagctttctttgttttatagttaaagattttggtaagtttgtttgaagtatgagtggtcttctcgtgttttgtgtttttttttttttccaaattctaaatattaaatttgagttagttatacttatatgtttattttgtgtgtgtttagattactgtgaatttgtatgtaaatgaataacatgtagagtaagcatgaaaagtgcaaagaagaatttgaagaggaatataatgcaagtattgtccctcagagtttctaatctcatcgagataatacttgtaaataacttctatggaatttattctcttagcttctattttgtaaatatttgcatttcacatctatgaagttaaatattagctgtttttgtttcataaactatacttttttatttcgaggtttaattgtttttattttttgagattaagtgctagttgttttcattttacaaacaatagtttctattttgatattaaattgttttttattttatatatatgaggttaaatactaattgttttgcatttcgaggttaaattatttccattatcaatgtgaattttttttattttttatgatattattttcattttcaatatgaattgtttacatttttcatgatatttatttttattttcaatgtgaaatatttttatttttatttcacatatatataatatatgagttagctactgttttttttataagaaaaacttaattgatttatcttaaataatggaagatattagagatatattttcaaactcttattttttttttttttgttaagtcaaactcttatttagacacacaacaaagccacttggagacaagtgtgcaaaaaaacttctaatacctaatgttaaatagagagaggtaacacaataatatacatttgtatattctagctacaatagtttcttagtctaaaaactattgtagtaaatagggtctagttaaggaggaaaactcggaattatagttgaggtaaaaattatagtttcttaattagtctaacataacattttcttatttcaacattagttttacttttaaggacgagatgacaattcaccttaaaatactaatactaaataaatcaaaattaataagtcaaacaagatacaacaattagaaaattgttatttattgaccattagtaagaccgtacaataattacagatgagcgtaccccaaagatagaagtggttgttagaaatgtatggtaaaagttgtaaatgtttatataatgtatatatatatacgtgatcatttcattccaggttaattatgcaatatgaaagtattatgccttatttataca

SEQ ID NO: 31959 - DNA, 1123 bp, Cannabis sativa
aatttaaaatgcatacaaaaaattgataaaaaaaaataattaaatttttttcttgttacattggaatggtcattcctttctttttaaaatggagtagccattccattcgaatgtcattccaatactttaaaatgcaaccaaacaaaataatggaatgaaaattgtttcatttccattccattccatttcattacctccaaccaaacgccacctatggaaaactctaaaaatgctcttatggatttatcaagcctcatattctcagcttagtgtttaaggatgagcatatcctcacaaggttataaccacaacaaatgatatcaactacatctctctcaattgaacaatatggcctttatttatagagttttcattctcatataagcatgaatgaccaccataaagcccttggatattaccaatcataaattaggcgtttatggtattaagcgggtgatttgaaggagttttgaactgttagaaagactcccaaactttcaaaaatgtatgcacttgtatgttgaaccattttttcaatttttgccaattcttcttcaaagtgttccaaataactcttacttgattttgaaccagttatatatcttataaatgaataaattaagtctccaacacttatatttttcaatagctatcattcattcacattcataaataattagtaacatcttttactaatttaagagtgaaacagaagtgagagttacatattcaagtgatcatcaaattaaaggatttgcaactcctatttgtgataattcgacacacattttgtaactccataatgtatgttacaatttgacaaaattaataatttgtcacccttacttatttgtaacttaattatttaatctaaacattatataatataaaataatataatagactaatagattggacttctctgatgctctctgtggcgaggcggctgcttgttgattggctttggaagtggcaaaagaggaaggctggaagtatattattatagagagcgattctagagcgatcatcaattcgattaacgggttagatgtccgttggggaattgaaaactactctaatttttgtgttaaactctctcggctatttgatggttgtaattttt

SEQ ID NO: 31960 - DNA, 1831 bp, Cannabis sativa
  modified_base (34)..(40): a, c, t, g, unknown or other
agactgaataagtccctttcctgcaactttaacnnnnnnnctctctctggtagaccaagagacttcagatacactacttcaaaagtgagttttcccaacggtttataattgtcttttatactatttcccaacggttcctaaaaccgttggctatgtgggtgtcgtaaaaatgcggaactttaaaagacagtttataactgttggaaaaagttacattaaatgacggtttacaactgttgggaaaaatctttttaaatgattgtttataaatgttagcaaaagtattatgtaaattaaattaaatataaatgaaattattttttaaatatgaaatgtatataataatattatttttcataaataaaatattaattaaaataaataaaataaatatatattcaaaatttttttagaataatatatattcatatgtaacaatatacattatatacaattcagaaaaaaatacaaaaattaatattaaatataaatattacaacaatattttttacagtaccaaacaaaatagaatcctcaacaacacaatcaaaaaattgtctaaatcagaacactaattggtatgtaaatccataaatttttccccaatttcatgaataaatcacagaacatataatccaaccccaattcaaataaatctctcttcagtgaattaggtatgtcaataccaaagccacaaacaacaacaggcatgtaatcctttgatctatcgttgcccctgaaaattcacaaaaaaaaaaaatcaaatctttattacataaagtacccaatttgattaaaagagagaaatcaacaatgcatcatcatatctttcaagacccatttttctttaaccctaattcgtcatggacatatataatcaaaattaataattcaaatctgttaaaaaaaactgagagaactcattgtcgctggtgggagccgaagccgaagccggagccggagcagacaaagcagcccccagtacgaactctctctgcgacgaatcaaactctctctgtgacgaatcaaaaagggtggaaatccttattagcctccacaatcgccattatcatcctcctcgtcgtcaacggcaccagcaagcaagagagagagagagagagagtgaacgagagagagagagagagtgaacgagagcgagagagagcaagagtgaacgagagtgagagagaacgtgagcgagagagagaagcggaacagcagagaatgaaagagaaaggattagggttttcatagttaggtattttccttatcattttctatttatattctttaaattttacccacaaaattattttattttaataactaaaaatctgatataattttttttttaaaaaaaaatgttaaatctcatataatattaaagatcatatattaaagaccatagatgcaacaatttttaattgaagatcccaaattaagtctctaattacattttaattaaaaataattatccaataatattttagtcctctttcacaataatattttttaaataactttcacaataaatttttaaatacaactaatttctaaaattatccttttattgaaaatatataaattctaaatttttcaattttataaattctcaaattataaattaattaaaaaaaattcttttttattttttaaatttgaaggttttttttggtattttattttattaaatacaaattttttttaagaaaagaaaaaaatacaaaaatctttattttttttaatttaaaacttttttaaagtattttcttttattaaatacaaatttttttattaagtaaaaaaaattctttttctttttaaatctgaa

SEQ ID NO: 31961 - DNA, 1653 bp, Cannabis sativa
  modified_base (1565)..(1565): a, c, t, g, unknown or other
atgatgtgaaaacaataaatatacctcaactataattaaaaattgaattttagtctttttattctccatatatatatataaattgtaataaattgtgtacaatagagaaaaagaagaatctaaaattaaatattttattttattgattataatttatatatcattttatatcattatgattaatattttaaaaaagttttcatattatataaaaaaaaatttttaataaaaataacattttacataagttatattcattcaatttttaattaagatatgtctcatctatcactatctctattttacttttttttttttccaaaatattatcgaatctaacaacttttttacaaattgtttttctcgttgtaaattaaaactaaataatatgtaatataagctaagtttatgtatgtatgataaatgggaaaacaaagactaaagataattatataaaaaaaatggtgaaaaaaaaatgagatagcacaaaaaatactaataattttattctctctgtcattaaactatagtgaaaacatataaatattacttttcttttaaaaaaattcttactatcttaaattaatctcaccttgagcttgcaagtattttcaattgcttataatgtccttgttgatttattgtaaaactaatctacttcgtttatcagatctagaattttaccttcatttatgaagtatttttatttattgagagattatgaaagtgttaaagacccaattccacaatatgaatttattcgtaaagtattctaatattctatataattttttatccttattatattcatttttatttgattaactattagagtaaatgagaaaaacaaagagactaaagataattaaagaataaaaataaagagaaaagatagtaaaaagataaaatgagctgggtcaaaaaaatactaataattttattatctctgtcattcaactatagtgaaaatatattcatattatttttcttttaaaaaatttctttcttatcctaaattaatttcacctttaactagaaagtattttaattgcttaatgatgtcctttttgaattattacaaaactaatctaatcgtttatcagatttataattttccttcatttatcaagcattttcaatttcttgagagattataaaagtgtcaaagtccaaattggagttctgcaatataaatttgttcttagagtattctaatattttataattttttttatcgtttttatatttaattttattacattaagtattagagtagtgctatgaagagttggagatcatctatagttaaaaatgtaaagttaacatattattttatacttgtatgaaagcagaaagttgaatagtttagttttttttttttttgtcgacctcccttaaattaacaaaaaaattaattttataatttacctaatttatatattatcacaatttaagataataatactcggtaggtaataattatttgatttttaatttactattattattactctagatattataattaccaagcaatactaattaaaaattaggctaattagganttttgccccctgaactttgacattaccaaatcatgccccctgaacttttaaggacattgaaaatgcctcctgaactattgagattgtt

SEQ ID NO: 31962 - DNA, 1061 bp, Cannabis sativa
  modified_base (1026)..(1027): a, c, t, g, unknown or other
gagatcaaacctattaacatcgttaaatttaacagaatattcttttatttttaaggtatattctgttaaaccaagaaatactgttagatagacacttttaatatataaagaaatagtcatgagtccaatactctttaaattttaaattttttcaattttttaaaattttacaaaatatattaaataactataaattacataactcgaaaacaaatttaattaaaaaattattttaaatatcaaaacagataaaaatatatattagtgtagtgttaattataaattttttctataatatttatttattttattttgtctctttctctcccctcttataatttatttcactcttattttttttttttcattttttaaaattttacaaaatattttaaacaattataattataaaaattttaactaaaaaattattttaataccaaaatacaatttagagtaaattatagaattttctcataatatttatttattatattttgtctctctctctctctctcttctcttataatcctcagattttctcattctgtttctctctctaaaactccatcacaggagttaggacagagaaaccaaaccctccaaactctctctctctctctgactaatctcaacctcaattcccttccttccatggagtcttcctacacctcatctccttcttcttcttccttctgctcttcaacttcatccgactactctactggagcttccaccgacactaattccaaacctcaaacaacctctccttcttcctctgtacgacgagctctgcttctggttcagtcagacgaagttgaatcgaagctccaaggtgctcgagaaattcggcgtcttacgaaaacatctcagcgatgtcgtcggttgctttctgattctgtccttccgcttataaatatgctccgagttcgtgactcgcccgagttgaacgagtcggctcttctcgccatactcaacctcgccgttcgcgacgaaatgtatgatattctctctctctctctctcnntctctctctctctctttctccctctctctctctc

SEQ ID NO: 31963 - DNA, 910 bp, Cannabis sativa
tacatttcaagagaatgtatattgatgtctaatatattcaatcaagtgtcaatcttgtaaacttattcacaaaattattaccaacatcaatatttgaaaagacgacatacaagattggaatttgtcgtttagaagatctccacggatgcctaaatgagtggagttaattcacactgcagtctttctcttttgaccaagttttttcagcaaggtttttaatgagatagtttttatgaacattaaagggggagtgttatgaaatattatttatggatatccaaaacaccaaattaattatcaccattaatgcttgattttattttcctttattacattgatttagtttcccattcttttagtcatatttttgtataagtaggaattgacccattggaatacataactgagaaattctcattcagtttctctttttctcttcttattacaatacaacatttatttatgattatatttgtgagagcaaaaaattatattctaattaagagattataattaaataaagatatattaaaagaaacattaaatataaaaaattatcaaatataacaataataactataaacaattattaatactactaagttattgttacgtacattgcatgtatacttagttatatttttagtttttattttcgttatgtgtatttttaaaattttataatataaggaaactaattaatattataattatttttcaagtcttccaatttgttatcccaaattttacactctgacgtggcatcacgagaatggtgacacgtggagtccgcttggaacatctgcttgggaagataggccaagcaggatgcctctctagcatgtccagggtaaaatatccagcgatccgtgtagagcaatcaacacttagcgaattcagctttggcatc

SEQ ID NO: 31964 - DNA, 1501 bp, Cannabis sativa
  modified_base (40)..(45): a, c, t, g, unknown or other
tattaaaagatgatatttatagacataatagtaaccttgnnnnnntggttaaggtagttggtaaataggttagagggtaaaggttcaaaccccactaacttctgggtccgccactggataccataacttaaactttaccatagaagcattaactacaaacctttttcttgaaccattatttccatttcttttgagactgtttcatcccattttgtgaccgccatatggaaaccatagtccatgcaggaattcctggacttcttttcataagattcaaatccggccatcaaacttccatcaacaggtaaaacaaagtcaatatgcatagttgttccacctgctagtgctgctgcctgaccactgaaaaaatcatcaatgctttgggtacccatgaagtccatggcaaggtgcacatgaggatcgatgcctcctgttaatgttagaacatattactactcatgaaagaagcaccattttactaattgttgttgtagaaaaaacaaacgccttcagttaattttccaaaagtaagaaatcaaaacgccaatgtagtgacaataacggtatatttatgccttatgatctaagttcatgataccacagaagacaagagacttgtgaaactattccaattaacaactgaaacaaactaagacaacacttagtggagacgaaatgaccaagatcgggctgcaacactttaataaaaatgagtgggagtttgtctagcatggaactatttactcaatgcttgcattattctccccctgctctaaaaaatactactatgttgtatgcactctaaaaagaatctaacctggcataacaaactttccaacagcatcaatcacagtgacatcatcaccaacctgcatatggcataaacaaattaggttgcacattaaatcataaagattcaaaaaaaaaaaaagccatattaataggaatcccaaggaaaacaaaatcttacaaacttttaagttttaacattctacaaatggctacgcagacaaacaaagtttaactcagtttagctattgtaataaatttgacgcacatgataaaaaaaagaaaaatagaaacaatttagaagtactgaaaaaccaaactatattaacagtttgacatatacagaaattggatacataaatatcatgcagaattgaaaagaaaagaactgtgtaagcattccaagaaaaaagttgcacctaatgtatgatgtaacaataaaatcaaaattaatgagcaaagttataaactttaataaacatacatctttcacagtcacttagtttaatattaatttaccaattaatagacaatgaataataataataataaaggcatgaaaccaatcaaaaaaaaaaaaggcatagttaaaaacaatcattgctaagtcaacaaccaaagctagcacagaaaactataatattcaatttcaaaatcattcaggaaaagagaatagaaagaatgaattgaacatcgaatgctcaaaacatac

SEQ ID NO: 31965 - DNA, 2876 bp, Cannabis sativa
  modified_base (773)..(777): a, c, t, g, unknown or other
ggcataaaatcccaacaaactcccgcttgaactaacataaaacaagaagtgcatttcaatcaatccattatcttgatatccatatcaaatttagtgtatttgactaaatccaaataacaggaactgtaaagctatggtaagcaactgctttctccaccattacatcctttgtgttcataaaacattatgtaacatcgcatttctatatgcattactcctctagagatgctgaattctttactacttgttaagtgcatctgaatgtagagaagacacatctctatttctatttaaaaaaggaatagagatgaaaacagttaagaactttcttcagtttgaataactttctagtgctttccaaaacaactaagttatttagcttcactggtggaactaaattattatagatggggttttacatccttctagaataattcttcaactcccagagtaactaccatctctaatattaagttttgagttggtgtagatataaatattctaatatacgcccctatcatctaacatataggtcacttacagagattccttcttgattgtctaccaatgttccttgtttgattacatctttgatggctctcactcaacagtaggagtctggttaatgcatacacaagtgtgcatttaacctcttactattgttacttagggaccttttgttgtgacattttatcttactctgaaacattaagttccttctagactaagtcatcaacatagcattttagtattaacattaatgtaaaatactnnnnnaagattaagtaatcattagagatatcataaaacatttcataaggaacaggaattgtgcttgagtcattcgaatagacattggaaaaattttctatcttatcctcataatacaaataagttattactatctatatgaatggttagagtaacttttcttagttttattttaaagttcatttcttgaacatatcatagtaaattaatcactagtgtcaactaaataataatgggctcgaattttaaaatcctcccactaagataagatactgtgattttatgtccaaggacttttactagtatcaagttactattatgatagtaacatatttatttgaacacttacaggatcaagaatgagttctattaatttacttgttagtttattattatatatccatgtctaatcaaaatatatgtatcatagagattctatggtgtattgagtatagtctagagttcaaagagtttgaactgcatatatcaataacttcttccacccgtaagtgttatagagattctgtggagtttcgaatgtaatctagagttcaatatatataaagatcttcgaactgcatatatcacttcttaacttcttccgcccctatcagatcaaaagaattttttattaaacaaatcttaataatttcttaagaaatgaaaattattcataaacattgaagttaaattttaagtgtttatgtggtattatctctttgcggagattattataccatagattttgtatcattaatatatacaaaacacataaaacatgataaacgtataaatataataccatattggcatacaagttaaaaaaatatgaaactcaatttcataaaagcaattcataatgaaaacctcttaaagagaaaattttatttatactctcaaaaatatcatataatgaattatctgcaataatatgaaattgggaataaacatcccatactaataattgaaactaaattatttaataactaaaataattaattcaaaaattaaagaagataacgagcttcatcttcaacttggacaatctccacccctctgtccaaccatccgtctcaactcgctaggataacaatccaagtttaagcagctggagctgaaataagaagaaaataaacatggttaatatatctagaattaataactaaaggggataatgattctcaaaaacacatgaactcacaataaagttggaaataccttgtttctttgccaaaaacttaggacaccgggattttcagtgcccattttgttgctatagaagcattttccttttttcctttgcttttggattagtagcctttttacccttattagctatgttaacaactttaagaggcttcttgctattcttccatttcttcttcttaggtttcaaagtagaggcaatgtttgcctcaggctttgtcgtatcagcagcagcagtactagaaataggagctttgtttcctcctttctacggtcctccaatcaaattttcaaatgtctgaaggttgttgatcaactcgtgaaagtcaaatgtcaacttgttcatgacataatttgaagtaaagggcagaaaagttggagtcaaactagttaagatcaaactcacttaagtttcttgatctataatagctccacgattcttatcttcctggaagtaactagctatttggagtaggtgatcacgcaatctctgatgaggtttcatccgcgaattgataaagtttttggtcgcctcaaaacaagcttgatatgacaccattcgaaacagttcagttaactggttcatgatttctacaaccgtgacagtgtttgcaaatcttgttttcaaggtatcaaccatgctagacaacataaagtatcgagctttattgttagcattctgccaacgctcaaacttttccttaactaccttggtttcattctcacatggttgcttaggagcttcttcagttaacacaaacatggagttcacctaagagagcaatattaatgtgctctttccattcgacaaaattagctccagagagcttgttgtcagtcaacagtgacacaattaggttgttaatagtcatattgaaaactacaaatatcaataaata

SEQ ID NO: 31966 - DNA, 2831 bp, Cannabis sativa
gagctggggggctcctggtaatttccttacctctatcgctggggctttttcttattcaacctccttctctccctccccccttttcttttatctttgggtattcgggtgtcttactattatttatatatattatgtgtattttcgtgtttttccattgtggacgtattgatgcttattctaatgggggtgttcttgtgcagtcgttgctgacaacgaggagactgtcatcggtgatattttttctgaaaaggttcgtaaggtcacaaccctagatcccaagctttgatcaatcaagttccttctatcccgtgaagccttaattgaatcctccgcctggcctcgcgaactcagaatccccctaagtacccccactccttatcctccttactttatttggcctgattttttaaaatgtgctttaagacacttgaatcaaacacccgaaccactcttgatagagttttctgaggatcattcccgccttgcaaagacctacccccgtcatcttcccaaaatgaggctatctgagttgaccattgaggagatcgaggcccagaacgccgcccgtcggaagaggcttatgtcgaaatcccctaagcgaaaaagcagggcgaagaaaagcaagacagcgaggcttgaagaaaccactcaatcggatctcggcatgtcatctcagcacgactcggccactgacgacgccattggggccctgcttagcgccctccctgaggtttcatcgggtgcgggcgagggtgagggtaattccgggggttggccccgacaagaccttccaatctagggcctcctgatcaggaagttctttctcagcctgagaacctttcggcggtcatgctgggccaaaatccagggctttcatccacctctcctgctcagactttgcttctctccttggagcgccgtcaacttcccatcttgccctttctcctgctctggtacatccttcaaccttttcttctggccaaggctccctgcctctatccagtcatcccccgcgggccttggccgaatgggacgagatccctgctttccggatcaaaaaggatgttctgttcgaggagtcggctaaaaattatttcaaaactctcctggatgccgtcagaaaacctgatgatgatttttacatctctcatgggcgtgattctattgtgaaggatacaaccatctcaggaataaaggtaatctgttccttgcatgtatctcattttacttcagttattatttcgcttgttgtcattcatgtatattttttatattatttattttattttattattattattattatttaaaaaaatccccttttttgccagacggctttgagatgtgcccatgttatgaagtttgctccacagactgatagggagagggagagcttggctaagggctattctcgctacaagaagaattatgaagcagctgttgccgcgaagacggctgctcttactaaagttagtgccttggaggtcgacattaagcttttgaagagtaaggccgacagtcttgagtcggagaagaggggttgggatcttactcgttcagcccttgagtcagaaaagggggttctaagtgacaaggtggcttccctggagactagtctgtcgacggtgaatctggagaaggccactttgttgcaagcatgcgatgccttccgttctgaggccgagggggcgaaggacaaactctcttccttgagtggaaagttgtccgaagctgaaaaggcgtcagcccaggcccaaaaggctttggtcgatgagaaggaatccctgactaaggagataaaagtcctgacgggccaagtgaagaaggcgttccttagtgggagttatcagtcgtcttttaaattgtactccgagtttaaggaaggcaaatctgctacctgggatctggacgggttttttgcaaagtattctgagtttaagaaggatgaagatttggtggattcttcctcggagtctgacgaaggtagcgagggtgaggatgccaacggagcctggagatgggagggaattttaccgtgtccttattttaataaatttcctagtgtgtgttatttgtgtgcgtgggacaagcttgaggaacaatttcttatttgttatttattttatcattataaaggatttgtaaggatttttctttaaatttgtactttcaacttatttttcttattatggttatttacacgtgtgtggtattttttcgaatcgttttgacacttggggatgcgcatttattgtcatttaattccttatatgtgggtggatttaccttttcatcttccttttatcttaccttggccaccttttgcgttctatttaaacagacattcttctttgttcatggtgtcattttggtgtagcttctaagttcctctcttcacacgtatatatatattttttgcttccctttcctctgcttcagaaatgtcaaactctccaggttctcctcttcctgagtcttcaagtggcgatgagttccattctgacgtcggggatcgatccccccgagtccttcaattttttcccattacaaccggcccagtggcgaagctattgttggaaggatgatgagggcttacatggctagacacaacgatgcgtcttcatcttctgatgaggaatggcttcagaatttctttgagaatgagggacgtaacatttcagctaccacaagggtccccgccgaatttcacgcccttcgcttgcacgctgagcgccgccgtgataaccgtcggatgcaagcccgcaaccggcgggcctgggatgaggacctggagatggagcgtttggctaacgagaggcgaatggaggaat

SEQ ID NO: 31967 - DNA, 1852 bp, Cannabis sativa
tcctaagattagagaaattcatgaaggcttatgtggggatcatgcaggttggcagagcccatctaaaaagatcattatacaaggagattactggccaatgatcaataaggacacacatgagtttgtcaaaaagtgtgataagtgtcagaggttttcacatgtacctcgcgtaccgccaacagagctaaggatgatgacctctccttacccatttgctgtataggggattgatctaattggggcactccccacagggcgaggaggagccaagtacacagtggtagctgtcaatttcttcactaaatgggctgaggtcgaatctctagtctccataacatgcaagaaagtcctcgactttgttgtcaagaacattgtctgtaggtttggaattcccatgaagatagtattcgacaatagaacccagtttgatggcgacttgttcactgagttctgcaaaaggaacaaaataattaaaagcttctcgttagtgtctaggcctctggcaaatgtataagtgaaagttgttaataaaaccttgaaggatactatcaagaagaaattagatgctgccaaaggcaggtgggtggacgagctacctcaggtactttgggctcacaatactaccaagaagacagtaaagggacacattcccttctcgctagcatttggctcagaagcaatgctacctgtcgaagtgtacttcacaaagttgtccttcgaggtcaacaaagtgatattccgagcagcatccggtagctgaagaatcttctgagtcctgtccctaagtgccaatgtgaagggtggatggcagtacactgggatctgtttaaactgagtataggtggtatctatgccttccacgaagtagtactcgtcaacaaaaccccctatcttgctaacatccttgtccatcgtgcccgtcagccacttgcgttctgactgagagaagtagaagtaccccgacctgctctgcttaggggtagacttcaagtcaaaaagccagttgacctcgtgtggggacggcgcaccccatccttgaatggcgtagaggacgaacagggcagacaagtacttaatgcccttggaagtgaactgggtcagacaaaggcaaaaataatccgcaaccctcttgaagtacgagtgcaaaggcagcatcgccccttgcttagtgtgagcacccgaccaggcatagaaccctttctttgggttagttgcccagtggttcaaagaagggacgcaacactcaagtccgcccaagtacccagctttatccaagtccctcatactaccttaaagcacacccatctggcccctaaagcactttgccttctgtgcgggactgcctcggtaaactccttggtgacatagtcttccccctcgaccaagacgtcaccctccgcggataccgactccccgacctcattataccctctaaaatttaaaggttcgaccactccttcctcctcaacttcggaagggctatcaggacggacatcgtcctgctcctctatctcctggacctcgatgtccccctcatgatcctcctcctccatggcgggcagatcctactcggtacttggcaattggtggcaagctgggccacgtgagggtcagacgcgctgacttttcgcatcgtctgctttgtgcgggccatcatccttctcttggacggatgctgatgtgtgtgttgtgcaatagtaacggcagggtcagctgttgggataccgaagttaccaaaacttggacggcctatgggaagagtatcagcaacacctggtcagacaatatacgtccagttggacggaagataacgtctcgaacccttcttcagctcccaaatgaagcgaccgta

SEQ ID NO: 31968 - DNA, 2383 bp, Cannabis sativa
gcctcggttagagcccaaattctccttaatgaaccaattcctaatctctctcgggtcttctctatgattgttcaaaaagagagacaaagaacacttggttcttcagatttggcctctcttgcatcctcggtccgtccagcttcttccactaccaatcccaaatcaaagaaaccgaggccctcctgcactaattgtggtaaaccagggcattatgtggacaaatgctatttcctccatgggtttccaccaggttatggtgacaaaaagaggtctgaaaaaggcaaggctactgccaacatagccattgccagttccaaactagaaaataccagcagcacctctccagctgacctttcttctcaatgtcagcagctcatctccttacccagccaacaattgagccaaggaccaactagggatgaccccaatactgttcttgcagcttctaacatggctggtaatctctccttacatcaaaatttgtcatggattgttgatagtggagccacacatcacaagtgctccaccaagtcttgtttttctaactttactaatgatgtttttccatttcaacttcctaatggcactaacatccctgtccatggcataggtacggttaaaattaacaaacacttgatcattcacaaagtgttatatgtacctacattccacataaacttgttttccattcctactttccttcataaccccactaacatggtatatttcaaccatgattcttgctttttacaggctcattttccgagtgtggtgattgggacagctagaagacttgggaaactctatgtcattctccaagattcatctccactagctagttctaatagttctttactttgtaccaataatggagaccattggcataaatgccttggccatcccttaatgtacatttctcaaaatttcaataaaaagcatgactttggttctcataactccaagaatcaattgtgtcatatttgtcatcttgcaaaacaaaaaaggttaccctttatatccaataacaactttcttgacaacatatttgatcttattcacatagatatttgaggaccatttaacataataagtattgaaggctataaatactttcttacaattgttgatgacaaatcccgattcacatggacattcatgcttaaaaacaaatccgatgtccataatataatacctatgttctataacatggcatgcacacaatactcaacacctatcaaagccattagatccgacaatgccaaagaattaaatatgcaaggcttttatgcctctaaaggcattgttcattaccgttcatgcgttgaaagaccccaacaaaactctgttgtggaaagaaaacatcaacatattttaaacattactagagctttatgcttccaatctcatttaccacttccttattagtcttacctcattctcactgctacctatttaatgaatagaacaccctccaaagttcttcaaggtagcacatcttatgaggtacttcacaaaaaacccccgatctatgaccatcttcgatcttttggatgcctagcttatgcctccactcttccatctagtagacacaaattttttcctcggagccgtgcctcaatttttattgggtacccccaaggcatgaaagcatacactctacttgacattgaaaccaagaaaatctaccaatctcgcgatgatattttttatgaggatatttttcccttaactggacaccagtctatcactgccataagccagttcttttagcctataatcaaaccaatttttcgccccataactcaggccacaaccccctgccaccacctggtgtttatcccacaccagcaccttcaattgacacaaatatgtcaaattcagatgcactacctgatgccactcccacatcagaaaccacctctggtgcccatcccacaccagaaattcaaataactgatgccattcccacatcatcaattaactctggtgcccatcccacaccaaaaatttagacaactgatgccattcccacatcagaaatcaaatctggtgacaattttccaccagcaaaaaacaatacaatgcccacccacattcctgataaggcagctggaattccacatgcattggacaaaccaaatgacaccaatagactcaacaaatgacatgttgaatattcaaatgataaacaaaataacaccaccacttcagcaacaaaaaaagaaacccaatccagaattggtcctcatatcaccaaacctaaacacttaaatgattatgtctgtcatacctcatcaacaccttaccccattgaataattcatctcttatgctaaactaagccctcattttcgagctgcacttattctcacattgaacctcgt

SEQ ID NO: 31969 - DNA, 6992 bp, Cannabis sativa
gaacgagccatagctgaacagagaagcaaatatcactcttttttcttaaccactcttaaaaaagaagatcatgtagctgtaggtggaaaaattaggcaactaaaacaatattctattttttattttagaaaaagaaaaaaggttttacagagaaaagtagtagtaggagtacccaatcaaagctctcgcggaggaagaaaacccacatagactctgtaaatctgaagctaaagaacgaatctcgatgctattcctcgctatacaagcattgaaccacagattatcgtcttcatcatcattatcggtgtttcgaacggtgaagctccgagcgtcgactccaacatttcgaagtttggcgggtgatcgtcctcttcatcatcatcatcgtcgtttcgaacgatgaagctccaagcgtcgactccaacattttgaagattggcgagtatcgaaccacagattgtcgtcttttcacctttgtaatccttaattcgttgccttgaaggcaaataatctccttcagatatgcctatatataaagtggggtcttttcgaagtctccatggaggctgccaatcgtggttaattatagctgtatacgattgggattacgatatacagggttttagatttggaaaaataatctccgaatgttttcgggttgtgattttttaatatttaatatcaatttaaatattaataggatttgtattattattattttattaaataaaaattaaaagttatgtataaatttctcataaactaagaatttcaattatataggcatactttatatagaatagatattaaaaaaataaaaatatttaaaataaattaattataataaaataaataataattaaatctcttattttttttaaaaaataatttatattttattttaatattaacaaaccatataaatttagagtttttcttatataattgaggttctgattttttattacatttgataaaatataatataaaaatactataaattattttttcaaatgcatataaatttatactttgaaaaaaatttaaaaatatatagaaaataaaaatattatataattttttatatatatatttgtgattttaataaactagagcattatcattacattttaacaactcagtactttaaaatctataatttatcaaacactcagtttagctttttttcacaattctgttgcaacccttaatatcattcaagcaaaatatatagtggtgttgatattattggagcaatcttttgcttggtctacatttaagttttgataacttcgattgttttatggcattgagccacatgcttcatgacttagccttattacatattatttcaagtttgtctttcagaaaaatctctattttatgacctcacaagaattagttgttcgtattccatgacaatgcgtaaattcaggtggatgagaaacttaattatatgaattttttctattatttttgtacaaaaaaattattatttcaatgaaatgttcactgtcaaaaaaaaaaaaaaatagtgatgtaagtgctcattgaataaaaataaagatgataattaataaatgacataaagattctaagacaagctctgttcctactttcataaccacagataatccttttattcgagccctaaatttacaaaccagttcactttggtaacatctcccaatacaaagagcaccgtttttgttttctaaattttttcaaatgatacgaaaaatctttacacactttatcttctgttctctaaatatacatatattttagaagtaaaaagcggcatgtagatgagttgaacgctcctggagtgtggataaaatactgaccatccacccattcatctttttctttttccacatgtaaagtaaataaagagaagtaaagaaactcttatacctatgcgactatattcctacatacaaacagttgcatagataataatggcttcatcttcactgaaccatcaggcggtgaagggtttttcagtggtgcaaacggtaaccaagaacgatactgataaatgcaaccataaaaacaaacagaagaggaaacccgacttggaccgtttttacgcctcttttgctcaactctgcctgcagtgagcaataaaacaagaacaaaaaaatacttaagacatgtctcagatgcagaagtccagggtgaactcgtgacttcttatgcaaacaaaacagaagataaaacagagaaatttattgcttttgtagctagtactaacagataaatacaaaaaagaagaggacaacacagttttcatattacgaaaagttcagtgtgtaatataagaggctccaagcaagttttagaagacaaaagcaagttttagaagacaatatacacacacacacataatatacacacacacacatatatatatatatatatatcaaaagaagacaaaaggcaaataatgaaaagtaagcctacgtcttttacttctactctaccccatactagtcggaactaagagataagtaagaacttaatctagcatgtaaacttagtccaactaaagcagtaacagacattattttacatggctgtgaaattatttcttgtttaacctttttgtacttttatttttaatatttttcccactcactatctgagattcctaaattcatcccactgctgctatagtgattacaatttatttttctcagattttattgcaggagataatagtaagagagaaatatataagaaatacaaagcagaatagtaagagaaccacaaaacagaataggggataaaagaattactaatttctcctgtaaaaattttctctcttcaatgtttgattttctctcctccatcagctgtaaaatagtagcatcagcctacaaaggaaaaatatcagttaattatggctcttgattaatgaagagatataaaaaatccatgggtaaaagaccaaatgttattatgatccaaatactgaggatagttttctgtttttccttccatacaggggttaaaaaaatactttccactcttttgggttcaaaaatactttccgctattacatgaaaaaaaaaaaaaaaagcaaaaacaaagtgtaaagaattataataataataatatgaaagttaaaggaaatcaataaaagccatacaccaacatttaatgaatttgtgacaagaccaacctgatgaagttttaattcaaatttgcttagctttgatttaatctcctcaacatctttaaacaacttcaactcctctacagcctttacatttttcaactcaacatctttcactggcttcgattcctcaacactctctacggattttaactctatgtcctttgctggcttcaattcctctacatatttatctgaattcaaatccatgacatcgtttgctggattcaaatcctccacatactttgatggcttcaactcctccacgtactttgcagacttcaactcctctgggtacaatgatggcttcaattcctctacgtactttgcagggctcaactcttctgtgtactttaatggcttcaactcctccgagtacattgacgacttcgactcctctgcatacattgtgggcttcaactcctccgcgtacaaggtgggcttcaactcctccatgtaccttgcggtcttcaacacctctgtgtgctttgagggcttcaactcctccgtgtactttacgggcttcaactcctccgtgtacatggtgggattcaacacctctgagttctttgcaggctccatttcctccttgtgctttgcaggcttcaattcctctataccctttgctggttttaactcctgtacgtccttttccagcataaactccacatttttcacaggcttcaattctgtagccaccactggcttttgctccttaattttaactgttacagactcctctgtatccttgctaacctgattcatgagaagacaaaattgatattaaaaaatatataagcacacttcacatgttgaatttaattaatatatatatatatatattatatattggcatacacctgacaaatgtctatacactaatgcactttaactaaataactattttgccattcgaaactcaaagcattctcgcatgagagaatgagtatgaaacagaagcaactttatgtgtcaaatgtgaggaggcgggcgtattgaaacatcaaaatgaaataaaagagttaatctaaccgtttgttgtttggataaatttccaactccatttaaagagtgatctttagaaaataaataatcatcacccatcccctggtttaaggctccattaattggtgacaaggttggcgaatgaggtgggctgacaagaatcactctcagtttcttctcttcaaccagtttcccgccatctttcgcaaactgttataaaaaccatgagaaactaaaagagacatcaagagaaacaacaacaacaacaacaacaacagcagcagaaattaccatgctagctgtaatgtactcatccgttgtctcagcagaaaccactgtgctctggattaaaaacttatccttgcactccaagtcgagtggagttgtccgtggcatttgcattgtgactaagtttacataaaagaaagaaagaaattactacaaggagcatactacttcacttagcaatgaaaattcacaccaaatgatctcatgacatgcagaaagttaattcaccaggctcatagctgtcaaaagtgaatgattgtggattttgttcaaaataaataaataaatctgcagcacttacatccttgacaaaaattatttgtaagacagaaaatataaaagaagaaagggaaacaactaaacctattgaacagtgtgtacctataaaatcacaactcgaattgggcattataacaccaacattgggccgcacacagtatctcttaggggaggtggtcttaacctgccaatatcatcattcttaaatcacattgcaatctggataccatcaataccaaatccgtagtattatcttgaacaagagcaattaaaacataccttaaaagcaacatggtagttggtgttattggaaagctgaactgaacatgagcttggcttcttcaattcaactataaaaacaataagaaaatcaattaacgaactaagaaccaactaaacatggcaagcaaatgagataataaaaaacatgtcaactgttcagttgtcaccctccacaagccttacaaactccttaagcaacggtaaacaagatctttatatcaaaatttaaagcccctgccactaaaacaactatttggtgtttttaggaaacacttcctaacttctctaacgccctgcccctctaaccccagcgccacccacccacccacaaaaataaaaagaagaaaaacacacacgcacacacacacacacggcgtacttagttcgttgtataccacaaaaagagaagagggaaaaaaaaatccgcttccggaggtagcattaattgacatataacactaatatttaaaaaaaaaaaaaaaagaactttagctagatgacaatcccaaacaacgttcaatcatattttaaggggaaaaaaacatcaataattacagggatcacgatgatgctaaaatcagggaccaataacaatgatgatgagcttacttgtgaacttcaattctttaggttgaatttccaaaagtttactcatttctccgctttatgaaaactcgagttcaaaaacgattctctctctcagcatccaaaagcacgcactaataaattaatacccagctctccactttacctgcataataacaatattacaagtatgaagtcccaaaaatatccatgcttaaagaaaatggcaaataggattaggtacgttcacacgcgcgcaaatattaataatatccaacgcttttggttaggttgccgtaggaaacgcctagagatcagaagatattaaattatacacaataaatatgtaattataaaaaaataattattattaaattgaaaaataacccaacttaagattaaaaaatcaaattaaaagttttcgtgcagaggatcccaagccaaaaatcacagagtaagagattcagagaatcgattcctttgttctttctgtcgccaaaattttctcaccaaacaaacacacagtccaagaattctaaaactcatcacctctctagtctcaacgatcaaacttatttaccagagctacattcacagttttcaactcgtgatcgatcgggaaaaattagtgaagaaaaaaaatataaacttacttaaatcctgacccgctgtggctgatcagtacgcaaaactaatccagcaaccgaaaatcgtttccaatccaggacttaactactcaacgcagaagagaaaaacaataatagaagtagtggagaaaaagcaaccctccgccgttcggaatcgtcttcttagggggattttgaatacagttagaagaaggggctgactatggagtcggtcaatttggaggcaaggagacaacaacaacaaaaaaaaaacttaaaaagaaatcaaactgatgcgtgaaagttccgtttttcggaaccaatatatataatattattataataacaataaggccaatctttggtggggatttaaacaatttgggagcaaaggacaaaccctaggattctagagagagaaaatgataaagagaagagaaaatagagagggagagggattgagagaggtaaaggaaaaaaagaaactgtggtgggtggtctggaacaaaactaatggccaaatattacttactataacaactggtgaaagcgtcagttgaaccagcagtttggagaatcggttcgggttcgggttcgggttcgggttatgtatggtatcaggttcggatagaataaaatcacttagttatgtttggcaacaatgaagggagaatagggtggattgaggatttatttttaccaaattatgattgagggtaaaagaaaatgatgagagtacattaatt

SEQ ID NO: 31970 - DNA, 1038 bp, Cannabis sativa
tcaacttgggagggcccaacaccaggtcaacttgggcgttgggctcagttttgaagccgctagatttgttgtttgatccccaagttcacttgtatctctgttatttctaatgacaaaaaaatgcatggaacacttttttaaaacatgattgaaaatagcacagttttgcaatatgtcaacctcagcgctgggcctagtaccatgtgttaacttgggcgttaggtccaatttaaggcctcttggaagttccgtttgctccctaaaagtagttgaatcttaatctttatgaatacagagaaaatttccaaaagacttttcggaaaaactcctcaaaatcggcctaagctgacaaaatgtcaccttgggtgttgggccaacaccaggtgtcaacctgagcactagtcccttgttttggcgcccaggttggcctacttcttcctaaaagtacttatttccccatttttatgaagacaacgaagatgcataagttagattttcagtttgatgcttgcaagtggcccaggttggcaaattgtcgacttgggcactaggtgctcaaaaatgaaagttctctgaatgtgattatgatgcctcaaatattatggtatatctagttcatgtcccaatgtaaagtttaacctattttcactaagatggtcccgaaaactaaaaccttagttggtttgtcaacatggacgctaggtgaaatcctaggcactcaggctgacttctgaggtgttgtttcgtgtgttttcatattccagggcctagacttggatgcttcatgtctttgtggtacattatactgaaagatggtgagttggaaacaacttttcaggatccaaatacccattctggagttcctagagtcaaacattgatgtccacatcatcagagaagtttttctaagttaacagtgtcactcaaactatcaaacaagtaaggtatgtttctaacttaaaacaagaatcttttatcaattgacatgtctcataatcatagatattcagttagaattgaaaattgtacactcaagat

SEQ ID NO: 31971 - DNA, 6467 bp, Cannabis sativa
tctcacaaatatttattatgcattaataattcatagaagataaaagataaatctacctaaaaaaagcataacctagtagaaaatagaaattaaatatttctcaaagtttgaaaaaaaaacaaaaaaatcataacccgagtataggatcatagtctcatacctctcaatcctcccaacagattacaaagtaaacaaagatgaaattaagaatcgagaagaaaatatctttatacatgtaatgcacaatgatcatcagttcactatcgtcattagatcttcataatttaaacatatgatatataattttgattatggatgataatcaaaaaaattttgattatctatatactatatatatgttaagaataaaaagaaaattatatatatcaatattggggtcggataatattatccccgcccccgccccatccccgttttgggtattgaaaatttcccccaccaccgccccattaaccaccaagacggggaatctccaccccattaggggcgggtccccgcagttacctatccccgcggtataaatttccatctctagtattaacacatatttttgctaaccaatattgagccttttcataataaatttaacacagatatatataagaaattgataagtataataataataccagatattttatgtggttttgcagttaaatctgcatactccacgagtctatcttattcaagatatttctggatatttaatacagtgttacaattagtaatctctctctctccaagatttttcgtccctttttctgtagaatctacacgtatttataggaatatagattggcagttatttacatttaaatttgaattacctaattgtttatcataaaatgtgggctttgatcacgttctatttaaacacgtgaatataacaattgataactgcactaagacttatcattcctatcttcaaggcagttagcactgacgtgggtcgagccatctccctttgcatatagatgaccaccaaataataacttggtttaattatatgccttccagcaacggaatgcgctctagtgtactgagcaaacttaaaaactgctcttcgaccataaaacctcgcagactagacaatcatgtccagcatgtttccaagttgttaaacttagttattataatgtggattatacactaagtgtttcaatagccaatttgtctcgtcaatattttcttatatgtagggagatggatgtcttgttatacattactcgtagttttctagggattgtgccctctaagggaagatggtttttcatcaatataggaattaatagtttgtgtatccttatctcgcctaaaactatacagtcagcgagttatgaatatactctattaattatatatttaatgagttattctattttacatttaatgatataatcgttattatatctgttagttcatattccacttgattgacacgtgtcactctctaaagtatagccaaattttatgtataacaattgccccttaaaatgttttttttaaacaaaaagtactttttaaatgattacaaagagtatattcgtcttaactcaatttgaaaaattgcatgcttttgaatttggcggttcatagttttaaggcacatcattagcatttaatgaccagtcttttctaattctctcttgttcctattcattggatctctattcttttaatctaacggtgatcaaactcaaggtataaaactgaaaaaggaaccgtttttctaccacttttacatttaaaacaaaaactttgagatttcctacgaaaaagcccattttgatttggcaaggctttccatgccctccttgtcattggcatacttcttgcgcatctatttggatatactgttcgacctcaagaattcaaaaaaaaattcgcggccttcaccccgtcctcaatttcagagctttttgtcgtacaaaaattcaatttcgaacggtaagtgattcacccccttttctctgatcttttctattttcatgggttatgatccttattctgttaattgtatcattcttgttccatttggttttagtaattttgatttatttttttgggtaattttaagggcttagacagagtaaaaaatttaggtttatcgtatttataagtttctggtttaataaatttcttctagtaattgggattgctctttttgtagagttctcccaatctggttctgaagtttattcttcagagtccttagaaatagaatatcttaaggagttagctcacccatacaaaccaaaaattctaaaacctccgtccaaaatggagataaacgatgcaacaattagggaccatttaataaaactcaatcaggatgaagttgctagtcgttataggcatttcctacaagaaataactaagggtaaacatcattacttgcgagatgcagcctggcctggacctttgtcgtgatcttttattcctttggctaagcccttgtttttacctagagtcacaattgctgtttcaccaggtgacctggattttcaaattatgtcttccaacccccataagtcaaagactccccaagatcctaatgtcactttcgagtctgagctcattgagtcaagaacaagagctatgagggactatgttggtggtgttttaaggacttgtggcatcaaccaaaagcgagggtgttgtgatagatttgttgcacctggtgaattcaatttttatccaccagaacgacttatccacgaggaacgtagggaggccagtgatgaagccagtactagtagctcggttgggataggcacttggagcttcaagcatatcagggctggagaaattctccccctgagagattattttaaagagttcatcaaccatcttggaatggctcctttccaattggttcctatttcctacagaatccttgcaagtctacagattcggtatcatattttaggatgggagtgtcctactccccaagatattgtttatctttattctgttaaggcattcctccgaggtatcattgtgcaaggtttttttactatcttgggactcatacaaatgatcataggatcattgtaggattaccaaacaagactgcttttaaggaggatttcttttgggacaaccaatctttccccaatcaacacgacaatatttcacattattcgtaagtaaactttatcttaaaaactcggtttcatgttatttcatatttgtaacctttggcctcgctgacttatctcatttattatgttgacagcagtctcaaaaagaccagttcccactcctgagataggtaagaggcgtaaagcttagctgggcctgctgtgcggactgcgatcagctgagtttctcttgaatgaagtcaatttgaagactgttggccttctcgcttcagacgagtatacttgtgattacaaatttcctaagtatacatcgtgggacaaggttccagttccagctgacgagcagagtcaagattatgtggctggggtgcattatctccaaaatgtaaccccttgggaagctgaagaagatgcatcctgaggtaattaatgtggatggtctcccactgctcttagggaaaaatgtacttcattagtaactttccatgatagtcggcatagcttttacatttggaaccctttccttatagattgtatcacgcataggtttgatagttggtatccacaattccatgttcaacttagttgcactagttcttactatgggatggtcgagcagtatgggactaacttggatagagagagagccatccaaattcagattggaatttagatccaattaacccctatgacatattcatgatcacaagactagggagtttagtgaatactatagtcctccttcttcatcatcagattattatggtaacttcccttaaatgggaatttatttaccattttccttttcatctatttttaaataagttttaatgcatctttttgtctcgcagatatggatttagagaatctcctccactcttcgagcaaaaaagggaaaaaagagggttgctgcctttgaaacttcttcagatgttaatgtggaacccctcaagagatccaggaaaaccactacaaataagaagcgtgcctcgttgtctatagacctcgaggctcctgaagaataaattcaagttcataccacagccattccacatctcgagaagccagtcctagagactcaccaggccaccacttcttcgagtaaggtacctgagacttcgcccatcgaggctgggggcactagttcagagtattgtgtgcaattttctacgtcctactagcgccatttccaatctttccagtctagcaactgggatttggtcaataatggcagcccaaaagagatgcttaagaggagtgttaccttcaatctctcggttagtttccttctttttttctttgtttttaacatttctttcaagaaccctcacgaattcatgtgcatttatttttttggaggccaccttcttatctcatgttgcccagagttgggttctcaataaagtaaagaaattggaagttgagcttcgtaaaaccattgagcaacgagaggttgttgctaaagaatggaacgatgcccaaaaggagatttcccgtctgaccaaggaggctgaagagatgaagaggactcatcagactgaacttgaggtaccccaaaaagaatccaagtacaagttcgaggcttgtcagacactccaagaaaaacttaatgcaaccactatgaaggtcgagggtgctgagaccaatgctaaagaatggtgcaacgctattgccaagcgatctattcactgagcttggatggcaaatcctgagatggacttaagtttcttggggagggtgccatagaagtcttagcctattgtgataaagctaaaaaagaagaagaagaggcagctgagtctgaagaagatgaagacccatccaagtctcctactatataggcttgggttttaatttctttcttttttatttagaaaaatggcctttttgctgagataacggttagccccttgtggcagtatttttgtaaagacaaatttgcattgttggatggccgactttgctttttatttatttctttttgtttattaccttgtatctttatatttgaacttaatatgtttgttcatttgcattttcaatcccaacttaaacaattatattttgatcaaacttaagatactttaggtaagcacttccattgatctcgttttttttctttgagattgcttaagtagttagtagtctactaatatgtatgtgagtagttatattctgctatgctttctcttcgcgagtagttcttatcagttctacttcgcgtgagcagttataatcttccatttataatttaataagcaaacttaaacataccttgaataattcactttatgaattactttgtacatattttgattacctatatgaataggtaggccttctattcatattttacgttaagtattatttttcaaggcaactctgtgcctcgtttatgatacatgcctgaataatgcgagctgttagatattcagcctcgcatttagcttaatgttgtttttatgagttaatctcatttacaactgctacttcgatttttcctttctgaagagaatggttcaatttttgactttatattgtctatagacaactttaatcaatcatccttatttggaaaaattttaatatggagtgtgcaatatatcatgtatctctagataaattctagtttatcatacacatatatatatgcccctcaagtaattttaaagaataaaactttgtaattacttgaataatacatcaactttatttataatgaaaatttacatcacaaagagaaaatacagcaattacataagtttactggtaataaggacgcaaatgttcaacattccagtggtttttattagcgagccattaagctgagccaatttataaaccccggttcaaactattgcctcgataacatatggaccctcccagtttcggttaaacactccagcagatgcatctctcgtgtttgcaaatactcatcttaacaccaaatctccaacagtaaagagctttttcttcactctcttgtcgaagtatctcgtaatttaatgttgacaagctgcattagtaatttgtgattcagtacgtctttcttcaagtagatccaaggataatttaaggagttcttagttttgttcttgattatagaattctcgtctatgagtcgaaatattaacttctatcggcagcattgctttcgagccggatgccaacgagaatggagtgtatcctgttgttgttttctctatcgttctgtgagcccaaagtacttgtggtagttcatctacccatctcccttttgctgaatccaacttcttcttgatagtatcctctaaggttttattagcagcttctacttgactattttctgttgggttttatgcc

SEQ ID NO: 31972 - DNA, 2642 bp, Cannabis sativa
aggggtttatttctgtgattttgccaactttgtgttgcaggtatttgaaaattaaaaaatattttaattttctaaagtgccaaagggggagattgtattgttagaccattttttttttggtaatttagttgtcaaaatattatttaatttatttgtaaattaaaatatttatcttgtgttaatttcgtggctttgattgctctttttctttgaaacttttatttacaattgttattttttgtttagcaaacatgtcatacaagagaatcaaatctctttatgaaaagttgtctatttttagaaaaaatgacttttgctttctctaattgttaatctcattttcgctatgtatatagtagatgaaataatttttatttggtaggtgttgaagaccaaatcgtgatcttggtcctatttagaaagtttcatgttttgtcttgatctgctgcagcagaatagaaacttgatgctgcaattatggatttttttaggaaagttttttacagttgtgtaaacgtatttgtggttatctttacgatttctatgttttataaataggacctaaatagcacacaaatgtttctcacatcttctagtttcattttttatattttcatctttatgaggagagaatttcttttgtgaaaacctaaagtgttcagctaggttttagtctttatttattgtgcttacactattcttagaataggttgaagaacttcattgaatacgagaagggtctttggaaattggaagaagacttgtcaaagtcttacttcaggagaaggtaagcactcacacatcaaaagacaaaggaatttccaatactacaaaaatgattttttctgacgtttttaaaacagtcatttaaagtattcctgtcagtttctataaccgttgcctatacgaccgtcgtaaaatgggaaaaataggcgacggttaaaaactgttgctaatgtggatttcccgacggtttaaaatcatcgcctgtaacagggtataagcgacgattttaaaccgtgtcctataccataaacgactgtgaatatgcatactgtgcaaactggttgaaaaactggttgtgagatgtcaaaatattaaaaaaaaaattaataaaaaatctaacaatattaatatcgttctattttacactctcataactctaaagatactaaataagtcctcataagcaaaagatggttagcaccaactagatggtatattgatatttgcataattaaatataataaggtcacacatattttaattaactaattattactatgtcttgttaattatttacaaggtaatacatttagataatggtaaatactgctagtattaagcaccgctaatactagatattgtagttaatagaaagaaaaatattaaaaagcactaataatatttagtacctttctaaatattaaaaacaatataataatttttaaaaaatattctaatcaattgcataatacatttagaaagttttagccactaccacgaaaatactaacagaattacttaaaaaaaaaaaaaaacagaattactttgatttgaatgagaaataaaaggaaaaaggagaggtttgaccgttgtattggagagtccaaagcagttgagcggtagcgacagtaatgattcggtttcagtgtttaaatgatatcggctgcatatgctctaacccaataattctctctaattacccgcatttcctctaatctcttccttctaacttctaactattccttttatcattttttaatctaaaacaatcatccataattcttcgaaatcttccttcaaaaaaaaagaaaaaaaattcttccacctcataattatgttcccttgaaaaaaaacgtatcagtatgtctacatttttattatattattatacttataatttcaacaaaattccacaacagccaatggggtgccctttacttctttttgaaaagaccagtgtacccttcttaataagttggtgcagtttctaaaaacatctagggctcattagattgtaatgaattattattatttaaaataatattatgtttgatattcacttatattaacatattaatagatttagtaaaattatactaactttattataaattcgatccaatctcgtaactttggatcacaatctcgaacgaacttaggaattagatccaagatttgggatccaaatcccaattctggtttagagtttggagttcagaatttgggtccagtgtacggtgcttgggcctaggtctaggtttaggtttagagccggggattgggatcgattttgggtgaggttcgggtcaagttctagtttcgagattggagtccaaatttaagtttaagtacaattctgaatgcagttctaagtctagagtatctctaatcttaaactttttctaaatattataatacaagtttatttatatataaaataatatggttcactcataataattaatacattataaaattttatgcaaaagtattttttcttgttatttaatataataccacttttaaaccctctaataaatcaacccgaaatcagtagatgagtacggattcttcttcatccaaaattaacttatatagctatatactatcccatatagtttcaaattttaccacct

SEQ ID NO: 31973 - DNA, 6879 bp, Cannabis sativa
  modified_base (37)..(43): a, c, t, g, unknown or other
  modified_base (324)..(341): a, c, t, g, unknown or other
  modified_base (648)..(650): a, c, t, g, unknown or other
  modified_base (814)..(816): a, c, t, g, unknown or other
  modified_base (1132)..(1132): a, c, t, g, unknown or other
cgctcttccgatctacatacttgtgagtagatctaannnnnnngtaaaataatttccaacagatcatactacaaaattatcctaaataattaggagcaagccattactggcacaaaaatattaaaagggatcaaagtaggattgggcatccgatccaatctaatatgtttctcctcattcgatccaatccaattagtaattgaatttagaaaatcatcacccgatccaatccaattagaccacaaaattcaatccaatccaatctaattactaattggattggatcgattttttaattggatatctaattacacacttaaattnnnnnnnnnnnnnnnnnntatgaagaaaaatacgtaaaaattaaatatcactctttatttaagttcaatactccataaacataccatcgttacaagtgtaatacaattaaaagtgtcaaataattaaaattacaacattgctaagcaataaaaaataaatacacaaacaaccatgtgttacaaattcaacacaaaaaaaaaatccaataaaaatatagttaatatattttttaaaatattatttattatagggtaaatacaattttggaccctaagttttgtaaaagttattaattggaccatgtgttttgttaaatgacaaaannnaccctatattttttaaaatggtaaaaataggaccctgagctcaattttcaataattttcttttttaatataactagtttaagacaatttctaacacgaattgatatagaaaatgttaccagttttatcataacatctctagatcagattattattaagttttannntgacaaaaaatcagttcagggtgtacaattttttagaaaatacagggtccattttttcatttaacaaaatagagggtccaattggtaaattttacaaaacacagggttcaaaatggtatttaccctttattatataaataatttttaacatatacaaatgtaattagattagatcggtttttaatattaaataccattttggaccttgtgtattgtaaaagttacagattggaccacctattttgttgaatgacaaaatgacccctgtattttccaaaatggtacaaataggactctaaactgattttttgtcaanataaaacttaataataatccgacctagaggtattacgataaaactaattaaattttctgcatctgttagtgttgtcttcaagttggttatattaaaaaaatattgtcgaaaattaagttcagagtcctattttaaaaaatacaagatttattttgtcatttaacaaaacagagaatccaatctgtaacttttacaaaacacaaagtctaaaatgatacttttagattttgaaattgacatcctacgatccaatccaattaaaattcaacttttaatatacaatccaatctaattgtaaattgatatctaatttttaataatttgattggattagatcaattcaattagatgttacccacccctagatcaaagccatcaaaattatggtgcaaaaatcctgcagtgaatactaggtctatatcattaattatgcttaaaatttataaatttattaattatccttatagttacttttcaagtcaatgcaaaatgttagtgtatttgggcattcagatgtcttaaataacaaaaggtaaacaaaaatacagatccttgaaactaaattacatttgtataccctcgagctctctgcagacatactgtatctataaattaaattaagaaatgaaagcacaagaatctattttctagcttagcaactattatacatagccccttctcaaaaaatgagtgattataaaatgaaccacaatccgataaaatcagtaaaatgggactaaattacagaggtggagatggcattttataattcaagggtcaatagccatgggagtaatgcgcctcttggcagacttattattcacaatgggagtactagttgaggaggctggtggagtttgtttcacttcagtcttttccccttctgatttcgtagtgtcgttcactgcaacagaattatcgtttggagttgcttcaattgccatgtcttctgccttctgaataggactttggctatcatctgtcattttgtttggttctagatcagaaggaaacaaaatgttaaagggaaaaacaaaagatatgatgggctaatggaaagtgaggacagattcaatgggtgagcaaacctggtaagataggagatcctagttcatcattttcaaattctactaaagtgcagtacccatcttgagatgacagcgctaaataacgagcatctgatgaccttcaaagaccaatatattcagcttttattgaaagaaaaaaaaaacagaagctaaataatcattgtaactaatactgatgttcttaccaagcaatatcggttatagcagcatagtgaagaccggccagtactgcaattggagaattactctctgtgtcgtaaacatacaaggaattcaaagtggccaccgcaaaaatgagacgataagggaggttaaaaagtccacctgccaaattcaccaaaaggatgttcaagtaactacatttacaagtcagctaactctatgggccgtgttagaaaaataacaatgaaaaaatatgaatacatggatttgatcctcggaggatgaaacgtaaagggcagaagcgaactgctactacaggtttgctggcaccaggaagctgtagagctggtctgcatattgcaagagcataaagtttatgaaagtgaaccaaagaacaaaatatttcccaatgaaaggttttttttccctttttttttctttttttttttttttgaacaaagtgatgatataagatgattttatacattgtattaacagacacaaatttgaaatcgttattttgataattagataaatactactatggtgtgattaaatctatcaaaaagaaacttgaaattgttaacaaaaaaatatttagatacaatactttaatgctgaaaaatgagagttttctcttaccttgtaagatcttttcgagaaaaaatataagctgtatttattgtttccactgaaggcgaaatcttggaagatcctgaaaaagaaaaggtatggtacacatcacgacagaaaattaatagacatattacacacaaacataattgtcgtaataatagcgtagaaacagacattttctgcagtaaactgattcctgaacttaatgtgatcattaagggccaaaagctaacaaaacaattgaggactttttccttatgttccttctgcctaccacatataggttgcaacttgcgactactgtggaagtatgaaataatcgataatgaggacctttgcatctataagaatttataagataatgatctactattgtaagaacatgaaataaaattctgggatatcttctaagttgactcctatataattcagatcataaatccaaacagccataatgagagggatagaaatcatttagtaactcgaatggtttaaattgaactccaaccatagtaactttcatttcttttctttgttctaacaactagccaaaagaaagtttgtttaatactgtcaataggtatgtatacaaacagtcagggagagcacttaatatcaaattttagttttatgctaatacctgctggcacaagcaaaaatgatccatcaggtgaccaggataatcttctgaagaaagatggcaatgtctcgtcatgaaagagatggttttttgtagactgcactcaaaaggcatacagaagcttcattagcatgtagcatgaataaatattaattacctaaatagatctgcaatatactaaccttacaatcatctgacaattgttgttctgcttttgcaattacatgctgacaaacataatttattttctctgtccctttggactttgtttgaggcttattgacataaattctgcaagttctatctgaactaagagatgcaacatacttggataacggatcccatgcaacaccttgaacataatgaaagtgagcatccaaaatctgatggacagaacctgaaaaatagatgcattggtagttagagtagaatatataaagcatttgggagtattataattgtccattatctgacctttattcacatcccatatgagacaagaattatcaactgatccagaaataagaaatgcaccatcagcagaccactgcaggtctagcacatccttgcgatgaaaactggcaagagacaacatccaataatgagcctaatctcaagagttatacaagcaaaataaagctgaagttcaacttcaaaaaataaaaaagtaaataagcacttctttgaaagcaaacatcatgggccaactaggcaacagaaaaagttttatagccccataatttaataaggcaatacaaattgcaataatgtcggtagataagttagctcacaaaacccaacaaaaagacacgtatttaacactaaaatatacagtttgttctcattttagttatatacaatgtaggttgattgtatcagtagagcttcagcttacttgaataatgtttatgatagtagcaaagtacatttgagcattccatcaattttgaaaattgtctgcctagcttatatttggcctaagctaaatgagccaatatcaggatgaagctgcaagtacaactatatacgacgtgaaaacagtcttgctaaagattaaagccttacgaaaatgtcttgagaagcttccatgtttgacctgtttctgttggatgcagcttccatatcaatagctcgccacctgaaaaatgacattcttagatccaacgacattgtcaaactaaatcactaaactaagcaacaactcatgtggtccagatcatgttaaaagaaaatctaagggtacaagccataccatctgcgccagaagcaatttgttctcctgcacgtcaatgcagaatgcacatcaatataaagaagcatagagataagcacaattacacagaaacagtcttaagagccgctgctactaattagtaaatgtaatctaaaatcttctgaagtgacttatatttcataaagactaggggaaaacacataatagataggcattgcatgcaacaaatgtgaaaaagctaattgataaagatgaagccaccaaaaaaaatgacaaatgaacctaggaaaatgatacataaacacatatatatacaccaccgatagagtttagcagcatacatccatttgaaacaaaacctataaattatgccaaggttctggcatttatccagttgtcagcgtgatttagatatttgagggcttgaggctatatcaagcttgcaagacatctggccgaatcaagataaaatatagcataacaagaaacatgagatgagatataagtttcaaacacatacatggtgaattttaatcagataattacataagttttgactaaccatacggtgaatcttgtaatagtcaattcattcctaagaagctgtcttggttaggaagggaaccgccattggattctctaacatatgttagcaaatatgcatcatgctgaccaatattgttaaggtttctcatgtttctatctttacaccactatcatgcacataataataatgcatttcaaagataagataagaaaagaaaatcatcattttgaacaaaacaacattatagtagatgaacccagagtcaccattactagcaataaaaatgagatttacagctgcaatttaattgatattgatatcggtaccagatggagagaaacggaggacattcacagctgcactatgatgagaaagacagcactgatacgaagctgtgggcacttttttctctgggtcagctgaatttattaaccatatctggtaaaattaaggataccttaatgattaggtcgaaattaatgacttaaaagctaaacaacatcacttaaacatactaaatagtcagcaatatccaataaaattattcacattgggctcccacatgtgtaaaagtacaaatacgaaaccctgaacaaaaccaataatcaattttctttccattgaaaaaccaaaaattaatgttcgattactctctaaaaaatatctaaattggtataaatttatacaaatacatacatacatacatgcatatatatgtaaattgcaatttcagaaagacccagcactgccactaatctaaacttcgatgtctgcaatccatttccctttatttcaattttttcggtggccgaacatacgggaaattccaaccaaacatactgaattcgattataatagctactactcgaaaataacgcatgattattaagatttgaaaattcaagcgaaaacaaaaataacagagcaagcgaaaccgaatcgagaaaagaagcaaaataaaaatgcaatttctggttacaagggcgatacaggaaatttcctaccttaatttcgaagtccgcaccgccggtagcaagagcaccagaaatggggtggaaatcaagggatagcactggtttgagattatgccagttaatctgaaccgtcccacccttcattctttttcttttctgtaagaattaatttgatctaggtttggtctgagaagatgaagcagaattagggcttatgattttcattttggcgcgattttctgagttggcgggaaagtgagagtggctgtgtgtacccctcccattttgacatctggcagcagtaagctctaaagtatgaaaagggattttttttttttaggggtttttttattggttaatttttagttatatacgtaattatcaaaaaatatcttacatataacgataaaaaaataaaacatcctatatatgtatatgcttaccgaaaattcgaaaaaaactcata

SEQ ID NO: 31974 - DNA, 5243 bp, Cannabis sativa
  modified_base (191)..(215): a, c, t, g, unknown or other
ggtgtaagtatactttatcgctgactatcacatcagtgtaaattcagttcactaataaataaagggacattatcttttgaagcatataatcacaattaccttccactgtgttgacatcactgtaattgtgaataactatatgtttcgatttaacagattttgtacccattaaaccataaacatgaaaactnnnnnnnnnnnnnnnnnnnnnnnnntcttctattgataacaaatcagataatattgaaatgggttttatttagggcataaaatcccaataatagaagccccatgcggcattcttccttgttggaatgaccttgaccgaatagagatactcgatttctactggtgtggggcattcctagttaagaattttatacaaaaccttcaaactagcgagaatcctgtaagagataggattcagttggaatggggaaatcccaaggtgatttatgtaatccttgaagtagtctcgaagagggagtatggccactgcactaatatgctccaggctccaagcgcccatgctagtcgagccactgatactagtctcaccactaggccttggggtactgcttgaaaagcgtgcaggaggaagcaactgaactcaccctttcgtactgacctaacttggcatgatcgctcaagttcaattccacaggtcttcagtatatcgcatgtgtagcctgagatagatcgcacctttgattctattaactcagcttcaaaggtgactctggggtcctgagaagtctttcatgtacgtggcttgggaggcattatttcaaaatccaagtcacctggttcaaaaacaatcatgacttcgggtaaaaacaaaggcttttccaaaagaataaaagataagctgggaggtactggccaggccgcatctcgtaagaattggcgtttgccttgggagatttcttacaagaaatgcttataacgactagcattatcttcctggtgagttctcacttcatattccctaaccctagcatcgttcaactctaatttggaggtggattttaaaggggtgggtttatatgggatggttgattccgtaggaaactcaagttctaaatcttttggacgataaattcctgaaccagagtgggacattgctgcaagcagaaagtggtcccaatccctggagagaattttatcaaacccgaaggtgatgagttggagattctgaaaaaacctacgtattgcttgaaccctagtatcaacctatatacagtttaaccctaaaaaactatcaaaaccaaatgagatggcaacaatacaaacaaattaagcagcaattaaacacaatgcaataagcatgtaaaggaggaaagcaacttactgtttgaagttagggcttggggcagtgaatggttattcggtctgcaaatctgcaagtgtagcaaggatcgctttgagaagatgaagtcggaggaaacttgtggaaaaaatgtcaaggacagggatggcactcaggcaaacttgatggtgattcttaacgaagaagcttaaaaatttctcagacttttgagaatggaggaaataattgaaaggtggttttttttttcttactttatactcatgatatcggcttcatcagatcaggaaaatatttgatcctacggatagaattcaaagtgaaagtagaaaagatggtcatttaatgctgatgtaccttgaaaccacacaatctccaaaattagaggacatgcgtcttttcaaaagggatcatgacaaaaataccctttgtaatcattaaaaagcactttttattaaaaaagaacttttcaaggggcaattgttatacccaaaatttggcgagcacatcagaggaagacacgtgccaagttgggaagaataaagaactcaaacacgtaatcataattacacttgaaatggaataactcgttagaagcataattagaagtgtatgtttacaactcggctgactgaatagtcttatgcaagataaaaatgtactaactgttgccttgtgcctccatgagaaaccatgtaacttcaggtgtacaacacgaggcactaacctgtcacttgaaggagatatagtgataatggaaatacttagcgtgtagtgcacggtatacaaactaagtataacagatgggtgaaccaaagcgagagatagcgaggcattcacctcgctgtaggagggcgtgcacacgaaaaagatcctcttgtcaccagaaactgtagttatcagaattaaagtaaaaacattatcaaccttgggaagacatatgacgagctccagttcgccatcaaggttaactcgaccccattcccagcgagacattctaatacgataaggcttaccatatatctttaatacacgttcattttggcccagtaaaagcggtatattcacaactctgtgaatttcaaataaaaactgcaattacttaatgcgatatgtaataagatcccatgatttgaggggataattattgtacagagtacaatcaactttgtaattaactgccttctatgtgattataaatagtggcatgtaagacaaaaatggggagacgaaaaaatgatacaagagaggccctgaaaaactatcagaaatctgaataagattgactcgtggactatgtagaattttaactgcaaaatcacgaaaagaatcattgtgttcatatttttttattttacagcttttattttttctgtgtgagattgtcaccactaggctcaaatttggttaacgtaaatctgcgttaacatgtttaattcaactaattttttttttaattttaatactttgagaaaaataattatattaatttttttatattaatactaatattttaatactttaatttattatattcatatacattaataataagaaagaaagataaatactaacggacacatataatagctaaagagaattttagctcctcacttttttatattttagcatttatagtatattttattattcatttatgaatatgtggtattataattttaataattatatatatttattgattatttaaattttgcatcaacgatggtaatttttcataggttcgtcgcgaaacataagttaaaaataaaatttaaaatataatttacttttgtagtttataaaaaaataatattattatttaagcattttcaattgttctttttcttattaaaattataataccacatattcataactcagcaataaaatatactataaatgctaaaatataaaaatgtgaggggttaaaattgatgcttttgttgcacgtttatgttctagctattatatgtgtctgctagtattttttttttcttattattaatgtatatgaatataataaattaaagtattgaaatatttatattaatataataaataaaaaaatattaatatgattatttttctcaaagtattaaaattaaaaaaataaaattattcgaatttaatacaaaaacataaattaaagtaagtaaaataagtaataaaaatatcaatatctaatagtgggaactttttttttttgttttgagaattaatagtgggaacttgatgttgctaaagaaataaaagtttggcgattaatttatcaaaatataaaatttgaagaccaacttgccaaaatttatatagtttggagattaatttgccaaaaaataaagtttgaggactaactttccaaaatatatatagtttaaggacctacgatataaataagccatatttattttagggcttgagcaaaaattcgtgctaataacgtgttataaaataatatattagataaaaaaatagaaaaaaaaaaagagaaaacaaaaagagtgaatgaattttttgtcactaatttattttaatataggctgaattcttatttatataaaaatataactaaaataacaagaaactaaataataaaataaaaaatacaataaaacatttataatgataattaacttaataatttaaacatttatatataaaatattttaatccttttttaaaaataagttaattaatacaatggcaatcataaattgtttcattcttcctttaacaaaaaaataaaaataaaaaaaatacaatggcaatgaatttggtcatagtttctttgtatggtagttaagtcatgacattgaataagtacatatcaaaaagaaagaaaaaactgtctcatctttatctttattttgcttataaaaaaaattaaaattcctcatacaacaactcatatgatttatttccaaaataattcatcaattatttaatatgacaattggcatagcagtattaagaccccaatgaaacgcacgaaataccagtcaagtgggggccccaaatagttggcaggggtcatgattgcatttgtaaaatgagcttacgatgagtccgaccgcatacaatccattctccattgaaaataacggaagtttggtttgagctggatcacattgcgcacgtactgtcgttgccagcaaatcagcatccgagtcctttaaaaagtacaattattaaattttaaaaaataatttaaaacaaaatgagattgggttataaaaaaatatataatatatatcctaatacgttgtcgttttgtgcggtgaatgcacgtacggattgggtcacagccacaaaacaggttgatccacccgataacttgttggagctccagctgtgtttagcttaacaaaaccagttggtgttgttctcattaaaccacgtcacttgggtcccactctcagtgttcctaatccaattggttgatttacttagccaagatgagaaacaatggggcccaccacactataactaacatagtaacaacatgagccaccaattcatcacagccgtttgtttggcttcgcttaacgacgagaatgacatcttagcttttttgtcactttccatcaaagataaaaaaaaataaaaattgatgcttttgttgcacgtgtatgttcttacattttgatccaactttaaaatataacatacattattttattatataggatcgaattcataacaattgaatgaggaatcccaatgttttaagttatattttgttataaagaaaaaaaattatattatttggtaacctactacactaaattaaagctagtgtttttagtaaatatactgttgttaattattacctactacactcttctcttgttaatatttcaaaaactaaataaaaaacttatcatcatacgatttgcttggttttttatttttt

SEQ ID NO: 31975 - DNA, 1686 bp, Cannabis sativa
tgaacgttgtcgactacaccatgttgttgacagcattggagaaatctttattagaatgcgttgagacagacagtctatttctaattaaattttgtttggtggtgatagggacagtcctagtgccaaaaacgggctacgatatcatttcggggtacctacactcccttatgattaccagggacattcgccacaagaactgggcaattgtagggttcaggtatctgatgaattcaattttcagattctgaaataagcatacgaagaatgtgtctggttgcaccatattcctgaaggtacattgattttgttatctttcatttatgtgaatgtgtttattaacttgataatataatattttgatttaatagttgaatctattactaatacattgtttgtttgtcacggttgatgtacttgactcacgtcgagtggaacttttgctatgttgaccaaatagtgctcctcattgatttttggggtagtaaacaatgtaagtccccttacaaatttgtgaaagacaataggggtcccaacagtgacaaggtacatcgaattttggttatattgtggtaatgttattttatttgatattaattattttgagattgaaaaattaattttgtttaacttgttctgtataacagataaagcttacttcaaatcctgtaatactgcccaactactactccgactcggaaggaagaaagagcactgaacagtttttcagtgctatcaatgagttgaaggagtacttttccaaggagttaaagtctcagttcaaatcattttctttgaaatttatggacaaaggagaaggtgaaggtggtattgaccgagatttggaggaggatgttgcaggagaagtggggaagaaggtagagtgtagccgggccatggaggagtccccgtcgaagacacctatccgttcgaagactaatgttcttgggcaatctgagaaaaatcttgtggaatcattatcaacgcctttgttatctactacaaaatccattgaagatgaatgttatgtagagaagaccattgaggatgacaactttgatatactcgaagttgcgtcattctggaataaaggcaaatccctcgtcaaatcgaagaagacacagtctgacaatgtggtcttaattcaggatgacttcaatgataaggcctatgacgaattcattgactcgggcaaaactgttgtttggccgttcgagacgaaggaagcgatccatcgtaagctgtttgggttttacaagttcgtttttagcaacacattagatctggggtaagtaaatgttattttggtattcgtgattatcatatacttataaaaaaatttaataacagttacatttattataattgaatcaaatatgtgcttacgaaatttggaaagtttgaagtggataggaggtgcatggcatcgttgcgacccttgcgagaagttcagggatctgtaagtgtgaaattggttactaaatatgtttcatttcttgtacatgtctaaatcatatttcatcttattgctgatcattgactgttattctcaaataatgaacaaggacgaagatcaaagccgactaccagaccaacctcgtgtttggtacatgcccacccacatctcgataatggctttgttatacaacttaatttaattttttttactaatttagtttggttggacta

SEQ ID NO: 31976 - DNA, 2852 bp, Cannabis sativa
aggatgttaatgaaacatacatggtagtaaatcaagatcctggtaaaatatttccaacagtggtgacctttgattatcttgttgtcgagggtttcgaaaaaaagatggctataattattacttttattcctttgaggtgccacgtcatcagaacccttcgggatttgtatagacgtgattattggtaaccgttggattgagagactttaggccttccattgccacgtgtttccatcccaataaatgagggattttagtatttaaactctctgatacgaaattatcctttatcctttagtatttaaactctttgagttttcttcatctgaagaggacttagcgatattcacaaactcacggaaagaagaaatgcacttcaaggttagtgaattaccatttctgtaactatttttttttctttgagagtttgtatgcattctggtcttttagggctagaaaatgcataaaatgataggatttgttatctgtcttctgacaaaataccatattttcctgagaaatatgtgcctcaaacttgaataatcatgagtttcaagaagaacacttcgagtattcgcagatttcttgataagtatttcgaatactcacaagtatttggtgagtattttgaatgctcgcaaatttcttcgaatatcctaccataccaattactaagctttttgtctctctttttgctagaatttactaattcttaggacattttagcttttaggttgtatgtattattgttatgaaaactacctgagttctcaaaatggtgggtgtgtcacagtaacttaatgtgcatgcaatcatcacatgccccttgggtcactatgaagcgcccagccatttattgagatgtgtagctagttttcattttcctggtcttatatttgctattggaactaactaggttcttcaaaatgttggttgtgtctcattaactcaatgttcatgcggtagtcgcatgtcacttgggatactgagatacacccaaccatttctggagacacacgattaactttatctcgcattttactcatcactagaactgactatattcttgaaatggtgggtgtgtctccgtgtcttaattttcatgtagcaacatgacccttatgtcactgtgatacacccagccatttgtggagatgcttagtcagttctttgatgttttttgtttttgaattctatgcgggtgagggcactttattaaatttgcactttcaccacactgataagatcttctatcttttagatgagcgacttgtaagatagtcagagactcgattctagaagagggacttccgttgacaaaacataaagaagcgataacttcatacccacctcaatatttgaggataaggctcctgcagcaaggatgcgtcagggcttgctatccactgacgagatagataggatggttcaagaacttgctgaaccattaacgatcgaagtatgcaatagtgagtccactgtgttagcccagtgttatctcgttcacttgagacatgctccaaacactgaagctgaagaaatgggcaaggatttcgaggtaccagatcgcaattctcaggatgagggggatgttgaaggaagcgagacatatttggttgatataaccgagtgaatgaaccatttttatgtaaggatctagtctcgagagtcaagaaatctgacttgaatatttaatgcagatttttgttaacgattatgaacccattttcgtaacagatatggcacaaaaattataagaaatttgagaaaactaatagaaacaaaaataacaccaggtttttacatttcttgcagttaactctgcatagtccatgagtctatcttattcagatatttttggatacaatattaaggttttacaattagtatatgccattttctctctaagatttttcgtcccctttctctgtataatttgcccctatttatagtaatatacgtaggcagttaattacatttaaattcaaatcccacaacaatattctccgaaattatgggttttaattatgctccactcaaatacgtgcaattaatatttaaaaatcacacagctgtgatttaaaccgtctttaaggaggtcaacgctgacattgattaggacacgctaccaaatgtaccttgctgaggcgtgtcaccttgtacataagtgagtgacttagtttacttttattccaacaatggcatgagcaccagtgtattgagcaaacttaagaattgctctttgaccataaggccatgaacacttgacaatcatgtccttcaagttattacacttagttattataatgtatattatacgctaagtgttctaataactaattcacctcgtcaataccttttcacatacagtgaggtagatgtctcgctatgtgttgtctatatctaccttggggttatgccttccgagacaagattgtttctcatcaatacatgaattgatagtttgtatatccctgtctcgcttaatactatacagttaacgagttatgaatatactctattaatcttgcatttagtgagttactctattttgtatctaatgatataattaccattatattcgatgattcgtattgtctgagattgacacatgtcacctttcgaagtacaacaaatttttgggtataacaatggccccttaaaaattcattttttaatagaaagtgcttttttaaacgattactgtgggtatttctatcataatctaatttcaaacattcatgcctttgaatttggcagttttatggttgcaaggcacatcattagcattaatgaagcatcttttccacttctctcccatttctatccgttggatcttctacactttgatc

SEQ ID NO: 31977 - DNA, 2111 bp, Cannabis sativa
agtatgtttataactcggctgactagacagtcttatgcgagataaaatgtactaactgttgacttgtgtctcgacgagaaaccatgtaaatgcaagtgtgcatgacgacgcattaatctcgtcgtgtggaggaaatataataacaataaaaatacttagcgtatatgacatgatatacaaactaagtataaacagaggggtgaatcaaggtgatagatagcaaggcatctatcttgctgtaagatggcataccagcgagaaagatcatatcgacaccagaaactatagttttcataattaaggaattatcaaccttgagaagttatatgacgagccgcaagtcgccatcaaagctaactcagctccattcccagcgaggcatcacatgagatgaggcttaccaaatatctttaatatgcatcaatctctgcccaataaaagcgggatattcacagctgtgtgaattctaaatataaagcacatagtgtgatttgtaatcaaatcccataatttgagggaataattgctgtaaagattacagtcaactttgtaatttactgttcactgtattattataaatagtggcaaacaagatcaaaaaatggacaaaaaaactcatacaagagacgccctgagaaagacaatcagaaatctaaataagattgactcgtggactatgcagaaactcgagcgaccagggattataaccctcctttgtagtaggaagggacaccttggttatcttgagagggagtgagtcacgagaatacaaggggcagttaatccgataaagcaatcttgtaaaagaattgcgacgtgagtagatatcggcccactatggttgccatatcaagctgccatggaaagctagtcgtcaaccagtagcagtcaaagacaaacaactaaaaccaggattacttcacttggaaccccaggatatgtctgggattaaccctggatattaaaacaattgtgggagtatgttagggattgaccctgaacatccaaacccgttttatcaaaaccagatgctcttggaagattgataaaataaacgattgaactggagaagttcttatgagattaatgattataaatcacattgctgataaaatattttgaacttcaattgtgaataaaataatcattcttttcaaattacttgaggggcatataagtatgatcaaccagaattaatctggaaatacataatacaatgcaaacccatcatttcagaaaataaaaaaaaaattgaaaacttttttttaaaaaaaaagtcctctaccaaacctttttgacgaaagaggggtcgaactgttataactctctgaccaaacttttttaacgagagaggggtcgaatcgttataacgccttgatcaaacttttctgacgaaaaagggatcaaacaactgtaatttttgatttataacctatctgacgagaaaggaaaatcaaaagttatgattagcgcataaagctgaatactaacggctcgtgctaagggaaagtattaaatgagacatcaaagtgtcttgaaaaaatacttaaacctaaaacatgggtagaaaatttaactactcatgtaagcaacaaaaatatatacaagatgacagggtcattaaaaatatatttgagtttgcttaaaataagatcattttttatgatcgcgaggtggaaccaaggatggctcgcagattgagggcaaggcagataagctgttcacgcgtaaagtaggtaattaactacttagcgtaagaggaaaatacgggcaatgggaacccctaataaactttatgcatgtaattgcttaaattgtgaatgaaacgcaagcaaacatccacatattaaagtttaaacttaaaagtatgaggcattaaaaagcaaagttggccatccaattttacgaatctgtctttataaacaattaatattagaattttttttttttcaaatggagtgacatgcttttaaataaaggaagattctattaaaattacattaaaaatgttaaaccaacaaccagttaaataaaatatatatcttaatgtatatgtcacttatattttagaggagtactatcgtcaatcttttttataattttttagtcaa

SEQ ID NO: 31978 - DNA, 2671 bp, Cannabis sativa
  modified_base (871)..(876): a, c, t, g, unknown or other
tgatattgaataaaatggattacattgtaatggagttttatttagggcataaaacccaacacttaaaacttaggattacttaaatccaggtgagttgaagctcaaagttggtaactgggaattagtgtcggtccaagctagaggaaaagatcacctcaagtttcaaaacaaatttttgatgttagacaatgttttgtttcttccaaattttagtagaaacttgatttcattttcatgtttacaatcacaacattttcaattgaatttttgaaattctatttctactatttctcgtaatggcattcaattatgtgttgctcgcatggaacaagggctttatgttttaagacctgatataccaattgcgcttatgaacgaactttttaatattgctaaacctagaaactataagaaaaagattgataatgaagatgaaacatatctatggcatttacgtcttggtcatatcggctatgatagatttcacagattaactaaaggtggtccattgaaaaatgtcaccttgaatgaaataccagtttgcaaatcttgcctaaaaggaaaaatgactaagcgttctttctctacaagggagagcgtgtcaaaaaacctttagggttagtacatttagacgtctacggaccactaaatgtaaaagcaagaggaggttttagtactttgtcaccttcattgacgattactctagatatagttttcattacctaatgcaaaagaaatctgaaacatttgagaagtttcaggaatttcatgcttagactcaaaaccaatcaagtaaaacattaaagatcttgtgaactaataagggtggagaatatattgaaatgtcgttcaaagatcatttaattgaacnnnnnnttgaatcccaatatactgccccaggcactccacaacaaaatggagttgcagagagaagaaattgcacacttttagaaatggttagggctatccttagctattcaactctgccaacgtccttctgggatatgttgttcagatggccaatgatattttaaatgtcgttccatataaatcagtccccaagacacctgtagaattatggaatgttcgtatacctagtttacgctattatagaatctagtggtgccttgctcatatcttaagaaagaaagaaggcaagctagaagcgcgaactgaagttttcatatttctaggcaattctaaagagactagggatggactattttatagtcacaaggataataaagagtttgtttctacaaatgccactttccttgaagataactataataaaaacttcaagccacaaagcaaagtagtattggaggaaatactttcagaaataactccaactaatgttccatcgtcttctactcaaatagaggatgatcccactcccttggttgaaccaatgcaagttgatacagccaaggaaactaccactaatgctcttgttcagaagatcacggcttctctttgtagtgggagggttactataaaaccatctcgttatggcttagatggtgaaatcaatatggtcattggtgatggtattgatgatgatccattaacctataatcaagtgtttactgagttttttttgcaaccaaatatttatagagcttaggaaagtaatgaaggcgtaaatagcaagattatagacaatagatttttacatggttcaggcattaattattcttagtccgtgagtccattttattaagctctttggtcggtaattatttatgcaaatacaaaaaggatggactttactccaaaccactgtgttcctcttgaagaagaggaagcttagtaggaatattctggagttaataatggagttacagtaatgtgttttatagagaaccggtcttcggtttcaagatgaagggttgaaggaggaaaagagaagtcaagccttggaatcccctgccttgcgtgtcttcaagggtttttataagccgatccccttgcctgggtcacctttgatgaattttcataaggttgaacccccactttgaacttgtaggtagcatattttccatatggtgtttatcaatgtaagattggactggttgtactggcggtgctttggacgcgtatcattctagggccgtccttatttgaatttcccatattcctagccgttgcatttgtttttcacagtacacaaggacacgcatactttgcatggtagcgtggtgtgggagacaacctctgatatcgtacatatgaaaggcgcgattagtgggcctgcaacctggcatttgcgggctgatggttcgagtcaaaagagttccctaaaccaatgcatcctgatggacggtccatattctttgcaggatcaaagggtcctgtcttcaagaatagggaatgatactagctcgcggacatttctttcatggcctcttttctaggatgacttcttttgcgaggacttattctgcaaggttcatgctgctatcttgctgaagcgcaaggcgagacacttaggtagcttaaataatttttgtttctctttaattaatgtccacatgtcatgcctgcggaaatacggatacactactagaaaattgggttttagtgacacacattgagtaactctaaaagtgtatagtgacacttcaacgcgcatcactaatgaggctgactggaaaagcagtttttagtg

SEQ ID NO: 31979 - DNA, 3098 bp, Cannabis sativa
  modified_base (2509)..(2512): a, c, t, g, unknown or other
tatctgaaatggcccaatgaacctagggcttaacttacccctattctcgaagagtcttatacctttaacttgagaaacccccaggaaaacacgtttcccctgcctggaatgtaatgtttctgtgctttgatcaacataacgtttttgcctgctttgggaagcaagcatctgagccttgatcttgtctatagcttcattggtcgcaatgaataggggaacgacatttcctaccatacaacatctcatagggagtcatccctattgtagtttggtagctgttattgtaggagaattcaattaaaggcaagtacttactccatgaaccttcaaagtccatgcactagattttctgattctgagggtgaatagttgtactaaacttcaacttggtacccatagccttctgaagattcacccaaaattttgatgtaaactttcaatttctatctaaaacaatagatttaggagctccatggagacgaactatctccttaacatacaattcagcgtactgatccactgtgtaggtacttttcactggcagaaaatgagctgactttgtatatcggtccaatacaacccatactgaatcatacattctcgtggttctagcaaaccaaccataaaatccattgcaatgtcctcccacttccacttaggaagggctaatggttgcaataaccctgccagcatctgatgttcagcctttatttgctggcaagttaaacacttggacatgtactctcccacatctctcttcatcccatatgaccaaaacgagggttttaaatcctgatacatcttggtggttcccagatgtagtgaataaagtgtggtgtgggcttcatcgagaatttctttcttgagctcattaatattgtgaacacaaacccgagccttatacagtaacatttcattattcgagattgaagagtctttagccgaccaaccatcaccttatctcgaatcttgattagcttaggatcttccgactgcggttttctgattctataaagaaagttagattggagtgtcaagttatgtaactttccaactacaaactcaatccctgcattaaccatctctgaggccaattgaggagctatcactacagtagtgaaaacctgcccgggacctcttctattcattgcatctgctacaacaatggctttcctagggtgatacaaaatcccgcagtcgtaatctttaaccaattccagccaccttctctgcctcatatttaaatctttctaggtgaaaaagtattgtaaatcttgcattcttcaccataaagataatgtcgccatatttttagagcaaatactacagcagcaagctctaaatcatgcattgggtagcgctgctcataatctttcagttgacgggaggcataggctatgactttgtcagcttgcatcagaacacatcctagaccctgtctggatgaatcacagtatataatgaaattttcgcgatctgatggtaaagctaacactggtgctgttatcaattgctatttcaactcctggaaacttgcttcacatatgtctgaccatatgaatcgctgattcttcttagttaactcagttagtggcatagagatcttagagaatcctttgacaaaatgtcgataataccctgctaaaccgagaaaacttcaaacttccatcatagattttggtctcggccaattcttcactgattcaatcttttccggatcaaccatgattccatcttttccaacaatatcacctagaaaagatacctctgacaacaagaattcacactttttgaattttgcatacaacttatgatctctgagtcactgtaataccattcgaagatgatgctcatgctcctcttttgactgagagtatacaaggatgtcatcgataaatgctatgatgcagttatcgagcaaatccttgaatactctattcatgagatccataaagatcgctggagcatttgtcaattcgaatggcattcatatgtggttcaaaatgcagtctttggtatgtcttcttcccgaattctgagctgatgataactggatcgcaggtcaatctttgaaatcacagtctttgcctaaagctaattgaacaaatcatcaattctgggtaatggatacttacttattcttaattgtcagcttgtttagttcccgataatctatacacattttgagggaaccatccttctttttcacatacagaaccggagctccctagggcgatacactgggtcggataaaccctaaatcaagcatcccccgaagctgtatttttggctccttgagtttggctggagccattctatacggtgcttttgaaataggttcaactcaaggtgccaagtcagtcacaaaatctatttcttgttgcggcagtaatcctggcaactcctcgagaaatacgtcgggaacgtctttaacaactctgactacctcaggcccaaatgtttcggatctgctggagtcaatcacaaccgctaaaaatcctacacatcnnnngtgtagtaaatctctagccctcaacactgaaatggtcaagatccgagacccctgaactgatccaacataaataaatggatcctcactctctggctgaaatgttactattttccgcttgcaatcaatgctggctgaatacatggacagataatccatcccaggtatgatgtcaaattctattaattctagatctattaggtcagcactcaactccctatcttcgatcctaatcggcatagacctaatttgcctattggagataaccaattccccgctaggtgtaacgtgtgtactaagatggcatgttagaagcgaagtgatgcccacaagttggccaaatggtggttaagtggtggcacattttatggtgcatgctggtggcatgctgatgcttagtttgtatgcagtggtatttttgtaaatatcttcaatattgttcggaacgggacgggactaggtattcgccattgatttaggtctacaaatagcatggtgcaatcagtttggcaaaactaggtgatttggtatatggttcttgccatatgtctacagagaaaaaattatctatgttcctgatagaaggcta

SEQ ID NO: 31980 - DNA, 2579 bp, Cannabis sativa
aaaaaaaaaacttatccattacattacaacaattaatggcacatcccttttttttttttattattctttttaaatgtaaattaatagattgggattgagggtgtactatgctaatataatattgaacactaatattttagattttgtgtgtaaaataaaaaaagtggaatcaaaagtctaaaatactggcaatcttgagcattatttaaaaccttaaaaaaattgggtatatatattaaactttttaaatgtagaatagatatgtgtttgcacttatagataaaattggatgccatgagtatgtcacaacattttaaactttaataattaagtaaataaagaaatgaaatataaacactatattatatatatcaactacgtacttttatcttaagtgggaattatttttttaatcggtaaaaatactaataaaaaacaataacatagaattaatcggttaaatttaaatatttcttattgatttgatatttttatctatatatttatagtcaattagcatgacttttgttcccaattttgtcatgtaccaaattatattctttaaacttttaagacagttaaaagtaacatggatgaaagtttaaaagacatgatgtggtatctgaaaatttgaggggcataattttataaatatcaaaatctgatgagcataatttaatacatggctaaattaataaaattaaatgaatttagacaaaaattcttcaagaatctattgagttaaataaaaatttttaacaatcagaaaaattgagggacataatatatatatatatatataaataacttaatatataaaggtatatatatattattaaatgttcagttatattctatatacgttgtcatgagtactacatatatatatagtcttcaacaatgaatatttatatgatatatagcaagcttattgtgaaatttagaataaatatatataataacaatgaatccagaaggatatcatttcagtcatccacatcatagattttatctatataattggtcatatacatattattggcgttgttgcttgtgcaatcaattaatcacatcaggagaggagtattacaaatgcgaggggtattgcttcaatgttgtgcataaacaatgtggtgagttgccagagcaaatcaacaaccacaccttccacgatcaacaccctctcacccttcgaattcacaacaacaacatcagttcatgttgcttttactgtgacaaaccttcggggatgaatatgcttacagctgcgaggagtgtgagttctacatgcacatgagatgtgcttcaatcccattgcccacccttacatgccatgatggggatattattgttcgattctcttgtcatcaacatccaatggccattttcgatcaagatgatggtaaagatgcatatcaaggtaacaattgttttgtgtgtcaattaccttggtctactactccatcctattcttgcacaacactcacatgtaaaaattttgtccataagtcatgtgctcaattgtcccaaacaattaatcatcctttccattcacaccaacctcttaaacttcaaataactaagcttcaaacttgtgatgtttgttgcaagaaagattgtaagctcggttttatttgttgtgagagtggatgcaactttaaattgtgtactaaatgtaccaatcttcacacaactgtaaaatgtcgtagtcacgatcactcgcttgctttggtggaaaatgcatgttgtgatcataatattcaatgtgatgcttgtttgaggtcatataagggattgcaagttccatctaatcgtgctaattttgaagttcaacgtactcaatcactcttgtttcgttgcatggaatgtacttacaatctccattttatctgtggcccattgccatttatggttaaagatgactaccacattcacaaattgactcttgttgattcactaaatgaagaagagttcgacgaatattattgtgattcctgcgaagaagaaaggaatccacaatttcgtgtgtacacgtgcactgactgcaaatatacagcgcacgtacattgcatgatgaatgaggtacgataattctacttaactataatattttcaatattatttgtacatatttcaataatttggttgtgatgataacctaattttctttcttacttaaaaatttatgaaatattaatactgacataggtagacatatatacattgttaaagttgatggaattaatgatatagactcaacaatctatttataattgttggaagaaattataattttataagtttttatattgtttatgcaaaaatatggatttttttttaaaaaaaaagattaattattttataaaaaaataaaaaaaatatgagaaaatcaaaagagtaactaaccggaatggtaactagttaccataaaggggttatgagatacattatgctttttttcatattttttaaattgttttctaaattttttccattaaataatttttttgagaaaataaaatcatatttttgttaatttatacattaaaaactacaaaaataaaaaattctcccaaaaa

SEQ ID NO: 31981 - DNA, 1374 bp, Cannabis sativa
aaaaaaatcatttcatttacgtgaaaataagctcacaaaataatgaaattggactcaattttttattttgtttaatttctatctcacaatttgttgcgtatattaaatttattttggtgtgattaaatttgtatatataaaaacttatgtaggtgtttcttacattgcttatgtgtgagtaatttgtgaaatttatattatagtaactatcaaactataactccattagttttgataattagataaatatttatttagtgtgagtaagatttagtaacaaataattgtgaggataatgaaatgatatatatgctaactctagttttagtaacaaatatattttataaaaaaataaagaatttgtgtttgaatagaattctcgatttaacagaaaaaaaaaaaaaatctaaatttctctttgttaaataatatgtcattgtgatagttagcatgtttgttcttatagttagttagaatctattttagtttctagttgtactttaactacttttagttaactaaactatgtatataagagctaattctctcctttcgagctttaatgagaatcacactttttgtttttcttttttctcttttcgtttctctcaacatggtatcggagctgacatataggtcgagagccaagagttaaagaagcattttgagcaactaggatgttcgatgaagaactacgaccaacagagtaatttgaagaggatgaaccaatctgacttgatcttcgaattcttctcttctcatatgtggcatcgctttttgcacgtgcattgtggatatgtatagcctatagaatttgtttcgttcatgtactagggagtctgttctgattgatgtgcttgtgtatttttatgatggtgtttttctaaaggcgttcacttagcttgttttataattctcccttagtctttgtattttgacccattgacaacaatcgcgcgtggtggtgctcttaatggtgttaagatctcgttttggcaaaggtcctacttaaggtggtcagtggtggttttgtatgtatgatttggagttttttacccggcttggggatgatgttacaaacttaatctctagtgtaaatttgacaaaattacctatatttccattgaaattattatcattatttcctatagaaatattattttgtatgtagcttttctacaccaccaatataaaatcctttaattttattttatttcgaaattagcattattattcaaagtagagaagatgtgagtatgaaaattgagaaccaaacaaagtgggattttacacctcatgcaatattctcttatatctattattattaaacataacatgttatgcaaagaataaagctatatatacattaacatt

SEQ ID NO: 31982 - DNA, 1975 bp, Cannabis sativa
tcatacagaagaaacaacttcatcaaagccaatgcttgtgttgtgatgaactctggctcatcttcttgtgcctcaaactctcaaactaactcaaattcatggctcaaccaagagttggactcagctggtgaacaaaagctgaaatgggttcaaaagaactacttgatctacaattactgcactgattctaagagatttccccaaggcttccctctagaatgcacagtggcctaaacgatgaactgagtttcattattgtctttgatgtaactattttgtttttgtttgtttgtttgttagtaaatatatataaaattctttattcgtttagaatagacatgtgatgtatcccacaaatctacctaaataatacaatttaattatatgccacttccatcgttcacttatctatgagagtattactaattttgtccaaagcatacattattaatttcaaaacaaagtcaaatatatatgttgttttgacttgtagtgagacaccctttaaaatagtaaattagtatatatgtaattatacactaattatctaatatattaacgacaacaactagtgaattatattttagttagaaaatcaagaactaaggtacataattaaaaagtagctaaacttagtcttagagaaaattaaaacaaaggaaatggtgagcataagtatattgctttctaaaatggtgttacagtgattctctaacctctttttctctcagagatggctatgtccataattgttttattagtcccactcaatactattatttttttcagccaattacaatttttcttttgttttttcaatttaaaatataaagggcaccagtgccctatttagaatcttttcattaatactctcttttttctgtcctgccacctaataaaatataaaaggttcctttgtgcgagttttgttcttttgtggagaaaacagtgtagtaggagggactgtcaaaataaaaaaattggggttgagagaatacctttccctaactgatacttgagacgaaattcatctattaacaattcaacaactattgattcaacggaagaaagcagagaacgatgcaatataaaacaacgtagtctctcaaaatcactatgaagagccattaaaaattcaaccaatctttgttcctctctacgagcaatatgaggtgccaaagcatgaagctctactaattcggtgagtgccaattacaaaatagaactcttgaatgtttatatttttctcttcaatagctctaatatcaatttccaactgaaactgctttgcaaaataagattttataaacaatctcaaaagatggtcccaaacttcttttgttgtctcgtactttgctaattgggcaccaatagattgttcaacagagttacttgtccaagtgaaaatttttgaattgtctactccttgattgtctaacagatttgcatgcataaccatctggtggtttccattttgtttcagaaatacaactccacatcttttttcctttcagaaaatttttcataacataattccaatacgaataattctttccatccgatcacattcatcgcttgaagagaatcatctttattggtggccaattcagaaatagagcaaattgcaaatgtttccaaatacaaaattgatgaaaatttaaaattgtattgcaaaaatcaatactcaaaattactatgcgaatcaagaaaaaacttgaagaaatcaatactgaaaattggaatgttgaactgtgctaatgttgtacggacaatgattgtatagacgcttgaaaaagttagatctgcgaaaactatgattacgcttaagtaattccctctcataaatttagctctcataccatgataattatttgagaagagaaaaataactaataaaaaataaaagagatgcagagaaattaagatttcatttaattacaaagtcaaaagtaaagaatataactaataagaaagt

SEQ ID NO: 31983 - DNA, 2465 bp, Cannabis sativa
  modified_base (584)..(590): a, c, t, g, unknown or other
taagattgaaacttcatgatggtgttgaaaggatgttgaaggacgtccgattagtacctgatctcaaaggaaatttcatctctgttagtattttagatgataaagggtctcttgttaaaattgagaaatgagtcatgaaagtttgtagaggttcgatggtggtgatgagaggaagaaaatcaaatgggatttatcctctgaaaggtaccacagtgaaaatcacgaaggcgtgtgtttcaagcaagcatgtaaataaaactgaagtatggcacaagagacttagccatgttaatgaaagagggttggatgaactgtataagcagggattacttggaaaagtaaaacttgagcagtttgatttttgtgagtattgttttcttggtaaggcttgtagagtcaagtttgggactgacaaaaagaataccaagggaacactagattacgtacacagtgacttatggggaccctcgagaacatcatcacactccaggagcaagtattttctttttatagttgatgattattcaagaaagttatgggtgtttattttgaagaacaagatagaagttcttgaaagatttaannnnnnnaagataatgattgagaatcaaactagaaggaaagtgaaacgacttagaacatataatggtctggagtactgttcaattgagtttgatgtgttttgtaagaaagaaataatagcaaggcacaagaccgcgaggaagactccttaccaaaatggactcgcagaaaggctcaataggactatcttggaaggggtcaggtgcatgccattgagtgctggattgcccaaagtgttcttggcggaagctgtgtccactgcaacttatctaataaacaaatatccgttaacaacactaattcaagacgtcaaatgaggtgtggtcagggaagtcaacaagttatgaacacttaaaggtttttggatgtgtttgctatgcccacatcaggcaagaaaaacttaaggctagggccttaaagtgtattttcttggggtatccacaaggagtaaagggatatagattgtagtgtttggagcctggaatgaggaaatgtatacttagtaaggatgtgacctttaatgaatctgttatgggattcattgacaaacttgctagaagtcaagccaatacaaaccaggaagaaatcaaagttccaggaactgagcttgaggtggaggctcctggaaaggtggagactaaaatatctgtagatcacaaaagtgatgatttggaagacgattccagaaatgataatctaagaagctataaattagcaagagacagaacacgaagagaagcaaaggctccagaaagatacggacacgctgatttaattgcattcacacttcatgttgctaatcagattgtgcatgaagagcctactagctatgcacaagcaatgaagagcaaagatcgaaagaaatggaatggagctatgacggaagagattcactccttgaagaagaaccaaacttgggatgtaatactgatgctagaagacggtaaggtcattggatgcaaatgggtgtacaaatggaaagaaggcattctaggtgtacaagaggcacagtataaaacaaggttggttgcgaagggattctctcagactgaaggagtcgatcataatgagattttttcttccgttgttaggcacagatcgattagaaatctactggcacttgttgcatgttaagacctcaaactagaacaattagatgtcaagactgccttcttatatggacatctggatgaaagaattctaataaaataacctgaaggatttgaagagactggaaaggaacactgggtgtgtttattgtgaaagtctctatatagcttgaaacaatctctgagacagtggaatatgagattttatgattatgtgaccaagatatgtctaaaaggaagtaagtttgatccttgtatatattgctgagagagaaatggagatactttgtatctattgttgtacgtagatgatattctgatcgtcagcaagagtgtacaagagatcaagcacttgaagctccagctaaagacggagtttaaaatgaaggatttaggtccgactactaagatcttaggatggatgtaagaagggaaagacggaaaataatattatacttgaattagatgagctacatcgaaaaggttctagaaactttttaaataagtaactctaaggcagtgagtactctgcctgcataacactttaaactgagtgctactcagatgccaaaaaatgaaattgagaagtcagaaatgttgagagtttcatatgctagtgcagttgggtccttgatgtttgtcatggtctgtacgattgaaaatcaatagaattttagaagcctacatcaatagaattttagaaagattttagatgaaatattgttcaacgagcattgctcccattgtgacaggtgataaattgaatttgagcta

SEQ ID NO: 31984 - DNA, 1963 bp, Cannabis sativa
catttaatgatactgttgtgtcattttagaattgtttcagattccttctattaaacacatgtcaacttctgaagtgtagctgaatttcaggtataacatctaatatatttaattatttagacatgtttggtgtctaaattagtgtttaattttgatatgcttggtatcaaaatttgtgagaaattaaattgtaagaaattaatcttttatgatgtaattttcaaagcttgagcaattttaggagaaaagtgatcattataatacgatttgcttggaatcaaacgtgagaggttataacaaattgtttaattttcatacaatattaaaacatgaatttttgtggaatgggacataaactccctaagtattttgctcattcatggtagtaacctatcttaacactagtaaaaatccagtcttaagttcaataggtaataacaagcaagtcaatagagtgaatatggtattcaaatcatctcatctatggatgagtacatgtggtataaattgagggttaaaactgaaaggtttttaaaggagcttaaacttaagaaaacttacttaggttaaaaagtgtctaaagagtagtgagacactaaaactccacctatatcgactagaggtggtgttgcctcttatgagaattgagagtattctctagagagttcatgatttagaattttgcacatggccattaacggtgcaagtgagagacatgcgatctcgagtgagcattaacaagggtgtgtgtgtgttatcattagtttgcggtaaaggaatagtagttcaatgctacgacaactaaaattttatcaaactttgtggtaactacagtaagataaaatttaagttgaaagatattttacctaatgcacataaacaagtcttcttaaatgtgtatatttattcaaacaagtcttcttagatataatattttgattgatcaaataaatattacaagtgtgtcacgtattttaatttagtgggggattgttatattatttgataatatatattatgtataggttaaaatgtgacaatatatactattatgagaataatatatattaagtgtatggtaaataaattgtgtaacatatagtttatttaatctacactttgtaacataattgcaacttagagaagttacagtttgttatcacgtgtaactcttttattgatcacacataattagtgtaatgaagagatagtgcacaaatttaattcaaagttatgataatatagttgttgcaaagtggattaatattcatttttaatgagagaaatgagttagaaaatgcttgggtttaatttggtttaacggagttctaaaacttgaaaatcggtattttaaaattgtactaggtgacatgtcgcctagagccaggaggcatgtcgcttggaggtgcaaatttatgaaatgttcatggaatgttggggatcagctccatctattgcgtaaccaccgaatcttcattattaatctattttacacctattattgtgcctataacaaccatgaggtgttatgtgtgtgaattttaagtgcgatcacctaaaacacaatataaaagagtgtaatgtgctcatttgtataacttattttctatcaaaaataacactttattagaaaaccctaaggttggataattcccaaagttatttcctagagagttctattaatgcttatagataggggagataagtttttggacaaaggtgatattatatatatgtgttatattacatgtgttgcaatcttcatcttttctacctttctttcttatatgtatatgtatatatattatatatatagtgtagtatatgttgttgtaacatctatttaaccaatcttttagttcttgaattattttacaattgagttgtaatatattttaatttatctaatttttaacacttagaatgccaaaccaaagtagatagatgctctttcctcttgcgg

SEQ ID NO: 31985 - DNA, 1870 bp, Cannabis sativa
aaaaaatattaattttattctaaagttaatgttgatggggctttatttgaacaagaggggcagtttggagtgggctgtgtagctcgagatcatcatggaaccgtggtagaagcttttataaagggaaaggttgggtatgtccaacttgaaattgctgatatcatgggcatcaaagaagctttgagttggattgcgactcatccctaagacaatgtagtgttagaaattgatagtttggtgtgtgtctaagcaatccaaagtaatgtttttatgtcctcacagtttggttttattgttcaagatgttcgaaatttacttttggctttatcttttgttgagttatgttttgttaaacgatctgcaaacaagttgactcattgcttggcaagagactcttgtttctctacaggttgtgtgcttcagttagaggattgttcctctgaaatgtgttttattgttttgaacgagtttattaattaataaatttcatgatttattcaaaaaaaaaattattttaaattatatgttaaaaaaaaaattatatataagaaaagaatatgcattttatttattaaattttaaaatataattgtattatatgtattagatttttaaattattattttttttatttatttaatttatatatttttttatacgtgtggattagattagattgaatagtgataataaaattggattggatagaaccaccaccatcattgaaccgcaccatcgcgatctttctctctccggtgctcctttcaatttcttggcagcaacattgctttcatccaagaccttatttatgcaatctctattcatcgatctaaatgccaaacgacaaggctttattttccgtattcaaactctgaaatgctccatttcaatttggcgtagcttgatgagtttcgtaacagagcagaatcgcctctctgttgagaagcttttacggtgtcgtttagcgttttagttttcttccattttattctcaattcattgaaaatgaatttcttcgcataatccagagccgtttcagatctagagaaaatcatcgttttcatcgaatccaaaatctctgatactcctaaacattgggcgagattatccacaagcgaaatcgaaccgcaccatcgcgatctctctcaaatcatcgacggcactagctttccgagccatcttcggtgtcgtcgattcgaatttgaaacattacattttgagacttagaaaagagaaaaaggctaataatttagaaaacaacaaaatgttgttatatgttttaaaaactcattcactttaagttaatattatttttaaaaaatactaataaaatgctacttgtgttttgaaaacttcgttgaaaataaaaaacaataacaaagctttaagactttcccgaggaactatagaaaatgagcgccgattaatagtatccccgaaacagagcagaccagaccgatttaatcaattagaaaaataaaaaaaaaaaatcctaaaagacaataaaagcagaaaaagaagaacatattctattgtagtaagtcgcattcaaccaaaatcacattggcttaaatcatgcatgtgtcactttattataaaaaaataagatcttactttggcatcacgaggaagagcaagagcagtggtaagaagagaataaccagtaaagactccaatttcaatagtcttctttgcattcatcactttcaaaaatatcgacataaattgtccttcatccacaggaacgcccataatactcctgcaattattatgtatatatagataaatgaacccaaatttaaattaaattaattaataagaaaagatcgagaccggcaagaaaaaaagcaccgtagtttatatttcttga

SEQ ID NO: 31986 - DNA, 2551 bp, Cannabis sativa
aactcggcttccttaacttaaagatacctaagatatatgggttctaggttagggcatcgacttgacttatttggcaatgtgacatatatggatgacatattagggcatggacttgctttattaggcaatgagatatgtggataccggggagtagtattcgagttgttccagtgagaaaatcgtcataagtcatgactctaaactaaaactgttgttaggtttcttacttgtcgacgatccttaattattaggtagcggtagtgacatatatagatgtcaggttagggcaatgacttgccttattagggaatgtgatacatggatgcaggttaggacatcgacttaccttattaagaaatgtgatatatggatgcaaggttagggcatcgacttgtcttattatgaaatatgatatatggatgccaggttagggcatcgacttaccttattaggcaatgagatatatgaatactggggaatgatattcgggtcgtctagtttgacaacaatagtaatatttgaatatcagttttgagtattgtggttgttttattaaacaacggcaaagacattagtatgccaaatggggcattagaattgttttgttaggaaagtaatgagaatggtaaccttataaagtaacaactaaagttattatcattggactagtaattgtatacaactgtatattttatattgatattcattgtgtttgaatatttgtactaatttagatttaaatatatgagtaatgtacgattgtctaattctgatgatgtgagtgtacttgcacatatttgtgtgatgaattatatgattgttgttattgcttttcttgctgaatctttgtaactcacaggcgctttgtggtgcagttaagggcaagggaaaactaagatagccataagatgattgtcttcttcaaaaaatttacatatcaacttatcagagtggtgtagtcgagttgtcaagagttgttttaggatataccatgtatattttgacttaattgtatatatagtctacataattaaactgcaaatagctcagataatttttctaaacattgaagtcaaacacttttccatctagcaataaatttgttgacagactcatctggtctttgcttagtttcagctagatcattaacaataacttcctttattaggcttacaaattgagcaatgaaggctcttcgcatgtcatcccatgtgattatagatcttggtgataattgtgtataccaagtcaatttttcttcatttgtcccaagttagtgtgcacatgtgcaagctagtggaaaaatactgtcatttttggtgtcattatttttcctgtaaaatagcacatctaattacaaaagtgtattttttttctcaacataattagaaattaaaaagaaaatgtgccccactgggcgtgccaaaaattatgttcagaaaaatttcacatttagaatattaaaaataaatgcaaaatataatttcacctatgccaaatttatagcataagagttaattaattttgagttcgactcatccaagatcataaaaataatctcttaattacagtcctttggtttaaagaaaataccttttgattccaattacgatggttttaaatgatttgaaataacaagggaaatttagggtgaatttagaattgcggttaaacttgatcaatttaattaactgagttgcctacatacctttttgtgaaggatcaagccacttgtagttcgcaataagatactttagaatttgaatataagaattctggtagatgaccactttcaggaattctttgttatttgaaaatttgaaaaaattcctaggtgtatgaccttttatagaatttcgagatttgtgttttatatcattttgcagtattgggactgtacttagtcttagcaactaagttgcctatgtatccttttataggaatcaagtcaaacataattctaagagtgttcaaagattttgtatcttcgagaactttgtagagaattaacccactttgacattttgaagtagataacctcacttgggttatttgaggtgaatgatctcacttgggatttgatggggtgaataacctcatttaggatttggcaatgatattttatcatttgaattaattttggtgagctcatttaaaactgtacaccattgattatggttagaattttatcactttttattataaattgagtcttgaaatctctttattattatttttcaataaataaagagatcatttgactaactgttgtaattaattatcccattattttatgagatataatcaattattctattccatataatacctccaattcaaaagaaaatcattaggaatttgaactgaaagtatattttctctaattattttatgagagcatgttgacatactccttttgcaacacatttttaaacatagtaagtcaaaccttttattcttttatattagatatatagatatacagggccggccctgagcatagggaggctaggcctgtgcctagggcccacctagctcaggggcccaaaaa

SEQ ID NO: 31987 - DNA, 1709 bp, Cannabis sativa
tgatagttaattttctttaatctcattagttctcatacttttgtctgtacccataaaaattatttattatgacattgattattgagaatgatgaaattttttaactttactaattatgcatatattctattcttagtgtacgattataatatttattatttttgaatgcattgtttcagcttatattgatgcatggacattttaagcttgaaatgacttggagagagagagctctcatgatttagtgagatttgttgatttgcctgtacatgaattatgcagattgcaaaacaaaattaatagattggaaaacatctttgaagaaataaaataaattggttgtatagacatatatttagttttactctatttttattattaattaatgtcattaataccaattcatattaattaataattagttgtaataattaatatttatactgttgtatcaatattttaaagttatattatatcattataattgtcatatgtaaaaaaatatattaatatttatgatattataaatatattttttttaaaatctttataacattatgttgcccctaaaagtcaaaatctaaaactgacaagtacttttaggggcgactttaaaagtaaaagtcagattctgacgaaagttgcccctaaaactattattaagggtgactacttttgtcgcccctaataatatttttaggcgcgatatattagaggcaactttttaggggcgacttgtcgcctctaatagctattaggcgcgattttctgtacaattagaggcgacaatagtcccccctaatgccctattttgctgtagtgtatacttgatactctagtcgtatcgatgtgatagtgtcaaatagtacttgagccaaacatacaatccaatacaactctacgtatatactgctatcaatgtaatctaacatcctttataacagaggggtaaaaagcataacagaagtaaggtttaggtagttttgcccctaaaaaatcaatttatgagtaacatttcctttctctctccctatcactcccttcctctctctgctctcttgctcgacggtgtggtaagaccacaaactgctattgccgacgtcgatggtcttaaggaccctgaaacccagccttttgatttcgaaaaccctagaacccgaatccctctctcctccttgccatcactccctctcttattctcttctattttttcagtgcaatgatagccatacagccgtccacgatcatgggtggtcttacaggatcatgggatcgtgttccctaggtcccaaaactaaaaaccctaaattttttgctttggctagtcatgaatcaagatgtgcgattaggtcactgacggatctacaattagttttagaggatctacgacattgtcttcatcaggcaatgcgattaagtcaccaacagtgatcttttggttggtatttgattttgggtttggatttttgtagcatgtggtatttaatttatgttttcacatcttctttgttttggtgcaatgatgagtgtagtggcggtggtagaggtgatgatgatggtggttgtggtggtgatattagctgtgggggtgtggtggtggttcttgagaagaagaagaaggatgaggaagataggttagggttttagaaaagaaaaaaaataaaaaggaaaaataaaagaaaaagtaaaagtaaaataaaataaaaaat

SEQ ID NO: 31988 - DNA, 2671 bp, Cannabis sativa
gaggattggtttgaggggtgtacctaagaaaaaaacaggaaaaaatattggttccaagcttattgataagcgtaaagggaaagcgaaggctatttataaagaatcttcgaggacttacaagttgccttgttttccttatgcatttcttgtttggatttatgaaactattcctctttgtcagaatgctggttttcgtgaatatgatagtgacccagaatataggatttgtagatggttgaatgtgggtcttcctaataatagtgttgttgagaagaaagttttttcatctcctaagatacattttttttattattattttatattctgttgtttacatttttgtttatttttaaagttttctggttactaattgtgtttatatttttttttgttgttttttgatagctgaaaggtgaatatatatttcctacagatgaagagagatcaatgcttaatctatttggttttgagtttattgagaaagaaggtcctgatgttgatcgagttggtgcgattggtttacaatcttctgttttaagtgcgttaaggagagacgttaaataagtaattcaaaatcaattacattttgatgggtcttttgaggattttacatcagatattaagtatagattcaaggagttggaactcaatatgatttcacacatagattctaagattgatgaaagtttgcaattttacttggacttgaaatttaatgatttgaaagaaatgtttgatgatttaaaagcttctcaaagtgtggtggatattcgtgatgatagttgtggcgatagtgatgatgtgagtgtttatccatttgttaattgtttagttgtcttactattattcgtttgtatgtttattaataattttttgtttttttatgcaggaatctggtttgaaagatggtgttaatgttgatttggcgttgatttggcagatgatttggcagagaaggatgtaaatctaattatatctaattatttattttttttttacttttttatttttattatatagtttcaaatttctgattattttataattgatgtgtttgtttattttttcaggatctagttatcaaagatgttgattatgtaggtttggttactgagaatgtgaaagattatcctattgtatgtttgtaaatacttttgtttcttaataacttttattcatttctgcaatattaagtagttttatctttttttttattactcagttttctcatctgtacttattggtttgtaacatgatcctattttaaatcttgctgaaggtggtggtgtgttggttaatgagggaggcactgttgtagaggttttgttcatgtttcttttatatgtgttttgtttttaaaaaaaaaaaattgtttgtatcttattcgatgatatttaaaagacttaatatgatttattatttattatgtttaattatttttatttatatcatgtttattttcaatttttttcattagggtagtttacaagatgctggagatggtggtttgattaatgaaggtcacactgctttacaggtaatatttttattttgttcatgtttcttttgtatgtgttatgttatttacagtttggtttctttttaaaaaaattatgtttatcttattttttatttaaaagacttaatatgtttaattagggtgatggtttacaagatgttggagatggtggtttggttaatgaaggtcacactgctttacaggtaatgtttttgttttctctttgtttttgtgtttttatataaaaatttgtttacatatgactgtttacagtcttgattttaaataagtttttgacattgtttaattttattgttattttttttttaatccaatgtattaataatggtctcttctttaacaaattctttttttttcttggttttatatttgatagttattgtttttgttattgttgattttgttttttattttatgtaaacatttttttttatgtttttatttaagtttatggtaaacaataagttttattaaattattttatttttgcaataattgattagtttatatatattttgtagggtgataatgatgatgttccaagttttgatataatggatttcatttcatctcagcccgatcctaatgctgataaagggaaaaggaaaaaacaagatgaagatgatcatgctaagtttaaagatttaaataaaaagtcaaaggatgatgaagatgatggtgatgagggtgatgaccaggtaaccattttgtatattctgttttttattttcttaatttatttttttccactttttatttttattttttatatttttttctcattataagttaattttattttttagggtatgggtggtgatgctatttcttctattattaaggaagttataaagggaattaatgaaggtgatgacaaatttaaaaaaaggtggagccagttaaagggtgatgttggtggtgaagcaagaaaaaaatatggttgattcatctgtaattgatgttgctgagggtggtgttattggatctcctaagttgtttgatagtcaaggtgcagaagatagtattactttatctgccatagagatcattaatgaaaaaattgaaactattgaaggaagcctgaaaaaggtacgtataatgttaaggaaattgacatttggtcaaagtgtt

SEQ ID NO: 31989 - DNA, 2183 bp, Cannabis sativa
agtgagtgctattttgcttaatatcaaagaaattttcttaaaaatcgtgttgaattaaaattttagatttaattactaaattttataaactttcacacatttatttacaaaagtcgggatctcgtatttaacttttacaaaatattcaaaatacatttagttaggtcgcacagtgactacaaaataaaaccatagatgtcctccaggtcgtgccgccatgacatgtacaatatcatcctagctcaaagctcacttctgttcagcatttgcctttcctttacctacacatgaaagtagaactgtgagtcgacagactcagtaagaaaaacatacaacaaataatataatatcgacttgtatctaggcacccatacacctatttacaaggcttaacaaatgagaaagaacgctcttacctaagatacaactatgtaccactgttccacatgcactcagtactgccactgtactagtgttggtagggtatgaaccgtaccccgagtaccgctaagtgttgtaccacatgcactctgtacctacccgtactagtgttggtaacaccataatgtatcctttagacgttgtacactataccaatgcattctgtactgataccgtactagtattggtagtatacgaataacaacaagcatgcatatatatcacacatacatacatttgcatatatatcatatgctctatactattcttacctcgtttctgaattgaagtgagttggctgacttgaatgaaaaatctcgcgctcgatggatgccataatcacataacataatcgggtaaataacacgcctaaaggcctaatctgggaaactcaatcttcaaccaaaggttctaccacagacaactgaaactacaataccctaagtaacagggaatcacccaaccaaggctctgaaatggacacgaatcgacgaaattgattgttcgggaaaccagtcccagaaccggttaaccagtattacaggacctggcaaaccggttaaccggtttgcaccaagtttcctaaacaatccaaaacctgctcaaatcgtgtccaaacctcaccaaaatttctagaacagctatattgacctcccacaacatattccaatcaatagaatccaaaaatacacataaaatcaaaaagtgccatggatgaaccaagcttgaatttttaaactcaaacttgtacattcatcaccccacaaccctaaaccagtagcaagaactccattctaactaaaattaaacttagatactgaattataaacaaatctaaccctaacgccctagattcacaattttgcatattcaaaccaaaatcaaagcttcaataacacaaaattaagagttctaggggtacctttgctttaaaccacttgaatcttagctcaaaacacagaaaacacaagaattggagctggttccttctagtttggaatggccgaacaaagaaagagagaggaggattgaattttctattttcttaattttctttaattaattccaagtaaataatttctaatattatcatttcaactgaataaaacattgtggccagctgccacacttgcaaaaagtcacctaatccccccttgctaaaagaccgaaatgacattggtgcttaaacttaatctaattcaagcctaggggtaaaattatcaaaaaccacaaccccgctcaaactcgttattctatttatctccaatattcatcccactaagaaaaaggttctagacttactcttgtgactcaaatggccatccatttcaattccatcgtcgtcgagcaaaaattataaaaatagcataatttatatataacacaaataatacccctagagtttaataaaatctccgtaattgagaaattataactctagtgtcaacttttaataatgggacccaaaattaaataaattcatgaataattataaaaatatcaataattaatgctaattttctttactaatccatattctaaaaatgcagtcattacaattatctccccgttaaaaggatttcgtcctcaaaatctaacctaaatagctctggatattgagtcctcatgttaaatataattcccaagtggcttcctcgaccttgctattcctccagagcactttgatcaaggttatggtcttgttttgaagaactttttcctttctatcaaggatctaaact

SEQ ID NO: 31990 - DNA, 1117 bp, Cannabis sativa
cttgcttgggagtagacttcaagtaaaaaaaccagctaacctcgtgcggagaaggcataccccatttctgggttgcgtagaggacgaacagggcaggcagatacatgatggcctttggaataaactgggtcagacagagacggaagaagtctgccaccttcctaaagtacgggtacaaaggcagcatgccccttgtttggaatgagcacccgaccaggcacacatccccttcttcgtgtttgtggctcggttgtttgaggcaggaacataatattccaattcgcccaaatcgccagaggaattgaacccacctagcacctaaggcaccgtgcctcctgtgaggaactgaagcagtaagctcctcggtgacgtagtccactccttcaaccaggacatcgccgtccacatctactggctccctaacctcgttgtatgccccaaaattttgaggtgtagcctcctcctcttcctccgcctcggaagggctgccaggacggacatcgtcatattcctctatctccttgacttcagcgtccccttcatgatccccctcctcctggatgggtggatcttgttcggcgctgggtaaagtggtgtgttgggccacatgagggttggacgcgttcaccttacgcatcgtttgctttgttcgagccatcatcctatggctagatggaaaatttgaagtggacagcccgtcacttgaagaggacggacttggacgaagacgaggataatcctcgtacaggagttgaagcaaatcttggtcaatttggtgttcgcttccccaaaacttaccagggttcatctacaaaagacaacatgcaagatgagtgcttggtcgggatatcgcacaataaaaaggcaaatatgccgaccagaagtactcatcagattaaaagaatgaaagtgttcaaaaacaagtacaaaccgagaagtttgaagtttttgggtttagggccaagtttcttgaagctttgaataagcaaggtgaaaggcagacaatgtgcgataaaaggttgaacgtcatcaatcacgaagcttcacaaatcattacaaagaaaatcacaaagttttaaacctagattttctactttgtaacgttcccgcttcaagc

SEQ ID NO: 31991 - DNA, 1789 bp, Cannabis sativa
atggttttaattcatttggcaacatgagcctatcatatattatgtcgcccgttgtgttagcgaacgaactataatattctaccttggttggttgtgtatgaaagacaataatttcatgttggccctacttaatccaggaccaaaatcaccaggtaaagacatggatatagttctaagaccattggtggatgagctaaaacagttgtgggctgacagagttgatacgagagattgtaggaaaaacactatgttcaggttgcgtgtagccattttatggactattaatgattttcctgctcgaagtagtttgtctggatggagtggtcaaggatacaaagcttgtccttcttcgatacgagtgattggtaagatagcttatgtaggtcgtagaagattcttgcccaatacccatcgatttagaagggattccaactttgatagaaattgaaagaagacatccactcagacgttttacttgtgaggaaatttttgaacaagtaaacaaacttgtaccacaagttctcagaaaacatgaccagttttgaggcgtaaaacacagacgggttgcagaagatcaaaattggaggaaaaaaagcatcttctatgagcttgattattggtgtacgaacactttgaaatagaatattgatgttatgcatgttgagaagaatgtgtgtgacaatctattgggcacaatcttggacaacgataaatcaaaggacacaactaatgcaagacatgatttgaagaaattggaaataagggaatggatgtggatttatgaagatgacaatggtaagttgatgaagccacacgccccttacgttgtcaaacctgatgaaaaattgaaattttttcaatttatcaaagacatgaagtttcccgatggattttgctcaaatttgaagaagaaagtgaacaatgatttaataaatattcttgggttgaagttctacgattgtcatgtaataatccaaagattattgtcagttggtgtccgtaaatttctcccaaaggatatatcaacaactatttctgaatcgtgcaattttttcaagcaagtatgttcaagaaagatatcgaggaagcacaaaaataccttattttgacattgtgtaagttggatttaatttttcctccagctttttttgatgttatgattcagttggttttacatttgcctgaagaagcaattttgggtggacctgtctttatgaggtggatgtacccttttgagaggtgaatttatacgtcaaggaaatagtaagactgcatggtgtaccaaaatccatagtttcggatagagattcgaagtttacctctaagttttggcaaagtttacagcgggctatggtaccaaactgaagttcagtacatctttccatcctcagacagatggacagttcgaaagttcgattcagatattggaagatatgttacgagcctgtgttatggattttgagggttcctggagtaagtacctaccgctaatagaattatcgtgcaataacagttatcaaagtacgatagggatggctccctatgaactgttatatggaaggaagtgtaggtctcccatccactgggatgaaacaggggagaagaaatacctaggtccagaatcagtataacggaccaatgaggcaattgagaaaattaaagctagaatgcttggctcttagagtaggcaaacgagttatgcagatccgaaacgcagatatgttgagttccaagtaggggatcacgtgtttttacgagtatctccaatgaaggggatcaagcgttttgg

SEQ ID NO: 31992 - DNA, 1698 bp, Cannabis sativa
  modified_base (1420)..(1428): a, c, t, g, unknown or other
tcaaactcggccaacggtaactcctcgagatcggcacttatttctctgccctcaattctcattagcatagatctaatcaactttctcgatataattaattccccattaggtaatagggttccaaaccccatttcgaaaacatcactaggcctaccaagctgattaagtaattgatgcaacatatgaacgtgtagcacccaattcaaagaaaacaatataagtaatgccgtggataagaagctgatctgtgactactgaagggctggcgacagcattcgcctgagtgatggcaaatacacgttctggtgtaggtttagcttcttgttttggttcctctttcttcaactggggacaatctttcttgaggtgcccaatcgatccacactgaaaacaagccctctagttacaggtcccagggtgatgtttcttgcagcgcaagcacttaggataggaatatgtttgacgtccccctttaccctggcttccacgaaacctcttactttgacctgaactccctgtaggtgggaaagttctcttctttagctcaatagtggaatcactattctcttttccaggaacagacatagggagagtagtggtcctaccagcactaggaatctctcaggtttcttgcaaaaacttactgctttctcagctggaagagccttgtcaaccatttcagcatagctggttgtatcattagtggtaataacaagatcatgcttaatcttggcattcaaccccgccaagtattcatcctttttgctaaagtctgttggtacaatccctgaggctagtttggccaagcgatcaaacttggtcatatactcagttactgacataatttcaccctgtaccagctcaacaaactctttctgctttgcactgcgaactgcttcattatagtatttggcattaaataagtcctgaaactcttcccaggtcattctagtgacatcctttgagagggacaccatctcccaccacaccagagaatcttcctgaaattgaaacgtggcacatgccaccctatcgttcccggtgactcccatacaattaagtatcctctcaatcacagtcaaccactgctctgctttaagaacattagagcctaccaagaacactggggcttctttcttcttgaacctctcatatagaggctccatacgattgcaagcaacaggttgttctactggcaccgcaggaaccacaacagtaggtggttgtaggggaggctcaacaggagcatcccgctgtctcaaccttcgaatttctttctcttactgaataatttcggcttgcatctcagcaaacctcttctcccagtcaaaaggagcatggggtggatcctgttggccacctctaagagcacaaccgcggcctctactgcgtccagggggttttggggatttctaccacnnnnnnnnnctccggtctcaaccatttttccctgtcctctgccgttttactgggcattcattatctaagacttagcctcgaaccccaaaaggcatgtaggtttgacaatgatcaaactatttttaagaccgcatttagggtttaaacaacgatctacatatatatgcaatatatctgaacggtttgcaaaaagtaaagcttacggaaccgtgagttgagctcgacactggccttgattgtacatatcttgacggtcttcagtaaacaacctagtggctc

SEQ ID NO: 31993 - DNA, 1017 bp, Cannabis sativa
aattcattgagcaagaagtgagaaaaatcatacgtgtagcttttttatgcactcgaacatcacctgcaactcgtccatcaatgtcgaaagtggtagcaatgctttcagtagatactgatgtgtggatactgaatttttttaaggcctagttacttagttgactggaaatacaacgatgtcagcagcctaatgagtcgaattgcacaagggactgatcctagtacaagcatgaaggcagatggttagtgcatgatgaagttgataaaacatggctagtgtttgtttcgctatgaatttggtattgcaagtcatgtgtgatatgatagaaaaatcagggcatgtcaacatatgcaccttgttatgtatccatgtttagaatctagattatggcttttatgaatcgtttcaagtacaaaccaacatattgtggtagatgagtccattgtttgcaacactatactacaggtgttgagtaaaagtttaattttgttatgtgagatattctataaatatatgtatgtttacatattaaggactataatacatacatatatttataccatggattgagattggtgttaagagactttgtatgttttctgtttcatattgcttgtgtaagtgatttgtggggtttattttgcacttactaactaccaaaccttaatgttttagtaatgaggtaaatgttgtgagattaaatttatcggtacaaactctgttttgaatttgttaaaagaatatttagaagtgactgataatacatgtttctgtctagactcaatgattcaaaatttagaccttatatgtggcttgtttaagaaaataacagaatttgtactcatgaaattagagaaaaattacatttttacaaatattgggtatttatgccactaaaaatttacattgagttttcacttataaaccttaaaactttaattaaatacttatgccactatttaccctaattttaattttaatatatccgtaaaattatattaggctaattaggatttt

SEQ ID NO: 31994 - DNA, 4044 bp, Cannabis sativa
acgaaaataaaagtaaggtcattctcatgcatacctatcacctttatactttatgtccaatttatataaatatgatggagttgaacgaattttgggtgaaaaaaagtgaaaccaaaacccgtctgttcacgtgttgcgggttggcgggtttcaagttggcgggctatacgtgagaacacacacacatatatatatattgtaaattatttcgaatttttcaaaattttgtaggatatcttaaatagctataacatacatgaatatgaaaaaaaaaaattagactaattttttttttttggatggtgaaacaaatagaatgtgcatcaatacatctcttttaagagagtgcatattgtagaatcaccttataatatatattgtatcatgtaactttatccaacccgcttacaatattggagatcaaatccaaattcttcttcatgctcgactcaccaactcttgatcaaatgaagggtggttcaagtatgccaaaggaatcataaatctcttcattgttctctctccaaatatactatgttaaagtttataccttgaaaaacttgtaaatatatttttgattataaatattagttgaacattttgatatatgcttgaatgttaaattattaatatttaatattgaataatttatttagaaatatataaaaaattcttattcatacatacgattgtgacttatattgtatagaaaattaagattacttagccataaataaaatagtcaacaacatattaaagttatgaaacctttaatcaacggttgttaatacggttcaatgatgcccgttattgggtacaagcaatctcaattcagattgttgatgtagtatatacatctaagtgaaggtattgtatataatagagattaaatatgacatgaatcgagatgtaattaagctgtctttatcaaacatgtcgtttcctataaagacctaatttatattataacgataattaatagtagatcggctcgaatcctaagtagtcatgaactcttgttcatgttattagtttctttgattcactcttcaaagtttctcagagtagatgattcttacaacttctgttttggaaacctaataatgtggatgactgagaacttgatttataattatagaattaaattgagactgaaacgacatttagaaaaagaaaagccaaattaaattagaatttgagtttgtcatatcaatttttgatagtatattgtttaattttattgtgttcttacaaatgtaaattatattatttgaattttagatttggcttgagtaatttgtggctagatctaaaagttttttttggtgttggttctagactgagatatgcatatagtgcaaaaataaattaaacactagtatgtattagtttaaaactgacaccaatactcaaacgtctcaggttagaactcacaccaagtaatatactttttgtcttggtggaataagtattggttttatgtatcgacactatatgtataagtgtcagtttaaaattgactaccaaaaatgcattttgtagtgtgatatactgttcatattgttagtcagtttgttgcttctcctacaactgttcactaggctgctgttcttcgtggtaccatctttcagagcctactactaccttccacctcttatctagaattgcaagcttactgtgatacaaattatggtcatgatcccacagaccgaaaatctgtcattgatttctgtatctttttgagagattcccttattttttggaggatcaagaaatagtctgttgtttctcactcttctacgaaagctgagtatcgtatcatgacatctactactaaagagattgtttggttgagatggttacttgcaggttattcactcttgtcctacttctatgtattatgacaatcaaagcattcagattgctcacaactcgttttttcttgaacgcaccaaatatatttagattgattaccatttacttttcaccatctaaaattagacactattactttatcttttgttcctttttcatacagcttgttgactttttaactaagtcacatacaatttttcgttttcgttttcttttaggcaaactctcgatatttcttgcaacaacaatatgagtttgaggaagagtgttaaataattatttagggttattttagtctttcttttttattttattcttttatatgttagttgcttatataatactttttaattaattgtattacttatttttaattttacaattaaataaaaccctaatttctctattttatctgcatcttttttttaatacagcaaaattagtaacaagatgtctcacttattaggcaggcatgtcccactgcccattaaatcactttgtcatatctaaatttaaaagaaaaccaataattgttctttcattagctattaattaaacgtgtattgcgtggtaattgactattaggctaatggggtgtaaagattcaacttttatttacccaacataaataaatatggagaatcgttaaacaacattaccggtgactagtacccttttagtatttgttggaacagattcctttatgtaccctaagtttcataatactattcatagagttctaaaatgacatatataccgacacttacaacttacaacaaaaccaaaatcaaaactaaagaagataaatcagttacaattgaaaaacagttacagaatatatctctaaggctctgtcctagatcagaaatcacagatctataaaaagatatttttttctctctttttctagagaaccaaagagaacacaagaagagccagtttgagatcctccaagagagttattggtatgttcatgtaaagaaaaaatagaaagatttgttagtatcaaaatttcaacaatgtcataccactattaatgtaattaagtagttgttctatataattttaaaaaataacttttgaaaaatatcgccaatgacaatgctcataaataagtataaataagtgatgatgaactcaaaagtgtcacccttgtgttctcatataacatcattcatgggcttgttttccaaatctcttcttaagatacaatacaactagggatcctctttttcttagtaatatattatattaagtgtcaccatattagtttaggatggagcttaattaggacaaaatcaagtgatgcttcaaatccttatatgttatttaccttggtgtaataggaaggcttcttgatctctctttataaatataaaacaaaattggatcttatgttatgacacacaaataatttttacatttttttttttcatgtaatagaagttctcacttcaaatttattatattaaaaaaattgactacaaaaagggagcagaccttaaaagtaaattttatcacaatttttgtaagaaggaaagaaagaaacattattgctccattataataaagcgaaaaagaaaattaaagtcactttggtcaaattaatttagaatatgaccatatatttcacctttatgtttttttagtttaacttagtacaatatattgtattaaattccaaagtgtttttttttatttaaatatttttgaaaaggaattcattctaaagtgtaattcaataaaacaaaaaactaaagcaatattaaaaaataggataaaaaattaaagacccacattctttgtcttcctaattctcttcctcgcgatattggtagtaatctcataaaaagttaagcaatattacattaaacaaacgtatctatttttatttaggggtgattgttattggagtttaagagataggaacttttttaaagagatgcaatgtagagacaatcactctttcataatttatacaaaattgagggggcaaatgatcccatgcttccctttccatctacctgcccgacacctctttaaccttatggggtaacttgtgactaagctatttaaacttttgaatttgacacgatcaacctccagtattgaattttggaggtagaactctccaaacttaaattttgttttgctctctctctctctctc

SEQ ID NO: 31995 - DNA, 1621 bp, Cannabis sativa
  modified_base (27)..(40): a, c, t, g, unknown or other
  modified_base (66)..(79): a, c, t, g, unknown or other
  modified_base (108)..(121): a, c, t, g, unknown or other
  modified_base (148)..(161): a, c, t, g, unknown or other
  modified_base (685)..(687): a, c, t, g, unknown or other
tatttctgatctatattaacaagtaannnnnnnnnnnnnntgatctatattaacaagtaaatctgnnnnnnnnnnnnnngatctatattaacaagtaaatctgattannnnnnnnnnnnnnttaacaagtaaatctgattatattgannnnnnnnnnnnnnagggcataaaacccaacaacttaccctcgaaaatcacttgcgaggatcgcccataatgatccacggggttcccttggtttggattgatcggaagctcctcagcctcggaatcattcatttccaattcaaattgaggtttgaagttcttgggaacgtacagagaagaaaagtggatggtgcatctggtgttatgaatttggaggggtaagtttctgaactcaaatgagacatcttagcaagagaatgacaatccaatctcaagatgaatctcaccaaaaaaccagaagtttgtggaatatggcaagcttaagccaccattttatactcaaagtccagtgacaagaaggcccatatttgggaaatctaacacttgggagtggggcagaagatgaaaagacgattcataatgaccctcgaaaccgtacaactgttagaatcaaaggacgtgtttttccaaaaagggattatgacaaaaatgccctctgtaattattaaacaacactttttattaaaaaagaactttnnnaggggcaattgttatactcgaaattcggctaccattttagtggaggacacgtgtcaagataaacggaatatggatcgatgaaatcacttttcatggaataattcattaattgcgtaagtagcagagtatactttcaactccctgactataaggtcttatgcgaggaaaagatatacaaacaattgtttagtgtattaacgagaaaccatatgtaattgaatgcacaatgcaaggcatcaactccgttacatctggcaagacaaaagcgacgcatatcgaccgtgaaaacacttagcatataatgtacaaactaagtataacagtctggtgggctcaagacctaataagcgaggcgccaatctctctataggaaggcgcatttttgctactttcattagttaacttcaaacattttttcagtgagacttataatcttgacaagtcagaagctaacattgaaatgagcctcaagaaactctctgttaataagaactgcgatagtcacaatgaagcgttaagcattcaaacaaagaagcaaccagacgtacatcatcaacctcggaaagataggaaaaaaaggctccagctcgctatcaaagtcactggaaccaacttcctgtcgaggcatcccagaatgctacaattaaagacgtgtttaaacacacgataattttgaccaaataaaagcaggagaatcacaattgtgtgattttcaaataataatcgcatttacactacatgttatgtaatcaaaccccatgatttcaggggagaaacattgtaaagatcacagtcaattttgtaattaactgcctactatgtgattataaataggggcaagtaagatcaaaaaaggggacgaaaaaatcatacaaagtaggccctgaaaaactatcagtaatctaataagattgactcgtggactacgcagaat

SEQ ID NO: 31996 - DNA, 1926 bp, Cannabis sativa
  modified_base (861)..(862): a, c, t, g, unknown or other
accacacgattgtaaatctaaattgtcactatcttcgttttattgaaaaaattcattgataaaatttcacaggaccgattagattattgatctagttataatttcatgatcatggtttcaccacacgaccgtaaatctaaatgatcattatttatgtttatttaaaaataatttgataaagtttcatcagatcgatcaggccattaatttagttatctttttactcatttatgatcaattaagatatatttaaaaagatgatactccaattgtttttatgatcatggtttcattacatgaatgtaaacctaagcggtcattatttacgttttattgaaaaaataatttcataacgttttattggaccgatgagctagttatattttcaatcatatcatttaagatatatttgaaaaatattacaatctcgttgtttttataaccagttaaacctaaaaaattcttgactttagtgattgttttcgactttggcaaatttttgacagattcaatctttcttggatcaaccataattactgacaatgtcttctaaaaatgatttgggataattaaaatttacacttcttaaacttggcatagagcttgtgtttttgtaattgctacaaaatcatgcgtagatgttcatgctctgctttggaatgagtgtaaggatgtcatcgataaatactataacacatatatcaagaaaatctttgaatgccctattcatcagattcatgaaagttgctagaacattagttaggtcaaaagacataattaaaaattcataatgaccatacctagcacgaaagacagtctttggaatgtccttctctcgaattttcaactgatgataacccnngcagagatcaatcttagaaaagattattttcccatgtagttgatcgaataaatcatagattctaggtagatgatacttgtttttttattgtcaacttgtttagttctctgtagtcgatacacatacgaagtgatccatcccatgaagttgtatctttaatctttaagttctacatgaaccattctataaggtgccttagaaacaagtgctaagtcaattacaaaatctatctctcgctgcggtgttaatctcggaagttcttctagaaacacatctaagaattcttgaaccattttgatgtcctctaggcgaactgactcaggcagagtggtatctaacaccactgacagaaaccctaggcacccctcctgtaacagatctttcgcgttccacatagaaatcactgggattcgagatccttgaactgatcccacaaagataaacgattcctcactctcaggttggaagatcactatgcttacaattgatattagtagcatacttggacaagaaatccattccaagtataatattaaaatcttctagacccaattccattaggtcagtactcaactccctatctttcattctaatcggcatagacttaatttatcttttggagataactaattcctcgccaagtagtagggctaaaaatcttgtttcttagaaatcatacgacccacccaacttatcaattactcttgtcgccacataagaatatgtggccccaaagtcaaacaaaacagagtaaaaagagttattgaccgaaagctgacttgtaacaactaagggactgacctcagcatcaacttgagtaagagcaaacacccttactggagtgggttttgcttcggtcttctgctcttcgttcttcaattgtgggctgtctctcttgtaatgtccagttactccacattggaaacattctcgaactttacactcgcccagatgatgtttcttacaattagggcatttcgggtaagtgtatcggttctcagacccaccttgtcggttgcctcggccctagttcccccagaacctcttattctggttcaagccac

SEQ ID NO: 31997 - DNA, 7777 bp, Cannabis sativa
  modified_base (1610)..(1615): a, c, t, g, unknown or other
agcttttattgctttagtagtttactttaattgcatgatttaagaaaagcctgttaggaagcatattagtagcttgatagctgaataggtgtatgtttttaatttttaaataagcgacaattagtaagttttactggagcacgatctgaccagactagctcttggttatgtaggatgttctaatagtatggacactaggcgaaacaccaagaacatgggtaactcggtcgggtttggtgatagtcagggagttcagattcccccaaatgtttgtggctgaggtagaggtcctaaatgtagggcacacgaccagggtgatgttaacccgccacaggctgccaagattgggaaaataggtttgtggaaatgcatgccagaattaatgaacaagatgaagagatctgacgcctgcgacaacagggtgctcctgaaatccatgctccagaaatgcaggtagttcctacccctactgtgcaagcaggatcactcgctatagtgaatcaaatggaaccattgtatgaaaggttccataagcaggcacttcaagtctttctgggaggtcctgatgttatgaaagcagaacaatggctaatagtgatttatagaattctgaattttatgggtgtcatcggcaatgacagaatggcctgtgcacattccagttccaagaagacgctctagtgtggtggacatgatgtcccggactcatgatgttactacaataacctggaaagagtttcaggaactgttcaacacgaaatactataatgaagcagtcagaagtgcgaaaagcaaagaattcactcaactgactcagaaagaaaatatgagtgttacggaatacacaactcagtttgattgcttagcgagattggctttgtgctcgtgccaaccgattttagcaagaaagagaaatacctagatgggttgaattcaaatataagacatgacctaatgatttttactgatgacaacaccacctatgatgatttggtgggtaaggcacaacgagctgagggcgcaatagagtgcacctaggagtctccagagactcaggttgttggtggggcttctaccctcctacaccaggctttagtatgggaggtagtggcttgaccaatgactagaaaagaaaggcacctactgcatctggcggctcaagtcagagcaagtggttgggagggaaccaaggtagacgcaattgttaggacatctctgaaacccaatacacttacccataatgccccagttgtaaaaagcatcatctgggagagtgtagagggtaggggtgcttctagtgctgtatgctaggatactacaaaagggattgatcccaactcaagaaggaagaatagaagatcgcagcgaaacccgttccaacaagggtttttgcgttaactcatgctgatgtagaagctagcccctcagtagtaacaggccagctctcagtcaacaacttttccttctctatgttatttgactctggggccactcattcttatatggcagccagaatctttagtaaattgggtagaccacatgatagttatgatacagtgtttggaaccctactgcctagcggagaattagtcatctccaaaaggtggatnnnnnntatgccgatcagaattgaggatagagaattgagttctgacttaatagaaatgggtttagcggattttaatattataatgggaatggatttcttatccaagtactcagcgagtactgattgtaagcggaagatggtaatcttccaacctgagggtgaagaaccgtttgtctttgttggatcggttcagggatctcggatcccagtaatttcagtactaacaacaagggaattgttacgagaaggatatttagggtttctggccgtggtattggataccactcggcctgagtcaattcggccagaagacatcaagagattttggaaattcttagatgtttttcgtgatgaacttttgggtttacaaccgcaaagggaaattgattttattattgatttcgcacctgcagaaccggtttctaaggcccgttacagaatggctccaataaaacttaaagaattaaaatttaaacttcaggggttgcttgacatagggttttcacggcctagtgtgtcaccctggggagctcctgtactatttgttaagaagaaagatgggtatttacatatgtgccttgactatcgggaattgaataaagtgacagttaagaacatgtattctttaccaaggatcgatgatctttttgatcaacttcaggggaagacagtctttttaaagattgatctctgatcgggttatcatcagttgagaatccgagcaggggacattccaaagacggctttccgcactaggtatgggcattatgtcttttggactaactaatgctccctcagcttttatggaccttatgaaaagggtatttaaggatttcctcgatatttatgttattgtatttaccgacaacatccttgtgtactctcaatcagtaaggagcatgagcaacatctccaaatggttctacagcggcttcaagaaaataagttgtacgccaaatttaagaagtttgagttttggacatctcatgtgtccttcttggacacattctcagtaaagacggaattaaagttgatctggggaaaatagaatccataagggattgctcgagaccgaaattagttatagaagttagaaactttttggatctggcatgttattatcgttagttcgtagaagagttctctaaaatttccacacccttaacgatcttactaaaaagattcagcgatttgtgtggacagacaagtgtgaagaaagctttcaagagctgaaacagagattaattacagctccagtgttagccttaccttcttataaagaaaagttcgtagtttattgttatgcatccagacaaggtctggggtgtctattgatctaggcgaatcggattattgcctatgcctctcatcagttgaaagaatatgaacagcgatacccgactcatgacctagaacttgccgcggtagtggttgctttaatgatttggcagccttatctcaacggagagaaatgtgaaatttatacttaccataagagtctcaaatatttctttactcagaaaaatttgaatatgagacagaggcgttggttagagttggttaaggattattattgtgaaatcctttgccatcctgggaaggccaatgtagtggctgatgcccagagcaggaagggtgccgggcaggtaactagtataattgagatttcaccccaattagcagaggacatggttggatcatgcatcaagtttgtggtaggaaaacttcataacttgacactgcaatcagatctattagaacgaattaaagctgttgagttaactgatccagaattagtgaagatcagggaagaggtttcagctagtcaagctagagattttacagtgtcagatagtgggatgctgttgtttaagaccggggtttgtgttccttgcatactggcaccaccaagatgtaccaagatcttaaaccctacttttggtggagaaggatgaagaagaatgtgttagaattcgtatctgatgcctaacttgtcaacagatcaaggctaaacactagagacaggcaggttttttgtagcctttgacacttcctgagtggaggtgggaggatatcaccatggacattatggttggattacctagaaccacaagtttattggattcaatttgggttgtggtagatcgattcacaaagtctgcacattttctaccggtaaaaacaacctttatagtggatcagtatgcagatttatatgtcaaggagatagtaaagtttacatggtgttccaaagtctatcatttaggagagggatccgaagtttacttctaaattctagtagattcttcagtgatttatgggtactaacctgaaattcattacaactttccatcctaagactgatggacagtccgaaagtacaattcagatactggaagatatgttacgagcttgtgttatggatttcgagggctcctagagcaagtatctatcgctgtttaagttctcttacaataacagttatcagagtacaagagggatgtctccttatgaactgtagatctcctattcactgggatgaaacgggtgagaagaaatatctaggtccggaatcagtgcaacggtctaatgaagaaatagagaagattaaggcgagaatgcttgcctctcaaagtaggcaaaagagttatgcagatccgaaaagcaaaaatgtagagtttcaagtaggagatcatgtgttcctacgggtgtctcccatgaaggggatcaaatgtttcaggaaaagaggcaaattatgccctactatactctatctgctcttcatttaatgtgttattccattttaaaatcttcaaatataattactattatatttgttgattcgtattctcccaagttgacacacgtccttctttgaagtgccagctgaatttcgaatataataattgcccattaaaaagttatttttaaatgattacaaagggtatgtgcatcataatcccttttgaaattatgcatgcctttgattttggcatttttatggtttcgcggtacatcaacatttgatgaccatcctttccacttctttttcaaatcttacccataggatcaattatctttctgatctaacggagattatccaaagagtataaaacggaaaaaggaacttgctttgcattaccattgccatattagaaactctaagaatttttcaaacttttctgccgaaagaccatttccaggtttgctcaaaaacttgcatgccatccctatctttgatattcttccttcgaatttcatctgatttaatttttgacttcaagcattctaagggatcttcaagccgttcgttgattcacagattgcagaactgttcctcgtcttacaatcaaaccccaaacagtgactcttcctctcattttcttacgtagttttgatgctgtgtttatgggtttgatttctaatttcttatttagcaccttggtcacttcatttggttctagaaactttagggcaggatcgattctgagtagctattagggtttaggcagaacgtaggtctttcaaaactcttcaatttaccaacttctactttgataaatttcctccaagaattaggattgcttcccccttgcaatagtgtcccaatctggttcacaagtttatcgtccaaaagaattaaaaatagagtgtcaaactagacttgtcgtcccacataaacccagaactccaagagccaaatccaaattaaaggtaaatgatgcaagaattagagaacattagtgaaaacccaccatgatgatattgttagttcccacagacgcttcttgcaagaaattacagaagggaaacaccatttcttgcgaggtgctgccctgcctgaacctcccagtgtgtcctctattcctttggctaagcatctgtttttacccaaggtcatagttgcttttgaacctggtgacttggattttgacataatgtctaccaagcctcgtaaatcaaggacttcccaggaccctaacgtcactttcgaggaagagttaatagagtcaaggtgcaagccatcgcaggttacgcgcttttcgctgttcccaggacacttatttttaatagctgtctcgaaaagacctgcccctactcctaagatggccgagcagcacagggtcttgttgactctcccatacggtcttaggtcatccgactttcttctaaatgaggtcaacctgaggtctgtaaatctcctaactaacaaggagtttacttgtgattacaaatctcccaagtatttttcttggcagcagtttcctctcccagatgaggagaaagctcaagatctcgtggctcgggcatagtaccttcagaatacttcccctcaggaagccggtgaaggagcatcccgaggtaatcaatgtggttggtcacccacactacttaggaaagagcgtaacactctagttacattttgagatagccagtataacttttatacttggcctcccctttccgtagatcctattacacataggtatcatagttggtatcccagattccacgtccaaattagctgtactgagtcgtactatgggatagccgagcaaaacaggactatgattgatagggcgagccatttagacgagagctggaatttaaaaccaattaatccctatgatatatttaagatcacgagttgtagggatgttagtggatattatagtcctttttcctcatcttctagtgattgtggtaaattccttaggcacgaaattatatctaaatatctccttttacttgtcgttcaataaatgctcacagtttatcttatcttccaaaaatgaactttgagggcctcgtccataagaaaggaaataagggagtgaccaacttggaggctccttttaacgttgaggtgaagcccctcaaaatgtagaggaagaccacagccaacaagaagcgagcctcccagttcgtcgagattcccgagtctaaaaaccaggatctgattcttcctctgttctccgcaagtactgataagccccttcccaatgcgagccaagcttctacctcttcgtgccaagccctcgagactcttcctatcgatgctaatagtcctcacttgaggtacactggagaatttggcccaaccttttggcgtcacttcaaggcttttctcccccatgaatgggatttgatcaataatggggagttgcagaatattcttaaaaggagtgttgctcgtggcctctcggtaaaatatttttttctctatcctcttacttttccttctaacccttttcagacttacttacgcattctttatttgtcttcagcaaactttcctctccttcgtcacccaacaacgtggtatggaaaaactaaaatatttggaaggtgtggttcaaaacttgataggcgagcacgagactttgaccaatcactggcacgatgccaagtctaagaacactcgcgtaagtaaagatgccaagaaggtgaaaaagaacctcgaggccaagctcgccgtttctaagaaagagacaaaggacaaggccaatgaatgcgagaagctcaacgcggaacttgctgcagccaaggtgacacttgatgggaaagaggccgaaactaaacaacaatgcaatgttgttggcctccgtaccatctaccgagcatggatggcaaattgtgatatggatacaagtttcttggaaaaatttgaggaggaaattattgctttctacgagaagaccaaaaaggaggaagacgatgccgagaaggcagcgaaagaagaactggccaagtctcctactgtgtaggcttggtttttatttttattttatctaggttgatggccctaagttggagatagtggtttgccccttgtgtaacaattttttcgtgaagacgtatttgcaaggtcggatggccaactttactttttttattttatctttattgaatgcttcgtacttttatattaactttaatatatatatatatatgtttgcttttattttcattaacaatttaaacaatcatattttgatcaaatttaaaatactttgggcctttccactgctcatattttcctttaataatattcaagtagtcagtaatctactatatgcacgagcagttgttatctgctatgctgttgatttacgagcacttatcaattctgcctcccaataacagttataatctgtttcaagcaaa

SEQ ID NO: 31998 - DNA, 3517 bp, Cannabis sativa
  modified_base (28)..(60): a, c, t, g, unknown or other
tttaatcacaacataaaaataataattnnnnnnnnnnnnnnnnnnnnnnnnnnnnnnnnnacaaattttattgtgactaaatgtaaatctttttataatgccaaataatataaaattacataacttacttaatattttttcttacaaattatataagatcactgactgtcacaaaaaataactattaataatataaccaattcaagaatgattattctaattttttttaggatgcattgtacaatgttaatatcttgacacatgattgttaaacatgatagataataagctttaatattggatggtagaaactcctttaatttctcttatttttgtatgatgaattatttgatctaacctaaaaaaaagttattaaaaagaaaaagaaaaaaagaatctatttgtatattcgtgtgtgtggataagagtgtgtaataagacaatgtgaaagtgaaacctttaatataatggcaagaaataaaagatataatgaatagttattggagaatgtaattattaaagcctttgatttatccccactactttgggttatataaggaaacaaaagtaaaatgtttcatactttcatgagtaattttcagtcccatatctctagattattttgtccaaaaagcaaaagaagagagaaaatatcctatgatcttgtggctataataaactacatttcttttaatttttaaaatataagcattatagacaagtgacacatctttggataaagaataatatttgtaggacaagtgatagaaattagggttttacgtacaatattaatattggagaatagtgcatgtcactatatatatacatacaaaaatttaggttagcatagtatggatctaaattaattcacttattaaacacatgataaaaatatactatttttttttttggaatggaaatttcgtcttattattgaaattaaacccttacatccgctaccaaacaagatagcaactcagttggaacagtctccaaaatgcaagtacaatcaggatataatctagcagctctagcaaacttatgagccactacattagctaatcgattaacaaaagacacaacaacattattaagagaagcaagcatagttttacaatcttgaatgacgctaccaaacaaggatatcatatcgatggaactatgaatagcttgcaccacgcacagggaatcggtttcgatgtaaacttgaggccatcgattctccttcaaccaactcaatacctcccgaatgcctattgcttctacaacagacacctccacttggaccgcagtgtacttcatccttctctcaatcaacaaaccatcggagtttctagccaccatacccaaaccgaagctcctcccatattcatcaaagattgccgcgtcgacatttatcttgacactagtaccgtcaggaggtgtccactgctcaccaacatcagcagccgtaaggatcggaaacgatgaatccgaagatatttgagcagttttccattggtcaagatagcgaaacgcatacgaaacaacgtcttcaaaaataaatggtttcttgttccacaccaggttgttcctggctccccaaaccgcccaacacacggccacaattctgcaatttacagcagcagagttgttgctgaaagccacaattctgcaataatagtatataagttgttgctgaaagccacaacttatatactattattctacctaaacataaaaatatttctctcattttaacttctccattttctaaactcaccatagtgtactacttaccaatgcgctccgctcaccaccactcaatttaattcttttttaaccaattagatgatataatcaataatttttacaaaatacaaagttaaaaatattatttactttttttttatcactataaaaaaatatcacttagttttagtcacaataaaatttcaaaagtcataataatttgtttaactaaatgtggttttagtcacgatacttgttgtgattaaaactaaattagtgatattttgtattcaaatattatgttttagtcacaagtaactttttgttatgactaaaagttacattagtcataaaaattttgtgactaaaaaatttatcatgtaattattttttgtagtgattatatgattacaatgttaaacatggatatatatgaatagtacctataaatgaatgaattagaattgttgaaaacactttaaattaattatctgtaccttttaaaatacaatcagatagactatttagaagcagttgtttttccaaattttatttagttttattacatacatataaaatagtaatttagggggatcaattgggtatggaaaagaaataagttaaaatgaaactatgaaaattccaaatacaatcttttacataattacttcatatatcccagaaagaaatagcttttttcacatgaaatacttatacatttacaagaaattgtaattaattgacaaattaattaattatcttaattagtacttcactgtaataggactcctcacagtgtgttttccatcagaccatttcaactctccaaaaacataatccttaataggcttatttccaacaaccttagccttcaaaacaatctcaaatgtcttctcctcaccaattttgttaaatttcaacatttcaggctttacataagccgaaaatccaatcggggctctcacaaaagccttgtaggtccccggagtgccaacattcctaactcttctagtaatagtcaccaatcgcgaaccaactcgagggactgaaattgaagggtagttaaggttagccatgttgaaagacttagggcatttgtatgatttgttagtgaatactcgaagggcggttgcattgtatccacgagcacataagaagtttaagtaatcgtcgatggttatgtcgtagacaagtccagggtccatagctcggtttggttggatatggccagcaccataggcaaaaggtgttgcctttttcatggttgagtccattattggttttttagtcccatctctagttttggctacaattcaagtaagaaaattttagtgtaaattataatacatagaagtgttatagaatgtttattataacacaaaaaaatgttgttttacctgttgtcattatagctgattttatagcagctgcactccaatctggatgaagtgttttaagaaggccaacaactccagaaacatgagggcatgacatggatgttcccgactcgacattgaatggaactcgacggtgatctgattcaatatcggacggtcctgttgcttctgtgtatgcagcaattatgttcactccaggagctgttatgtcaggctacaatagcaaaaacattaaaagaaattagattgtatacccactttactttatacctgttttaatttttacttatatttccatattctttaaaatatacccatttttataaatgatgtccccattataccccttagattaatgtaaattatgtactacactgattaagtaa

SEQ ID NO: 31999 - DNA, 2056 bp, Cannabis sativa
  modified_base (51)..(60): a, c, t, g, unknown or other
attcctttgtcttattattgctttcttttatatattctcattacgacatannnnnnnnnncttatcaaaaagactcattgttgttggctaaaagcgaagtcaacatgtactaaaactaaagtaaaaatatttataacaataaaatttattatataaattttatctgaatttaaattttaaaatattattaatttcaagatattttttcttacaaatacttctatcaatttctccttaattctcttattttttgaatttttttattctactttaaattctctccttaattttttcattttttccatttttttatttttttttatttattcagagatcattaatcaattattttttattctactttatttaattaaagatcactaattttgtcaaacaatacagattattaattaatttaaaattattaacaaaatatataaccgtatatattaatgatgactacaagtgagatacgatgatgatatcgattttaaatgtagtggtgactacaaatgaaatatggtgatgacagttgttttgaagatgttttcttgtatgttttctttttatataagagattgtatgatgatttttttaaaaaaatattctttagagtaatctatatagatttataatttttttcaaaaaaaaaaaaagttatacataaaactctttttcaaattatttcatatagttttaatttttaatattcaactaatattcatatatatattttcaaatttatatgttgtataagaattatttcagttgataatttttctgcactataattcatttaaaaaaagtgtactttttaattcacatataaaattgtatgataattttttcagaattgtttacatagattatcatttttttaataaacatatttatttttttaaaaaaattatacataaaaataagtttaattatttgatctcaatttattgttcaatcaaaatatttatatttgtaataatttaaccgccacgcgtggagcgcggcctgtttactaatttatgaaataatctcaaaaaaatgcattcaaaaataaatatttttcttgtaatttaaaagattcaacaaaattaaataaaaaaggtagatataaagtagatatctagtgaagaaaaacttatagctatcttataaggatgcatgaatagtaaatacagttatctcatacggggattaaattataaagcaatcactaatctggcgtttactaatatctttttaatcagttttcaatttttaaaattgaaaaaatgaaaatattttttaaaaatatattctataaaactgttttcacttttaaattttttaattgagaatcaaaattttgaaaataaaaaaagtcagtttcaatattttcttaaatagttttttttttcttaatcaatattttagattctgaccatacccgaaaccaaatccccccagcccctgcggccgaactcgacctctgaactgaacccgaatccgaccccagacctagacccgacttaaataaaatccaataaaaataaaaatgacaatgaactttacagaacacacttttattttctgtttttaaaactgaaaaataaaacttgttacaaaacacatttttatttttcaaaaacaaaatttttaaaaacaaaaaataaatttttatttagtgattaaaaaactaaaaagaaaatgtgttgccaaatggcacctaatcttctttgttatcttcaactagttctctctctatatcttactaatataaaagtgtggtaatggtgtgatattaccataccacttttgcccctcacattaatttataattacattagtgtgacattaccataccatttttacccctcacaaaaatttataattacattaatattaataaaatgtaaagtataaaataatgtaaaatatagtcaaatctcatatccttacatgattgtatatttcttttgaagtgggtttttgtctattctacaaattgcaacatgttaaaataataggtgcatattcagtttgtacactaaaacatagagttaaaattacaaatcattta

SEQ ID NO: 32000 - DNA, 1458 bp, Cannabis sativa
tgaagaagaaaaaaaaaataatagtaaaataagtttaaagaatgaatagtgcttagcttaactccttagttattttagctcacactcacatcactttttttactttattttttaaaataactcaccaaaatcttacttttatattgagcattgctatgacactcatagtacctagcactatgataaagtgtcactttataattggttagcaatattctataaaatttattaaaataaatagaactcgataataaattacatcaataataatattacacatcagaatagtgctaagcagcataagtaccttttatcatttctcttatattttatctcacatttttatattataacatacgagttcactatattttttatctatatcattaaaataacatatctttaatacattaataatatataaattaataaaaaatattatattatacattatatatcattataaaaagttaataacttaaataaagcagtaataaaacaataaaaaaatttagctctctctatagctacatcaagagatgcattttattagagtttgtgcaaacatattatagctaagttataaagaagttaatggaagagttaaaaataagtttttaactaaatttgtttagcttttagctattatgaagacactagtgggagtgctctaataaggaatattttgtggacaactcttcaaaatttttaacttttagctattataactcatttgttgtgatacattttcctacaagtatgactaaactttaatatgcattagtcataacatacaaggttttgttaagaaaatttattattattattaagtcaattttttaggcagctaataaataataaattatataattatagagattaaagaaacgattaagtattattttgaaataattttttttacgtagttggaacattaatgagtctttgtccatattatctaaatttctacataggctgatttggcatccatctgggtgacacgtggaataaattccataacatggatgggcaatcccacttataatgagttgtgcatgaagatttgatacttgaagtcataaacagaagttgggacatccgagcagaacatgcgaaaacatcccgaccaacttccatcaagtagttggcttgaatacactgacgaggggatgtgagttggacaatttcatagatatatgctatatatatatcctcaagcttgcaagacacgacactatccctaaatttatgggatagattcgttgtaataaagaagaaaagaaacatatctagtttcctattctgtttattgtaattatagaaagtaaacaaatttctcattttatttcttattgattttgaaaaatcaatttgatgtaattaatctctataaatagtggactaatctcactatttagggacacgaatttcatccagagaaaatacatgagaaaaatc

SEQ ID NO: 32001 - DNA, 2107 bp, Cannabis sativa
agaagcagccttctggttgatcatctcatcatcagttgacaactctgaagttgagatggtattttgagttcccctacatcgcttcaacgcctttcgcaatgccaatttttcaggaagtctcttgcccatccgatttggagagtaattttctttatcattaacagtactagtagacaacatacagattgtagaatctgtcatgagtgggtaaacaggagactgcgagactggtgcagcaggaatgttgaaagcacttgtgggcattgcttcaggaggatatgtttgctatgactccttcttgatgaccaaccattggcatgtacagatcagatagatcactttcatttggagaagttggatgtgtggtgttaatggctgaatgaaggaatttgctggaagaagtgtcactaacatgtgttgatccgtgtgttgatatgggcagtatgttatgtgaaaaaacactagcagaagcaccagacatgcctttatttttaacagaggggtcaatcacttgtgatagcattgaggctgatttgggaattaagacccgatctgttgccgatgttggtattgcagaggaagtagcagatgctgaacccatctggtgctggtacagacctgaaccatcaatagtttttgacatgaaaggcagatgcaagttactagggaccaatgaagcagatgttagtgcggttggggcaaaagagattgacctactgctatccatggtaactgcctcaggaaaagttgaattaggacgattaacatcaggattttgatttgttggaaagtcatgagtgagttgctgagtgttagatgattctccataaagtaatctcctatgttgtggctggtttcgagtagggaaggagggaatggatgttgtgagagcattccttgccaatcgagtaagaagtggccaagcatttcctttggagaagtccgtttggtatctgtcataacctgatgttggaagagcagcccctttgatttcaggaccataagcaagttcaagatcaactccattgtctaaaagtttcaagaaaaatttgaacatttcttgggtaaggggtggcccaagacaaaccacattccatacaccattcgggtaatctctcataacggaaatcaacccaaaatttgtctttaacttgctgcaatcgaatgttcctaccccttctcaatggtttggtaacatcaagtttgactcgaatacgtaagaatggtccccatcattcgttaagagaatcagtatatacctctaaaaattccccaattatgtttcccaaggcctttgccaaacctctagtcttactaagaaaaggcagcctataaacttgtacccaaaaaggagagaatttgaggtctgagggtgatacattctgcagtgcaataggcttatgaagaactatatgatggttttggaaatgccatggctcctgtgtaaggactctttccttatcccctttacagccgaaagagactataaataagtaaggctctttctcagtaattttggcacggtaacgaccattccaatggtctttcatttgcttctggaatgtggacagatagactggtttacgagtaagaactcgggccaaaagggagtgatcattggtgatttccaagtttggagattcattttcatcaaaagcaaggactgattcttcttcatcctcaagattaataactcccttcattttactggttaaaggatccatggagaagcaaggaggatagacacaggattatgcaaagaacagtgtggaacggttataaagttttgcagagaaactgcagatcagaaagaaaaaccacaaaggactattaactgcctcagagcaacaaacggcagacgctctcagattttaagtgaattattctaagagtagtctttatttaatatatattaaattctattttcataatttaaataacagaatttatataaaatatcaaaaggaccaatttaattagtcaatcttaagtaaaatatcaaatgtgtacgcttcttattaatccaaattttcactccatttctatataaggataagaaaaaacttatctcattcatgtttactactatttacatatatatatatat

SEQ ID NO: 32002 - DNA, 1705 bp, Cannabis sativa
taatctaattcaatataatacaatacaatacaatacgacctaatacggcattccaaacgagcctttaaataattaattaataaattatttaatgaaacccaaaattacattatatatttatacatatacaaagacttataagctaatttgttgaaattaaagataaaagagagatcaaaaaaaggtgaaatcaaaatcaaagcataatatatggcaacatgaagtcaatttagtttgttatgttggtgggtttttcttattataattaattaaatataacatattttttttaagtacaatatatctcattattgtattcatcattatatattagtcctatgattggagtgaaaataataatatgaaattattgaacacaattcccacaaaagttcatcatcttttgatctctaatacacgtggcattcaaggagaagaagtgggacccaaaattttggtggcttgttaaaaagatttgatcttttcttttgtaaatataaattattgtatgataaatgtaatgaatgagtctatatatgagataccatgaatatatatatgtatagaatgaggtgttgagtaattatatgaccccacattcaccattatatatgccagcattaaggaggttttaaaggcttttcgatagaacaaccaaacttcttatatcattaaatcttttaacactacatacctataacctttactattctcatatgttaattttttttatttaatttaaataatatagttaacattgccccattaaaaaaaaaaaaatactacccattttttagtcacaatataaattttttataactaaattttgtttttataattaaaatatagtattttgatacaagttgtcactaatttattagttttagtcacaataaatattatgactaaatcatatccagttacaataaagtgtaatttttgtgattaatacctttagtcacgaatcttttagtcacaacataagaatgttaatttataattagttacaattttttttccttttaactaattataaatattattgtaactaaacataaaaatatttgttattaaaaaaaaaaaaatatttgtagtgttaatctaattcaaatattttaagtagtggatgttatataattcaaattgaattaatttaacaataaatatatacaagactattgagttttagccttaattcccactaaaattagatattttgggcacaaaagttattattgcatatacataggttaattgtccaaatctaaatctaaatagaaggctaaatgttggtattcaattaagttacttttttgttttattggttgaatgagttttcacttaatttttcaatcacacacaattaagttgcttatttttttttatacaaatgaattataaaaaggttgttggtgtaaaaagtcaattttacatttaacatgacattatggtgatcacaatgtgatcaaaaattatatgatgatcgttttgacacatgtttgagccaaatttattgttgtcattgtcatttgtgtactgtctcattaatcataaagtaatcattaatcatgtagtaatttttattatatatgaggatgttgttttgtggaagccctaatcccaccataaaaaattttatttttagtcacaacaaaacttgtgactaaaagtgaaaaaattaggactaattataaattattattct

SEQ ID NO: 32003 - DNA, 1877 bp, Cannabis sativa
actaattgcataattttgtgttaaaagttttaatttaccgaaattagtttaaatttccaattcaccccccctcttggaaacatatcttgggctaacattaaccatggcatttgaccagatatgatatcaactccctctcaatgaaagtaccaaactattgacctcagaaattggccaaccgatagcagagttgtattaaactaatgcttgccacgtgttacacaattaaaactagaaagcaaaagaacacaagaatttttatagaggtttggcccccttagttagtggataatgacctactctccttttagttgtattaatacctaaagataatactatttagatcactataggtggaatttgataaagctcaggattagggtttcagactttaaacttgagagctaatgacttaggattttagagataggttaatgctctttatatagtagagcttacatgcctaatatccttaggaataggtaaaataaagctattatttacatatttaattaaaaaatacaaatcaccaaattttcccttgaatgtagatattttcgtagcatcttcgtgggctatcaagggtcaactcgcagcttggcttgttgtccacggataaaggctgcacattaatgacctacaaaagaaaagttggccagccatgcacctacaggatgcgggctggccggccatacaaggtctacaggttgaggtctagcaggtcatgttcctgtcaagatctggcaggtcatgttcttgccaggatctggcaggtcatgttctcgtcaagatctggtaggtggaggccagcctttggacatcttttccatgcagaagtccgcctcccttggttgaacggaaactctcttggtctgaaagtcacttttggccaaacaacttatgcttaaaccttggccagccatgcaagctcatcctggccagcctatagactctccttggctggccaaacatgtttgtactactgcttgacggctcgcttaactcctttcgtttactgcttaacggctttgccataccttataaggaggcattatttcactattgacaaggttgtattccacatgtactctatcttggcttacatggacatgccacatcaggtgaacaaattttgggattacagagagaactcatgaaaaagtctttaagtgaaaagaggatccgtaagggagtaaccacatgagaaagaggttacggaagctcatggaaggcttaaagtgccacatattttgaaagaggtcaataaagctcaagaaactaacactcccttggctaaagaataacacaaatcaaaaagatgttaagaaggcttaaagtgtcaaaactccttcatcaaaaagagagttttgtatcatgaagagttatcacacaaaaaaaatctactagggatctaacataacacacaagaaagaagtctttattaaaagtttgtctcgctaagacgttttcaaccctagcttgtctcataaaggtgacttctttcaaagatgttgtcccacgaggatagtgttgggaaaacatgcttagtaggatcaattttattttttatgtaaataaatatttaacatatatatgaatctacaataataccaatatcatcaatttagaatagaatgcttacagagatgtgacacaataaattatgtctgatttcgtttagtgatctaatcttttttctcttatgttgcaaagtatcagtaatcactaaacttagatattcacttgaacaagaactcaatcttgaatcttcaatttcttcacaatcttctacaaagatctaggtgttgtaacaaaattatgtgagaaattcttacactactaagtggagtttcaaaaaatacaaggagagagagaga

SEQ ID NO: 32004 - DNA, 1375 bp, Cannabis sativa
  modified_base (109)..(115): a, c, t, g, unknown or other
aaatatttcaataatttaagtgaagtgaataaaataaaattaatttaatttctaaaataaaaaattcttatttagtaacaaattacaaaaattaattaataattattannnnnnnaattttaaatataattaattttagttaagattttacaaggaataaagtatcaggttactttcaggttacaagttataaatttatttattttaatttctaaattaatcacagccattcaatagtgatccaatgattaaaaataaatgtaaccatgatggttacatatttgatgtaaccagtgaaacctcctccatatatatatttatgaaataacaacttcattaaattagaatttagaatataaaatatccagcatagttgctggtgcattggacacacaaatgcaatgatctgaaaaggactgagacatactagcaacaacatgtgctagacagtatgctgatcgttttacaaaacaaattttaactaaagactgagatagcagtagtaaatgacaatcctgaaccaagttcccaaagatagagcagagagaagagggattgcggatagcttggattgagactaagctgtctgattcaagttcaacatgttgcatccttgtattttgacccatcttaaagcctctttaattcccatgatctcaaccacttaaggatcaaagacaccattgtagcagtaagctttagcttcaatgagggatcctgaattgtttcttgcaaccataccatttgtgcatgttatcactagcaaacgtagcagcgtcaacattaatcttgattgtattcacattcggtttagtacatagctcaactccatcatcatcattatcaaagtagatgtatgatagagatgtgttatcttgagcttttaaccagtgatcaagagctatacgggctcgtgttaagacaattgcaacagcgagcgctttgtccttccaaacaataaaatttcttacttttcataaggaccagcacaccataattaaaaagcaaacaagatcagcatcaagacacttgaaaatacagtctaaccagcttgcaaatgagaggtggagtgatgccctagccggtagacttgtgctatgccagcaggaggaaataaagctgcaagaaagaaggatgttagagatggttttcggagaagaattacaaacgggacaaagagagggaacatcgacatgtttcattttgagattgacacatattgatatgatcccagaggcagcacgccaaaggaaatttctaactttgggtggaatctttagttgccaaagtttttgccaaaagcttgagttgttgcttccaatccttggatctttagaatcctgaagaagacaatatgcacttttgacagagaaat

SEQ ID NO: 32005 - DNA, 2913 bp, Cannabis sativa
ttgccaattgccaagattagttcttgccgaccgaataacctccaaaactgttgttgatttattgttccatagttgatcattacgtgctgtccaaatacgccaaatgagcattgccgcactctcagcaacagcccgactgccctgcaccagcaagccacaaaaccagtcgataaacatgtcttcgccaacaccagcagcaggagcacatgacagattccaacaagaacgagcaaagttgcaactgaacaacacgtgtgaagccgcttcaggtgcaagattacacataggacaggttagatcaacatgtacatgtctattagaaagctgaactttggtggggagacaacctgcaacaacacgccatagcaggtgttgaaccttggctgggacgttcaattgccaaagcttctttcagacgctgtccacgccagtaacctgccagtcgccattggaacattgcaacagtttgtacgcgctacgaactgagtagataccggttgtttctttagaccaagaccaacaatcctccatccttgagtcacacaattgaatggataaaattaaggctttatcatgaggattaaaaatatcattgatcacctccatatcccaaacttttcgatccatctgcattaggctatcaaccgttcttccttcaaggctcggatgataagtggtgacaaatttattgtccgaatcgggtagccaagggtctaccataatagaagtggatttcccatcacctatagaccttaaaacacccatctgaagcaaagatttggcctccaggacactacgccaaatgaaactcgggtttggacccaattcagcagataagaaattgcccctaggaaaatatctagctttataaacctttgccaccaaagaattatcattagttagcaactgccacccttgcttccccaaaaaagccagattataatcccgaagattttgaaaaccaagccctccagcatccttgtggcgacatagtttacgccaactcatccaacttactcctttagacacatttttagactgagatttccaccaaaacttagccattaacccctcaagactagagcatatttccttagtgagaagaaacacactcataacatagcttggaagggattgggccacagatttaatcaaaacttctttccctgctttggataggaatctagtctcccaactctgtatcttcttaatcatcttctccttaaggaaccccaagattgcattcttgcttcgacccatcgtacatggtaagcccaaataggtactattttcagaagcaggagccataccaagtaagccacataactgagcccgtacattttgctgcatattgttactaaagaaaactgaagatttagcaaaattgattttctgacccgaagctttctcataagtactcaggagacgaagaacattagccccttcaatatcatttgctttgcagaagatgtagctgtcatcagcgaacaacatatgtgaaacaataggagcatttctagccacacgacaacccgatagccaattcttgcgaacaaataacttaataagtgatgaaaagccttctgcaaaaatttagaacaagtagggagataatggatctccctgacgaattcccctactgggaatgataggccccagaacatgacccccatgagtgaccttatatgttactgaagaaacacagtgcatgataagcgacacccacctaatagaaaaacccatccgaagcatcatctactcaagaaaaatccactcaactctgtcgtaggctttgctcatgtctagctttaaagccatagtccccgtcttgcccatagtcttcctcttcaggtaatgcatgatttcaaaggaaatcataacattgtcagagatcaaacgcccttgaacaaaagcactttgcgtctcagaaatcacaccaggtaagaccacctttaatctgtttgcaatgcaaggaccttggatataatcttgtaagcaacattacaaagggaaatggggcgcaaatccatcatagtttcaggttgcttcttcttaggtatgagcacaatattagtttcattaaacaaaggagagaaataacctgtgtcaaaaaacaacctgacttgagaaatgatgtcattacccaccacggaccaacatttttgaaaaaaaccaggtgtcattccatccggcccaggagacttatcagggtgcatttgaaagagagctctacgcacttcatcatcactaacaggttccaataacatgccattttgatcttcagttatgacactaggaatagtatcagttacttcgttaacatccaaagaagaggaagtgaaaagattgttaaaataatcaaccataaggttagccaaattattttcccaatcaatccaaatgccattatcatttttcagtctttgtattgagttattcctctttctagaagtggccatagcatggaaatacttggaattctgatctccctcctttaaccacaactgttttgatctttggcgccaaaacacctccttctgaaccaacacttcttgaagccgagcctcagcctttttataatgatcaactgagcttgcatcctttcctcttttccaacgtcgcaactcagtcttgcaagcttggattcgatctttaaaatttccctagtaatctcttccccaaaccgaaagcttctccccacaataatgaattttatccataacagaggaccccgaaagaatctcccaagtatccttcaccaactgcaaacaggcgggttcacgaagccacatgttttcgaaccgaaattgtttcattccacccgttctcttcattacttcaaagactaactgaatcggacagtggtccgaagtcgacacctctaaattaatgagtttagctagaggaaaacac

SEQ ID NO: 32006 - DNA, 1941 bp, Cannabis sativa
gtaggtaaagctcaccaaccttggtattcaataattgttatatatatgattatgatcatattatataatatatgaaatttttgtagtacacctttaaaaaaaaaagtgtttttggtagaacctaatctgttttggcatctaaaaaaattaatttaattttttaataatcttttacgttgtacttatttaggactacttataaattttttaaaaatttcaaataatttattatgtcaaaataagatttaaacaattatttcatacatataaaaaaaaaaaagtaacacgtacaaccaaatatttaaatattattttcgacattataaattactcaaatttttttaagaatttacaaatagtgttaaataattataatctacgcaatcatgaaaaaaataaattaaaaaatctcttaaatgttaaaactgattgggagtccacatgaacacctctttaagggaaatactaaaaatatatcgataatatatatactacatgaacattgttaattatttggtaccagtaatgcataataccttttagacgtattttttgtaattgattagcgatattttttaaaaaattattatattaaattatatgaaattcaatatatacttataccaatatatatatatatgacaccgaaaaaattattaaccgtcactaatatattttaacttttttcatactatattaaatagtacaacttttttgataatgagctatgattaattaattaaagaccaaacccttgaccagattaattagtagtatagtatcattttttaaggagtagtattaataataaatttcttattattggagtattatataatcatcatctatgctgtatataaaggtgtggctcaatatataggtttttgttctattatttattttattttaatttaaaaaaggaattttattctataatgatatatcatatatattattgtattttatttgtagtgcttcatttaacaataattaaacgatctttatcaaaagaaaaaattataattaaactaagaacaacatagttccagcataattttgatagctcataaatatgcacataataatctcaaataataataataataataataattgagtttattaaaattagctccacattaatacatgaaaatataagaaacaaaaaattaaaatgcgacaataatttttttttaatattatccccttaaaaaatttgtaattaacacctattttaattaatttatattatatgcaagattatccatcgattgttttttttagttgtttatctagttatttgtaaaatcattattttgacatctatatttcttcactcataccatatcagtataattttatttttttttttaaataaacaatatatgtaaataaataattaaatatcactgatagattataattagttagatatgagagtgagacactctctccctcgctttaaatttaggggtttttatcttttcttttggctaagactgtccctggctttgccgtgcaactttttttttattttgataagcaagtaagaatattattgcacaaaaaaactttacaaacaaaaattagtgtaactaattagttacactcaatctctctaactaatcaatatcttctatacttatgttctctcttttaaaattgcgatttattctttatgacattagctttagactgttttcggcggggtctgtctcatggtgttattaagttggcatgagttgtggttattgatcttgtttttgtgagaattgtgtgattttagttcggtttaattttttgggcttggttcctttaccccttagagtgacacaattttttttttttttacatgattaaaatcattaaaggaatttacgaagctgacattcaccattgaaccaggatagcttattatctaatcaaaagacatgttttatc

SEQ ID NO: 32007 - DNA, 1429 bp, Cannabis sativa
taatatccaaactcatattttattatttttgtttctagtctaattggttttttttagtttattttgtatttgtattttaggatttttatttctatcttttccttctactctacaattttaagtgagttttctgtttatttggagtattatttgattactagagtgtataatattaacccacctctatttttattatttttatatatgatttctctccctcttttgtttttttttgttattgttgttatgatttttattgtatttttatctcttaaatttttgttgtttccttttctctctctgattttagtttttgactcgctttattatttttgctccgaattctatgttcgagaatgaagttaaccaaaataaagaatggagttagaagtttagttattaggtattgatataaaatttatatgttcaaaactgaattttaaaattagtattgttttaaagtttgattattaggaattgtgtatttttcattatattgttgatgaaactgatttttttttgcctcttttaatgaaataattaatttttttaatgttgatgaaagggatttttaaagttaatatcgtttttagattataattttttttttcatcatcttgttgatgaaacgattttttttttcttttgcttcttttaatgttgatgaaacaaatttttgaactttaaattatgtttagattataatttttacatttttttttagtatgatgttgatgaaactgattttttttctgctgcttttagtgaaataattagtttattttaatgttgatgaaactagtttttaaaattggtatcgtctttacattatttttttatgaaatttgttttagtttgtgattcacttggagatatttactcatattaatgctcaaatcaactatgacttttgatcaagcaaataagagattaaatgttaaagcaaagtatgaagtttgaaattggggtattaagtattcatataaatctatatgttagaaactgatttcatagtagttagtatcatttttagattatttattataattttttgcagcattattgtatttttttttcattatgttcttcacgaaacttattttagtttctgattccctttattatctttatcccattttgtatgcttaaatcaactctgattttttaaaaagtaaatgaaagattgaatgctaaaataaagaataaagttagaagtttgattattagatattcatatagaatttatacgcttgaaattggctttaaaagtttatatcgtttttggattataattttttgcattgtatttttttattatattgttgatgaaactgatttttttctgctacttttgatgaaataattagtttatctaatgatgaaaaatacagggtaaattatttttttaataactattttttgagcttaa

SEQ ID NO: 32008 - DNA, 1121 bp, Cannabis sativa
  modified_base (699)..(703): a, c, t, g, unknown or other
atatatatatatactagtagactttgcattagcaaaaaaaaaaaaaactttaaattgtattttgaaattcgggatcccgacccttatgattataaagtcttataatactataaaagttatcttttaagtttagtagattttaaatacgggcgttacatccaatagcttagaatgcatctcatgaccgaaccctttaatgaagcccatgagttagaattttgccattattttgtttccttaattaaaaaaacttgtcttcctttagtaatgctattattctgcaatagttatttaaatactaattctatctatttattattataaataattatcaaataaaattactatttaaatatatttattaattagaccttccaaggtctcttaattagaaataaaccttgaattctcttttcttgtcaattgtgccttttttttggtgaaaattcataaacaagacatagtcttatttagaattataattaattaatgaaaaccaattaattgagactacaaaataatattatcctagtgtgaggaccatggccctatgtaattaagcttccaacaagttgatctgaaatttattaagtaaacttcttagcttattaattcctcctgactctactatagattcaaaattatattcataattacatagaacgctctatataccaaaaatagatgcgatttgaattnnnnnttatttcaatccaaataatcaaagatcgtctatagatgatctgcatggaatagggataaatttaccgttatacccttcaatgtattttattcttaaaacactttagctacttgtaaatgatatttagtaaactaatataattattgtttaccgagtttttcaaaaaccgaatatatttagagctttagaataataaataataaataataaaaacagattttttacgtggttcaagcgttaatgatccttagtccacgagcggaaggagtcattcaatttgatcttgatcctcttagttatagttacctataaatgatattccagtaaactaatataatcactgaaatgagtgcttgaccatttatctctattaagctaagcttgaaggaaatcatcgttttacttttatgtctaaaca

SEQ ID NO: 32009 - DNA, 3127 bp, Cannabis sativa
  modified_base (1899)..(1902): a, c, t, g, unknown or other
ctccactaatcattaataattaatttataacaaaagttacatcgggtgttgcaattaggtatttaggccaaggaagcaatatgtttgctacttccctaacatatctgcacccttcaattgagattgggattttagcgtcctcttgcagtattcccgaaatcagaacccgggcatgtgaatcatcttagtccttgtagtgaaatgtgattggaccctcgtacaaatacgctcgggcgacaatattgtcgatattgtcaaagcagagatagacttgctgatcaagggccctctggtcatcgaaattgtacaggagaggtggctcgttgagggaaacaaactcctcaacatagatttgtggttgaccatcatcctcacgtgcgtatttttgtcgaacatacgcctgatcagccacctctccttcttcctcttgttgggtagtgtttttcttctgtttaagggattggagttcggcttttaacttatcgatctccttctattgccgagccagaacgtcaaaaacttccttttcttcttgccaaacagtttagatgccctggtcaggaacctggaaatcatgaaaggcaaattacctacgattttttttgtataactaaggaaaaaaaatttcaagtactagcatacccacgatccctgacacgtccaggatgctctggtgtcccgagcacctgcgtcaggatatcgttttggccatggacctgaatttgtccctgagtaagttgctcctctaattgagcctaatgcacatatttaagcaattagtatatgaattatatatactaaatcattagtagtactcaattaaggattaatatgtacttactgtcttttcggcaatttccttgtcataattagtgacaagttttgttctcttggtctgagatttgatccaaacacggtggcgtggtggatcttgaacatcgaggtcctttttctacactattttataacaattaaatgcgtaaaacttacattttaaagcacgttattagaaatcattgaactttaccattgttggtaatcttagttttttacaatcatttatcgctcactccatttttctgctttgatgttgtaaaactttaccattgttggtaatcttagttttttacaactatcgaacaggggtttatcagcatcacttagaaaattatcgaatttttcaggatcattaaaaaattcctcatgtgcttcgttacccaagtccaatggatgatcatcgaaatcattactctcgacatcatttatcccccgctttcctaatgcatatggatcatcagctaaattttcgccatgccaataccaagtagtataagttttattaaaacctcataaatacacatggtccttaatcattgtaatatttcctgtagatcaattacaacaatctacacacggacaatgaatacgtttgagatttttagaattctttaaggcaaactctaaaaatacatcgaaccctacttgaaattgcagtgtgtctctctcctcacgcatccatgatttatccataacaaatatcgtaacaaaaaaaaatcagtatttattaactaattataactagttactacttacacaatgtaactaactaggtttctcacaattaattcatattaatttatatattactaaattttttgtttgagtttggttcatgttattgagttgtaaaagttgtaattaactaactagggtagtgtttagttgattggaatgttggtaaaattggaataacttttcctaaagtgaatccattcatttgtttggtttgtcatttataattgaaaagtttatataaatgtgttatgtcacctagtttcttacaactaacgagcaattaactagttatttatgttatgtacttttcctttaatatttatnnnnttttagtaaaatttattctaattctaccaaaatttcggcagcataacggctgtagttggacgtttccaaaaattttaaaagtgcctaaagtaacaaataaaacaaatataacaatacagttaaaacaaaataacataaacaatgcaaaatttatccacccatccgaccgcattacatgtattcgcaaaatctactttactacggatgaatacttaagatattcaaactccactaatcattcattaataattaattataataaaaaaaagttagtgaatgtatatacatataggacgttaaaatccgatcaatatcgaaatatgttgaaccttaaaaattagctcacaacttacaatatgatgcaatataaccaaattagaattttaattagttaattacttaatttaaaaatgtaacaagttactagttactaaattctatagttaatttttttttaaaaaaaaacatatacatatacatatataatcaattatatatcacaccaacataattttaaaaactttatttctaaactaattaaatccctactacctcattctcattcacaacaaatatatacaatataattacacaaaatacacaaataagtatatacataatatatacacacacaatatatataaacacatattcaataataaaacacaatatatatatattatatatcaagttaataaatattaatttaccttataaacgcaatccgatgacaaatcgcaacaaaaatttacaaatacaaaaaatccaaaaaaaaaaaaaaatagaaaaatcccaaaaaaattttacaaaaacaaaataataccaatgtacattaataaaatgaatggaaataatatttataccttaatggacgttgagattcaacgttttctctactaaaatcaatggtcgaagttataccaccactttttattttaataggttcgggtatagtgaaataggagaaaaaaactaaaccttttagtgtatagaattagatattaaaaatagaagattttttttcaaaaaaatggggtgaaatggtgaagaaatgagtaagatatagtgatttttagtggtggttggcaagagtttcgtgggtttttagcatctgctatgggaggtggctggttatcgtggtgaagaagaagacgaagtggggaagatgaagtctgagggttatatctatataccctatgccatcgattattaggaaataaccgac

SEQ ID NO: 32010 - DNA, 1304 bp, Cannabis sativa
tatggtttcatgagctggatgaaattaagttaaagtgtgtcaagggcgtaattgaactgaaattctggattgtatgcataagtgaaaatttttcataatcatgagattgagtctacttcaaaattactcatgttctggagattgacttatttaatttttgtttttcgttttagtgttttactcgaggtcgagtaaatgcttagtttggggaaatttgttaggttatttttagtattaattttagtatatttttaatttagttttactcatgtttggagcaattttacgcttgttatcttttatttttgcaaatttaaaatagaataagattagaaaaatatcaacgaaaaaagatgaaaaaaaaaagataaaagatcgcataaaatatcactgtgaaaaatcgagatcctacctagaaaaaaagactgtacgcattgaacatgtgggaaaattgcacacgggccgcggcataggaatgggcatgatgtggcccgtattgtgaaaaagcagcatccttggttgaagattgcaacttagtgtggcttcctaattcaaagctgaataggattttcagcatgtgcgttttttctatctttttagtccctcaatggctatataaggagtgaactttagttgatatcgggaggaatttagaaggaaattaaaggcagaaaaaggagtacgaatttcagagaccgagttcaatactggaggcattcgtcaaaaggttttcagcattctcttctttactatttcttctctttttttaagttaatatgtgtgatttcgctataataaacatgagtagctaaacacttaattagaatctagatggatattttttgacattgttttatgattctaatatgattttattttcccttaatttctatgtattctatttcattcatacttaattacttttaattgtttgagcaccaattaactgcctatgattttgatgcgagatctgagaagtgagtgtcaattatgctatagtgaaataaaactaaattttgatataggacgagagtacttgtatggtttagatagcttatagggtttctgtgtttaatgtatgtttcatgtttaatttatcacgagagtagaaaaattacatgtaattgaggtttatatatcttagaagactataaattaccttagtaaacctgctattgcatagaaattggtaacaggaagtgaaccatattaggccataatcaatagatacaattgcaatcgaagccctaactttaatcattattaatttctcttttgaattatttgctttttaatttcactgt

SEQ ID NO: 32011 - DNA, 5071 bp, Cannabis sativa
  modified_base (55)..(58): a, c, t, g, unknown or other
  modified_base (1170)..(1177): a, c, t, g, unknown or other
catttctattaagtcagcactaaactcccgatcctcaattctgatcggcatagannnnatccaccttttggagatgactaattccccgccagacaatagggttcaaaaccctttgtcataactatcatctggtctatccaatttactaaaaattcttgctgccacataagaatgagtggccctagtcaaataacacagagaagtaagagttgttgaccgaaagctgacctgttacaattgaggggctagcctcttcatcagcctcagttagagaaaacaccctagctagagcaggtttttattcagtcttttgttcttctttctgaagttgttagttgctgctaggaagcatggtttggagtttttcggacgaagaggagtagacattaaggaaagtgagatgcctaataggcagaccacttgcttagacaaggttgttatcagttcttaacctccatcattaaaaaaaatcactgcttccactactacttaaagggcttttggctttggtttttaaatgacatataaagaatttgcttcaggtttgtgtaactgatgcttatagtcgtagacgcaaatagtgatattttttacttcagttatgaacccatgctaattgattattcgcttcagttatgaatcgaagaaatttttttttcttcggttcataactcaggcaaaaaattagtgcactgacactaattattttttgcttcggtcataaattgaagcaattaaaaaaaaaattaaaaaaattggtaattataaccaaatcgatggcacacgaattttttcaatttcacacaattttttcagcttcacataaactattctaatatctcaaatttacaataatctcaaatttttttcagagacgagagagcaaaccaccgaatgcaagacaccaccaccacgacaccaccaccaccctacctccacaaacctaaaaaaaagcaatattagatttataatagagagatcaaaagagggaaagagacagagagagtgagagagagagagtaccgtgactgatggggtggctatgcagtggctctcgtctaggtggctgccgatgggcatctcggcagtctttgatgggcactttggcttggaaaatatggtggtaagactaggtgagatatagatagatagattgatatatatatatannnnnnnngagagagagagagagagaagttagtgcaatcgtgtgtaatatttaggttaaatttatcttttaagttagggttttttaatttggccaaaagcccattgtattatatatatatatacaaaaatcaaatccttttgcttcggtggataacagtcgcaaacttttaaacctctgtttacaaccaaatccaaataaatttgtatcttttttccaccgaagcaaaatgtcaaagataattttttaatttttttacttttttccttagttcctcttttagcgtcactgtagtaactgacgctagttgttttcttttagctttagttatctcttgaagcataaaatctctgcttatttttggcctcgaccaatcattttggtgatacgcgttgaccgacgcaaattgtgcattttatagtagtgttcctttgctgatctaccgagggacaagacaaggcttccacctcttcctccttccaatgttattctacctatccatccttactcactgctgaaagaagaatgttctcatgtagaggaagttgacaaattatttgtgaaaagattcaacgcaaagtatgatgttataaagaaagtagctaatgtgctttccactaggtgaagtgtcgagtttgttgatattgctggatggaatgaaccacttcctttgatctttgatcgtcaagtggttgctgaatgtctctaacccagagtaagttcagatctcgttcaatttgtggtggacttattagaccaaaaggctgcaacttataacaaattaggatctggtaagcccgctacaatggtgagtagttattcagctgtaattgtagatagtcttaaaagctaaatttgtgcagtaagttcatcaatcaacctttgtttcaatcgtggcatccaactattttacttgtgtttgactttatgtaatttttcttttaggtgggtctgatggcagacaggttctcttctcttgtgactaagctcacctacaaaattgaagtctaatgactgagctcatgaattaagagcaaaagagagaaggggcagccaatgctttaaacaaggccaaagctcatagtgatgctttggtctagaaaaaggtcaaggcttccctcaatgatgctgttgccaaccataaagcttctgccaagacggagagggattaggaaaagaggtacaaagaactataaaaccaaacaagctctcgtattcccaccttagaagagaaagttgtagattttgagaaataagttaaggagctcgagcaaaagttaaacgttgcttcctaagaccacgatcattagactaaggcattgaatgacaagatcattctcatggctaacttggagaagaaagtgaaacatcatcaagggatccaacagtaggcagagacttttgagaagggtgctttggacaagttgaaggtatgtgaggctaatttctaaactaagcttgacaaagtagaaaaagctcttagcgtgtttcagaaacaagccatggaagatgttgagaaggctgaagcttatactgagaaccttaaacaagtgaaagctctcttggaacagaggtttgctaaatctgaagtaaagtatcaagaagcattgagaaagtccttattggtcactttgttccatcttcgaaaaattaacaaagatgtgctaaatatgttggaagaaaatgatagagaaaacttccttcaaaaaatgttggaacttgatgctataaagaatgctactgatgaggttgttcaagatgatcatgagcccaatcttccaaacgatgccaatccagaggaatcttcctttccagcttcagagaatgctctagttagtgattttcaaactgacatcccacctaattcaaccacataagcaactaatccaactcaaccttgaacctatctcttccagcttcaaaactctttttttatctttaacctttttttgggggggacacgagaccccttaatatttttgtagagacaaaacgccattactatgaggccttaaatatgcaaatattataatttctatttaatatctaaattcaccaagtaattcatgatccttgaatgaatttattttgctaagttattctcgtttccatgttccttgaggttctggttcctatggcctgagccttaggattatgactttatgcttagactttagctttcttttatcaaattaatttttctaaattcactagaacatggtctgatggcttagaccttggaatttaaataatccattttataaaaataatttttagtaagtgttacttacttctagatccttgaatttctagttccaaagacttgtttcttctaattgcatgtctaattaacctgaaataattatgtttaagggctgaccttattttgtttcaattaacttgaattaatctttttgtagcctaaacttattttggtcaacctgaattgacttaataaacttattaactataagaatgtggtaagatagttgcttacttccaattccctgaggctctaatttcaggcagtactttttactcccatacttaatgttagttgttaatatttttggacagatataagatatgctacccttaaagtgattaagagtgttgactcttggtcacttcttacaaaactaaatatttagataaacatgccttctatttttatttaattaattcctgccctgaggcatatatggaagtcgagcaaaaaataaaatgcagaaaaagaaaaggaaacgaccacccccagtgtactgatcgtatcgatgcgattggtctactttccatgctcttagaatttgtgatccattaatttgttttaaatgatacgttccatcacatattatttttaattttatatggtccttcccagtttagtccaaggacccccactcttggctcctaagaggctaaaaatactattcccaaaaccaaatcacaaagtttgaaattttgacatttaaccttggaattgaaatatttaaattttttttcttggtacatctagagttggacttgtgactgctcttaaagatcttcaattagatttagagattgttgaagtaatgcatgaattcaagctaggtcatcagtctcacttatgtgagaaggtactgtggtttctactgggatcactacttcacatccaattggccattgaataaggagtgtgttctattgaagtcctttttctatcttgtatccctaaaaaactcttggaagttcttccggccagtgtgctttgaatgcttcaagctttttctccaaagtcattttcagaatcttatttatggcttccacttgtccatttttttgtggtcttgccaatgctgaaaaacttttgataattctgtgcttgacatgaaacttagtaaagtgatcactattgaattttttccattatcatacatgatgttgtgtgcaagaccataacgacatacaatgttgttgacgataaagtccaaggccttcgtggaagttatcgtgttcataggctcaacttccacccacatggtgaagtaacaacaacaatcatggtgaatttgacccctccttttctagttggaagtgatcctaccgaatagattccccaaatagaaaaaggcgacgtacttctcttcagggttatctctattggcgaagctctaggaactttggaataacgttggcactactcacatttttggacatatgtgataaattccttcttcatagttggccaaaagtatccttggcgaatgatcttcttggagaaacttggtttggatgtatgatgtcaataaaatccttcgtgtatttcatgtataacagtggttatctcgatttcaactatacacctcaagtatgatgtaaagcccgcttagttaatttggaattatcagttaattgtgatta

SEQ ID NO: 32012 - DNA, 1352 bp, Cannabis sativa
gtacttctggaatagcctctattttttttatcattattttgaatgacatcttaaacaactgaaattttttcgataacatgaccctcatcaaataataggcccttcattatcttcgatatcatgagcaatatatttatcagcattgggagcattatcaagtggagtaggaataaaactactattattatcatctcttgaaaaagacgtaagaatgaagctgtttggagtagacttactctccccaaacactgatttatcttgtggcaaatggtcaataggcagctgctcacgagggataaatttatgagattccatatttatttaaaatccaattcttgcccaatatgccatacagaaaatgaaagtcacgagcatctttttttcgcttgcgagttttcgaaaagaatcactactcttgtgcttgattggctgggatttactgcgtggccgattgtgtctaagtggtggccgacttggattgctgaaaggaagccaaattagttcaagaaaattctttttaccttttttgcagctattgtgtatagcatttggaggaatagaagtagatgtgtacatgataattactcatatattgtcttaaatgttcttaaagagataaaatttgttgtcaaatacaagttgtatagattatacacaggaaaattaagtcacaatgagttgaggacaattgctcatttgactagatagcttttttttgggttgtggctgggttgtttgggctgattgtggtagcttttggaatttgtaattggcttgttgattaatgaattttttttctttgacaaaaaaaaataacaaaactcatcaataaaatccttttttgattcagtttttgttttctctctttcagctttgtcgtttaacagaattatatatattttaatttaataattattataaaatttcacattaactcatagtagtagtagtgctccacagcacttaaaagaaaaaaaaaagtatgtatatgttttatttaacgtacatcgaagcaatgactttttgaaagggtgggggtggggggtttatattaagaaagagaactaatacagagtccagagaaataggcaagtctgctaaataagcatcacttgcagaggtccctactatacttagtgatgacatgataaattttttaaccaattacatgtatttaaattgtattttaaattatgatcataaattcataatattttagtttgaaggtctctgcaatccatcgatcgtttaagtcttatattcatttcttatttatttttccatcattgcctaattaaatcttgtcttttgacataattttttagtttttttatttttctggttcgattctt

SEQ ID NO: 32013 - DNA, 2204 bp, Cannabis sativa
  modified_base (337)..(338): a, c, t, g, unknown or other
  modified_base (2162)..(2163): a, c, t, g, unknown or other
gaatgtgaatcggtgccatatctttttatggaataactcgcgaggaatcaatgtacgaactggtacttagagtattaacgagaaactatatgtggctaaaaagaaatagcgatgcaccagagaagaataacacatacctcggctcacaaataagttgacttagtataaaagtcaaattagttcggaagtacaagaatgcgagatgaccatctcgctacgaggaaacttcctattgtttcatccaactagtggaagcgagactcacaatcctagaaagacagtagatttccttatatctgtgattgccttatgttgtcgatctcggatagaagaatgnntccagctcgccattgggatcactataatcaagttttcgtcgagacatctttagaatcaacaattaaagacatgcttaatgcacgatatttctgaccaagtaaaagcgggaaaatcacagctgtatgattttcaaaatcatgcaccgcgtttacattttgtaatatgtaattagatcccatgatttaagggatcataactataattacattttgtggtcagccttgtaattcactgtcaatgcaaaattacaaatagtggcaaacaatctcaaaaaggggacggaaaaaatcttatacaagaggccctaaaaaaaatactcagaagtctgaataagattaactcgtggactatgcaaaattttaactacaaaaccacataaaaacccggtgtccatattcttttttttctataatttttattatttctgtgttgaatcataatcgtgaggctcaaatatggttaacaaaaatctgcgttaacagtttggtgcttttattgagagcctctgtaaaaaaaaaaactcaaaaaaagccttgccctctttcaaagaaaaaccttctcctttatggctgaaaatccagagaatattaacaccccacatgaggaaactaactgttgttctggaaaagagcctatgggctctagaagatcaactaatccatcatctagaaggaccattcgttccaggagggcccaacctgaggatggtcccagtgctcggaccacacgtcaccaaagaacttaacctgatattggtcctagtacgtggacaacacgctcaaggagaactcaccgtgggaatggtcagaatcccgaggcgagggatgaagagctccactgtggaggtgcccaatctgtgggagaaataacttatgaaacggaaagtcgctgcctgagacaccatctggaagaggtgcagtgtcaaaacgttgagttagaatgagaggcagcctcggccagggcggcgcaggggaggaacgcttaaaatcaacctgaacctggagtgacaagaccacgtggctcacgaactaggcgacaggaaaaggcatgggaagaataacccggagaaaatgagacaccccttgagaattaggatgaacatcacgaaaggagacaactcgaaactgatgaacgagaatcgctcatgaaaatgaggaggatcttggaactcagccgggagaatggagatcacctactaggaatcaccagcattcttcccaaacccatagagcgaggactcgtacgtaccttgataggggaaatacgaaaaaccactgtcgagaggaaagaacagagcgtgaaagtgtgacttcgaggcgatccagaactcatagtcaatcaactcgaagaggagaaagtacttaatgagctcatgatcgggagagtatgggaacaagtaaatctgcaagccacttaaaaacaaagtctataagtaggatgcggtcaatgagtaagacgagatatgtcagcaattactcccaaccagatctgcgagagcacttgaatcagaagaaacctgatcttcgcgaacagcttggtccaaagcaagaggatccaatccaattgcgaataaacgagttggagcacaagttcatgagatatcaaggggggagggggaaataggtaaatcatctagatatgactctgacgaggagcttgagctatatcacccagatattatgaataccccatttcctctgagattcaaaaacccgcacgtctcgtcctatgacggaaccacagatcaggtctcgcatttgaataacttcaacatgataatgccagcgagtaacgtgacgaacaatttacgttgtattttgttnnccacctcgcttgttggagcagcgagtagctggtttaacaag

SEQ ID NO: 32014 - DNA, 2193 bp, Cannabis sativa
  modified_base (1622)..(1627): a, c, t, g, unknown or other
ttggaatgtcctcctctcggattctcaattgatgatagtccgatcggagatcaatctttgaaaagaccgtcttccctcgaagttgataaaaaagatcgtcgatcctaggtaaaggatgtttattcttgattgttagcttattcaattcccggtagtcaatgcacatccataaagacccatatttcttcttaacaaataataccggagctccccagggtgacacactaggtcgcgaaaaccctatgtcaagcaacccctagagttgaattttcaattctttaagttctgcttgagccattctgtaaggggccttagaaaccgaatatgctccaggtgccaaatcaatgacgaaattaatttctctctgcggtggtaaacccagaagttcatcaggaaaaacatctagaaattcctgaaccaccttgatgtgttctggccgaacagagtcaggccgagtggtatccaataccacgaccaaaaaccgtagacaaccctctcgtaacaattccctggctgttagtactgaaattatcgggattcgagatccctgaaccgatccaacaaagacaaacggttcttcgccttctggttggaagattaccatcttccttttacaatcaatattggctgaatacttggacaagaaatccattcccagtataatatcaaaatcttctaaattcatttctattaagtcagcacttaactctctatcctctattccgatcggcatagacctaatccaccttttcgagataactaactctccgccagacagtagggttccaaaccttgtttcatagctatcaagcgatctatcgaatttactaaaaattatggccaccacataggaatgagtggccctagagtcaaacaacatagagaaataaaagttgttgaccgagacctgacctgttaccactgaggggttggcttctgcatcagcctgagttatcactaacacccttgctggactgggtttcgctatagtctttggtgcttcagttcttagttggggacaatccctcttgtaatgccctggcataccacactgaaagcacccctgccctttacactccccaagatggcgctttttacagctggggcactctgggtaagtgtatcagatttcagtgcctgtaatatctcgataagtctaatagtaagtaattttggtttatatttatattctgtgttaatcaggtaataagtggggattatgatcctactaatttatttcagcataaaatgtaaattttgttttaagtgagtaaataagcgtaatttgtaaattacggagatttatatatcatgtgtgcatgtaatatgagttatttgtgaaataaaaatattttcaagtttggcgaccctggagacctgattggaggccaaaaatatcacaacaattttagttagaaatattgatggaattattagaataagttgattttaaaaaatatcagagtattttagggtacccaaagttggccaaataccttaaaaataaaaatttcttaatggctaagaaataataagataactattaataataaattttttattaataatattattattatattgtattattattttattattattaatatattattattatnnnnnntattattattattatatattaactgaaactttatataaatttcgtacgattctatatatattatatataagttttaacatatataacagagtaaagaacgaacgaatcctcgttcttctttctttgataaaactttttccttttatgtccattttctttaattttcaatccgaaacttagcgatctaagctccggtagtaacaggatagcaaatccttaaagagggaaagcttaaggtatagtttaatttcgttttaagtttaaaaacaattggtttcgtataggggttttgtgaattagaatagttatgaaggttctaaccttacaaaattattctcaggtagtaatgggactagttccgatattttcttattgaatttgaggtgattttgagtttgaaatcgagtttggaacttgttaaagcttagtccgaacgttaatgagatttttcatttaaggtgtcaatttttatatctgttacataaggatggtaatatttatggtatatatgcgccctgtgaagtttggagtgatttggatacgttttggtagtgtttcggtgagtg

SEQ ID NO: 32015 - DNA, 2975 bp, Cannabis sativa
cttctctgatcactccacctgcgccacctgctccagcaaagggagttccagggtcttcgtctgcttcgacgaaaactactaagaagttgaaatcccaagctcgaaattcaacttacaatctcatttctcctcctatcattgcctctctgatttctacttcaacacttgggcttcgtgatcatgatgaatctcattcatccgatcactcattgtcgaagtcttcttcttcgaagggtgctccaaatatcgagaaagcaatggtgcccctacccaaagttagttctcgaaccaggtcccaggtatccacaccatagaaacccgaagtggttctgcccaaaggagcctccaaaggaaagaaggtaatgtcttcatcttaaaaggccaaaagtctcaaagaaaatcccccttctatttctttgtcggattctaaacatgaagaagagaccgaagaggatcaagaattcgagggtgtttctgatgcaagtgaagagtttgtgcccaaaaacaatcctctgctgatgattcttcgtctaaaagtgaagtgcctgaacctgaacctgtcagtgtagaacccgttgctgtccctgctgcatttccaaagaaggacaaaggaaaacaacccattgtttctccaagccctattcttcctcagaacagaaagaggccctatggtattactcttgaaaatttcaagccccattctttttactattgattcaatgataatgctaaagacatgaaattttatgagaatcgtaattttactgttgagaaaaatttcaatgttactgctcataagccatttggggtttataacatgttgaaagaaagacaatgggttgatactttgatcagttttgatccctatgtggatcgaattgtgaaggagttttatactaacatcactaatgagtgcctcgatgaggactcttttatgttttgcaaagtctttgtgagtggacactggcattcatttactgtgaaggatgtgcctgatgctctcaatctgcctgtgggaattgaggcaactgatgtggaatttgatcgtcaaaaggatttcgggtatctcactagagataatgatgtggaactctccgacacaatgcatatgtctcaactcacctatggacatgatgttatcatgaggtttgccctattcaattggtttccttgctccaatcaagtaaatgcttcaaatgaacttgccttctttttgtataaagtgtctattggtgctaatattgatttgggtgacatgatttgggagaaaattgtttctcttagaaagggcaagaaacctagactccatcttatatttcctcatttgatctataagattttgtctaaccaagaagagttgattcttgagaatgaaaccattgaaatgcctgctttttaaaccactttcaaagttccagagaaacctcctcaaggagaatctgctaagaaaaaggctcagttttctttccttggtgctactcgtgaacctgctcctgcatctgcttccatttctgcttctatagaaatggctgaattcaacttgcgtttgggaagaatggagaccagtcaagcctttcttctcaggaggatggacaacatcatgaaattcttccaatccaatggtgatgaataatgttatacccgaaattgagtaagcacattagaggaagacacgtgtcgagctgggaagaacgaagaactcaaacacgcaaacgaaagtacacttagcatggaacaactcattggaaacataattcacagagtatttttataccttggatggctgaatagccttctgcgagacaaaaatgtacaaactgctaacttatgtattgacgagaaaccatgtgggtgcacgtgtgcatgacgagggctcaacctcattgcgtggaagagaaacgataacaataaaaacacttagcgtatattacacgatatacaaaataagtgtagatagtttggcgagtcaagataacagacagcgaggcatttatctcgctagaagatggcgtgcagacgaggaagatcatctccacaccaaaaaatatagttatcagagttaaaacaatattagtttccagaagtcagatgacaagctactgctcaccatcaaagttaacttggctccattttcagcgagatatccctgtgggataaggtttacttatttcatctcggcccaataaaagcgagatgctcatagctgtgtgaattataaaagcctcatttacgtagcttgatttgtaatcaaatcccatgatttgagggaataatcgatgtaacgattattgtcaacttttgtaaattactgcccactatgtaattattaatagtggcagacaagatcaagaagggtgatgaaaaaaactcgtacaagagaggccctaaagagaaaacacaatcagaaatctgaaaaagattgactcatggactatgcagcattttaattgcaaatccacgtaaaaaaccctgtgttcatatattatttttctgtagcttttactttttctgtgtaaaattattaccatcacgctcaaatttagttaaggaaaatatgtgttaacagtttggtgctttcattgagttctgtgaaaaagctcagaaaaagcttcttgacataaaagtgatggatgactccaaagataataatcaatcctcaagaaagaaaaaatcaatcaacaatcattcatcgtcccggaaaagaaccattgagtccgcagggatctattggatcatcacattgtcccctgggcccgatggcttcccagaaagcttctttccaacttgttggcatatctgcaagcctcagaagacccagtattggggcccctagcttgacagaccttggataaacaacaattggccaattcctaaccaggttgatgaggatggtgcctacgacccaaccagatatataacaatcatggaattagaatctcgccatcttaggcgtcgattggaggaagtaaactggc

SEQ ID NO: 32016 - DNA, 1369 bp, Cannabis sativa
tttataaattacgaagatttatatggtgtatgtgaatgtaatatgagctaccggtgtaagaaaaatattttcaggtttggcgaccttggagacttgattaggggccaaaaatatcatcataaccgatttaattgatagaatttatgagaatattatgataagttgataatatgggtattgggataattaggagtgtgtgggatttgacttagcgccctaatagtagaaatttcttagtggctaagaaataataaaataattattaataataaagttttattattatattattaatataatataatttttctaatataaaacatatcaatatgttttgattatatatatattaatgttataattttttaaaatagaagaacgaaaatgaaaccctcctccttcttcaacaaattctctctcctcttatatctatttttttcgattttcaatccaaaacctagcgatataagctccggtagtagcaggatagaaaatcctcctaccaagaaagcttaaggtaaggtttaattgcgttttaagtttaaaataattgctttgtataggagttttgcgaattagaatagttataaaggttctggccttttaggattgttctcaagtggtcatgggactagttctggtattttcatgctaaaattgaggtgatttttggttagaaatttagtttagaactttttataacataagtccgaacactactggtgtttgctaattacgggctcgattttagattctattacgtaagtatggtagtatatatggtatatatgtgccctatgaagtttggggtggtttggacaagttccggtagcgtttcgatgagtgtgtaaacttgaaaaattattttttgcccctgataaaccggtcaaccggtttaccatttcagtcagcctcgagaactcgggaatcatatttttgtcataacttttcactcgcgtgtccgttttggacgttctatataccatttcaaagcttgcaaagagctctactatatggtgtatgtttgagagccaaaatataagttttattttagtgtatttgaactacgagttttggtaagaaatcctaagttgtcctttgcaacaattaagaagtgtttttggataaatgcttattagtctattattgttatgaattagggcacgacatcatcatcgtactccaagtaggttggccaacatacttgaaccgaaacttgaggtaagaaaagtatattctgctgcatagtacgttgtatgtgacacaattagtattgtaatgaattgattaatattgagatatagttaatattgttatataatgaaaagattgatttgttgagtatcgataatgtaatgatattatgcat

SEQ ID NO: 32017 - DNA, 6215 bp, Cannabis sativa
ccatgtaataagactatatactaaataattatattgatgattactatgtgatgtgatatattattaaaaggtactattaatctttaaatactaattaatgtgtaatattattagtagtaaaattaattattgagtcttatataattaattatttgttatgcgttattttgtggtattactaaatactttggtgtctaatagtaatttataaattattagtggttcttataaaataattaagttaaataaataaaaacttaataattaattatattaatagtatgtttatttatagaattagagaatgaaattcattactttgtttactgttaaataataggaatgaaatatgttaattctacactaattttatattaagaaataggtttgataatcttataagattagtgggattgatactcccattctttttaaaataataaaatattattttaactctcatttaattaaaaaaattaaaaaatccaaataaaaaagtatttttataacttaaaactatttatttcaatttcaaaataatataaacacatcaataaaaatactatttatttcaaaaatcaagtaaataactcattttaattatgatttatcaatcccattgagagtaattttattttctttacttttagttattctaattatttataaataaatacaatacattgtaatatagatatgacacctcataataataataataataatgaatggaatcgatatgtccaagaagtaagcctattagataaaaggcacataataataattattattaatgtaatgtatagtatagtataggaggctataaataaataaatttatagttaatgtgtctatatttgcatgcttaagaaaaaaacaccaaagagtgtgattacataaagtatgagagagaaactatgaaaaggtaaaagccggtgccgtgtgaaaagcaacaaaatggtgtttaaaggtccaataaaaaagactattattattgtgtgttagtggtgtccaatattttttttagagaaatgttaaaagtttatgtgtaaatatcgttattagtctaactaagtatcagatcccatataatttaatataatagtttgtaaggagtatcgctagccaatcgcaacgtgacatgtcgagaaggtgctaggcaccactggtgttttatatcaatcctctattttttataattgacgttttatgattagttagtgatatttattaaaaattatatgagatttgatatttaattgtattaataataatatgataataataaaaatattaaatactaataatattttttaaaaatttaaaaaaacttaccaaattttatataaaaagacaattttttattttcttgttgtttaggtccttatcaattcttataaataaataaaaaagttgtaataaacaaacaaacgagagtgataaaaaggaagaaaaggcagtcaattcgtagtcgtgaatattattttttttataagaaaaaatatattaaattgtgatctctttatacttactccttcactctttctctctcttcaaaaagtgagtgtctctttctcactccattatctcgaatgaactgaatatattaaacaaataatactaattacaataaaaataaaaaaaggacaatgcaaatacatcaataaaaatccttttttttaaattttttttggtgtctaaaaaggtaatctacgtgggtatgggtaaagattataattttataataaacatattatcacataataacagagtgtagttagtagtatttttagaaataaaaaaaaaatgtttttttttatggggtatatttagctttatggatattttgagtagttcttatattcacattaacatatagatagatagagataggtaataagagagaaagagaaaagaggtgttgagagatgagatgagatgagatgaggaaattcttgtgaggaaggggatctgatctttccttttcgtgttgaattctcttctaaaaactttctgtgtttacaaaacatacagatatatatatatattattattatgtatatatagagagagaaagaaaaaggagtgagaaagagagatatcccatcatcccatatagagagagctgttactttctcttgatttttgtttgtgtttgtgaaaagttaatttttgtgattcattttcttcttttatttattgcccattcaaaaactcaacttctctaaaaatgcaaactttgtccaataattcgaaacctcctttcacacacccatgagagagttgagtgagactataaagttttgatttttatttctggggtttcttattattattattattataattaattttacaatttttttttccttgaattttctcacattcagagcattaaatggtcttttgttcttttctactataactcaatacaaaacaaaagcacagagttatatacaaaggaaaaaaaacttaacaccaaaggaggaaaaggccttctttcttctcctctctctctctctctatctatcatcaagactcagactttctttctgggttttcttccaaacagaattccaaaccagaaagatttgttctttacatctatacacatatataaatagggaaagttcgttttttttttgttgggttgatttgggttttgtgtaagaagaagaagaagaagaagagtaaagtaaatattaatcaatgagagccgggctgagcacgattcaacagacactaacgccggaagcggctaacgttttgaatcactcgatcgctgaagccggtcgtcggaatcatggtcaaacgacgccgcttcatgtggcggcgacactattggcttcaccttctgggtatttaagacaagcatgtataaaatcacacccaaattcatctcacccacttcagtgtcgagctttagagctctgtttcagcgtagctctagaaagactcccaactgctcaaaacatgagtccaggaatggaaccaccaatctccaatgctctaatggcggctctaaaacgagctcaggctcatcagcgccgtggttgccctgaacaacaacaacagcctttgttagccgttaaagtcgagcttgaacaactcatcatatcgattttggatgacccaagtgtgagtagagttatgcgtgaggctagtttctctagtccagctgttaaagccaccatagaacagtctttgaattcttcttcagctgtagcagcagcttctaataattcttcatcttgttccccaattggattgggatttcggccagctcatcagccgagtaggaatttgtatttgaatcctcgtttgcagcaacaacaggggagtgccaccgcggcggttccacagagaggggaagaggttaagagggttttggatatacttgttaggagcaagaagaggaatccggttttggttggtgattctgagccagaagctgttatgaaagagcttcttaagagaattgagaacagagaattgttgggtggtttgagtcttcaaaatgttgagattgttcatttggatgaactttcttgtgataagactcaaatagttgggaaaattaaggatttgaagggtttggttgagacccggatggcgaaatccaatgggggaggagtaattctcaatttgggtgacttgaaatggttggtggaacagccaccgccgagttctgggtctgaggcagggcgtgctgctgtggctgagatggctaagcttttagctatgttcggagatggcggcggtggcggtggtaccggacggctttggttgatcggaactgccacttgtgagacttatttaaggtgtcaagtttatcatacttcaatggagaatgattgggatctacaagctgtgccaattgcttcaagagctcctgtttctggattattcccaaggtacttattttttaaataaaaatgtgatctttattatgaacattattgatttagatgtaaagatgtttaattgatgatcttgttcaataaaacacaggcttgggaccaatggaattctgagtagctcagtggaatctttgtcccctttgaaaaactttccaacaacagcaaagcttggtccacctcggcgtttgtctgaaaacatggatccatctcgaagaggaggaggaggaggaagttgttgtcctcaatgcaattcgaattatgaacaagagttgtccaaacttattgcccaggaatcggagaaatcgtcttcgtcgtcctcggagatcaaatcggaagaaacaaccgccacgggggcgcggcctgtgcttcctcaatggctgcagaatgctaaaacatctgatcaaacacaggtgagataataagatgttatgtcatgaacaagctgatgatgatgatcaaaagttgtaaactttaatgacatttttggtttttgttcttttttgttttgtgtgtagacaaaggatcaagaattagtcttgaagcaaaagactcaagagttacagaagaaatggaacgacacatgtttgaatcttcatcctagtttccatcatcatcatcataatcatcaaggactcgggtcggagagattggggccggtgacacccttggtggtgtcgcctctttcgatgacaagcttgtacaacaatcatcagaacttgcttgggccacgccaacctttccaaccaaagcaactacagatgaacaaaagcttaggtgaaactcttcaattgaatactacaaactcctcacttgtggtttctaacagcaaccaatcattagagaaaacattttctccaccaggaagccctgttaggactgatttagttcttggtcagacaaaagtcaacggtgtcacaacagaccagcaattaactcataaagatagaatcaatgactttcttggttgtatttcttcagaacaagataacaaggttgcttgtaaattagatgcagactcgtttaaaagactatcaaagagtttggccgagaaaatctggtggcagcccgaggctgcggtcagcgtggctgctaccataaccgaatgcaggttgggcaacgggaaacgccgaggtgcagggtctaaaggcgatatgtggctgcttttcatcgggccagacagagtcgcgaagaagaagatggcttcggctgtttctgagctcgtttctgggtctaatcctgtgacgatcagcctcggttcgaggcgaggagatggggagattgacatgagttttaggggtaaaactgtattggacagagtagctgaggcagttaggagaaaccccttatctgttatcgttttggaagacattaacgaagctgatgtgattgttagaggcagcattaagcgggcattggaaagaggccgccttgttgattctcacggccgcgaaatcagcctcggaaatgtgatcttcatcctcacggcggattggttacctgaaaatctcaagtacttatcaaatggggagtcaattaacgaagaaaagcttgctggaatagctagaaaggcatggaagttgagactttcggcctcggtaagaaccccgaaacgcagagctcattggcttgatgatgatcaaagacagaggaagccaaggaaagagacttattcaaactcaatggggtttgatcttaacgaaatggcagctggtgatgctgatgatgttgataaagcagatggatcccataattcaagcgatttaacaatcgatcacgaagataacgactgcggcggtggtggcctcagaagaccggcgtcattgctcggcggagcagcctcgtcaatgatgccaagggaattgcttgaagcagtggatgacaccatagttttcaaggctgctgattcgagaacaatgcgcggcgggatcagaacctcgatcgagaagcgattttcagccgtgatcggtgaggggttttcgttagaattggatgaagacgcggcggaaaagatcttgagtggtgtttggactggccggacgagtttggaggaatggattgagaaagtccttgttccgagctttgaggaactgaagtcaacgctttctgggtcaacgatggaagactcaatggttgttaggctcgaagccgaatctgagtctgatcacggcggcggcggcgggaattggcttcctgttggggttaaaacggtggtggccggtgatgcctgaacagtgggggcaaaattggtattttcctattttctttttggatagaaatgtaaatattggtcaaaac

SEQ ID NO: 32018 - DNA, 5332 bp, Cannabis sativa
aatgggttttgtttagggcataaaatcccaacaaatttatcatcaacaattgtaagaaagaatttatatcctttagtgttgattatatggaatggaccccatatgtccatatggaataagtcaaatatggtttttgcaaagttgtgattggcaataaaaggtagttttttttttgctttgctaattgacacacatgacagtaagtagaagagggaataacaaaagatggatcaatctttttattgacaatattagaaatgtacatagatgggtgaccaaggcggttgtgccaatggtcaacattgtttttattgaatggaaaaaaacattgagaaagagcagcaatgggggtcctctgttgaagaagatagagcttccattctagctatcccaatctccacattctgagaaagatcctagattacacaagttttttgttaatattgatggtaaatgaagtgttgtccaatagttcagtaatggacaataggtttattttgaaactaggaacgaagaggacattatataaagtgaggaagagtttatattaacagtacctatgtttaccacaggaattttatgaccaatagggagaataacatctttcggatacgcaatattagaaaaagatttgaaacatgatctgtgtgcacacatatggtgtgttgcaccagtatcaataatctaagtaaaatcagtaaagaggggattattaccagccaagttggaggcagcagcaagagtttggtcagaatcaacacgggcagtggtgttggtgagctgctgactgagaagcgatatcaattgttggcactggacagatagatcagtggtgttggcaggggtatcaacaggggatgaagaagaggcctggtgagctttagctttgcctttgtcctgcttctttttgtctccataactggggggaaagctgtggatgaagaagcatttatcgaccaaatgcccaggcttaccgtaattggaataagaaggtcgaggcttcttgtttcttggaggattggtagaagggggtttgacagatgccgcaaatggaggattgtcatgagaaccaagagagcgttgtctttcttcttggattatcatggaaaaagccctagagaggtttggtataggctcattgagcaagatttgtgcacagacagatgcatatgactcattcaaaccagtcacgaattgaaggacttggttttaattgtaatagtagtcaagaaagtgtttcattgcaccacatgtgcaagttgtgtttggttaaaattctttcaattcatcccatagggatttcagttttgtgaagtaagaagtgacagatctggcaccttgttgcaacctggtgagttgggtttggagttagaagattcgagggccattgccctcgttaaatcgctcagcaagatcttgccacatatcgatagctaggtcaacgtacatgacactttgagctatttcagatgagaccgaattgactagccacgacatcacaatgttattacagcaaagccaagagtttaggagattgttaccaggttcaggccgtgggagggagccatcgatgaattgaagcttgttcttcacagccagggcaattgtgattccacgtttccacgactagtaattggtaccgttgaggactgtagagacaagaacaagaacaggatggtcacctgagcttaggaagaaggggctggagacatcatcgttgatatggcgattgttactggttctctgatcttgagctggaagctggggttcgattcttggagattggttctcgatatcatcatgaagctgagatctggatagtgcaatagttgcttgacgatttgttggtatagattgggcaagaggggctgaggtaacatcaagaggagcatcagagttgatgttgtcgtttgttgatggaggaacaccatcttgagatcttgtggaaggtcttgccatggaagctgtgggcaaggttacttctgataccatatgagaaacatagacttgagaggtgaagaagacagagtcttattaatctttgttcacttaaatgatttttacaagagccaaggtatatataaacaacagagtaaagtcgacgaaggaaggaataggcctaacaactaattgaatcctaactaactttacaacagaaccttgatataaagataatgatctaatagaaggagaatggaagataaaagatcaagcttaaaccattatcaacctagttcttattccttttctcttttatctttagtttgaaattatgaacttcatcattagaatttcttcaattattcctatgttctttttgttcatatatatatatatattcttttttttaatatttattatattgatgcttgatcactattgatgtgaattgaaatctaaggtttatgcgtgagaaagattactttaggttggacttaggattatgacataggatgattgtgagactgagagattttataaattttatgaaattcatttaaaggaatcaaagtgcttaatgaattattgattgattaattgggaataaaaatatcatatttattgattgagtttgattgcttatatgcatgattgatacatgcaatatttttgggttcttgaaattacaatcaaggccaggaattggtttgaacgattgggaaattgtagttcatgatttaaaattgtaaagttaatgctctagtatgttctttatcttgaaagttaacaatctgaaatcttgttctttatattaaatcttatttatgtttatttctttttataattcatatccaattgaattgtttaattagaattggtagacttaaagtgtagttcttaataaagttaattatttaatctttgtaggttggacatcccttaaaagtaaaagctatattgcaatacacaatatacttgcattaacaaaaatctatattaataaaaataaaaaatcaaatgtaagaggtttatgaaaatcttaaaagtagcatataaaatcagttcatttataatgtaaattttcatattataatttaaattttgattaatttttgttatgtaacaaatttaaatcaatttttagcacaccattcaagaattttttttacaagatatgctttaacaataaatcatcaatttctgttagagatgcacttaggttatatagccaacaaaatgatcatccatatcaagtaaaagctttggtacataaactttttgcaccatatacaaaaaatgcaaaaaatgcaagagaacaaatgtatttagagagagcaaaaaatattaaaaataaaaatatataacaagactctatacaaagatgaacaaaatcgaatcatactaaaagattgtcttaaaaaatcatttgcataaatcaataaaaatactattaattttggatcaaaatttatcagaactagtgatgctaatatctccaattgaaataattggctgaattggttcatgaaggagtatagacctggcagggctgccattgtctttgaaagcatttgaaaagagagaaattatgctatctatgatggaaaatcaattcctctgaccgttattttgaatcacatcagtggaaggcttattgagcttgccgaggttcaattaccagctgctgctacattgtctaggtggctcctgcctcctgcacactggatgatgtgcaacactgatgtagcaattggggaggctcagtcgacaggggcggctgtgtttagcagtgaggatagagttgtcacaaaaatttttacttcttgaatttgtcattttaatcctcttggcaggtgaagtagttgctctttgctcgggtgtagaggaagcatttaagcaaagcttcaagaacgtgattttccaatgtgactcaaccaatgcagtgtttgcggtgcaaaggaaacgccatgaggttcaaaccttgcatcacaacatctaggacttagtgaacaggttccatttatcagttggaaatcttaacctctgggaggtcaattggatttttagaaaatgcaattgtgtggcccatttttgttttcacactatgttgagtatctttgctttggaatcttatttagacaagagtaatttgtttaagagaaaaacaaaaagaatgaaagaatgaagagctttgaagttttaatatttaaatatttttcaatcaatattttaaattatgtttaccataatcattttcttaattcagatctgaaaaaggctgagtagaataaatccataacaaaagaaaagaaaagaaataagtagtacaatattatttataaaataggtatggaatcatttagttattagtatgttaaatatagtatttgtcaatgcggaaaggtgaatcaacattatttagatgtgtttttttttttagaagttgtgaatggtgatcaagcaactttaggaaatcttatgcactccaaatttacagctagctgctttcatacttgataaaatgaaaaaaaaaaaaatctatattatcttggatttttttttagaataatattgtctaatattagtaaaatataaaatgacgtaaaatgtagagatttcttgtgcaattgaatattcgtaaaaacaacctttctagaaaatgtctgcagaaaataataaggaaagatttagatcttagaaatgttatcacttaaataataaaattaatacaagccccaataaaaaatgttgaaaaacaaaacccaattttatagtgaaatcaaactatcgttcagatgtttggcaaagagagacagcacacaaacgcatctatataacattactttaattgattatttgatatttctttaaatgtaagatttcttttcttggtaatgctgtcttaaacaataatttttaatttgtagccaaacactctattttctcttgctaatgctaaaaggtattagtattctctaacacctagtggttattatattacctacaattaaatattatgtcttatataattttgaacactactaatatgtactattacaagtgaggcgcctcttcaaaataattgatttttatacaacattagttgaattaaggcgtcaacttatattacctacctttaagcctaaagcaccctattttgagcaatagaagccatgttacgaattattaatgatatctacaatacgacatgcaaatggaacttaaaaatcatatttagtgagctgctaactgctttctttgcttatttatttttgggaaaattatgaaacaatcaaggtttgaatttaagataaagtaacaatgtatagattgtagagttgttacccattgacattttatgaattagattccctgtttcgagtcacaccat

SEQ ID NO: 32019 - DNA, 3744 bp, Cannabis sativa
  modified_base (2531)..(2536): a, c, t, g, unknown or other
attataattaaactttattttgataaaaataaattatattttaaatattgtaacaaaaataaaaataaaaaattatgtgaaatttttgttagaaaaaaaactataaatgatttttaaaaaaaatatgaaaataaaattgatcatataagtattgaaattatcataaaataatatgagaaaaagaaaatttaagcttaaattttttaaatattgaggtatacttttcattttgtgggattggataaaatttctcttaagttattaagtgattttggtgagattacttgattacccttagaaactattttgagaagatttaattattagggttgaatttgttatactttaccattaatttgatgagtaagatatataaataagtttatatatttaaaataatataactaataaatttgttataagggtatgattaattaattgaattaacatctattttaattttaaattaatttttatatatataaaaaaataattttctaatttttataatagttttaaattaaatttaaatagttaaaactaatttttttcataaaaaataattaattaattaatttaacggtgttagttttaactgttagctttaacgaaaaaaaaaaatcgctaaaccaacaatttttgttaaataactatataagataaataaactttaattattttactttcttattaataatatgatcatcaccaaaaactccattttaattttcataaataatcatagaagcctcacgtcaaagcttaagtaaaggtatgatcacatcataaattagtctttggagcttactttaaaaagaaaaatggtaacctctaattattccattttctctaattttgaggtgtgttaatggagaaagttagaaattgtaatatataaccggcatatttatggtatgtgcatatagatggagatgattaaatgttagcctaactgtatttactatatattgcctaaaaatacaccttaattaactactataatcccaaaaaaaggattaaaacggtttctttaattagtattcataggacagccaaagaacacaacatatccatcaacatccatatgcatgcatgcaaaaaatcacctctaatcctctatagccagctccaatacaaacacacaaaaacaatacaaagaaatttattccaacattagtattattataaataattctttaatatcatctttctctcccaataatttatattataaaggaagagaattattattattatttgtcttcgtcttcatcttcatcttactcaaaatgggttgcggggagtcaaaacatgacgtcgcaactggaaacaccatcctccaacgcaagaaatccgataatagcatcaagaccacaagcatcaacgccaaagacatagaaacggttcacgaaaacccgcctattaatgcagcggttgatcaagtaaaaggcgatatttctgaggatcaagcaaaggaagaggagaaaaatgagaataatttgttaagagaagatgagaagaataagaaagaaaaattagatgttgatgatgatggtggtggtggagtacaagtagttggaagggaggtagggagagattccccgaatcgcttcttctcttcgaggaaagatgaggaattagggattgatatgatcctttccgatggacaatctgggaaatctgagtacaatactcctcgccatggagctggtgaggctgctcatgaacttattaacaaagatcataataatgatgatgctaataatactaataataatgatcaagatttaaaagtattaaaggagaatgatgataatggtaacaaggaatctttgcctcatgttcaacaagttacacaagctgttgatgatgatgatgatgataaagaaaatggtaatatataatttaaaaattctttttcgattacatatattatgtagttgtttttgtcctgatattaaattgcaccaataatataatatacagaaaagcctgtaaatgtggaggagaattcggtgaaagaagtggaaacgatcaaggtagaagaaaaagatttgaagcttgttgacgaagtgaagagcactaatcagaacgatgaggaagtatagttttttttattattattattatttttttttggtgtggagcaattaattaaagaaattataactaaaagaggttttggttatattacagaagcgtgtggttggttgaccaaaaaggaattgatcaagacaacatgaagaggacaatactatttgggatgtttagcacagaattcgaaagatgaaatattccaggatttttttttcttttttttcttttcaaaatgttactttatagttcttgtctatgttaaatgttgatgttgttgttttaagagtgcatggtcttattgaagatgtttgttaaaatgttgtggtgctctaaatgaaatattatcaagtagtacttgttatctacaattctacattattggtaactacacataatactctttgtgtgccccccatatataaatatatatatannnnnntatatatatatataaatatacttaacttcaccatttaattcttttgccctatatagatcaataaacactataattgttttgcctcacaacgtggctagatgggcctttactcattaggtatttgagtctctcccggtcttttccataccgaaaactctattttgtaatgactgcgaggtctaaataaatgctttttctcaaaaaaaaaaaaaaacaaaaaacaaaaaactataagcagaaaaaccaaattttttcataagtgcgtacaattaataagtggtgacatcatcaagagaataatgggtattgactatatgcgcatttggtattttggtacttgagttagatttgatgggaatgagaaatgagaataacgtgaataaattcaatccatatttagtaattaaattttatgattaacgggtttgaacatagagactttctctcttgtggtcttagactaaggtatatgcatgcttaaagcaagtttaatggaagctaccaatatcattgctacaagggactcacttcacatttctaatcaataaaagtatttttcttaaagaaaaaatgaaaatttgtcagtgatatcgtagtttaacataaaatatgatgaatatttaatttcacaaaattttcactctctcctccacctcacccactgtcaaacaatctcctaaactattctcattgaacttgcctttatgggactgtagcccccactgaaaaaagttaatatattttttaattatttcataatctatatataatcatacactaaaattacaaattaaccccctacaaatattttaataacaaatattatcataaaattaaataaatttacaaggagtaactataatttatttaaagcagacaaaagaaaattataataataaagtttctcgcaaaaatcctagcttcttgtagagcaattgaatcgttcattttgacacgtatctgttaggaaggaatagtgttttgttggttttttttttttttttcctttttgttttttaattttttccgttgtttatttgataatggtgctttgatacccttctcttcaggattatggctatttgccaattttgggtgactatctttcctttagggtaatatggttgtaaattcactttcagttggttgttgcctaatcaaccacttgaggcacacttaagtgatcataggagggtgcgtgtgtgttg

SEQ ID NO: 32020 - DNA, 1688 bp, Cannabis sativa
atgtaccctgtatttctaaaatactgtattttttttcaaagtttttaaagtgattttaaagttaattcttcataatccataagttcatcttattaagaataataattgaaatgcagaatataataatttcaataatattaatgccttgcttttttctctctcaattcggttgtccatttaatcttcgattttgtttctatttataagtgtatagggtgacagttatttccttaagatctaatcattcataattgttcatgaaacgtagacacagggctggccctaggcataggcgggctagcccgtgcctagtgcccacactttctagggggccaaaataaaaaaataaaaaaaattattaggcttttatttaagtaaaatttaagtgtattgtaagcaacaaatattcatagttagttgaaggtagatgacataatatttaaggtcatgggttcaaatcccataacactcttttattgatattttttatatatattttttagggccccaaaatttaattcgtctaggcccatatattttcagagtcggtcctgcatggacattacccatgtttcatttttatgcacatgagataatatttaataactacccaaccatccttttatcattccttaaacagttatgctgactatgccggttgttcctcgctaaatacgagttgtccttctttaccgtctttataagaaaaaatactaagtatgggtacaatgctcctcgcagtcttcttttttttatgatcgtattagcgaggtggttactttaatgtataaagagcgagatggatgaatgtagttactcgctccacatacatatatgtgagttaattaattgcaacctctttactcatgagtatgtgggtcaatgagctgcaaactcttatacccaagtatgtgggttaatgagctacaactcttggtttactcgtctcgaattacttttattatgtactcggttattcccgagatagacttattgtcttgccaatctttttggttaatagttattattctcatctcgcatctacctacgtggtagcgagtttgaatatttttatcaaccataattcctaaggcaagttattttcaattgtattaaataatgtaattactaagctgattcatattccttctctggtacatatgtcaacttctgattgttagccaaaatttgggtataacagtagcttcttaaaagctgcaaccttattttcaagcacacaccattgaggtactaacaaactatacccgtcaccaagtattagccaagccttatacatctggatgactgcttaattaatggtcaattgagttaagccaatttgacataaggtacaaactgcgatccgacattaaaggtcaggcccttgtcgatttcatccttgaatttccaaatgagcaagtggtcgtcataactgaagaacgagttgatacagacattccataaggctttggttggaccttgtatgttgacagagcatcaaacagtaaaggcttaagtggaggtatcatgctgatcagccccaacaggttcaaagtccacgcaactctaagatttggattcaacgcatctaataatgaggctgagtacgaagccctaattgctagactaaaacttgcacttgaaatgaaagtcaagtacctcaaagcttttagcgattctcaaatcgt

SEQ ID NO: 32021 - DNA, 1402 bp, Cannabis sativa
tactattttgaaaaatacagtgtccaatttgttatttaacaaaatagaaagtctaattaataatttttataaaacacagaattcaaaataatatatacactaaaaaaaaatagtattttatttcatcaccaaaatacgaaaaattcaatcaatttagaaatggataatctttatttattgttttttttttttttcccaaatgaagataatgtgtgtaaaatgtcacaactatctagctattgtactaaaagaatttgatactttctttttagtatactttggctctactggactaaactgtcaaatcatgaaggtatataaaagaagtaaatacaagattttttttaattttcttccaatttttatctctattatttttttaaaaaaaataattaaaaaattccattgtttttgcttaaataaaactatattccaattttgtattcagacattcgttattaaatatatagtttttgttcaaaaaaaaatatataatttccataataattattttcattatttttatcttatttaattttatttaatagtttcttgtttctagtttttattcaacagtttgactcaagacactgagaaaaagctccattgttgtaccaaaaatattctttcactggtcaatagtcaaaagactactcagcacatgtatagatatgttctctgcaactattttttatttatttatttatttatttattttggttcttttgataaatattaaccatttataagtacatacacaacatttgtgaaattattagcaattttctcaatactaaaaaattgtgcttagagagacactcttctctctgtgttttgtttcaattcaatgagtcattactgtcaatatataattgtacttgatagtaaagtacacacaaacaaaaccatgaataaataatagagaaattttattttatttttttaaaattttattaatataaataataaataatagagaaattttattaaatggcaaaaataaaacttaacccttacaataaaattatagtaattgaataaatgttaaaagaattactctatatattattttatttttcaaatttatgtttggattgttgcggtggttgttccggtaatttctatatagattgatatgtgtattttggttgtaatttaagttaatccgttaattagtatgatagttactatgtgaatttccttaaacatgagaaaaaaactgaaagaataaaaatgaaaaactcctaaatattatgtgtttgattaaaatatgaaggtttatcatcataaaagcccaatatccaaagaaatgcaaattttcaaagacctacaggttgtttggctttacagtttaaaaactgttttctgttttttaaaactgaaaacagttagatcggaagag

SEQ ID NO: 32022 - DNA, 1023 bp, Cannabis sativa
atcagcattaagcaataatctaagtgtcacataggttatgcaaatactctcgtttcacatagaaccctaattatccaattttaccattctcaattctcacttttcagattatgaagtgagatcatagaacatgtagaaggtgatcaagcttacacatgtaattaaacacaaatataggatgatttcataaatcaagattggcggaatgacaattaacattagctaggcaaaactttaaacaacattcattatccttcgtaaatgggaatttagttcataaaattaaagtaaacatccatgattaaatctgaaacaaaaatagacataaaagaaaaatagagagtgaaagaaagaaactagatggtgattttgctccgggtcttcaaaagatcgcgcttccctctcctccttcactctcacttttcgggccgatttctgatgcctttggccatctgagtcgagtccctttagataggaattaaggttgtgccttcaattggaaaaatatcagaattaggtcaaaaaatccagctttccgtgatcgcgaccacaagcaaatctcgaaaaaaatggggtttctgccgaattccccaagttgcgaccatagtcgtgaccaaagaaaggggtcgcgactagaccttgagctggtcacgactactgatctagttttggcagcttcagccgattgccccatcttttcatcaattgactgaatttgaactccaatgcaccggaaacctaaaacagggaaaatcaagcgtaaaattgctccaaaaggcgacaacatttgagaaaatgcttattaatgagacccggaacttaggctaaaaatagcctaacaatgactcttcccaattatttctcaagaacatatcaaatgatttttagttgagcaaaaggacgtcagaattttctttgatcaagtaggtgaatccacaaggtgaaaattattgataaaggttataaaatacttgtttctgcacaacgtggtggagtaatgtgttgagctttgtgccctaaata

SEQ ID NO: 32023 - DNA, 7157 bp, Cannabis sativa
aaaaaaatattctttgaacataaaaatgtaaatattttacaaaaatagtgtcttatgtaattattcctatttaatattcccttttataacgtgtcctacaatcctaccaaattaaataaaatagttactacaaatcatcaatataaaagaagcacaacttattatcattgcttgagaataataagatgatccctcacactactacaaaaatggactttagtaactcagtttgagagacacttaacatttttagtaaccttttactgcaaatctctaatgtggatgattggaaaaatactatatagtgaccattcagtgcaggttactaaaatattttagactccctctatgagcgtcattgtattctattagagtcttaccctatcaaactctaaaaataacaacaacccgtgatacgggtcactatatctattatttcttttttttagttagttttttgacatattgactctcaattattattattattggtcaagggcatggacacagatttgtcaggtgaagaatacttgccacatgccccttcaatgaactgaatggcgtggtttggtccccacactgagtagggggctatcctgctgctccactcatatttccataacatagctaactactttgggatatgtctaacatagttgacgctaaaagggatcgagtatctgtctgccctcgtcatgttgtacacgcagatgggttgaatgtagccttcgcccttcgagatcagttgttattttgacttgaaatccaacccttatcagggtcggtcaggatacttctatttcagccagctgggcttcatctggttgagtggcacaaatgactctgccatgtcaaagattggtggttatgtcccggtctattttatggtctatggtgcagagggtgtgcaacattccttcaggggtccacacttttgaccaaccaatactcaccctgcaactcagagatagagccaatcacatcctcccattgtccgcctcaagacagaacatctgcaaattgccgacgagagacaattttattatgtatgtcctctacccttccgcgggcaagcctcaaggttcattcgataacctttctatgaagtagaaatgaagaaccaagaggaaagatcccaagttcgtagatccctctaataacctttctaagaagaaaaaagagactatgagggagagagctgctcggaagagagttaagtggggtgagtctttaagtaaggccccagttctcattaggccccaagagtctgaatctgccagaacagtccgcccagcagttgtagagggcaagggcaagggcattaccagtgagtgtgaagactcttcttctaatcatgatggcatccgtacagccctccctgaggtaatgcctctgggtaggctgagggtaaacttctttactttatgctgaaattataccatttgaaattaggtttctgaccaatactttgtgtttttgcagacatagcttccaagttagggcagtttattatgagaaaacatgcaggcacccttggggaagaatccccttcaaaagtttcccggaaggagaggtcaagctctactaccacaggtcttcctccaccacttcactatactcctccagccaaccagtccatggtgagcagcttggatggacgtcctcctgcttccaggaggtccaacaaagagtgccaaaaacccatccgggcacctactccggctcgagcagataaagcaaaggaggtcatccataactactaggacaggtgcttggtcactcagacaacgagtctgttgaagtcttgacttttggtattttaaaggagcttttcttggtaggtaatatttttcttcgaagagcattttttgtatatcgtactacatcacacacaaaactcttattcctccattatttcaggtgactttgaagtttaggtatacttatgctcgcctcaaggggactggtgccatcattaagaagaagattgaagagctagaggcccaggttggtgaggtgaacaaatagctatttgttgccaataatgagataaaagagctcaagcggcaaattgaagacatgccctctactgcaaagttggagcaggacttagaggatgctgagaggcaggtgagaaaattgacaagcaagaaggaggccttgggtcgactgctggttgctcgagatgaggagatcgccaaactcaaggaggagtctgaggcaaagccagcgaaattagagcagactcaggttgcagaaaaggaagagtatggcaacttagccatcgaaaccttctacaagttttggaaacggaacctcgagggtgattacagatatatgaagcctaaattgcttgaagggctgatagctcaaggtcaggaaatggaggcatccaagccctctggggaggatatctcctcccaggatcatgtcggccaacctaacaacgctgtcgaccaacttactgatgttaccggccagcctgctactccattggaccctcctattgagataccttttgaatttgctgcccaagaataggccagtgataacatgatcctgcagactccttttgatatgccagaactttaagctcttatttttttttctacacgaccaaaaagatcattgcattatatagttggccaggaaacttttaatcatgactttattttttgctgaaatataggattggcctggtagcctttaatctcgaacaaattactttttatgattaacaaagtcatatttacacatactttcaatttttttgcattaattttgctttaaattttttgcttaagtattttcactgtgcttgtcttttattgtgcaggtgtaagtgtcctccaagtgattaagcaaacttatagtctcttggtcacttacaattaactaagtttatgagcctttgtctgtcaagtttcttgggcaaacctgtttaaatgcatgttagataaaatattaactttaaaaagttaattattagcaagttattcgacacaatctgagtgaaaaaaaatcatttttattcattcattggtcttataaatgtgttgttgctgagcaacatacatatattaaaataaaagcttaaattcctcaagactgcttttaaagacattagtattcacgtacttttgcactacatattgtgcagaagccaccacttaagagtgagtattattaacgaattcttgtgtggcatatcgcacaagaaccactacttaagagtagtgttttttacaaactgcctcattagtagtactttctgagatgttctccattccaatatcttggtagcaggatcaactccattttctcattgtaccggccaagtttgtatgcgctcgaacttgtgatgtccgtaacttggtatggtcattcccagtttgggctaagtacccctactgcagggtctttggtgttcaaaaatactctttaaagtaccatgtctcctacaaagaattttttgttcttgacgtgcttgttaaagtatctgggcaccttttcttggtaaacttgtaacttcaagtttctttttttttttttttgattttgtcaagtgattctattaggaaaaagtggtttaattcttggtcgtagaatgccctacatccacttggaaaattgtgctaagtatggtgcaattatacacgacaataatagttttttaccactattatgagcctataaatataccaatgataaacaaagaaatgtgaataaaaaaaaaactctgtaatacaattttcataaatacaatgactcgtggttatagctcactaatgtaacgtaaaattcttcttttctaatattcacaacgagacttcttacaactttaattattggttgccgaaaacctcagttaacaatatttttgaatatgtgcagagattttaatataaagatatttttttagatatgtgtttaaatttaaattgtaatgtttaaaaaaaaaaaaattcttttttatagtcacatttaatataagatagttaatcatgtaaaaatttcataaatttataccttggtccttaaacaaacatgtcaattattcaagtaagttttctattttcactaaaataaataaacttcacgacataagtagatcgaccttttttattattaggatccataaaactaaacaaacattatagaaaaatgttcataacattttcaactaattattacggtttgatgaagagaggatgagtgagctttttgtaatctttgacttgattacttgtgcaaattctggcttcacattaagcgatacttgtaacacctctttcgacaaagcagcaaagctagattcattgcttgctatatcctctaaaataggcctacaaataacataaaaatccattatattgaataataataataatatgtatatcaagttattgaaagtgtatttatacttacagtgagtttgtcatgacagaaaggcagactaaaccttgtccaccagcaatagcagcaaccacaaagaatcttggcacaacaaccaaatgaccagcttcaacttcactctccaaaaccctttccccattaatcccaacaatttcaacacacccattcccacccacaacataaatcatcttagcactagaatcagttgtgtaaataggtgaactcatggcattggcacccaactcaattaaactcacactcaacccaactttctcaagaaaaggaaactcattttgagtcaaagtggtccaacccccaatttccttgtcaactctaagaccatgaggaaaagcaacatctatgttatgtaccatttggtaaatgtcattattgttattgggttttggtaaggtttggtgttttgggattttgatgagtaatgagccatcttggctattggccataatatgggcctcatcttgggttagaccaaaagcttgggaaatgaaatggtttgagaagcctgataagactccttggcgacctgtttggaggaaataggtgaattctcctggaatgtgagaatggtttgtttttcccaagaaaattattttgagattggaattgttttctcctgtgttgaaccaccatgagagtgatcctagtggtactggaataatgtctccttctttcagttttactaccacttcattttttgccttgggaaataccattcccactattccatcattgcctatatatacattaaaaatataattaatcattcataaaacctcgtcactctaacattattggtgtctaatagcaatttattaaaaaaaattatatttttctattcaggtcgttaaaatttttccttcaaatattgagattgttacatccacgtacttctgtcccatttcgtttaattttactaacaagacaattatctatatgataaattgtgcccctaaactttgatatctactgctctcgaatactttagtttgtataaaatcgtgtcatcaaatttgatatatatcaaattgtgttcctaaatttttatgtgtaacaaattatgctcttgaagttttatccatgttagatttccgttagtaaaattagataaaagtctttaaatttaacaattttaataatttaggagaaatttttaaagacctacaaaaattcaggaaacgtaatttgatacatattaaaatttaaagaattcctaatctgccaaaaagaacatagaaaatacataatgtttatgtataaaaactttttacacctctctttatgagaataagtatgaaaatactaaactatgcatatacatgagcactttttttttttgttaacaatgaaagcaatttaaagtattaatcgaatttctagagatagaattgataaatttattttaatttttaaataaaaattaaagagctttttttacttttatattttaaattagtttttttttgtatttttttttatagaaattcacgtaacaactcatataacaattaacggagtaaattaaatagcaattaaaatttttacagcaacctacataaaattcatagaacaacctaaaccatgaattaaaaataaagttaaaaaatagtatacggaataataaccaaaattaaatataaagtctatatatttataacataattataggtaccttgaagaacaaagccaatcttagagcaatctgcatagtgagggagagcaaatccacgagggttgagaagaagaacaccgccgccgacctggttctccggcaacaatgggaaatccttgctggaccagctttggtattctcctccttctccctcaaatattttctgggcaaaccttggtttaaaatccatcttatccatatatataaatatatatatttatatgtatataccaaaagatcttataatatatatatatatatatttatatatataatttcactagatcttctttatagtaatattattgtatataaaagaaaaagggtagtgatatctataaaaattattaatgattggatataataaaaaatgaaaagtggcaatgttgctatttataggcatgaagaagaagaacatcaaattcatgtacatgtgcacatcacatttatatgcagagttaataatgaataatgaagtacttttttttttttaattattattatttgtttttttctttgatagaattacttaaataaattataaagattattatataaagtactattttttttttttttatatttttatgtttaaagattattattattttttttttatataattttacggtattctataaaaataacataataaaaataactaaaatactacataaaagttttaagaaaataatatgcaaataacatcaaaaataaataaataaataaatatataaataacattcaaataacaaaaaaaaaaattaacagtaaattaacaacaatacaatataaaaatacattaaaaaattatttttttaataaataaaattataaatatcgtaaaattatttaaaatttcgtacaaccgtattttttataatttttaattatttttctgtatttatagaataattcttaaattatatagatttaataaattatggcaccaacccgcatatataaaacatgtttaaaataattttgatcataaattatttagattattactcaataatttataataaatttaagaaaattacctcatata

SEQ ID NO: 32024 - DNA, 1700 bp, Cannabis sativa
ttttccctctcgaagggtttgtaaggtgacatcatgcctgtgcaaagcacacctatttatatggatgtgccacatgccctactgtgaatggctcgcacgttggtgtgcttttttgctcctcaattttgattatgtcgattctcttctctaaaattaaatccctgggtaagtcataaacggaggttctcagtcggatagtcgagtactccaaacacgtaaagatatggtgtttaattgatgtaggatatcacgtaaagatatgaacacgtgtcaaaagagtctcttgtgatctgttgtgagcccaaagtgccaccgatccaaaataatgagccttaacctccatttgggacctttcgactaatgtgtgccagtttccagtgttggagtctttgacctgtttcaaaatccacaaatttctcaacatgttcacccataaatttccctatatttggccttgtgggattctttcaaatgtggtgtttggtcctgtggtctcttaaaggtcgttcattatacccacactttctaagtctaaacgtgaggagggtgtattagagtaagccccacattgctaatgtgtggaaataaactatcatatataagatgaatgggctactccttctattgccaattggttttgagatgcaaccccgtgcatcttgtcctaaattctaacactcttttaagaagaaagctatctaggaattttagcagaggttttgtaagtaaaaaattattcacccctgcacataaaaatagaggtatttatatgcacataagtgggtaagggcacaccctttacctaactagggtttcttactccacacgcaagaaaggctaaaagcaccacaagatcatctaactgctggtttggtaggtagctcttccatcatatggtgtttaattgatgtaggatatcacgtaaagatatgaacacgtgtcattcaaaggtttctcctttaaaagtaattgcccagacaagtcgttggacaataagcactacagaggcacgtacgtgcacaaccacagtctgacgcaagggacaggatctgacttggtgtcagacgaggcgtaactgtcgggtgtagttccggagtaggccgtagggagcttctaggaagttcagccaagggcttctagggatagtcgattattgatcatctaggagtgcttgtgctttccatttccctccaaatagcgtaagcatcaaattagaacttcaagaatcattctgtccttcgcaaaggaaatattcttccgaatacttcaatatctttcgtgatcctatcttaaaaaagggtccgtgagatcattatatgatctgacgtggcacccttctgctgcttccatgtagaacccatccatgaacagggataacagtgattggtgttaaaaatcaatttttctactttctttctatttgtatattttatgttaggcgagatgttaactaatctacttatggtttagttaaataaattttactattgaataatgattatatttggttagaggagactctatttgatattttatactattttttatgttgttgtaaatgaatagttttaatttataataatagacatttttttataaagaaaagaaagaaagaaagatatttatccttagacttttctttattaaacaaaaagagttttgcaagacacgtaccgttaaagagagtagacaatatagca

SEQ ID NO: 32025 - DNA, 1233 bp, Cannabis sativa
tcaactgagacaaacaatattcaccatagcaacactgaatcgaaggtgatcaactgatttcgaaaaacaatcacaaaagaggcatctattatgagaggtatgatccccatattcagcaatatgtcctcgagtataaaggttgttgggggtagcgagccaaccaataaaatgacgcttaggaataatatgttagaattttataccctacataaaattcaatttaatgcaatcatatatactttcaatgaaaatcagaaatcataccatgacttagtcatatgctttgttcatatgtttgttgcatgattataggtttaatgtataagttctattaaataccaaatctataattactcacaataatagtgatgtcatcatagtagaaagtaattttgattatatgcttaaaattatttagttccacaatttgtcaatgcactgaatatttacactaatgtgataatcaacgataagatttacttacactagggtgagtggaatgtatttttcaaggcattagcaaaataaaccaagatcggatgtgtcggctatacatcagactggactgatattgacagtgaaaaatatatcataaacttaccatcatatagtcaatatcacttaattgatcatagattatttgatctcaatcctgagatatagctctggcttaaatgtattgcacgagttctttgacttgttccttaccagcttaactacgagactagcccatacttacatcttgagaactcagtagtgcaattgagtgggagtgttaatcataaatatggacatctataacttctatgtctattagaaatgaaacaatagttttcttagagcttgtttaacacaataaatgagagagtgctcatttcagtaattatattagtttcatgaaatatcatttaaaagtagctaagtgttttaaggataaatatatttaagggtaaaacgatcattttgtccctattcaatgtaaaccatctatagaagatcaatgcttgttgtgattgaaataatagataaattcatagcgtatctatacttggtgtatatagtgttctatatatgtaatcaagagtgtaatttcgaatctatagttgagtcaagaggaattaaaaagataaaaatttactcggtaaattctagaactacttattgggagcttggttacataggctcatggtccctacactagctgagatcatattcccttgtagactcaattaa

SEQ ID NO: 32026 - DNA, 1174 bp, Cannabis sativa
aaaaaaaaaaaaaagcgaaaaacggagaaaaaagaaaaaaaaggggggtggggtgggggggggggggtttcgtaagttttagaggaagaatggggctgctggttatttttgggtttgaggcagacgatagctggagagggttatataaagacatatggcgtcggttattacaaaataactgacgccataggtgtttttttattaaaattaaaaaatcacttacagagtcggttattacaaaataacagactccgtacagttttcttaataaaattaaaaaatcacctacggagtcgattattgcaaaataaccgactccgtagggttttttcattaaaatttaaaaatttatcacctacggagtcggttattacaaaataaataaccgactccgtagttgtttttattaaaactttattaatttgttgaagaaaaaaaaaccgcctctaaaggcttgttttgtagtagtggggaatttgatgagtccatatttgtcttatgaatatgatcaatttatgtaccaatattcttaagttgattctttaaattattgattagtgtgattttaatttattaggctattttaaagactattcatgcatttagagtcttttggagggattttagcatattttggtggaaaatagttgaagccgactagctcgattttacaagacagaacttaattgcaaatttcgatgaccttagatgctgaaatgaacttggagctcaacataaaagttttagattctggaacatcttgaatcgttcaattacaaataatatcgagagagttatggccaaaattctatcagtcgtcgcatcaggaaatttctgaaaataaaaagataaaaagatagagaaaaaaaaaagatagcttttcaagtagagttgtgattttttttatctcttttttaaaagataagttatcttttcttttagtgagatatttcctaatactataaatagaattctaattctaaggagattcatctatcttttcaagcaccataaatagaatcctaattctaagggaattcatctatcttttcaagaactataaatagaatcctaattctaaggagattcatctatcttttcaatcactataaataggacctcttaggttacgaatttaaaaattctaaagctacaaatgagagagagagagaga

SEQ ID NO: 32027 - DNA, 3549 bp, Cannabis sativa
  modified_base (67)..(70): a, c, t, g, unknown or other
tctaatgtaatctaataggcttagctaacatgtaaactaaacatgtaaatacatatgcatatcattnnnntaatcttacctcgtttccgaattcaggtgtgccggccaacatgagtgtaacaactgctcggcaaattataggcccttaaatcatatcattcaaaacatagataagtgacacgctaatcactttccggggacttaaacttgaaactagaagttttcctatcgataaataacatgaccatatcctaaatatcgcaaaaataggaaaaaccagagttcctaaaattgctccacccagtagaccggttccccaaccggaattccggctttgtggggtttcctggggaccaccaaccagaatttcggttcctacagctcccactgaaccggtcgaccggattagtgcaggaaaacttcaaaatttcatatctcactcaaatcaaccccaaatcaaaccaaaccttccagacctgttttatacatcccaaaaaacatattcaaggcaacaaaacactacagcatgcacagaaacaaaatccaccgttaaagagccaagcttgagttctaaaactcaaagcttgctcaaccaacaaaatagctctcaaaactagcttaaatcaacatatctaaccatgattaaacctcagaaatataattcaaacaacagcagcaactatagtagcaaaactcataagtcatgcaaaattccaaccataaacattaaaaaaaaaactaaagagaagggtatccaagctattacctccaatgaattcaccaagaatcaactatagattagtaaaacccaatgaagatcacctcaagcttctgatttattcccaagggtttcgagagagagaaaatggagcggagaaatgggttcttttgtgtttttttccttttacttgatttttgtaaaaataaatgagataatcataggttttagttaatttacttcagccataaaatcagattactaacccaatctaagtccactaaaagacaaaactaatatagggcaaaaagaccaaaatgcccttgcccacactaaaaatcataaaaatcacttaggggtattttgttaattttaaaatctcgactattctcgacattgctaaggtctaattatattgccctgctatactaaaaatactaagatgtgattctaatagccaaacactgtattccaatgttgctgagcacaaaacatgcaaaattatgaaattacatatataacatataaaatgcattctgaattcaaataaatctccataaattgataattcataactaatatgcaagtttcataattaaaccctaattatctactaatttccaaattaaagttaagtgatctttacaattatccccccttaaaagaacctgaacaactctggatattgagttctcatgtcggactctaactcccaggtggcttcctccaccttgttgtttctccagagtactttgaccaaagttctggtcttgttccgaaggaccttatcctttctgtctaagatccgaactggctgttcttcgtatgacaagtctggttgcagctcaagattttcataactcaatacataagcagggtctgaaacgtacttccgtagcatggagacatgaaatacgttgtgaaatgctgaaagagctggaggcaaagctaaatgatatgccacttgcccaaccttctcgagaatctcgaaaggtcttgtatatctagggcataacttgcctcttttcccgaagcgcttgatcccccttcattggagacacccgtaggaacacatgtcccctacttgaaactctacattcttgcgttttggatctgcataactctttcgcctactctgagaggcaaacattctaactttaatcttctcgattgcttcattagtctgttgtactgattccggacctaagtatttcttctcccttgtctcatcccagtgaatgggagatctacattttttgccatataacaattcataggcagtcatcgctattgtactttgataactgttatcatacgagaactctatcaatagtaaatacttactccaggagccctcgaaatccataacacaggctcgtaacatatcttccagtatctgaattgtcctttcagactgtccatcagtctgaggatggaaagctatactgaatttcagtttggtacccatagcccgctgtaaactctgccagaatttagaagtaaacttcggatctctatccgaaactatagactttggtacaccatgtaatcttactatctccttgacgtacaaatcctcatactaatccactgtaaaggttgttttaaccggtagaaaatgtgtagactttgtaaattgatctaccacaacccaaattgaatcaaataaacccgtggttctacgtaatccaaccacaaagtccatggtgatatcctccaatttccactcaagaagtgtcaaaggctgtaacaaacttgccggtttctgatgttcagccttgatctgctgacaggttaggcatcgcgatacaaattctaccacattcttcttcatcccgctccaccagaagtaaggtttaagatcttggtcatcttggtggtgccaggatgcaaggaatatggagtggtatgagcctcttcaagaatttcatttctaagttccgcactacttggaacacaaactctagtcttaaacaatagcatcccactatctgacactataaaatctctggcttgaccagttgaaaccttttccctgatcttcactaactctagatcagttaactgagcagctttaattcgttctaatagatcagattgcagcgtcgagttatgaagtttacctacaacaaactcgatgcttgatatgaccatgtcttctactaactgaggtgaaatctgaattatactagttaccttcccgggacccttcctgctcagggcattggccactacattggccttcccaggatggtaaaggatttcacagtcataatccataaccaattctaaccaacgcctctatctcatattcaagtctttctaagtaaagaagtatttgaggctcttgtggtcagtataaatttcacatttctctccgtagagataatgccgctaaatcttcaaagcaaacactaccgcggcaagttctaggtcatgtgttaggtatcgctgtttatatcctttcaactgatgagaggcataggcaataacttgatcagcctgtatcagtacacaccccagaccctgtttggatatgtcacaataaaccacgaacttctctttatcaaaaggtagagctaacaccagagctgtgattaacctctgttttagctcctgaaagcctgcttcacacttgtccgtccacacaaatcgctgattctttttagtgagctcggttaaaggtgttaaaattttagaaaatccctccacaaatcgacggtaataaccagcaagacctaagaaacttctaacttctgtaactattttcggtcttggccaatccttgatgaattctatctttcccaaatccactttgatctcatctttgc

SEQ ID NO: 32028 - DNA, 4936 bp, Cannabis sativa
  modified_base (46)..(52): a, c, t, g, unknown or other
ttgaaaaatattttcacttttctacttttaaaaacagaaaactgannnnnnnagtgttaccaaacgccaccaaagtgttaccaaacgacaccaaaccgaatatgatttatttatttatttattttttttacattttttggtggtttgtataaaagcccgagatatttttttatttttttatttttttttttaacaggaaaactgatttatatatttatatgtaacccctaatttcctctctcgttttctatttagttttctctctccttgttccttctctctaactcccaatctcaccggcgctaaccggatcaggccacgcggacgcagtcactgctaccttcactgtcactcggtggtgagactctctctctccttagctggatttcttggttgtttgtcaatgataatgacgatgatatttttgatctgagatttattaatttgattgaactgaaaccaccacttattctaatttttttgccataatcacctgttctttcgcaatcgattactcttttatttttgtaatcggtcgatgtgacttttatttaaaagtctctgatttcaatcgtatcttccttttttctgttctgaggtggctattactcttgatgatctggttaactcttttcctttgtcactcaattttacttctgctgagaatgagatttatactctttatcgaaactctgatgaattcataccaggatcttaacattacctcctctttcttaaagtcctaacaaattgccccttttaataagttagccttcaaaaaaactatgcctaatctctggaagggtcgattttctgatgctgaacaaggttaaccatggtaagcagatgttattactgatattactttctgcaaccgtggcagtttgctcaaaatctcattctcatggaaattccaagttctagttttgtaattatgcctgagccataattcatgctcctctgggtttaagtgtatagcatccattttcttaagagatctcctgatcagttagtcaacttggttgttactgtgttgggtaagtttcttgaaatggagcagtattctcttagagaatcttgggggccttatatgagggtttatgttgttgttaaatactactaatctttgcctagatgtagaggtgttgggattctgttacctactatagaaatactgttcttcttatctggattttaaggattgtttttttcaaataaagaaaaattcaagtaaagagagagtattattgttttattgaatgtatggtatttaaatttatagagataaacagagaaggtaatccaagcggaagaagtgaatactgaaggaggaggctgcggaaatctaataaaatatcgaaatttttagagagatggagaagggaaagggagtgatgggtggaggtcgtagatgggcggttgacttctcagactactctagttccccttcttcccgtgatgttcctgatcctcctggtttctctcgcgccgccctcgatcaggttttttatttaatgttttgtggggtttgatctttcagatgagattttgtggcttttcttgagattcttacttttgggttttgtttaggatgattccgttgtcagtcgccagaagaaggatgctgaagcttcttggaaatcccaggtctgatttcttatttaacttttatttattgttgttattattattattattttgtgtgtgtggttagtttatagtgtggtatctggtatgtggaagaagaagtaaagattaccctcagattttttttttgacatttttcaattttactctagctttctgctgagattcagatctaatctaagcaactgtttcgtttgattgagtatttgcttagtttactgcaaacttagtttttgcataaatattaataattgacattgggaagattttatttgtgtagaagcgagaaagtaaattgagttgttgggctgcatttgatcagccaacttcgcgtttgatttttctgttgttgtggagttttctaatgaattttccttttgatattgaagggttttgatgaactggatcaagaacgtgttaatctaactcgtgatataattttttgtttcaacagaaagcttgggaagtggcacaggcaccctttaaaaatttgatgatgatgggattcatgatgtggatggctggaagtacagtgcatttatttagcattggaattactttctctgctctttggcagcccattagtgccttgcagggtgtgggaaagggtaaggatatgcagaaattattttttttgtgtttgttttccgtttctgtatgttttaatgtgaaataacacaaatagaaatattaattagaaggtaagtatatacgaaattggagggtaatctacattttcaaaacacaaataaattcatttggatgatgtagctccttagatataaatttccattcacaattacttgtttgttggatatatcacattttatggtttataattttgaaatttgtaacacttgaacttctgtttagatggcacttttatgttctcaccaaggtgattcttgttactttttgtgttgatttcacagtttttgagccttacaaagacagcaaggttgatcttcttgctccaaagttgctgttcattgccctaaatttgggaggtctagctctaggtgtttggaaggtgattgttgcactctcccatgttttttggacctcatttttttttactaatcatgagcaatccagtacatgttgaattcacccatgctccttcagtgattcacacttgaaagtttttcatcttgacagcttaacactttggggttacttcccacacatgcatcagactgggtttcttccttaccccctcctcaggtacaattcttcttgtactaatgatcaactgtttttgggtatttgtttaatgtgttgttggagttatgaatattacagaatggtttgcctaaataagaaaatgaacacaggctagtttaaagtttggtctttttatttgttgtttgctctttaactgcatttaggccattgacgagtgctgcttttcttaacatataattccattaatacaatgttgcctagcactgtgcttgtgtttattgtacgtgagataaggtgtaagaatccaatttggaacgaattaactagttggtttcgtcaattcgccttaacaaggaaaggggtggatttgtttgaacgctgcatctactaacattgtcttctctctaaatttcaggaggttgaattttcggctagtggccttcctctacattgattttaatggtaataaatttcggtttaaacatgcatcgatcgttgatctctgaactctgattgaaacatactggagcagtggataggccctttatgggctgatggttccttgctcagcatggacgatgtaccagtattttcttaaaaatatttaaggatgaaagttcatattatgtggagaaagaagactagtttttgtagtagacttgatatcttattggataatgaaaaggttttcttctttagtagatagtataaatgttattaaaaaatatttcaggttgtttagattctcggatgaaatacgaacgatatttgtgtagtttatgcatgaaatggaaagtagttaacttcatattgaattatttttataactattattatcagggaaaatcttgtaagcagaaaaagatcaacaattatatgagatacgactattttatttatacgatcacacgtgatttatttcatttttatgcagtgtttgtattcatgtttagaaacagttgctgtccttatatgtgacatggtcgagaaagtgatcttcaaactaaattagcaacttaagtatctgcataaataatatagcaaagcaaaactcaaggagaaaactaaaaaaaaggataagaaaaacaaaattgcaaaactcaagagtcttagcaaggatgcaaaggttatggcacttgtagttgaacttaaggagatgagtcttttgtggtttgaccttcgtctcaaggtagtatagattatgaacgaatcaatcaatatcaatatatattctatataaagtgtgcttatataactaaattcttggtttacgagaaattagtgggtgattttttttttaaaaaaaaacatgtgagaactaacagaataagaaaaaaatttgtcaataaccaattatatcttatggaaaccgttttgccgaatcaaaccatcatttgtgtaatataaaaatcactaaggttttatcgtatatcgaagcaccatttaaactaaaaaaaataatcgattaaaggaaatcgactgaaggtagcactatccaaactccaaatcgagaaacaattatcacatttcttgcaacaacaatcatgaaatttaagtaaagcagcccagaacaagaacgatcgtaaaactgaagcacaataagaaatgacaaagaaaaatcaatcaaaaatagtatattctacaaaaccgattgatagtccctcactcaggttcttcaattgttcttctttattattcaatttttatatattcagaatcgattttatcattatatatgtatatatagttgcaggagattactatttcttcatggttgcaaagtaaaaaacttgctgatgtttatgtaccgcaataataatatttggcaattatataaatttgctgctacataactcgatcttgaaattgagattagcattgtttgtattgttgaaatattcttttgctaacaagagagtcaatagtgcaacagggtgccacctctccaaatgataagaaataaacaggtaatattaccagatgttacccaaaatcagcaattttgcgaacagaaaagacttgcaaacgggtgatagtccttagagatgtgcttaattaagttcttgtcaacaaatgcctttgggtactctggatacccttggat

SEQ ID NO: 32029 - DNA, 1154 bp, Cannabis sativa
  modified_base (348)..(349): a, c, t, g, unknown or other
attaaggaccggtaccaaataaggttagcagatacactagcaacagttgaaaagaacaatacaattacataaataacagctcttattagaatctaaacaaaacaataaattcaaataatggttaatcccatctcaatataccaaacacaatattaatatttagtctttggacagtaatattaattgtaagtagtactcttattgtagtgatcaaatattgacaataaattatgtcaaataatatgtaatctttggactaatacattgttcacaaaaaataccttataattatcacatatttatcaccacaaacatgcatgaaattcatccaaatattaactcaccttnnggttagttaataaatttatgaattacaaaagagatcactttatcgatattttgtttaaattaattcaattaaaatattggatagacaaaatatatacaagcaaaaattcaagtcatgatcacacatcatataagacgaattctaatatgaaatcatgtgcttctatatgaatattatataaataacatttatgaatgaaatttgttttcgttaaaatcgagaaataaacctgatataacattcatgaatgatgacctataatagtatattattaatatacatgcttaaaccagatatatgtgtattacattgattaagttgcgatagaagtaaaacaaaaacaaaatcagaagtaattcaagaattttcatatcgcatatatcacatatccgcatatttacatctaatttgacccctcatcaaattagaaattatccttatggtatccgtatattaaaatcatgacaatcaggtctttaaatcataaactttattctaaaatagacaacataaatttgacttatttatttgatgacccaacacacattttatatatacaattgtgaccccaataaatttttaatatacaaaactttaacttgtatttgagacactatatatacacttaaaggggtaagagctatataaagaataccaatagtttttattttttagtagaagaatattaatagttttaacaattaataataaaatattaatataacatacataataaatattaaatagtatctcttgtaaattttattattgaattgaattgaagataaagttaaattagtaaaaa

SEQ ID NO: 32030 - DNA, 1327 bp, Cannabis sativa
ctccatgtcaaacagaaagttttgaagcacctttgcatccctcgcccctctatagaatatgggcttggggtgctctcaggcgaccatactccatacctccgttccctccaatattttcccgctttgctgccatcataggtaagatttagcttagttgacattcccgctaactcttcctgaaaatctgtgatagatgcatgacaatcttctattgtatcactcagggagtctttttatgcgacctgcccattttgtagcccaatgataacagtctacatgtctgttgttgcttattctaatgccctaatgcgatcctccatctgaagtgaactttatgttcgtgtagcagcgtctctcctctcgattgcggataccctaaccaacaagttagcataatcttgagcaaaagtggcaagttgttgttgtgttgctgttggccccgagttacgagcttcagaggataaatccctgaccctctcatctagtccattcagttcctttatgcgcttctcaaacacttcaattctttgagtgttgctcaccatcataaatgtgttaccaagcttcccttctctaggctctgataccaattgtcacggttcgactatttggacattcccaagtaggcgaaacgtgcgacacttgctgacacaccaacctagcaagttagcctaaacacgcctacatgcaaacaagctcaatagttaagcacgatacatgtcttgcacatgttgagtgaaaacaagaaacatgagcaagaaaacataagtcgtccccaaggaccaatgtcacacaacccacaagtaaacacataggcaaacgacacacaatgacccaacaaaggcaacatgtcatcacataggcaacataaaagcatacataagaagcatggaaaaatatcattttattattatatgaccttgatagggcaagagagtacacaattgagcccctatcatgctggtgacaaggtgcttcataagtcaccaagtcaccccctaaagagcttaaggaagtttcaagagatttccaagaacatgtaagcttttagctctctatacatatgtgaatgaaattacaaaaaataaataaataaataatcacaaaaatctttccatcctaataaaatgcttggtgcaaaatttgactaataatcatataccaaagcgtcctcattggggtgttcatccaattcaattcgcattatttctctcatagtgcatcccatctgcactaagtgcgaatttcaacttttggatccaatccaatctacgcaatagcttaaatccaatccgtaaaagtgtggattggatcgattattttggat

SEQ ID NO: 32031 - DNA, 4153 bp, Cannabis sativa
atatatatacacaagcaaacttagtttttaagttgaggggcgacactttttttttgtaagttaggggggtatcttttttttttttttttttacattgtataacatgttaaaaattggtgtaaatttatattttagtattaaatgtagtataaagtaaaaaaaaatataataataaaaatattagattcaataattaagacactaaatataagtcttattggtagagattcaaaaagtaaaatgtaaatactaaagtaaacatgtttttattgaaattaaaactatgagctccattatatgcatgaaataattttatcattataccaaaacttattttatgttcataaatatcacttttatttataaatatatattgtagctagttaaaatgtttaaatgtatatatattttttttcagaagctgaccccacctcgtctctatatgggtccgcccctgcttgcaagtaattttaagttccaagaaaatagcacgaatgcccaacttagagcgatggcccataattagcataacaaataggagtttttacactacatactaaaatttttaatttttttttaatgtatagcataattttttaaaaaaatattgtgtaagttttagactgtatacgattgttttttagttgtgccactattattttaattattttgttttattattttataaaaagagggtatttttttaaaaaatttcatatgatagtaaaattataaatttttgcttaaaattcaacattattttttttgtaaaaatttcaaacaaatattgcatggttgaaagttcacaatccaattccattggtgtcctatttatttgaagacagaaaattcgaaacacggtttgagggaagggatagtttagtaaaatgcattctcacgcgtcattgatgacgtgtggtaaattatttgttttaattttatctgatttattcattcttcatttcaaaagttggaaattggaaattggaaattcgagaacagtcgtctaatttgaagccctaaattcccaaatgaaagagacggagatgtcgaaaaccgacgaaccagtcgtcggagttccatactatgcacatcagaatccctatcaagctggaatgatccccccaaacgccgtctttggggaccctaagggtgttccgattcagcagaccatttaccgggacactcccgcccctttcaactgcctctactgtggtaattctggtctcacaaccgtcaggtactttcttcttgatttatctccttccaatcgtttcatttttagttagaattatcaaattagtaccttgttttattggtggaaattgaaattggttattggaattcgaccatcttatcttagggttctatgtctaagatttttcatgatgctcgatgaacttatgctgtattgaatgctactttttttaatttcgcgtgattttagttttcttggattaaacaagacaagctgttcctataatttaacaagaatataacataagttacttgtagtgttactgggcatagaacacagaattgctaacacaatccaagtgattccatagaagaattaagaataatgtaatgtacttgtcactggtggattgcttagtagataatccaatggaagagtggaagtctcttgaaaccttaatgctaggccaagaattataaactcattgaagtaggctgtttcataaatagaactaccaattagttttatttccagtgtgattatgctatgcgttgttaaatctctcatgccatactgagattaaactgtttatcttgtccagatcaaagttaagtctggcagctattattggctgtatgatgccaatgatgcttggaatttgctttctttgcccgtcaatggattgtctatggcacaaatatcatttttgcccgagctgcaaagagaaggtacctgggttttctgtctcttgctgtcctgtttctattattggtttattttaggggactatctctggaaaagatttttttattatccgaacattaacaatgtggctatctgctgtttgatccttgcgtaggttgccgactacgagaaattggacgtctgtgctgtgatggatcctcctcaatggacgcaggaaagctttgctctgcctgcagtttaactttgctctgcacaattcgcacttttactttgctatgctttcacatctgatctgcacacacttttactcaacccattgttagaacaacttacacaagaatgctcgtacatatatatattctcaaactgttattgtataatacaatatttctggaacatctattcttcttgatttgcaaaatatgatactcattgttgatgcaataaacatgttcgtgaattttgtcctaaagacaagtctacggttgagctgtttgtattgtttcgttaatcttagttaatgccattgttgctgcatatgcatagacttccatctctgattctttggccacatcgagtttgattttatacaaggtggggtatgtcttgttaggccagccatgctggatgaattaagtctatagagatagctagaaaagctaggtcagtcattattttcctaattgagacgtgaatgccctacaactttgggttcattaaaaaagaataaacctctgtaattaatattgttttatcctttgctgcaaaaaaatattgttttatccttggatctttgttgatatatgaaaattgctaaaggagagtattgtctaaaatggttaattaattgtaaagtggatgtactggtattgggcctttataacaatgcatatagactcaaatatatctaagctatataatatacataacgaaacttataaaacacaagctacttttgtcttcattgttggatgcacaaattactaatttatattgtcagaatacttggcatatactgcgttttgcgctctgctggggcaaaatcgacttcagtattattggagccatggccgatcgaggaagacctcgcaagctagatctaaagtcaagaagaaggtgaaggagaaaggaactgatggtggtgttgggcgcaaactaggacttgtttcgcgtaaggtgaaaatgatggaggagattctaggagttgaaacagctgaattttctgatgaggattctagggaggaaactgagatagaggaattggaaatgcagccccatctattatgtcgttcattgatggaaagacaggccatttgtgaagattttttaaattttatctacgcttcgaagcgtaaagaagaacttctcaattcaggcatcaaggtggttcctccaatacttgtttgaagggtgaagatttttcaaattttatctatgcttctaagtgttgggattttatgtcataaataaaattcaatgtcaatgtaatcttatttactattaataaagatcagaaatcatatcttgatcttgtcatatgctttgttcatatgtttatttcatgattatatgtttgaatatataggtttcatcaaatcttgaacatatagttattcataattatagtgatctcatcacagtaaaaaataattgtgattatatgcttcaaactatttagtcccgagatttatcagtgcactatatttacactacatgataaccaataatgtggtttacttacacttcgataaggaatgtattttttcagggcattggcgaagtaaatttgtattgaatataatggttatacatcggtttggatcaattgacagtggaaaagatatcataaacttaccattatatcttttctaagtcaatattacttagttgatcatagatcaattgatctcaatcctgagaaggctcgagttctttgacttgttcattgtaagcttactcgttggattagtccatacttacatcttgagaactcggtagtataattgagtgagagtggtaatcatagatatagacatttatagctgtaatatttaattagaagtacatcgcttattctttgagtgttcttttgctgcccagtgtctccaagaagtcaaggatcggctgctgtggagagcaaaggctactgatctggcccaacttattagatggataggcataggaaaaatgacctggtttaggaagcaagtgtaaagcccgcttagtgtaatttggaaattagcagttaat

SEQ ID NO: 32032 - DNA, 1605 bp, Cannabis sativa
attctccaacaacttcaagactctctacatgacaaatttaaactcaaagcccttggcaaactaagatatttccttggctttgagatagcaaggaccaaagacagtttatttctttcccaacgcaaatatacattacaactacttgaagacagtggttacataggcagcaagcccgcaaaggctcccatggatcctagacataagcttgatgatcaacaaggtgaactgttgactaatccctcaacctacagacaactcataggcaaaatgctttatttaacattgtcaaggccagatataacatatgctgtcaatgttctaagtcaatttatggcctctccacgaactcctcacttacaagcactacaacacctcattcgatacctcaaaggcagccctagtcaaggtattttatactctgcaaactcctcccttcatctcagaggtttttcggattcagattgggcatcttgccctatcacaagacgctcaacgacaaggttttgcatcttcttgggagactgtctcatctcctggaaaactaagaaacagccaacgatatcacgaagttccgcagaagctgaaaacagggcacttgctgctacagcaagtgaaataacttggctgcaatacctactccacgacctacacactcagcaaccaaaccctgccttcatctattgcgacaatcagtctgcaattcacattgccaacaactcgacattccacgaacgtacaaagcatatcgagttagattgccatttcgttcgtgacaaaatcaaccagtccaccattcggctcatacctgttccaagcactctacaacttgccgatgctttcacaaagcccttacctgcttcaacactatcggctcacacaagcaagatggctgtacaaaacatatacagtccaccttgaggggggtaacaagatttaccttcctatattttcgcctcctgtttatcttcagctggagtctgttatttagttggttaggtagttaaattagttaagggcagtttagtaattacaggttgagttgttgatttctttcttgctctgtttgagccttgtatatatacctctgtatcttttatctcagttaatacaagatttcattttcacccaaatgtgttttcgtgttagaaacctttgatttgggtttatcggagttggcggagtctcgtctaaaatgaactataataatatatttaattaattatttaatgtttttaagaaagggaactaattaaacaaacaaattctaaacatgataattaaataaaatgatgtttgtttcggaaaaaaaaaaagtaaaaaaaatgctcatgtatggttagaatttgagaataagatgaatggagttctatttcaaaagtaattggcaataggaggagcagcccattcatcttatatatcacaatttatttccacacattagcaataatacatttgttaaataacagttttacgatgcatttgttcaaatggtaaatgagtaaatacatatacataaagttaataaaatattaaaaatgttcgattaaaatcctatgtgggcacataagtataatgtatatgctattataaagtgtgatacaaaat

SEQ ID NO: 32033 - DNA, 1363 bp, Cannabis sativa
gactctcttttctgcgagttttagtgctgtgttgtagcactctcttgaatctgactggactcttcgcacagaccctaccctagcttgggtagggaacttcatggtgagatgatagatagaggtcacaatcttcatctttttcaaaatagggcggccaattactgcattgtatgctgagtactgatcaataactgcgaaattagccattgatttggcagtgacaggtgtggttcctagggtgattggtagtttaatcattccttttaatgcaattgtgtctctagtgaacccataaatgctcgagactacatgtcgcaaatctttttcctgtaaccccatctgcttgaaggcttggaaactgagaatatttactaaacttccattgtccactaatatgcagtggacattatctcctccaatgttagcaacgataacaagtgcatctacgtgtgggtggtgaacccacctggcgtcactttccgtgaaagttatgtcgtcccattcttccttaaagagtttttctagtcgctcactcaagttgttcacattagcgagtggtttctcctttgcttccctgacatatcgttattgcgatttcttggagtcccctgcaatgtggggtcctccaatgattgtcaaaatattgcaaggagtcctcgaaccactcgcattgtttttttcttcattgtcatccgcttggggaccctcatgatttttatacttgccaaattttcctcgtctaattagttcctcgatctcgtcctaaaggaaccagcattctagggtggtgtggcaaatatccttgtgatacttacaaaaattctttgggtccctttcgtcgcgattacccctgattgggggaggtttcttgaaaactccgttcttttcttcaatcacgtagatatggtcacgtgggaccgccaattctatatagttgatgaaccgcgatcctcctttcctttttggggacgtttctttctttgtaggggacttagccaacttttgacttcgctgccttttggggctgcgtcttctagggcttcttgctctggaaatctttcctctgggactacgagatcgtgatcgcgatacagttgactcatgtttatccttctctttctctaactgagctagagaattttcgatcctcttatgcggctcagccatagcgaagaattcgaccagtgatttgggtcttcgagcctacaactccttccagcaattggttctcagaaagacccctgtaatcaacatacaaaccatcaaagactcgggggccttctcaactttagttacttcgacattgaaacgcttaaaataatcttgcaatgactcatcgacctcttgtttgatgttcgctagg

SEQ ID NO: 32034 - DNA, 1120 bp, Cannabis sativa
acaatagtgacaactacaagtaaattagggtaatgacaagggatgagatacagtgatgacaacggatgagatatagtgatgaaaataagtgagatacaatgagacaacaagtgagatacaataataacaatagttttgcatgatcgaaatataaaaataatgtattatgggtacaccgtaatttttttctataccattctatttataattctaaataataatgaataaaattttgcatttaatttttaataagtaaaattatcaataataatatgaaataaaatattatatttataattttagtatattagaattatattttcgagtaattatttattataatactaaaagaaattaaattagtaacacgaaaattgtccagtgtatttatacaatacatgcatttatattatgtaaaattggctttttaagggatagattcaacttttccattttatctattttacttttacattatattattttttttatatattattaaaatattatgtttttaaatcatttattatataaaataatacaaaagaaataataaagaaaaaaaatataatttttcttaaaaaaaaaaggattgaaaagaaaaaacaaaaatgtttaaaaaaccttcaagctcttagagctatcactagagtcttaatgaaaaagcttcttcgaatgagctattatttctttctttcactacctcctatataaactaccttttaatttcgctttgtctttgactttgtaatttattagacacccaattatatactttataaaatatataaattatttatgttattataatgttcttttgacaaaatatattatattataatatttaataggttaagaaaatatgttaggtaaacattataaatattaaaaaaatatataataatattattaatttttaaatatatatttaaaataaataaaaaatataatatttaaacaatataaaataaaaaaataaaaatactgatgtatgtatttgagcataacatagctaaatgtgtatactttattgggtaaataccattttagatcctgtgttttgtaaaagttgccaattggaccctctgttttggtaaatgataaaatagaccatatattt

SEQ ID NO: 32035 - DNA, 1287 bp, Cannabis sativa
aattagactattttgattggtcatgttctttatattaaaggacatatctttatttattaaattaaattctgttttaaaggatcataaattttttaatattgagttataatgattttttttttaaatattctaaacagttttgacacatatatatacatactatacaacatacatgttatcaaatggagtatcccgattattaaggatgagatgttagcgagacaggaaatatagcattcaaatattgacggaaccatatttggatttcagtctttaacatctccacatccctattaaattgatcacaaaggacatgcacgtttatgtcatacccgatgaggacacgcctcatctcggcatttttttttagaaataatagtcgatgcatgcagtagttcgtttctgagaaacagtgttctcaaagacagctcttcaacacgaccagttaggccatccagttgacatatatgatcatgacattccatagttcgttctcgattaacatcctctgaattagaaagagattgctccaaacaatatactttatttcgcaaatcgttaaggtacgaaagagcattaggagggagttattttagtttagtaatgggatttatgttgtgtgcgtgaggagatgaactgtggcctctagaagacatacctcaggattgatattcaaaaaaaaagaggcaaaaaggaggtttcataggaagaatgaaggaaatgcatgtaaataaaagaaaaatgtggtaatttataggcagaagagcttccttcccatgcctctacgtagtaaaaaattgaagagatgagtaatcacattgaacagaaaaaagattaatatgatgcatggaagtgaaaagactgatgaataatcatctttgagcaatacaagattggtgtgatgcatggaagtgaaagaagagcatgatgatctatggacaggaggaacaccaaccatttacgtagtaaaaaaatagagaggtgagtaatcaactttgaacagtaaaaaaattgtctgtgtgaagaaaaaacattgagcgttttttttttctttaaatacagacaatggcaaataaaatagtaacagtataagaagtgaaatagtaaatagttgtgtataaaacaaaaaacatgaatggtagccgcacaaaacctgagatgaatatatacctgggtttaagtgtgaatgcataaaggtaaaagcaactgccacttgattctattaagaagataaggttcaccttgaagaggcatgataagctacctctataaatacattcacccaag

SEQ ID NO: 32036 - DNA, 1248 bp, Cannabis sativa
ttttataacataatgaataaaaacaaaaagcacataataactctaaccaattataaattaaaatagaaccggttctataacatagtgaataaaaataaatcaaacgcagtagttaaaatcggttataattaaatattgtaccgattctataacataatgaataaaaaacaactaacacaaaataacttaaatcggttataattaaaaaaaaaataaagagaaaatcagttcctaaaacactgaaatataaattaaaaataaaactagtttcacaacaaaatgagtaaaaacgaataacacataataactcataaactggttataattattttttttttaaaaaaaaaagtggggatcaattcttaaaatactaaggcgtaaatctaaacagaacgggttccataacaaaataaataacacacaataactcaaaatataatataaagaaaccggttatatttattaactagttaagaatttgagacaaaaaaacaaattttgtactaagccaagaatacaaacaaataacatagaataactcaaatcgtttataattaaaagaaaaagatggaatcggttccaacaacattgaggcataaattaaataaaatcggttctacaaaaaaataagtaaaaacatacaacaaacaattactcaagaaacggttatcctattttttatttttatttttttttaaaaaaaaaaaagcaatataaatcataccacatcacaaaaattggtatattttttaagagattcctttaaaactagctgcgaaataatactaataaaatgtaaaacgatcttaactaaattgaaaatcaactgagaaagaatacaaaataaatacaacatgatctttgcaacttactagcaaacccataatttaagtcaacattcaaatatgttggctgaaaaaaaaataaaacaatataaaaagtatttagaaacgattaaaattaataaaaaaaaaataacaaataaattaattggaaaatttgacaaatttcacactatccactcaatattttacattatgctataaaaggtatttcgtaaatataaaaactaaataacagccccataaaaaagcttgaacattccttttaatgctcacatataaaatccattaatacatcaaataagaaatatgcatcaggatctgatattttcttaattgaaagatggatacagaatacacaaaatcaataacagaacaaattcaaataaagagcatgaaattctta

SEQ ID NO: 32037 - DNA, 1118 bp, Cannabis sativa
aaaaataccataccatattttttctaacataaagtcctaaaaataaaaaataattttttttcctgtggcccactttattttagggtcggccatgtctgggttactacctctaagctggagttttctgatgctctttgtggggaagcaacgacttgctgtttagccatggaggaggcgaaggctagtggcgttaagtttattattgttaagagttattcaagggtagtgatcaatgctcttaatgggaaggagtcccgttgggagcttgagaactatgtctcattttgtaatagatcctctcctttttttgttggttgtattttcgaacatataagtagacaatgtaatttcactgctcataatgtagctaagtggacgttttcctaacagaggtttgatttcatgccgctatcctttatgcccgataaactcttttgtaacgaccgcgaggtctaactgcttttcatttatatatatgcacgattttcttaaaaaaaatatgcatatagtatacatatatgtcatatagaataaagtacgtacgagctatatagccattgtgtattgcttttcagttactttcttcagtaaattatggttcaaactacaaaatatataaataattgtgtccaagttatatattatggctcgagttgggtaagtaagaattgaagcatgatatgagctatgttatggttggcacatctataacatcattggaaggatggatatggcaagtcgttcttgtccttttgtgattttgttttaatttaaagtttgttttttttttattttttttaatacttttttctataattatctttttttaattttgttttttaattctatttttcgagaaataatttttatacttgttattggtagactcttaatgtatttaatgtcatatcgaaaacgtgcttaatgttttgtcggtatagtactatttttttcgtacatttttaaatttgttttaattctattttttagtaaatgatttttgtacttactattggtactcttaatgttcttaatgtcatatcagtatgatactcaataattaattagtttgtattttttttttttgtcttttatgtttttttcttttgtatggataa

SEQ ID NO: 32038 - DNA, 2221 bp, Cannabis sativa
ttacttgaaaaggaaaacgagtggcaagcaaggttatatggcgttaaaacttgatatgagcaaagcttatgatagagtggaatggaggtttttgaaggatatgttgaggaaaatgggctttgctgagaagtgggtggatcttgtgctacattgtgttgtttcggttcggtatcatattatccatggtggtagaaagatggggtcgattgtcccgtctagaggtattcgccaaggagaccctatttctccttatttattcattgtgtgtgccgaaggtttctctgctcttgtaaggagatttgcacagaacccgttgttacatggatgtcgtgttgctaatggggcctcgagggtttcctatatgttgttcgcggatgatagttacttatattgtcaagcttcggttgaagaggctagccgtgttatggagttactttgaatttttgaaatggcgtctggtcaagtggtaaacaaggcgaagtcctcagttttctttagctctaacacaagggaggatgtctgacatcatatatgtatggttttggggatggatgaagcggatgctaatagctcctacttgggtcttccaaacactattggaaggaataagaatgatgtgttggggtttcttaaggataaggtgctaaagcgaatcaaaagttgggataccgaatttctgtctcgtgcgagtaaggaagtgttgataaaaacggttgtgcaatcgttacctacttatgcaatgagcgtctttcttctcccggttggggtgtgtaaggagatcgagagtctaatggcaagattttggtggaaatcttcttggaatcaaaacaaaggcattagttggatgagttggccccgtttggtgaagcataagttcgatggtggaatggggtttaggagtctttgtgagtttcatattgctatgttgggtaagcaagggtggcgtcttatcactaatcttaattctttggtgagtcgcgtgtatcaagcgagatattatgctgaattaggctctaatccgagctttatttggagaagcttagtggaggctcaagatgttctaaaggctgggttacgaatgagggttgggaatggtttatctatccgatttgctttggatctgtggcttcctagtgatgagtttccaataccaacttctgacttaactgcttacaatgatttaaaggttcatagcttgtttaagtttggaaataaggagtgggatgaggaggtggttcgggatattttcaatgaaagtgaagctgatgttattttgggaatttcgttagctattggtgatgctagcgattcttggtattggttgaaggagaagcttggatgctattcggttaaatcagcttatcaattgcttattaaccgtgactctagtgttgaagagagggatgggggttcaaagttttggaaggatttgtggaacttgaaagtgtcgcctactgtttaagatgttctttggagggcagcggccaattgtctcccaactaggaagagactttttgagaggaaggtgcctttggtttccagcgaaaccatctcgtattgtctaattaactgtgactttgctgctgcgtgttggacgaagcttgctgtgagtgatgggggtcgggtgtgggattcgtttagggactggttgcaggatttaatggacaaagttgatgatgttaaagttgttcaggttggtactttgtgttgggcaatatggaaggctcggaacgaattggtttgggatcagaatagtcggagtgttgatgatgttgttcagtttgcattaagatcttttgatcaatggagaaaagctcaaatgggtgagaactacccttcgttgaatccgttatttctcaataaaggggatgagctttggactaaacctgtttttaatgggatcaagcttaatgtggacgctgcaatttttgacagcaacagccgatatgggattggtttcgtggtgagggactgcaaggcggagcttctggtggctgtggggttgtctcagccgggaaaacctgccccagctgttgccgaagctatgggtatacaggaggctttgagttggttgaaggacaagtcgtaccaacatgtgtgtgtggagagtgatagcttagttactgtggaagctatcaatagtctggttgagatgttttcggcgtttggtttaattgtgaaagattgtaagtctttgttagactctatgaataatgtttcg

SEQ ID NO: 32039 - DNA, 1893 bp, Cannabis sativa
aaaatgaaaaaaaaaaaaattgaagcgtaaaaaataaaaataaaaagtccctggattttatatgaattaatatttataaagcgaataaaaaattaaaaaaaaaattaaggggagaacaaataatactaattaaagatattttagagtgtcatgtcaccgccttatatttttctttatatatagatagatagataagtgtattggtttaaatatttataaatataattaaaaattaaaaaaaaattgagagaataatggagagaagagagaaataattttgctacgattttagagcgttatgtcaccgcctcatatagatatatagatatattgatgattgataataataatgataataataataatgtacaattttagagcgtcatgtcaaataataataataaaaaaacctgtggcataatattatatatatagtttttttttaaaaaaaaataattagtttatggtagatatttttgtcgaaaatttattaagataatagtaaaatttattaagatatatatatatttttgtagatttatattttaataaaatattaaaaatgagagaattaagggggaaaaagatagctttggagagaatggaagagaaagaaagagagagaatgtgagttagaaggagggacttttcaaatgggaggggtaattttgagtttaggaaaattgttagaattttggataaggtgaatggggttccatctcaaaaccaattagctatgggatgagtagtctatttctcttatatattctattatctttctacatattacaatgtgggactctctaacaaaaataggtgcacatttttgacattgtgcaaaaaggtttgtctatttttttttttttattttggtgtaaaattatatattaaaagtgaaattttctaatataccatgacaacaaaattatatacaaacattgtatataataaaagaggaactaaacattatccaatataaatgatataccatataattaaaatatataaaaacaacaattaaatatatgtagcataccaataaaattatatacctacattgaaatatatattatgctaacaaaatatataccaccattatatacataacaaaataaaaaataaatattatctaagaataataatatatgatgcaacaaaaaataaatatactatacaacaaactatatatactattttttttttataggaacaaactatttatactaacaacccacaataattcataaaaaaattgacataagtttaaagcaaaaataattttaacaagattaatataaatatatcatgatatttaaataatgtgcttctaaatcttaaaaaaaaatgagaatatatatataaattgaacattaaaaatataagaactatgaaaattttatgtaacaaaatataatttaagtaataaatagcataaaaggctcatttttctacaaattttaaaataaagatatttatcaacgtagtactatataagtttattcgcaacccaaaaatttataaatgcaccctattttagtgatttttattttatataaaaatatatatctttaattatatatcttaaaaaatatatcgttcaaacaaaaacaaattgtatttataagtatgataataaaaaaaaattaaaataacaaatcatatgaaattttattagaaaaaaagatattatccatggtttaaaaaaaatatgaaaattaaaataaatattgaaattaacacaaaataatgtgaaattacttttttgaaaaaatattaagtgcatgtaatttttaaaaattattttaaatttcatttttttaaatattggagtatatttatagttttgtggggggtgctaatagaaatctctatttttgaattatttactataat

SEQ ID NO: 32040 - DNA, 1721 bp, Cannabis sativa
gcagttactcgagatactacaaaatgtaaacttgcaataaattaaacgcttgctgatatcaaaggtattagccctcgagtttgcacccatcgaattaatctgaaagatgaggctatcccacgaagggacccttaaaggagactgaactcaccaatgaaagaagtggggaaaaatgaagtactaaaacttcttgatgcggctattatttacccggtggtcgacaacaaatgggtcagtccagttcaagtagtgccaaagaaatcgggtgttaccgtggtccaaaatgaaaaaggggttcttgttcccacaagaactgtgacgggttggcgcatgtgcattgattatcaaaaattgaatgctgcctcccgtaaagatcattttctgctctcatttattgatcaaattcttgaacgcgtcgctggtcatcttttctattactttctcaatggttattcaggttactattaaattgagattgtattagaggaccaagaaaaggccactttcacttgttcttttggcacatatgctttccggcgtatgtcatttgaattgtgtaatgcaccagccactttctaaagatgcacgatgagaatttttagtgacatgattgaacaaaccatggaagttttcatggatgacataactgtctttggaaaatctttggacacatgctttctccatcttgaagctgttttaaaacgatgtatcgagaaaggtcttgtgctaggccacattttttataaaagagggattaaggttgatcattctaaaattgacctcatctctaaactgcctacccctaaaactgtcaaagacattcagacatttcttgacaatgcttgtttttataagaggttcatacaaaatttttcaatgatttctcgtccattatgcaacctcctagacaaagatgctacttttgagtggacaccgaagtgtgaggagtccttccgaacaattgtgaattcactcacttcaacaaggctcacactctcaatgtaatgtttcagtctttggccattgactcgaaaaatcctcccatcgactgggtcctcgacttcaatagaatcgttggggaatatacttgcttcaccacatacggaccagtccacctcgatctcaacttaccagggtagagatgcaaacgagaattgtacaaatgtactttcttatttggctcaaaatatttttgcaagatctgtttgtcgtgagcttctttcaggacccaaccgatgggaggatttttcgagttaatggccagagactgaaacgttacattgagagtgtgagccttattaaagtgagtgaattcataagtgttcggaaggactcctcacacttcagtgtccactcaaaagtaacatttttgcctaggaggttgcataatggacgagaaatcattgaaaaattctgtatgaatctcctatacaaaccagcatagccaaggaacgattggatgtctttgacagtcttaggagtaggcaatttagagatgaggtctcttttagattgatcaacctcaatccctcttttagaaacaatgtggcctaagacaatgccggaagataccatgaaatggcacttctcccaaataagcacaagacctttctcgatgcatcgttttaaaatgacttcaagatggagaaggcatgcgtcaaaagatttttcaaaaccagttatgtcatccatgaaaacttccatggtttgttaaatcatgt

SEQ ID NO: 32041 - DNA, 1316 bp, Cannabis sativa
  modified_base (1265)..(1272): a, c, t, g, unknown or other
ggtggagatctaacaacttctactagtgtattataaacggcaggagacttcctaaaatcaaacaagtaaaattatacatattagttccccagatgacattttggcccttcttctagcataagtttactcgatcgaacctagttgtaggaggtggagatctaacaacttctacttctgtatcatcaacggcaggagacttccttaaataaaacaagtaaaataataaatattagttccccacatgactttttgatccttcttctaacataagtttactcgatccaacccggttataggaggtggagatctaaaaacttctattctgtatcatcaacggcatgagacttcctaaaatcaaacaagtaaaacaatacatattagtttcccacttgactttttggctcttcttctagcataagtttactcgatcaaacctggttgtaggagatggagatctaacaacttctatttctgtatcatcaacggcaagagacttcctgaaatcaaataagtaaaacaatacatattagttccccacattactttttgaccctttttctagcataagtttactcgatcgaacctggtgttagtaggtggagatctaacaacttctacttctgtatcatcaactgcatgagacttcttaatatcaaacaagtaaaacaatacatattaattccccacataactttttggcgcttcttttagcataagtttactcgatcgaacctgattgtaagaggtggagatttaacaatttctacttatgtatcatcaaaagtgggagacttcctgaaatcaaacaagtaaaataatgacttcctgtctaagtgccacaccaaaattataatatactgattatataggaaaagaaaaatctaaccaattacaattaaagaaaaatacaaactcgaagaatgaacacatgaacgaaaaatcatatataaaaatcacatacacccataatttactaacaatatttggcccattacaagttgtccccattcgtcccgcaataaatttatttatctcatcgttgctgtaaggatcgtcattatggaactgtaaaataaaaaagaaaaacatcaattacttacgttaatatatttgtaataaaaacttttcaaatgaaatctatgcaagtttacccgagttcttaagaaatctatgggatctcgcttatttattaaactttggataaacttcatcacgtagtaactgttgggttttatgccctaaataatactcatttcaatataatnnnnnnnncttattaatatagatcagaaaaaacatttaatgttgcatggttc

SEQ ID NO: 32042 - DNA, 1726 bp, Cannabis sativa
ggtggtgggtagcaaaaataaaaaaattgagtttcggtacacttttaccgatttattggaaagaattcaggtattgatatcaataaaatatttgagcacattttcctaaacattttcaaaagtatatattgtgatgtaattatctcaaagaaaaatatatacaaaaaaaaatataatttaaaatttaataatccaacatatataataaacactagtttagtccaacctaattctcatgatctcataataaaactgttaaaatataaatttattcaataagtattgacaattttattagcgtttaggaaaatgagaattgatattttaaatctaaggttttctttctttaatcttatgggttaaatgtatattaaatcaagtaatatatatgtttaaatgaatatattaaatatataaaattataaatgtattttaaaaatatataaatataattgaatgactattggattataattggatcggtttggtcgattatccattggatcagatgttcgatccaacaactgatccgatctaattgatttttaaaatttacatccgatccgattcaattataattagatatccaattttgggctgagattagatcaatcagttgtaattaaattggatgaatttcggtatacccctttttagatttaagtccaacaatgtactaagtatgagtgggtgtctcaatttaaggccaccaaggagccatccatatatatattagagcgggactaattggccaggtaaggaatcatgatgtcctttcttggtggacccaatctgattactttagtctttttctttcactattgccactctcctcactttctatgatatcaatcttggttattcagcccttggattaaaagatgggtgagtgatccaagggcttctaaaatctattattgacatcaatggtatgatcaccggaccctattgccctaatgggcatcttcctatttgtaaaatttacacatttttgcaacaatgattcattgggtatttggattgaaaagtcaacatgaagcttatatttttttttttcaacaatatcaacttcctattcccaccacctccaaaaatatatatatatatatatatatagatttgtatgatagtataatacaaaagaaaatattatattatcatataatatagatttctcatgatttctatactatgattttatacctcatgatttctcatgttctaatcaataagtatagattttgtagattcatagaatgaaaaaaaaactctctttatattgtatctctctcttcacattgtataaataatttggagatctctcattttaattaaaagtatagattgggattactcatctatttggtggctcgtaattgatatcaataaatggcattgtgatatactttttttctgtctttttattccttcactcaataaatgtcattcctaattctgaaaataaagtttcatttctttcaagttattttcatgcaaattgcaaagcattaaaaagtattatgaatttatattatatttcattacaaattattatttatttcaatcccaactattgatttccccattaaatcatatatagggaccaattaattatgttcattatcattacaagatcctcatgtcttatccagatgtttatattgataaattttacatgggagcttagaacggatagatttctttttcagcaaaatgatagttttta

SEQ ID NO: 32043 - DNA, 1263 bp, Cannabis sativa
caccttgagtactgttaagtgttgtaccacatacaccttgtacctttccgtactagtgctggtaacaccgtgatgtactcttcagacatcatacactgtatcaatgcactctgtactggtactgtacaagtattagtagtgtatgaatcacaacaagcatgcatataccttaacacatacatacattcgcatatccatatcacacattatatatagttcctacttcgtttccagattcaagtgagttggccgacctgaacggaaagtctcgtgctggatggatgccctaatcacatattataaccgggtaaatcatatgtctgaaaccctaattctaaaaacccgagtctacaactctaggctttgttatactctttagggattatattaacctaggaaacagggaaacacccaactaaggcactaaaattgatgagaattgagaaaaaaaccgatttctcggggaacctgccaaagccggttaaccggtaaaaccgattaaccagttttacaggcagtggtaaactggataactggtttctgccagttctccccaaaaaacatccaatttgctcaaaacttgtccaattgcctccaaactttcaagagtacctaaacaatgtatacacaacatattccaaccagaaaatcccaaaaaaagtcactgaatcaaattatgccattagagatcaaagcttaggtttcaaagcacaaacttgtgaaatcataacaccatacactcaaaccagcaaccaacacctagaatcaacttaaattgaacataaaaactgaaccctaagcatttctaaccctaacagccaccaaaacacaaaatcactacttgaaaccaattaaaaccttgagaaacacatagctagagagtatctagggtttaccttgattgaatcctcctctaatcgttgctgaaaacacaaagtttcagcaatcaatccctttgatcttggcgggttcgaagagagagaagagaaaaaaagggttctccttcaattttgatctttttcttatttcctttattttcctaaaatgacactaaggttaatcacattaatcttggctgaatgtggaggttcggtgtcaacacctaaggcagctaccactcactccccataaaccaaattactaaaatgccctcacttcataacaagcatttttaagaataggggtaaaatggtcaaaaaccataaccctgctcaaccccgataatttatttcttcaaaaatacatcccactaagaaataaggt

SEQ ID NO: 32044 - DNA, 1356 bp, Cannabis sativa
caattaattaaaaagtattatataggcaactaacataagaataaaataaaaaagaaagattaaaataaccttaaataattatttaacactcttcctcaaactcatattgtttgttgcgagaaatatcgagagtttgcctaaaagaaaacgaaaacgaaaaaattgtatgtgacttagttaaaaagttaacaagctgtacgaaaaaggaacaaaagataaagtaatggtgtctaaaaagtaaatggtaatcaatctaaatatatttggtgcgttcatgaaaaaacgagttatgagcaatctgaatggtgctttgattgtcacaatacatagaagtaggacaagagtgaatgacctgcaagtaaaccatctcaaccaaaaaatctctttagtagtagacgtcatgatacgatactcagctttcgtagaagagtgagaaacaacagactatttcttgatcctccaagaaataagggaatctctcaaaaagatacaaaaatcaatgacagatcttcagtttgtgggatcacgaccataatttgtatcacagtaagcttgcaattctagagaagaggtggaaggtagtagtaggctttgaaagatggtaccacaaagataccgtagaatgcgaagaacagcagcctagtgaacaatagtaggagaagcaacaaactaactaacaatatgaacagtatatcactactacaaaatgcattttggtaatcaattttaaattgacacttatacatatagtgtcgatacatgaaatcaatacttattccaccaagacaaaagtatatttcttggtgtcagttctaaactgagacgtttaagtaactgagacttactagtgtttaattatttttgcactatatgcatatctcagtttagaaccaacaccacaaaaaacttttagatctagccacaaattactcaagccaaatctaaaattcaaataatataatttacatttgtaagaacacaataaaattaaacaatatactatcaaaattcatatgacaaactcaaattctaatttaatttggcttttctttttctaaatgccatttcaatctcaatttaattccataattataaatcaagttctcagtcatccacattattagctttccaaaacagaagttgtaagaatcatctactctgagaaactttaaagagtgaatcaaagaaactaataacatgaacaggagttcatgactacttaggattcgagtcgatctactattaattatcgttataatataaattagatcttcataggaaacgacatgtttgataaagacagcttaattacatatcggtgcatgtcatatttaatctctattatatacatatata

SEQ ID NO: 32045 - DNA, 1391 bp, Cannabis sativa
tgactttgctatagaggataagtaaaatctaggtttaaaactttgcaattttctttgtaatggtctgtgaagctttgtagttgatgatgttagccttttatcgcaccttgttttccttttcaccttacttatttaaagcttcgtgaaacttttccctaaaccccaaaacttcaaacttcttggttttgacttatttttgaatactttcattgtttttaatttgtcgagtactcctggttggcatatttgcctgtttattattcgatatcccaaccaaacactcatcttgcgtgttgtcttttgtagatgaaccctggggagttttggggaagctaacaccgaattgaccaggatttgctcaaccttttgtacgaggatcatgcacgtcttcgtgccagtccgtcctcttcaagtgacaagctatccacttcaagttttctatccagccataggatgatggctcgaacaaagaaaacgatgcgcaaggtcaaagcgtccgaccctcacgtggcccaacacaccacattacccagccccgaacaagatctgcccatctaggaggagggggatcatgagggggatgctaaagtccaggagatagaggaactgaacgtcttccatcctggcagccctaccgaggtggaggaagaggaggaggctgggcctccaaatttttggggatacaatgaggttggggagccagtagatgtggacagggaagtctggttgaaggagtggactacgtcaccgaggagcttactgctacagttcctcaaaggaggcaaggtgccttaggtgccggtgggtgagccctccgtccaaagtcactgcggcacgcctaagtgacttggaccaatctggctatctgggcgaactggaacgttatgtccctacttcaaaccaccgagccacaaacccgaagaagggaatgtgttcctggttgggtgctcattccaaacaaggggcaatgctacctttgcacctgtactttaggaaggtggcagacttcttccgtctcgttctgacccagtttacccccaagggcatcaagtatctatcagcactgttcgtcctctacgccacccaaaaatggggtatgccttctacgcatgaggtgagaaagtttttttacctgaagtctacttcaaaccaaggcaggttggggtacttctacttctctcagccagacttcaagtggttgatgggcaccggggacaaggccgtgagcaaaattgaaaattttgttgacgaatattatatggtcgaaggcatgggcaccatctatactcggtttcagcagatccctatatattaccgtccaccttcacactagctcttagggacagagctcaaaggattgttcagcaggcggacgatgctcagaatatcac

SEQ ID NO: 32046 - DNA, 3080 bp, Cannabis sativa
gagagagagagaggaagagaaaaatcaatcctattttctctctattttgttatgcattttttgtacctgttaattgctctgaattcttggtttattaattatgatattatatatcctataaataaagtctttaatcctttatttaaaataaaagataaatattcaatttactttgaattcagaatttaaattcaaatataaatatctattaactaaatatcaaaatattaatagatattttattttaataattatctttttaattaaataactatcgaattatttatttaattaataattaaaagatagttaacttaatttaatttaaataattttaacttaataaaataattaaactaaattaatcatggtcctttatatgtcatcctacatgtttagaagtgggccatatttaaaggtctaaaattgatttcttaattttgccacaaataagatttattatttattttaccaataaataataatttataaattctcattaatatcttattttaaaacgattaaaataaatattattttctctaaattaacatatttctctctttaatattatttagtaataatattatttaactaattaatatagttttatctaataaaattaaatagttaaatactattaattatacatttcataattgctataattaatcaaaataataatttttcaaattactaatttgcccttaagaatttatttctcataaaaattaattttcacttgaaattcattcatcaaataaaaccttccctatacagtgttgtatagagatgactcagggaccatgaactatatttcaaagctctaataacccttgccatcaatctcatcaacagagaatcagatttattaattctattattactccactataaatatgaaattacactctttgacaatataaaattatatttacattattcttaattgtactctattgatataatcaatataagtagttcaccctctaattattagttcataaatagagttggtcaaaatactattttacttctaattatctcttaattcagtatgtaccattaattcaatgtgaacaattaatctataacttatttagaattggatccaactgttagcactcccagaattaacacttagaaaactaatattggatctgttaggaaagcttggattccactattgtataacatgttcccaactactcatgttattaagctgtaaaagtagaagttgaaagaatcaatttctctgagaaactttaacgagtgaatcaaagaactcagtgaacacaaacatgagttcatcatatactcaggatgatctactaattatgatcatcattgtaatatgataaactcttctcatggtaaacgataaattaatgaaagatgtttattatatattggttcattcatgcataatctaattatacacagtacatttactacatatccatctacatatgtgatgcgaatcgaaatcacacacactagaagtatagtgtatagtaaatagtacttagcattttcatattaaagattctcaatactttaatatactactgacttattttatccatatcgtataatcttaattctctcgtatatctttacaaaattataccttctttatataaataagaaattttcaaatatttaataattatctcttataattaatctatcatttatattataattatatttaatatattttctaatttattatccattaattgtttacttttatggcataaatcctaacattaagcaccttaaagtgtctaataacaatactctttcttcattgttgggtcatactcgtagctattggatcgacccgtgttcttttgttgttagttagagatagtcttaattagcgccatttataatgctttgcaacttcactaaaaatggggtcaacattttctaattaagatttttttttaaaaaaaatatatatattgacaataattattgtatgcttatatttttaggaatttttgtttgtactttatgatcataacgttagttagagcgttgttattagataatagtggtgcttagacttctagacgtgtcactttataatttattagtgatattttataaaaattatgatattaaattatttaagatccaatactttattatactaataactatattaagctagttataagagaatgaaaaaaactattgtgccttttaacatttatcggttatagttattgtgaccgttgatcaacaacacaaaagaaaaagaatatatcctcatcaatacaaaatccatatgaaccacatggaacccatatgagtctctcatctcatattcattacatagtaatgacaaacaatatcacatggacgtatatgctcataaaagtgtggctcaaataaaaaactttttatttcttcatattttccatattcctttatctcaatatataaaatgtgtttactaaaagggtttggaaatgaaaatagagaatgggtatatgattactcatgttacttagtaatttaaattattatgaaatgagaaaaaatattagtggacttagtacaaatttgaaattatatatgaaatattagattgaccattcttattaaacattgaaagtgtctagcagcacttaaaaataacacaacaattagttagcaccagtaatatctcttaatatatatttatagattagctctataaatatcaacgtgatgacaaatcattgtaaatatcaaaagtttatattagaatttatctcttgcattaattttattgagggtattattttagtatgattctagtgaatttgattactagtgaatctaactagctctaagtcatttggatttaggtagttattactgatcatgacaaataaaagagtacccgaaactttgagacttacaatttattttaattcttcttagaagataatatatggataaatatatggtgcggtcaccaatacacaagcactctttatatatattattacttttttaggtatcatctttcttcataataagagctcctattacgatatatctctataactactacatctatc

SEQ ID NO: 32047 - DNA, 1927 bp, Cannabis sativa
ttttgtctctttgctgggtagtttggatcgacatttaaatgatggcagataatattagggtcaatccctatcatatctccatggctccatgcgaactcatcctggttcgccattaaaaaacttattagctgctatttcaattgttcatccaggttcttcccaatgtaaacacactttgtgggatttcctgggtctagaacaacttcttcaaattcttcaattggtttcagtaagtttatttcatcttgagttcgaggatcaagatcttcatccttcttctcgccttcttctgtcaagactgccattagttggtgatcggcttttctatgctgtagctttatgcgatagcatttgtgagccagcatctgatcacctcgcactaatcccacacccactggtgtctaaaacttcagggataagtgcttgatcgaactaactaccccttgtctgattaatgctggacgacccagcagtatattgtaagccgatggcaggtcgacaaccaaaaaatcttgcattattgtggtggataaaggtgcttcgcccaaatttaatgcaagctcaattattccttgactggcgacagtccgcacagattcaccatacaaggccttaatttagctttttcgagcccaatcttcttcagtgtttccctgtaaaggatgttcaataaactcatattatctaatagcaccctttttatccttttgttagcgagctggatggtgattaccaatgggtcaacgtgagggtacctcacattcttttcatcttcctccaaaatataattggaagttcttcggtctttaatttcttggaaggttctggagcaaaggcagactgctcgttcttcacttccttcacgtaccttttttgggcattattgctctctcttgcaatatgtgcccctcctgagataaccaggatatcctctccttcaacaggaggaggctgtaatccctgattgcttgggttgttgggcggattagactggttatgtctattaccctacctcttcacatattgcttgaagtggcctcgcgcgatgggactttctatctcatctttcaactaacgacactcgtctgttgtgtgcccaatgtctttatggtacttacaatatttggttggatctcttctatgcctcacgtgcctcatgggctcaggtttactgaatgtaaccttatgctcatgcgcgaggtagatattttcccgagtttcattaagctcggtataaatggtgtaaactggcacatacttatcgtgcttcttttgtttcttcttgtccttagatgaccccttagagtcgtctttcctctttgagccagaggcccctgggttatcagctttagtcgagacagtacttgttgaaatagtgcttatgtttacttcctgagccaatttttaacaagttcatctcttttcgagcttcttcctttcaaacaaacatttgagccctttcgttgaactcggtgatatttttcactagacgaccctgtaggtcgtcccacagttcgccaccagcagtggagagatcagtagtgatccctgcctaaagggcagtaagatgggtactatcttccaaatttcttactcttccagcagccgtgctaaaacgacttaagtacgccttaagcgtctcgccaggttgttgctttatgttaatgagtgaggactgtaacgccctaatgctaaggcactctacagtgctttttcaattgcagtgcagtctttgttaatcaaagaattttcttgaaaaatgtatcaaattaaaatttttatcttaattaataaactttataatatacaaaattatttaaaagtttcaggatcccgttttcaaactttttaaacataatactttaaaatacataatatccaggtcgcacaacgactacaaaatacaaccccagatgtcccaagaccg

SEQ ID NO: 32048 - DNA, 2894 bp, Cannabis sativa
ccttccaataacatcataaatccataatagagcaagcttagggtttttacctcagattaagccctcaaatttcacttaataacctctgaaattgaaagaaattccccccttgtctgttggttcttgttggccgaacaaagaagaagaagaacaatgaaggagtattctcatctattctcttatttcataaaataactaataaaaggttaactaattaacctttatttaattaggtggaaggtctcaaacataggtgaagacacctatccaaaagtgtaaaattactaaactacccttacctctaaacctaattcaataatcagcttaggggtaaaatagtctaataccacaaccccgccaacaccaaccatttgagcttacatgacatattctctatcactaaaaagctctatatttccccaagtggctaaaacaacctccgttgcattttccatcgtctccgagctaaaatcacaaagatagcatattttacatttaacatcatcattcacataaaacaacaatattaatgataataataaaattagaacttataatctcactaatccatatttaaatattgcggtcgctacaataatattctttggctttttattttttgggaaaaaagaatccacccatttttttagctttaatttcagaatgaaagatgtacatctatgtttctctagaaataatattgatatattagtgttagaatcatgtcttcattaagtaattaaattatcaattttttgtttattttttttaggaacaattacaacagttttatctataataataataaagttattcttaaacactcatgcactaataatgattctctacaacataaatttctattgttcatctacaataataataataactttattcttaaacactcatgtacttttaactattattaataacaaatttattcttaaacgactattaatttctaaaagaataatcattccaattatcacacactaaatttaaatttataatcctcacaaaaaaaatactttaattcataattaaatttgtaactattaataataaatctacacatttttatttgttacttttagcttattttaaattttaattaaaaaaagatacttatgtttttctaaaaattaaatcaatataatagtattgttataatcaatgtctaaatcatgacttttagacattgattttagaaaaaagtatcgaccattatcaacttaagttacaataattcatgtatcctaatgtaaaaataaatattaatagtaatatagattttttcaacaaaagatataataataataataataataataataataaatttttcctttaatatgataataataaatgtcttattttaataaatgttaatattaataatagatttttctgtttacagatataataataataaatttttcttttaatatgataataattaatgacttttaatattcatggactattaactattattgataaatttcattaatgagaagtcaaaagtaaaaaaaaaaaaaacaaaaaagaataaccgatctaattattgttaaatgtgattacttctaatttgttattgtcattattataatatgataatttttaattaccattttggctcttttaatggctaaaagaataactatttcaattagcacacattaaatttagattcataatcctaaaaaaaaaaaaaaaaaacttaaattcataatcaaatttgtaagtattagtaataaatctacacattttttatttttatatgtgaaaatgtctttttgtttgttatttaatattatcataaggaattataaatacactttttcaaatattatatacacattgattagtctacaataaatttgtaagcataagtaataaatatgcacattttctattatcaaatacacattaatagtgtcttttcatttgttattattgttattataatataataatttataattattatttcaactgtttttccttcatttatttatttttttttgttcattaaagttttcgtactaactatatataatatatatataatatatatattatatacataggggcaagaggaattccatccgtcttttgatttaatttatgattagtaataattattatagttttattgtgtgtaattatgaattatgtaatatttattttagaaaaagaatcataacagttttatatttaaagagtgatttgtttgtttcttttttacccatatcccttcttccactattatttgtgaagtattctgtacaatttgtattatggagtattcttttcttcaagacttgaacaacgacaatgatagttggatgataagggttacaatttgtagaatgtgggagtctactaacacaaagaagaatgatgaattaattagtatagacatgattttcattgatgagaaggtatatataaatagtttggacaaattatttatttattttattttatattgttttattcttaatgtaacaagtttattcgttactggaaaatgttatgcatgctataattcaaaagatttttgtctccaaatttaagaatcctttgagtgagggttctttatatagtgtgaaggatttcaaggttactgcaagtacaggaaagtataggcctgtttcaactgcgtaaaaaattatttttcatcgtaatactttagtgatgaagttagaagaaggaagcattaagttctgactcatggatttcaattcatatatcaaaatttgattgatttacgtgttaatgaccacacaatcctctcaggtatttatatgaagtttaatttttctatgtggtgtgtgatttaattttttaagtcttcatattcaaatatctttatattatttttggttgtt

SEQ ID NO: 32049 - DNA, 1626 bp, Cannabis sativa
aaaaatacattctttgaacgtaaaaatgtaaacattttacaaaaaatagtgccttatgtaattattctattttttttaatgaaaagaatctcatcacttttcgtatttcagcatctttttgaatatttttaaaagtactttatttctttatattttattcataattttacagcttaaaaattttatttataaaaatatatttataaagttttaaaattacaatatatttaaaaaaaataaagaaaaataaacttctcaccacaactataaattaattataaaacaacaaaaaataactagaaaaataatctcataacaactataaataaactatataaaaaacggtttattatttttactgaagatatatttttataaataaaaaaattcaaagtgtaaataaaaatatttccatcgatgtatctttataactttttaaatttttttttcttttctctaacctataagagcactcacaataatttatctactctattatttaaaatacaccacttaaattttactttatctattttacctcaaatttttacattataccatacatcaacttatttattttttctttatgtcatttaaatattatattttcaatatattttattcattttatgtaaataattcatataatattacacatatataaaaaagttaagaaaataatattaaaacatgaatagctcaatgaatagttatctctacatttagttaagtactattcattgagctaaaagtgtaaaacaattaagctttacctcacttattggaagcttaatgttataagtgtttctctataatttaaaaattgaactattttaactcatctatcttaataaattattacatataatcatatacaatgttattatttaattatttaagattataaaaaatttaatatataattttgattcaaccacttatttgttacaaaaaaaaaatgaaatataaaataaaatattgaaattttattttcattgtaaattattcaagagcaaaaatttaaaatttacaaaaatcattttaaaacaaaaactaaaattcttttgaaaacagggttaccaaaacaactcttttggaatatacataaaagaatttaactatagtacaagtaataacaacaacaataataataattcttgtctcccatgagtgtggcaaacaaaagtagcaaagatttttcgagcttggaaattattgagctattagtagaatcttttagcctttttcaactaaactttatgaattacaattatgccactgttttttaatattaaaacagaggactatacggaagaagcccaagctgtggcccatatccgacgtttattggaccttgtggcttgtacgacaaggtttactaagcccaagaggtcaccatcaagcccagattcgaagtcaaggaaaagtctcaacaggcccaacagcaataagagctctggcccaccaagatcgccgccggcggagccgtcggttccggcgatttcagagaggtttgggatggcagccatacacccaacgccgaagctttccgaattttatgatttcttctctttctctcacctctctcctcccgtactgagtgagttataattttctttatttatt

SEQ ID NO: 32050 - DNA, 1792 bp, Cannabis sativa
aaacttataactgtgtttagttatgcaatgaaatatttagttagatttctgttattgacgcaattttttgtcaacaaatctaagaagatcgttaacgagcaaaatgaacacaagtattcgtcaattgaagtaaaccaattaatcgaaaataaatttaacaaagatgaacacgaggattagttcatccccttttcagcggtaataggctactccacttgggatgttattggtctcaatacttaaggagagttctctagagttatgttctccaagagttcagttcttaagtgaattttttagaatgagaaagcagaagtttgtgagaaggagttgacctcttttacaattaatatcacctttatataagttatcatcgactatcttagggtttaaaatctcttaacccaagacacactttctcttaactatagttaagtttaaaatacaaaataataacaaaattgtattttaaaagaaatatctaaaaaaatgataattgctaaaagatatctttaatccacacatgttggcttattttcatcacgaggagcacgtgcatattgataaataacacatgtcgagatcatgatgttgatgactcgtgaggagcacgtgctaaagtgaggagcataagctcaaagcttgagctctcatggcagattttgattgagagcatgattttgatttttgttatgtggagatcgatgtatggataatgtataattattctgtgaaggttagaatgatttggtggggttttgagaagttgaaagttgagttttttttttttttttttctattgaaaaaacggtctgctgtaccaaaatttatattttggccataacttttcacttgggtgtctattttaaatgttgtatatactattcgaagcttgcaatgagctctataatatggtatattttagagtcaaagtataagttttattttagggtattcataccacgagatttggtagaaaaccctagattgttttatgcgagtattaggtagtatttttgaatagacacttataggtttactgttgttgtgacatagggccgaggtcatcgggtattttctccactcaggttggccgaatgcataaatctagattaaatgtaagaaaaatacatttgtaccacatagcatgccaagtacgattaagatcatttatgaattaaatagttgtgaaaataacaagacagtcattattgttatgaaagcaaggtgacagttattactgttatgaaagcaaggtgacgattattaccgttatgaaagcaaggtgacagtcattaccgttatgaacactgcacacccaataacacacttgttccatttatttttgtaagggtaaatagtggcataatacccaaagttttatgattgtaagaggcataaactcaatgtttatttttagcggcataagtacccaatatttgtaaaactataatttttctctaattttgtcagtacagactctaatattgtcttaaacagggcacatataaaatctaaattattgatcatcggatctaaatagagatatataatatcagttacttctaaatattcttttaatatattcagtttgtaatttcttttcatttttggtatttatgaaatatttgagaaaaaattataccatagtatagaagatgacgtggcaaatcttatcacacagacaccatagttgtacacagtttttactccgtacagcaaggaagaacaaccaccgaagctgtgaagggagaaagagctaaggaaacggttccagagagagagagagaga

SEQ ID NO: 32051 - DNA, 3077 bp, Cannabis sativa
cttaggactgaaataatcgggatctgagacccctcaacagatccaacatagaaaaatagatcttcgccctccggctgaaaagttaccattatttgcttacaatcaatgctggtcgaatacttgaacaagaaatccatccatagtatgatatcaaattctgctaattccagctctactaggtcagcactcaactccctatcttcgaccctaactggcatagacctaattcgccttttggagataatcaattccccgctaggcagtaaggttccaaaccctttttcaataaagtcacaaggcctacccaattgactaattacccgagtttccacatatgaatgtgtagccccaaggtcaaataacacagtaagataggagttgttgacaataagctaacttgtcaccactgaaggactggctacagcatcagcttgagtgataccaaaaacctgagcatgtacgggttttgcctctggcttctgctcttttttttttttgtgatggcaatctttcttgaagtgccccaccatgccacattgaaatcatgtctttcgactgcactctcccgaatgatgtttcttacaacgtggacactcaaggtaagaataaccctggcgtccacctctgccttggttccctcagaaccgcttgctctgtcccgaaccaccagatgtcggggtagcctttcattttttatcagtagtggaatcaccactatccctaccatatacaggagtaggaagagtgggggttccaccaacacttggaaccacttgaggctcctaaagaaattttagcgcaccctcagctcgttgagctttatcaaccatctctgcatatgatgtcgcttcagtcgtagtaatcactaggtcgtgtctaatttttgcatttaaacctgccagatatttctccttcttgctaaagtccataggcacaatacccaaagccaacttggccagaccatcaaattttgttgtgtactatgttactgacatatcctcactctgcaccagctcggtaaattgtttccgcttagcactacacactgcctcgttgtaacacttggagttgaataaatctcggaactctttccaggtcatgatagtgatgtctcgggtgagggacactaattcctatcacacaagcgcgtcttcctggactgaaaaggtagcacaggtccaccctatcatttccaatgacccccatgaaattaaaaattctctctaccaccgtgagccactgctcaaccttcattacatccggaccttccagaaaaactggaggtgcctgcttgcaaaacctctcgtacagtggctccatacggttgtcagcaacaggttgttctgctggcaacacaggaaccaaagcgggatgagctcgcggtggaggcactgcaggaggaccctgctgccttaatctcagaatttcttcatcttgctagcggatatgatcttgcatttccacaaatctctactcccaatctagaggagcttgaggtggatttttatgtcgaccaccctggaaccttccacggcctctgccgcatccacggggatctagggaatttgatttccttgattgcctcctgtctcgaccctattaccctgactccttgtatttcactgagcatctatttaataggacttagtctgcaaaccataagttagaaaagtcaaacagcgatcacaaaacttaatgccgatcttatgaattttaaggcaacacattaaaatgagcaattataaactactatgcttcctaatatactttaataatcaaatacaatactaaacaagtaaaggcttactgaactgtgagccgagcttttctctgatgatgattgtatatgtcttggagatctttggtaaacaaacttagcggggctatgataccaaagttgtaacgctgtaatacttaggcgcgctatagtgattttttaattacagtgctatctttgttaatcaaagaaattttcttgaaaatcaaactaaatattgtaattataatattcaatctcatattatagaaaatcttgttataaggcaactataaattaaaagaaaaatatcaagacatcaatcttgttaaaatatacaaatcattcataattaactctaaataaactacaaaatatccaataaaaatatattacttttattaatcatgcaaaagatggaaaaatataggaggagtgctcttaattttttataagagagaaaaggagtgttaaaaaaataagatataaaaatgtacacttattatttataggatatgtctatgataagcaccttagttttgtccctatggtaggcctatttttatagccatagatatttaatctagagaaatgctaattacaacctcctattacaacctctcagtcaacctccttgttcgaaatcacatattttttttttaatttttttttcataatggtattcgttatagttacagtatcatcactgtaaatttttgaataatttatggtaccgaaaatagagttcctggtattcagttcctggtattccagtttaccatgcgcattctaccatgcgcattcaaaaatgcgcattcaaaaaacttcaaacgtattttcggcactgtaaactattcgaaaattttcaaaaatttacagggaagatgttgtaagcataacgaacaccccctgtgaaaacaaatttgaaaaaaaaaaatatgtcgacatgtgttttcaggcgtggaggttgactaagaggttgtaacaggaggttgacggtagcactcctctttaatctaatagtaataaattaatgaatgtatataaatggttaatgtataaaatgtactagattattcataaaattattttttaaaaatattcttaaattaaatataaattatttaaatagattactaatttattcttaccttcaccaattattatttttttctttctctctctttctttcattcaaaaacccacttttagaaacaccatatttatttcccattttttcttttctctatcttcttcttaaagtttggttcaatatcacagtactatttccattcaggtattctccccccccccccccccc

SEQ ID NO: 32052 - DNA, 1366 bp, Cannabis sativa
tttttgcacattattattttacttgtatataaataaaaattgcccatcataaatacattaataatatcccgaattctttaacttgtggacaacggaagttccgtgaatctcttgaactttcaagcctttaagcaaatgggactacatgagaaggatctgcgaccagtcgtgtcgagcatctatggtttcacgagagataccattgctttaaaggaaatgatcaaactcccgattactctcggaaccgcacatgttgtggctaagtcgatggctgacttcgccgtcatcgatcaacactcggcatataatgctgtgattggtcgtcctatcctgaaggagatgaagattgtgacgtccatttatcatctcaccatgaagttccctactcccgctagagtaggatctgtgtgacgagtccaatcagactcacgagtatgttacaatgcgcaactcgcagaaaagaagtcagtcaacgtcatttatctgatagaagcaccgccccctcgacaggaggtgtttagaatagaggaagtacaacacaaagacgaaccagacttggatcctagggtcctcaattacacaaccaccgcccaagccgcggtagacactattgaggtacccattgatcctttagataataacaaggttttgaaaattagttctaaactaacttttcaatagcgagaaaagcttgtcatgtttctcaaacaaaatctggatgtttttgcctggaaaaattcagatatggtcggaatatctccgcaggtcatgtgtcactgtttgaacattgaccccaaagtgcgaggtgtccgacagaagcgccgtaaaatgcaccccgcgaggtaccaagcgctgaaagaagaagtagatcgccttttggcatgcggcttcataagggagtcattctacccaaactggttagtaaatcccgtactcgtgcccaagcctaacgactcatagcgcacatgcatttcactaatttaaataaagcctacctaatggacagtttcccactacctagcattgaccaacttgtcgatgccactgcaggtcatgaacttctcagtttcatggacgcatactcgggatataaccagatcccgatgtatgaaccagatcagtaacatacctctttcattacagatcaaggtttgtactgttacaaggtaatgccttttggtttgataaatgcaggtgcgacatatcagaggctggtaaatatgatgttcgcagatctaattggtgaaaccatagaggtatatgttgacgatatgctcgtaaaatctcaacatgcaaaagaccatgttacccacttacaagcaatgttagagatactacggccatataaaatgcgactcaatcctct

SEQ ID NO: 32053 - DNA, 3301 bp, Cannabis sativa
gatttgcctcaatcgtgaccttctcttgtcaacttttcatggagatctctattgttggtcgtgttgccatggctgatcgaaaaaagcttcttgctggagtccataattatcggtaaaagctttctcgtcggcattcatggtgatcagcaaaagcttctacattgttggtggtgttgtttggagaagctacattgattatggagtagatcttggattgtttgggtgagctcatgataatttcagatctagaatatttttaaaagttattttgggaaggtcattgtagagcccgtatttttgaaaaaaatactttgagtttttcttttttgtttaatttcctatatgagagtaaaaaagtaaagtttttccaaaataaagttatatgagaaaaaattccattttattaagtgtaatcagttaatgtgctttgaggattcttaaagcatctccaataaaagcattttggagaatgcttgatgaggtggaaaattcaggtgacaaaatatagggatgctatactattgaagataaaagaatgttattcttgaaatttatattgatgccacacaatgatattgatgctatatttttcaaataaaaattaaagatgcaatacatataataatttaataaaaaaaagatttataatacaataatgtgtgagatcataaatataatattcttgaaaggtgttatatcattagagtatttttagaagtaagagtgccaaaataatttgaaagaaagataaaataaaatattatatcatctactagaaataaaatagcacctttaaaaaatgctactattggagatgctcttacaaaggaaaatctcttactattttattatactaattgattatactacaatttactgataaatattttgagttatgttttagtttgtgacttttttggttggtgccatagtttgatttttagtgatgatattgtaagaaaccaatatgactttatattatcatatataatcacatattttagctctaataactattaagattgattatattaatgtaagtatttgataagtaaggttgtatctgttcataataactacactatttaatgtggaaacatgtataaaatattgtatattcctctaaagatcattagttgatattagcaattcttacaacaatcatgttagttactcaagctcacacgacaaacatgttagcaactcttatagctcttataacaatttaatctcatgcaacaaccattacaacaattcaatcgcataaaacaactgatttagtttaacaacccttacaacaattatattagtaagttaatctcatatcacaaccatattagcaaatcaatcttataccacaaccaagttagcaacagttataacaatcatgttatcaacttttataacaactcaatctcatacaacaatcatattagcaaccatggcatcaactatgatagtaacccttcaataatcaggttagcaattcaatctcataaaattgatgatggattgctgtaaaggttgctatcacagttgttgtatgaggttagattactgtaagggttgttaacacaaattctgtatgagattgagttgctgtaagggttgataacacgtttattgtataagattgggttgttgtaagggttaatttttatattgttttataagattgtgttgttataagggttgctaacatgattgctttaagggttactaacgtggttgttgtatgaaattaagttgctaacatgttttctatatatgagattggattgctaaaatgttgttgtcttgtatagttttagattgttgtcttgtataatattgagttgctgtaaatattactaatatggttggtgtattagattgaaatgctatgagaattgctaacatagttattatatgatattgggttgctaacataattataaagattgggctggtgtaaggattgataacatagttgttgtaagagttgctaacatgtggttgatatatgagattgagttgctaacatgattgttgtaagagtttctaacatgtggttgatatataagattggattgttataaaggttgctaaaataatttttgtatgagattgagttgttgaaagggttgctaattaatacgattgttttcactatatattaatgattttttttttcactctatcaggttagtttatacattgtatattaaaatataattataaaataaaaccaaataaatcatagactcatttttgactcaaatttagttcaaaatgtaccccacttattatagatggtgtaatatcacaagtcatataagaattttaaaagcccttatacggttgtactaactcattaatgttcttaattgttgtgattggtcactaatagagaaaatagacatcattggctcaacccatataaccaccaacggttttacctaactctcagttaggatagttaggatcggattattacatcaaggctataaatagccaattgctacagcaatttcagtagcaatcttgggagaatttttcaaaaaaaatttgagagctagtttagtgtgcaagacaaagagagttttgagtgaagttgattgtaaatgaagctatgcttcttgagtgattgtgtcaagaacgcactgtgtatcaacattgtaattctctcttctagctcaataaagatttcaacttttggggctgttctggccgaggagtaggcaagtgattcatcatcacttgttcgaacctcataattctggttgtgtttgattctttctctctatattctggtctataattgttcattaatcattgttaatatctggtttatagttgatggtttattcatttttgttctctggtttttgaatcaattcaagttgcaaataaatttgttagctttattcttgattggtttcttattttgttttgtgtatgaggtgcataattaagtattgatcacattattaattaatataaaaatgataaacaagctcataattaaggtgatcatcatcatcattgatcaaagagatcacgagcttactatttaattggcaaaataataaagggtttttatttaaaaaaaagaagataataaaaaagaatcatcatatttctatgttattatgttatagtagttatatacatataattgtatttctatagttatatatataaaaatatttatgtaaatgtcattatataatattatgtttaataataatatatattttgaaatgtcttttaaaatgtgatattgttagtggagaacttatttttgtgaaaaaagttatag

SEQ ID NO: 32054 - DNA, 2148 bp, Cannabis sativa
gatgttgcgagccctaacagcagggtcgatcataaccttcttccccttgtcttggataattttgagctgcttcttcgaggagtcagccgctagagttgggacgacctcgctcttcctcttctgggggatgacaggagaagttgttgcacttccaaccttaggctttcggttgagaatgggagcatgcttcaggaacttcatttctacaagaaagccataagataagtatatttctaattgtttgaaatatcatgtatatagttattgtattacctgatgttggtctcgatgtttgttttgataggcgcttgtctattctttcctttggattcttagaaggctccttgtacacttgttctcgctgaaggttggcgttcttaggtataagcttgtgttctcgcaattttgcagtagtacacaacagtcgccaatcgcgatcttgaataggaaagctacctaaaacttcgacaatttccctatgagtagaatccaatacaggtcgagccggcctatctgcaatcaacaaaaaatagacattagggactatacagagtaataaaaatatatactaagtgttaagagacgtgacatactaggtcaacgattgaagtcagtactaactcctggtactttaaatgcgtagaaccagttatatttctaatctcccatattagaaaccgtaccttctagcccgttaatatcaaaattgacccatttgctaaaacagtaaaagtcattgtcatggtcaacattctttatttaatagaaatagctaaaatcttccatcattggttccccttgaacatactccatatacaatgcataaaaccccagaattatgcagtaattattcaaagttagttcgaagggagagacatcgtaatttctaaggataactttgacaaatggatgaaaaggtaaagttacccctcatcgaagaataggaatcgagaccaccacgtcttgtgtggggataatctcgaggttggtaaaaggaagatgaggctgcggagatgctgaaggacgtaaattccctattcaaacaaaattcaactgtgcaaatgtatgcaagtctgattttgtgacttgcgagaccagatccttgcatgaaaatagttcattaaattgagtgttgtcaactgaatccgtctcacttccctcagcgtctccctcttcctccaacccacgaccaggtacctcgaagtcttctcccatttctttgacttcgatgtcaggggcatgtctcgagtgagtgagattctcctgagttgacactatagattcgctatcgcaaatttcaatcgtcactagtttagcgagttcctgaaccatcctatctatctcgtcagtagatagcgagccctaacaagctctggtagcaggggcctcctccttagagatcgaggtgggtatgaagttgtccctcttctcaagctcatcagcaaaagccccacctccagagtcgagcatttggctatccgacaagtcgctcatctaaaagatagaagttattttcagtgtggtgaaagtgcgagaataacaaagtgccctcagccgcataaaagaaatttagagattataaaggattaaccagacatttcaagaaatggctgggtgtatctcaataacataatgatcatgtcgctacatgagaattaaggtaatgagacacccccaccattttgcgaactcagccaatcctcgtaaagtataagtcccacacatacaactaacggtgtacctcaagtaatggctaggggtttcccatatcccaaggggcatgcattcctcgcataacaactgagttaatgagacacccgcaccatttcgagaaacttggttagtcctaacatgtgactataatacaggaaaagttaaagctagctgcatgtctcaaatggctgggcgtatgttttcacgaacattaagttactgttacacacccaccatttaaaagactcagatagttttcataacaaaagcatatataacctaaaggctaaaaaataaaccctaagttctaacagggattaaaatagctaaggtacaaatttactacgtcatttctgatatttagaagtgtatgcgagtattcgagatgttcatcacgaaactcgcgagtattcgtaatactccacgagaaatatg

SEQ ID NO: 32055 - DNA, 1043 bp, Cannabis sativa
tagactaaaaatagcctaacaatgctaccttcaattgctcaaattacaaatatgatgcaaccattgaatctggaatggtcaaaaacatggtataagacctcgtcttcaagttcagaggccttggaagtatcaaaaaccaaatctcaggagctcgggggaaaggacccagtgcccatgttgacaaaaggcctggtgtactgtgttctacttatctgaatctgatgtcgttttgactgtctatctagtttttcacaattaaaatgagctatgaagtcaaaggaatcaaatttacaactttgcatttctcatttccagcacacccaaaaatgaagaattttgagtctttcatttctagaaaacaacaacatctctgaaaatcggtgaccagctttgccagaacatataaatggactaactggtgtcaaaatatcacttatgaataaagaacatctcttagacatttttacacttacccagcatttagggtgatgtcatatgtcaacatatacgggtgatgagatgtcaacttgggcattgggacctgagcagcctttagtaaaagccataactaactcaattttgatttgattgatgtgatttaacttaaatttcaaactaattcaatgctctatcaattcatatcttatagtccagatgtaattctgaagctatcatcatcgaaattcaccttcaagggagttatgaaaataagttctcagttacccacagcacgacctgcttggcaccaataaatggccatccccttcataagataattttcacttttagatcatcatcaacagtcaaaaacatcttatttgtattttttaactattttttgggcctccttcacctataaaaggagaactctcttagctcatttttcacattcagaaaactacccacaaggtcagagcttatctctttggacttcctctctctagaatttggagcttctgacacttagtctattgctctaattaccatctcatgagaaataaaaactcgaagtagacgatataagggtaaactactataatttt

SEQ ID NO: 32056 - DNA, 1996 bp, Cannabis sativa
  modified_base (1310)..(1310): a, c, t, g, unknown or other
atacaaaaagcctaccctaccaaactgtctggcagggcagcgacgcgaccccacccccgaatgtcatccccctgggtgaaacagaagaagattcagcgacgaatacttcccagactataaatggtcagctgccaaatctccggtcacaggttccgcctttgggccaagtagtaggtgggcagaccttttctagtaattcatcaggagaagtcatacctgatagttccaaccaggcttacggtgccattccacctgtcaaccaagcaaatcaatcactgagacagccaggcgcttctgtattcgataggttgggaaagactcatgatctaagaaacaatttgaatagaaggagaggagtagatgatcagcttggcacgacgatcgtctcgctcggaacccgtgctcaaattcccactcagaaagatattgacgtgactcaaatggaccagaatgctgagcaggttaggccagatgtgcaggcacagctagaaaaagtaaagagtatgttcaaaggcatgcccagacagagaaacaatgatctcgagttggaccgagtacgtggaacccctttctctcccgagatcaatctcctagcgttgccccacaagtttaaaatgccaacctggaaaatgtacactggaagagaagatcctctttcccatctcaagtatttcgagatgcaaatggatctgcaagggacatgaggggatgtgtgctgccgaagttttcctgctaccctcttggaagccgcccatcaatggtatttcaagctagctccttgaaagttcaactcatggaaagctttctcctcgaaattcaatgcacaattctcctcctcatgccaacttttgttgcatctaggagacctggtcgaagtcaagcaaagaccaagcgagcctctccgacggaacgaccaaggtctcacgggtaactgaagatggaaagttgtccgcgatactggggggcattgaagtcctcggtgaactttggaaggatataaggaagaacgacccagttgactcaatgagtgattttcttgaccgtgttgaaggcttcatcaaacttgaagaggctattcagcaagcggagggtgagcaaaagcctggcaagtcaaaagttgcttccacaagaatgttcgcccaactcccccattacccaaataattctagctcaaatggtaaacgttccaacaacaacaacaacaggaaagggaatgggaagaagggaaagttcaccagcaaaaccgagcaagctccctaggagaatcaagcaaagtacactgcatttacaatcttgactgaggatatagnaagtgtttacatggccactcagtccctagccccgtataagaaacccgcacccatgaagaaggatgtgagcaagagagacatgaccaagttctgtcgatttcatggagattacggccatgacaccaatgaatgcaacaatctgaagcaggaaatttaattcctgataaagacaaataacctgcatttatagaagtatgtcaaggccgatcagagtcagaggaacgacaataaccaagacttgctacctccaccagtagatggacatctacaagtcatcattggaggcccgcacatagcttgagattcaggcaaagctcgggagaggtatggccgaatagcacagcacgagcaagaagaagtaatcatggccgtagaagaaaagaagcctaaaatatgacaagcaggagggcctaccgtaaccttcaacgatgaagatgctgtataaattaggttttcgcacaatgacctattgattgtagaggcccagatagctaataagatggtggccagaaccatgattgataatggagcctcttccaatatcttgttgaagactgcctatgaaaagatgggactccagctaaaggatctaacccgatgtctcttgcatgtctatggtttctctggccaaggagtcgcacctctaggacaaattcgcttaaccctcactgttgggcaagctccga

SEQ ID NO: 32057 - DNA, 6679 bp, Cannabis sativa
aaaaaaaaaaaaaagactccacagttggtcgagtagacacctgtctttcgcttgaaaagcacaattgattcattttgtgttacttgggcttcagaattattggatgagtattttcgttcttcctcatagtatcaccaaggaggtagaaaagctgtgtagaggttttctctgggattaaatggcaacgggaacaagatccacttagcttcatgggataaagtttgccttctgaagacttatggggggcttcgattcaaagacggtatcaagtggaaccaagcaattcttaccaaatatgtttgggctatcactaccaaaaaagacctgctatgggtcaagtgggttgataatatttacttgaagtctactagattttggtcttataacctaaagcctaactcgagctggtattggcgcaaactttgtcacctaagacagaagtttaatcagaatgagattgtgaaagctggtgcctttggtgggtttagaattaattgtttgtataacaaaagattgaatcaaagtccagtcaattatcacaaggcaatttggagctttctaactatgcctaaacatagattcattctttggcaagtgatgaactctcaccttcttaccagagataagttatctcagtttcatatagtgcttaattcgaacttatgtccggtttgtgaggagaaggaggaatcccatgaacatctcttttttagatgtctattgtctcaaaaagtcctcgatgcaactttttcgtggttgggattcagggcttggccgacaaattacattggatggtatgattaggtaattttgacaggtcaagctaggctacatcggctcaacattactattttggcggctgtaatctacaacatttggctcaacaggaatagatgtattttcagtaattattctagttctgtttgtggtttagttgatgatgtaaaaagttctattaagtacaaattacaacttgtaaacaaaaaaaacttgtctaagcaggagagagactacctaatgagattacaaaataggtaggtgttttgttggtcgtggctgagttgtaaggggcggtgtgtgctcttgctaactgttgtattttgctctgttgattaatgaagctttttcttcttgataaaaaaaataatagtaatagtgacaccaagttttttacgtgatttcgcagataactctgcatagtccacgagtctatcttattcaggatatttttggatacaaaatacaatattacaatcagtgatctttttttctcaaagatttttcgtccctttttctatataatctgtccctatttataggaatataggttggcagttatttacatttgaatttgaaatacataactgttttcacgaaatgtgggttttgaccacgttctattttaacacatgtagagctaaaaatccacgtaactgtttgttattcttatcttcaaggtagtggacactgacgtgggataggagcatctcgctagaggcatctcgctagaggcatctcgctttgtacatagatgaatgacttggtttattcatatgctttccagcaatagcatgagcaccagtgtactgagcaaacttaagaactgctctttgaccataaggccttgcaaattagacaatcatgtcctccatgctcccaagctattacacttaataatataatatggatttccctacatggtgcgaggtagatgtctcgctatgcattgtccgtagttccctcgggattatgcctttcgagacaatatgatttctcgtcaatacacaaattgatagtttgtgtatccttgtctcgcctaagattatacagttagcgagttatgaatatactatattaactctatatttaatgagttattctattttgaatttaatgacataatcattattatatctggtggttcatattccatgtgttcgacacgtgtcactctttgaagtacagtcgaatttcgggtaggattatcctcatcaactcagttctccttactatcaatgcttattggtcgcaaatagtgattcttcctaaagcaattatccacaaaattaaccaaatttgttatggttatctttgagggggttgatttgtctaatggttcggggtatgtttcgtggaatgaaatatgtaaagataagaatgaatgtggattagacttcaaggatattgctttatagaatctttctgctataagtaaacatgtttggacaatatctaataagaaggataatctttgagttaagtggattaactttatctacttaaagcaagaggattggtgagactatcaagttacactagaagcgagctggtattgaaagagaattctgcaaacgaaagacaaattaaagactatactatcccaaagtgagtttcaaaactttcattttttcattgttagtctttacattaaaatgcataatgaagaggttagtagatggagatactttatgatttgggaaagaataagtgtttctaagcatagaataatcatttggttagccttacgtgaaaggctcccaactcgagaccgtcattgctgttttggtaggatccaaaacaatgactgtttgttatgtgaagctgcgattgaagaccataagcactttttctttacttgctactatatctagaagctggaccatattaccaactagtgtaggctgatttaaggaggaaatgagttaaaaaaaatgatacacaagttgcaaaaaaggaggctctcgaaaggcaggaacaaggtgttgatttctataacctcagcaatggtttattttgtgtggagtagtgggaacataagtggcatttggttggaggtaatgaaatggaatagaatgaaaagaaaataattttcattccatttctttatttggttacattttaaaatattggaatattattctaatggaacgatctttctaccattttgatggaatgactattacattttgaaaatgaagaaaagaccattccaatgtaaccaagagaaaaaaaaaattaatgcttttttataaaaaatttttatgcattttaaattttattccattctactcatattcctattctcattctcattcctatttctatgttttcattcattctaaccaaacgctactataattctttgggagcaaaagcttccattagtacatgtcgctataaaaaaattatgcatgttgtttgtactagattgcaacatatggatattcaaaactttaataggatagatcaagattgggtggggatactcctaagagcttgtaattaattgtgttctttgtggcttagcaacttcatttttaattgagttttgttgcgaatacaaaaattactaatttaccaaaaaaaattatcgtataagacaaactattatttaacagagttaaagaaaataaattactctttatgattaaattattgtatgtatataaaatgttcaatcaacaataaaaatttacaattgaacttgaagcttggcctttttttttcttgcactattatggcttaagctatggctatacttgatagtttgagattttgtatccattttggctacttatatgtggttgtagagtttgattgcataaatattgttaatgttctgattagactaattcttatttaggttgcattgttagagatgttttacctctttgcatcaattttagcaagttgtctttcttttattgtcttagaatctctaatagtgtggctcactcattagcgaaacttactctttctttggatgatcactatgtgtggtggcttggctattctgattgtattagtatctctttgcagacgatctttattgattaatgatgtttcttggcatttttttcccaattgaggtttcttcctttgggtttactaaagagattttaatcatgaggtcttttcttcaaaaaataaaatataaaacaaataaaaaaaaattgaattccatcaaacttatttatcgattcaatagaagctccaaaagatgaatagagtcctaaggcccctctaagatcattttcaagcctgctcccattttaagtcaatagataaataaataaacacatcctattgcattgacaaggacgcccgtagtaattgatgaatttctcatcctatttctatgatgtgttaaattctaattagttattcattatttatatgatttttatattatttacttggtgttaatttttatgacactttttctatgataagttattattattatttaaagaaaaatagaaatttctattaataggtaaattataaaaaatctattaaggagaatcaacgaaaataggtaaatcaaatcgtttacaataaaatgaaataaaactctaataacacattaaaaaagtgtgaaaaatgctaggtctccaatccgattaaacgtgtgacaaatcacactcatttatgactattaacaaaaatcttccaataaaaaattaggtaataacaaccttattatttaaattcaaataaaatgaaataacaatacaaccaatcttatttataacaatccaaaagaatgattgatctataaaataaaaggtcaataaaaagtaagaatatctcaaatttgaatacgaacaaagataaccatacccctacccaaaaacgctttgagacatttaagaatacatgaacaacccaagaaagggcaagactataacccctcgccataacaaagtgttgatacaacaccgttattaaaaataaaaataagcatattaaagaaaaataacacactaataacaacaacacaattatgatctaatttaaagccaatgagcaactctcaatcattgagagacacctttgaacccatggaaccaaagctagacaccaccacgccaactcgacaatcacccactagcctatccctctacctccttgataattggactacgatttccaattttagccccaaatcacgaccattttaataggtccaacataaccttgactcccccaaacaaccctaacgacaaaaggatgaagacagagaggaaaggaaaaatttagacaataagagagaaacaacaccagtgaaattgataatagcgtgagaatcaacaaagcccgaccaaatccacgttgtaaggtcgagaataagcgacgagcccttttcaaaaaaaaaatttcaacaactaggatgaagaaaaagtaaacctaaagagagagcctcttcgcatgcctcgtttagtcctttgtgtttttttgatgataaattggtggctttaaaaactaatatactactttaatagtcacagagtaataaaaaaattctccttataatttttttttttgttcatttatgtattataaataatataattatttcaataaataaaatacatattttttaaatgatataattttttagaaatttttatagtgcactcccaaatatattttagataacattatatattttttagataatataatttaggagattttttttaacatttttttatagtcgtgtacattgtaattatttaaaatattttgtaaaattttaaaaaatttgaaaaaaaaaattaataagccgaaaatatagttcaaatagtctattacaaaaaatatcaaaatatataagggcaaataaacaaaattagtttatttccaatcaattttcatgaaacaatgtacacatgattttatttattttttttttaccaagaaagaaaatgcttttcttttctttcaatgtttctctccttcataatttctttcacccataccaaacacagattaaagaaagtttcttttctcattctctcatcccatgaagttgccggctcttaccctagtaaaagaacgaaaccttttcaatcaaattgaaaatgaaaccgtggctcatgtacttgtagacttcgcttttgtcaagctatgttgagattagttcaatagctctattaaaagtattaatggggattcttttgctgattggttctctactctttcagcaacaatgtcttactcttcttagtcatcactacaataaaaaagactttttatcctactttttacacttgaaaaaactaaaaagtgggataaaaacttttggttcgacttttacattcggaaccttaaaaacaaaggccttgtttggcaaacagacaaaaaatagtgttgaaaatgctatttttatgcatttgccaaacacaaccttaacattttaagtgagactttttatctcagtttttatctaagaactgggataaaaggtccccatatatctgggcctcttaattgttggcctttacacacaaataaaaggaacatttaacttttagggtttcatttttttaggcttacccattctttcccacccgatctctctctctctctctctctctctctcatatctccctctaagcagcaaccatgacctagaaaacccaagcaacgcctcaaccttcgacgatagatgacatagcgacagactccccagtcaaaaaaaccccaacgataaatgacctagaaggctatgcgacctctctgttgggttttgtgccctaaacaaaatccatttcggtataatcagatttattaattaatataaaatcagaaattgcttttctattgcatggttcacatgatttattttatgattatgttaaatgtataaattatattaaatccagaacatata

SEQ ID NO: 32058 - DNA, 4640 bp, Cannabis sativa
aaacatataaatgataacatgaaccaaatgacacattaaataagtgttgaaaatacttctgtctctttattgataattaaatgatagagtttacaagaatatgcttggatatgcaggtatgacactactctatatcgtgctattgtggagagaaagagaactttcaaatttcttcgtggccttaactaaaatcttgacgcagtgcggagtcaaatcatgatctccaagccacttcctaaggtcaaataagcagtttttgaagtccgtcttgaagaaagtaagaaaaagcttatgatgggtactcaaagctctttttcaagtcaggaatctctgcccttgctgctagaggatagttccatgaagctacccctgatactcgtcaaactaaggggcgcccctagtgtgatcactgtcgaaaacctagacactacaaagaaacatgctgaaaatccatggaaagcctccaaatttgaaccctaagtcctggggtgaacgtgagtgtagggggaatgttgctgccacttgtggtttcatagccgaaggaaaagatgaggcaattgagtcagctccattcactaaagctcaacttgaggccattcaaaagcttgtaagtcatttctccacttcgttgactgccactcatggtactggaatgttggcagaatgaggtaataaatcagtagctttttttctcaataaaagaaatactaaatctgggagtcttgattctggggcttcagataagatgacaagagatgcatcaaatttttctttgttgcacatgagtataggaaatcatactgtcaaaattgttgatggtacacttcttaaagttgagggtttggcttcattcatcattactaaggacctaaccctcacttctatactctacgtatcaaaattggattgtaatatactttctattagtaaatttactcgtgaccacaattgtgtgactaaatttttctcaaatctttgtgtgtttcaggacttggattcgaggaagaggatttgtagtgctgagatgtgttctagtctttgtattctaaggaatgaaactcaatctactagcacaacccaaaagtttagtttgcttcctttgaataatcactccatttcttgttctaataatgataatgatattatgctatggcactattgtcttggtcatccaaattttttgtatttgccaaaaatgtgtccctctttatttattaataaaattccaaactctttttgctgtgaaatttcttagtttgcaaaacacactcgcaataattattctagaacaacatataaaccatccacacctttttcatttattcatagtgatgtttgggggccttcacgggtcaacactatattgggaaaaagatggtttgtatctcttatagatgatcacacgagattaacttatgtgtttctcatgaaaaataaaataaaagtgagtgaaatattttagcactttcattcaatgattcaaacaaaatttcacacaaagattcaaattctcaaaactgacaatgccaaagacttctttaattctgttcttggtccttatttgatacaacaagacatcattcacctaagttcttgtgttgatactactcagcaaaatgcaattgttgaacgcaaaaatcgacatctccttgaagttgcttggtctctcatgtttgggactcatgttcccaaattcttctagggtgatgatgccattcttattgctgcatacctcatcaatcggatgccatccatggtgctaaaatttcaaactccttttcaaactcttttacaactatttcctcacactcggttcattagctttgttgaccctaaaatctttggatgcactattcttttccatctttattcacaacatcatagtaacctagatcctaagtctatcaaatgtatctttattggttattcgtcccatcaaaagggttataagtgttattctcctactactcaaaaaacttataactctatggatatatccttttttgaaaaacattcctactacgaatctgagattcagggggagaatgtaaacgaatctcatctttgggagagtattcatggtacccatactaacataatttttgggtactcatactcatactctgcctctcgatcaattttccaatccaatgaaagacacttctttgacttcttcagtcatggaaaatcaaggtccatctagttcttcccaagtcatagaaaatcaagatccgcgtatgactattgagcctcaacaaaaagaacctaaagagatttgtgtctaccaaagaaggaaaaattctgacaaataattaaaagatcaaacacatcttgagtgccaccatgaatcagaactggatccacatcctcctaaaatagattcaggtttgagtaagcctagtcatgataatgttattcatatacatgatgatctacctattgctttgagaaaaggtgttcgagcgtgtactcaacatcctattggcaactttgtgccctacaaaatcttatctccatcctatcaggcatttgtttcgactcttgacagtgtagggattccacatacaattcaagaggcgctgcttgatcctcgttgggaaaaggctatacaagatgagatcaacgccctggtgaagaatggtacttgggaaatcaccaaattgccaactaggaagagactcgtgggatgcaagtgggtattcactattaagcataaagcagaatgtagcattgagaggtttaaagctcgcttggttgccaagaatttcacccagtcttatgggatagattatcaagagacctttgcaccagttgctaaactcaacaccatttgtgttcttctctctcttgctgcaaaccaagactggttgttgcaccaattagatgttaagaatgctttcttgaatggagatcttgaagaagaagtctatatggatattccacctggtttcgagaattcatccaactaggataaagtatgtagactcaaaaaatctctatatggccttaagcaatctccatgagcatggtttggaaaattaactaagtcaatcatccagaatggctatactcaatggcaagcagatcacacattgtttgtcaaaatcgactcagatgaaaggatagctatcctaattgtttatgttgataatataatattagcaggagattacaaggaggaactagtaaggttagaaagtttcttatcaaaggaatttgagattaaagacctaggttatcacagacatattcttggcatggaaatttcacgatcaaggcatggcatttttttctttctaaatttaagtatgttctagacttactcaatgaaacaggaatgcttgggtgtaaacaagcctcaactcgaatgtagtcgaacaagaaaattggcttggggacaaatcagagacttgtggacagggggagatatcaaaggctatttgggcgccttatttatttatctcacactagacatgacattggtttcgctattagtgtggcgagttaatacatgaataattcaacagaggaacacatggaagcggttacaagaatcctaagatacctcaagatgactctaggaaaaggtttgctattcaagaagaatgaaaataaggaaattagagtgtaaactgatgcatactggataggagatataacagatagaaggagtacttcaggttactgttcttatgttttgggtaatctagtaacattgagaagtaagaaacagacagttttttccagaagctcagctgaagctgagtttaaagctccagctctcggtatttgtgagggaatttggctaaaagagtaaattggtgaactaggattatctacaaaagagtctatccaaatgctttgtgacagttaagatgccattagtatagcgaaaatcctgttcatcaagaaaggactatacatattaagatagatagacacttcatcactgagaagattgagaatgctattgttcaagctatttatactccatcaagatgtcaaatagccgacatcctcactaaagctctcccaagaaccagttttgaagatttaatttgcaagcatgggatgtttaatatacacaacccaacttgacggggagtgtgtatttcttttagtaattaggaagttgaccatatgtaggaatcaattttttattaataccaaatatgctgtatatttattctttctaaaattaggggattttaatggtgtactttctagaattagctatttatatttattaggtcaaattttaagttatatatatatatgcattccttctctttgagataataaaacacagaaaaatattcaaaattcacatcccgtaatttattttgtcaagaatcaatgaatataaaatattcatttatcttaaaataaattacattattttattccataaataaaatgtattataatattctcccactaggttagtatttaaactaaaatattcaaacctaacattcatcattatataataaacgtatgaatcatactgatacatcctcattatatgtcggtattatgtaacaccctaactaataaaggcgtgctagggtgatttttaacgtattgtgtagctcattactaataaacgaggttattaaaaattgtgattaatgaaaatt

SEQ ID NO: 32059 - DNA, 2278 bp, Cannabis sativa
tgactcgtggactatgcagaatttgaactgcaaaaccacgtaaaaaagctttgtgttatttcttcttcttttactactgttatttctatgcaaatcagtcacgaaataggttttaatatatttaacaaaaatctgcgttaacaggttggtgctttcattgagagcctacgtggaaaaagctcagaaaaaaagacccttctgatcaaaagaaaaacctttctccatggttggtaacggagaaaacattagtactcatcctggaaaggagccaatgggctcacggaggcctcccaattcacgatctacatggaccacttgtcccagaaggacccaacctaaaagggacccaagtacacgatctacacattcaaggaggactcaagatgagaatggagcccagaagcagggaatgaagaacccaatcttgggggtgctcaacctatcgaatatgataatgacggtgcctatgatcccacgagatacgtgccagttgtcgagttggaaaatttccatctcaggcatcgtttggaggaggcaaattgacgaaatgctgagttggaacgtgagacagccgcggcctggtggcacagaagaacaacacacaacactaacctgatcctggagtgaggaaaccacgaggcagacctcgtggctcacaaaccaggaggcaagagatggcttaggagaatcctcagaatgctcaggaaaaacaacctggggaaatcgagggtccccctgagaatgaacaaacaaatgacctaccgaagccttctcacagaattgagaatagaagacgacccgagactagggaacaggaaattccccatgagaacgaaggaaatcctgggactcaacctgggactagtgggttgccaccaaggtcaacatccttctcgaatcacaagggaaggggcacgtacaaaccccagcagggggcatgcaacgacccataccactgggagaaggatgagatgtgaagaggtgagtgtcagctcaggacgcacgataacccataatcgatcaatgcaaggagggaaagaactcatcgtaataataatcgagagagtaccggcacaagtaacactaaaagttacttaaggacgaggttcatgagtaggatgaggtttgttagaaattataaacagcaacaaccggatcttcgtaaccacttgaactagaaaaaacccgctcttcaccaatagctcggtctaaagcaagaggatcctatccaagtgtgaatatatgagttggaagataaattcaggaggtatcaagtcagggagcaagggaaatagtccggatatgacttggatgaggagctcgagcctttccatccaaacatcatgcatactacattctcttaaggattcaagaaccccgacgtctcatcgtatgatgggaccacagatccagtctctcatttaaataatttcaatactattatgtgacctagtaatgttaccaacaatctatgctgtattttgttccccacttcgttagttggagtagcgagtagctggttcatcaaatttactcatcattcaatcacctcttgggaacaattgtctaaggacttcagaaagaagttccaggccgcaagggataggcgacctgaagcatcctcactcataaacataaagcagcagccggacgagacgcttcaggcttacttaagtaaatttagcacagctgctgcaacggtgagaaacctggatgatagtaccaagcttactgctctttatccagggatctctactgatctctccactgctggaggcgagctatgggatgacctacgggtcgcccagtaaaaaacattactaagatcaatgaaagggcttaagtatttgttcgaaaagaggaagcaagaaaagagatgaagttgatacggattggttcaagaagcaaacccagtaatgccttaacaagcattatctcaaccaaggctgataatccaggagcctctagtttaaagaaaaaagataattctaaggagtcagccaaggataagaaaaagcaaaagaatcacgacaagtacgtgccaatttgcactatttatactgaacttaatgaaaatctagaaaacatttatctcgcgctgagcataaggtcacatttcgtaaacctgagcccatgaggcatgcgagacataagagaggtacgacaaaattctataagtatcacaaagacattgggcatacaacagacgagtgtcgtcaattgaaagatgagatagagagtctcatcgcacgagctcacttcaagcaatatgtgaaaa

SEQ ID NO: 32060 - DNA, 1675 bp, Cannabis sativa
  modified_base (148)..(151): a, c, t, g, unknown or other
  modified_base (833)..(853): a, c, t, g, unknown or other
taaaaattactcttcatattttttatacttattttgattttattttcatattttttttttttaaattatgtatatatatatatttttatttttttcttaaaaaatttcatataattaattttgttgtcataatatttaaaatataatnnnnttttatttgatagatatattttttaagaatatatggattgaaagaaaaaaatttaaaaaatttaatacaattaaaaatataaacttatataaaataaaaattattaaaataatatgtctttataaatttttaaaatataaataaaatttctctataaaaatattaagttatttataaaaaaaaactctcctcatagttaaataattttgagataaaatttcataatttttatcaaaacggtagatattttgaagaaagaatagatcattcttctttataattgaaatgattaataattgaagtgtataaattaggagggtttcaattattactatgatattattatttgatctatgatcagctaatgaaaatacataatttctggtaatatattaatcatgaaaaaagtataattatttatttaattagttgagggtgattttgatttaacgcctaagaacaaaaaattgacaaacattcgggaaaacgttgtgtatgaatacaaaacctaataatgaacattccaaacaatataaagacagcaccaatcaatattaataaataataaatatccctactatactatactattactatcactactctatattagacgtaaattttataaaccactcaatccgaatctaaataatctgtctaaactaattttttttaaaaaaannnnnnnnnnnnnnnnnnnnnaaaaaaaaaataattcacttaatataaaatcaacccgtctaataaatctgaactaacttgatataatttaatatatactttaaaaaacataaaattcaaattaaatttgtgtcgtggtagttaatttgaattttagatttaaattttattatttctgattaatttgaagcgaccaattcattagatgaaaaaaaagaaaattatttaaaatgatttattttttgatctaattatcaaaaataacttaactaagtttcaataacatttttatttatttaaggatgtttaagtaccttatttatatttttttttctcttccttttacattccaattatatactcttctctcatagatttttggtttggcatttaggacttgaccatatacttaatgtaatcaaatcacaaataataaataataattaaatagagatatagatatagataataagtactaataatagatatcagctttcatatcaaggccggttgtcaaagaaattgaaatgatgggtcctgaaaattcccaccaacagccgacaatcacaacctgtgactgcgctgcactcgtgtgctttgattgagtttgggcccaattcttttgggttgagaattcacatcttcacaattaataccatcctattttcccccatatatacatattttcttcttttataagtgctactttgttcaagaaaaaaaaacacaataattttggtaggtcttataaatttattttgacaaaactttattttttttaatatattctatagtaataaataataaaagaaagtgttaaaaaaaaaacttattataccaaag

SEQ ID NO: 32061 - DNA, 9331 bp, Cannabis sativa
  modified_base (4709)..(4709): a, c, t, g, unknown or other
ttgttttatttcatgttaagctaaagatcagattagatcaaattaatagctttgatgtaagttactacggtaacaaacaaattctcgattaatttaccatctagtgcattcaaaaggtttggtcaaaccaaaaaccccgaacagacaaaagagcatacttgcaaaaaattataagtgacaaagggtcataagtctgctaggtcacttggggggcacctatatctgtacaaagcatttggtaaaaattaaacaaacacagttgcattatgatcataaacagaggatgaaattcattaaagataacaaaagcatgtaaaactgggattaaaggctgcccagtcagcccgttggctgaaacatgaaaaataatttcaagtttaaagaccgcttggtcgatcactctgtcttaaaaaaaaggccttatggccggacagatataaaaaataaaagatagaaagaaaaagtattcaaatggttggagtcccaggctctttgtacgaatcttcttggctggttggagctggaggataagttgtctgagcggggggcatgtcaacattctaaccagaggtagaagtggtcgccttagattctccatatgccacctgagaagcacaatactcgagaaacatgtctttggaatgacccaagtaatcaaagtttgcattgggattagccttccaaaagtcataaaaaatctcaagacccactgtctctaaggcatgcaccttccctccaagcctcaccatttcatttctttgctgctcggcctctgatttgtacttctcaacctcagcttcaagctcctcctccttagccttgttctctgattccaacaaacggaagacagatcgaaggacccctctttcttcctggaggctggtcacttctttggactaggaagcaatggcagtttcaagttaatcatacgcctctagatctttggtcagctcgaccaccttttccttggcagcgagaagtttcttgttaacttctctcagttccatccggactaccccaagttgaaccctggcttcattagcatcgttcctggccaagtccatttccgcccgcatggtgttggacatggcagcatttttggaggcacctgacatagctaaggaataagcataagccatcttcagaccggtctgcacagagaagtgacattaaaatttgagctaagtaaagaaggataaaaggaaactgttaggaaagacttaccctcataaactccttcaggacgcctcccatcaccagatctagggaaaggtcattatcaacttcggccaactgctcattcaccttagggaccgaccgagtcatgtagttggtgagcatgtcttttcctctcttagtctctggatgcagtacgggaggtggggtaggggcgctgatctgctcggatccgcccttcgactgctcgggcctgtccgagctccctcctcgagagtctttggacttagtcatttttggggagaagggtctacgacggttggctcctcgaagagatcaataatcacctcggtcggggccctctctttgggcggggttgtctcaccacccctagacttcttggccagaggagataagcccgagcttcctcccagtctcttcttcagagcttcgagcattttctgagacatgtctgcacgaaatgaaaagcaacatagttaaggaaaaaacatgagatatatgaaaacataataatcaagaaagttaaagacaagatggagaattttgcacattggcagaagcatttgcccgagcaagacctgatggagcatcatcatctgacgattcttcttgctcctccaggacgtctttcccctttcctactacaggagtggacggccaagcaggtaaactgggctccctaatctaaatcttattttcaatagtcctgtgttcggtcagaagtttcttcttccttttgagtggagtctccggctcttgctcaacctcatcttcctgctcaaaacgctcttgagcttagttcttggctcccgcaccccccttcaacttagcagcatgcttgagttgaatgagttcattctcttgatgagctccctcagcccagccagcactagatttcctcttcttctccttcataggctggggaatgaaatccttcgggtagagcccgtactccataaagttgtcctccgaggtgaacaaagttatattccgggcatcattcggtaggtgagtgattctttgagccgtgtccctgagagctagcgtgaagggtggatggtaatatatagggatctgctagaactgagtataggtggtgcccatgccatcaacaatgcaatactcgtcaacaaaattcccgatttttctcatggccttgtccccggtgcccgtccgccatttgaagtctggctgagaaaaatagaagtatcccgacctgccttggtttggagtagacgtcaagtcaaagaaccagctaacctcgtgcggggatggcataccccacttctgggtggcatagaggacgaacagggcagacatatatttgatgcccttgggagtaaattgggttggacagagacagaagaagtctacaaccttcctaaagtacgggtgaagaggcagtaatgccccttgtttggaatgagcacccgaccatgcacacatccccttcttcgtgttcgtggcttggttgtttgaggtaggaacataacactccagctcgcccagatggccggactggtccagatcccttagatgcgcctcagtaaccttggacggagggctcacccactgagcacccaaggtaccttgttttctatgaggaactgtagcagtaagctccttagaattgtagtccactcctttgaccaggacatcaccgtccacatctactggctccccagcttcgttgtatcctccaaaatttggaggtgtagcgtcctcctcttcctcggcctaggaaggacttccaggacagacatcgccctgttcctctatctcttggacttcggcatccccttaatgatccccctcctcctggacaggcaaaccctgtttggcactaggtgaagtggcgtgctaggccacgtgagggtcggatgcgttggccctacgcatgtctgttttgttcgagccatcatcctatggttgtatgggaagattgagctggaatgtttgtcgtgtgaagagggcggactggaacaaagacgagggtaatcctcgtacaagagttcacgaaaatccttgtcacttcggtgtttgcttccccaaaactcactatggttcatctacaaaagacaacacgcgagatgagtgtttggtcgggatatcgaatagtaaacaggcaaatatgccgaccaggagtactcaacagattaaagaataaaaataatcgacgataagtcaaaactcagaaggttgaaattttcgagatttagagcaaaaacttcatgaagctttgaataagaaaggtgaaagatagacattgtgcagtcaaaaagcaagcatcatgaacagtgaagtcgtgcagatcaatataaaaaatatcgcagagtttctgaacctagggttttctacctatcttctacagcaaggttaagatcgtattcagaaactaaatatgcaaagtaaaaggaggaggaatcgagaacttactcactgatcgacgtttgaattcactcaaagcgaagctgtttggattgttcttgtgaaaacctcatggcagacttgagacgaaaatttctcttttttgctctgaactttcttaacagagaagttggtgaaaatgaagttgtgaacaatgctcagtcatatttataggcataacaacaaaaagggctaatcatttcaaaaacctcagatgcctcggttccccccaaaagcaaatattggaaatcaaacataatcaagtgtaaccatcaaacgtagtgagagaaaattagatttcgaaacattaattgtgtcagagcatttattagccgaaaaacaaaaagacgcctagtcaacctcacatcgaatctcgaatagatgcacttgacttgtgtcacccatccaaacgcaaagacagctcggatgaagtctacacgcaactttagaagtcccgtacttacttggggggcaaatgttatcccaatttttgcactctgacgttgcatcacgctatggtgacacatggaatatattctatgtacctgctcgcaagaaatatgccgaacagagcaccatttacatttttttagacgaagtcctctaagtcggacaatgagcaacccgtgcaacacgccaaacacttagcaaattcagcttttgcatcgttagtcatcaatgaaatccctataactttgggatcagatcatagagatatggcaagctgtctgaatcccacgattagtatattctgtatttactatgcaattattctacttatattaattgtaacaagaagggaaatacttccctccaagcttatagccctataaatagtgattcatattcactgggcaaagggtcgatacatttgtctaagaattcatattcagagatactattgtaagagctctaagaaaaggaaccattctctttgttcttaagtcaatacaaataacgaggattagggtattaccgaactgctcggggttgaacctctataaaattcttgtgtctttattgactatattatattagactcgtattaaactacttgtcacttacaaattagactcattgtcgtnggctaaaagcgagatcaacaattataaaggtattattgaaaatagactaaatcataggatactattctaagacttatttaacatttagtagtttaataatttaattaattaatactctacatcaaacattatttatatataatcaacttatttttgacataagaataagaaactgataatatagaacgtctgtctgttttgagtgctctgttgcagtttgatttttttattcagtttttcagttatttctagttttcttccttgttttacgttttttttttgcatttccattataataactgctacattcaattcatagttccttacattgattgtttcttggttattatccactagtttccttgttttttttttgcttttattggtttcggtatggatcgcctacttgatcgtatgaattcaactattaatttaaaggagactgaatgttctgtcgttaccattactgatgatggtgctcctactattgttgaagccttaaatcttattttggatgtccgcattttgtcccggagaaaagtttggcttaccactttataatgtcaaatggctgaacattagggtggtctggttaaggttgttatttctgagcatcactctaagttattcttgattacatttggttgtcttggatattgttgaccgagattttcggcaactaattaaataagataataattagagcctagggataattaatgcaggtgagttttacgtggtttggggattaatgagttgtagtccatgagtctctgttatgaatgagagtattccttacggagaatgctttttgcggtttttttttctgatccccttctcaatttttgtcactagctccttcgattatcgtgtaattgccttaaatcaggtttattatgtctgacacgtcatcttatgggcgttcctagacattttctccatgctacattaaatgcaaagtgattgttcaactctagcctttctagctcgaagacgcctatttgtgtcttgactcccggaggagaagataggtcttttgttcatgtccgggctcgcatcatgagccacacttgttgtttctttaatccaactcacaactcatctccaagtgatgtgcctatgtcgaccatatgtcacacacaacaactgccacgtatattgggaataaactggggcaacatttacccccaaagtcttatttagtcgtaggtaaataagacttgtgagtcatctccggtatcaataaatgagatggcacgtgcccccatgcgcgtgggcaatatttatgatcatcattattggattttgtttcttttgtaggcaacgattcgcttctcgcctattgacagacccttatataaatgccggtgttagaaaggtactcaagtgtttcaaccgccctttctcctcaccatacctgttcatcccatcggttggattgtggaattccaaccgttgtgagtcctcaccgtacgatggtgcctgatcgatgctgcctcgtatcctaaatggtctataaaagccaacactttccccaactgggttattttcccaaccctttaatttttagactaccaaacccattccacaaaattccaaacgcctctgattttcttctgctttttctccaacattgttaggcaaagtataaccatcaggcgtcgtcagcctctacttcactgtctttgtgtaagttttctgtttatacatttcattcacttattagggcaagtagagatgatgatatgcatttttgtctgttttgtttagcttcctcgaaacggcggtcatggccactgtcgatgtgacgccccctatgtcggtcgtctaatcacttatgccttgtgtccttatatattttattttatttactgttttcattgtgtatgagttgtttctcccttttcttaaaagaaggttgaaaatggggattttccctacgccttttttggttgttcgaagcaacttttgtacttccatattttctttcctttattgcttggatgttttgcacctgatgtttgcctttgtgaatcgttggtttccttttggcagacatccagagggggcctctttccagtggttagatgacccccattcccctttttgactttagggtttgatgtgggggccaatttctggatttttgttgtttcagatgagtgaagtccttcgtgaccttcacacgcacggtttctttaggtttgaccaagaaatcctcaacctccaccaagtgtattccatgtggacccgcgctgccgccggagcaaaatcttcgaagaaggggccaaagaaattggccaccttggaggaggtcatgaagggccctattatctataagaagtttggatgtcgttccaacggttgggaggctgacgaactgcactcaacgttgaccttcaccgatcaattggagaagattatcactgttgcgaggatcaaaccttctggttatgtggtttatcattgccttcccagggatgaggagatgccaaaccacaactatttcattgacttcgtcgtatttgttggactttcaccttaccaattgattctgtatcacctattattaagcttgtttattttttatgtagctaggaatttggctccacccagtctttcagtccccaaggagggggacaaattgaaagatggttttaataaacttcaggcccatctagccaatgagactctggtaccctttaacttccaaaagaatgtaaagaagtatcgtcatagatttttcttctcctccgggttcaaagcctttgagcgctcggacctactaacagactcggtaggattcctcccatgcatcgtaccgcccccacccaacttttcccgaaccatgcgcaagtgtttgctggctacaatagggaagacttgaacgtgggagaccaggtcacgacagttaactataggagggccaagttgatttcagagagtcaatctgttgatgacttcaacttgtccaaagtcctcagccctaacgtttggaaacttgggatggagaaggcgctaagggaagatattatattgtctgcgaaggatagatacaacaggtataaatacaaaaggaagcaagagctcgcattcactcgggtgcaagctacaaccagaagggtatcccgggaggaggcaggaaaagagaaaactctggtctggcccaactttccattcctggttcctaactctagagccctcgatgcaagtacctctggagcctttaagtctcctttgaacattcacttcgttccttctatccaagactatgctgactttaggccagtggaatttgataacaaattatatagtttttggatcccgcattctcggtgggtgataattccaaaagtttttatttctccaatctaagtcattatttgggttggtcacggatgggctccggtcctactgtaaaaattcctttggatcatttttcctatatgtcttcgagttggttccttccctcggatagatttttaggggatgacgacaccagccgtttaatttgtgaatttgctagagcagaatttgataaccagggtaggactagtcctattgtactatacttgcatatgtcatttttgacgtcattctatttttttttctactttgcacagtgtaacgtgcgtgccaagatggcacgttacaagttaggtgatgcccataagttggccaagtggtggtcaagtggtggcgcatgttgaggcgcatgttggcggcatgctgatgcttagtttgtatggcagtggcatttttgtaaatatcttcaatattgtccgaattgggacgagacttggtattcgccatttctttgggtctacgaatacaatgatgcaatcggattaaagcaactatatgatctggtgtatggtttggccatatgtctacagagccaaaatcatgtatgtttctggtagaaggctaaaagcttagaatgctctttaaggggggaccctggtgtcagctctccacctccccctggcaccttagtgctaagtgagctactactagtcagttgggatagtagggtaggcataggaggaccacgatgggactcatatgtctccatgagtatgagtactgatggacattatcgggtcgatccaatagtgcgtctaagaagctgtcagaggttaacgagtatgtttccattggcttgccaatatgctacttgcacgggatgtggcctaaacctctaagaggggttgtggtgcgccttggccacgattctcgacacgagatgacacgggtagtcattcgtgggctagtttgcatatgcacaagggacgaatgcaccgtgttgggaagggacagaggtctaatgtatgcaactcgtttggaagcttgtctcgagggcctgtcaacatatgcgtggaggcatggcgccttgaggattggtccatggatgtataggagtccttgggcgacgagggagactgttctaacattatcgaatggggcatgatagaagcgttggcacgttgattgggtgttgccatcttgccacacatgctccctttgtcaagattgacaaggtgagcgttggtgttgggatttgccttatcatagtgggaacttatggatagtgcgagtatcttggctagagtgcctcgatg

SEQ ID NO: 32062 - DNA, 2645 bp, Cannabis sativa
atggcctccgcttaatcccccacccccctcgtcatcggaaaacatccacaacttaccacccaaattcgttctcgtatacaataaccacatgtcttcgatcattttgccatctttccagtaaatgaaagtaacgtctaactccgtcttcactttatatcatatcatcctccctcgacgacaaccaaattaaataccagttagacccaaacaccatactgtcatcaactagctaaggaaaaaaagagcagggaatggtgcagtaccgccctataagagaatctgctgtgaatgctcctaacagagacatcaaggcagcagatccaccccaagcattgacaatgtaaatgtattattgaaatctctcaaaaaagaaaattgaaacatgagaataatattgaaacatgagaataataaaacagcacagaaattaataaatctaaaatcttgaaatacaaaacaataatttttgctttttctttttaattcaaagtataataataaaaattcaaaatgctttgcaaataatgtaataatataaaaatgaaaaaaccaaaagagagagaaacttacagcatcatcgaaggctttcttaacaatcttcatatcattcaaacaaaacctagcaggagcgagcttccgcggccaaagctcaaccccatcgccaccgcttatcaccgttttacagtcagaaacccacatcagcttcttcacaaactccaccacaaacacaaagctaaaccaaatcaccccatgctcgccgcctcctcaggtttcccgactttccggcaaccagccaccagcatcgacatcaacgaaatacagtccccgagagcgtggtgaattcggaacatttttctttttctttttcttgttgacggtggcattgataccggtggtaactctctcctctctatcaaatcgtcttgtgttacttccaaaccacgaaaaacaatttctagggtttatcccagaattcagattcactctcactcccactctgcatgtcaaaaacctctgataaattcattcatcttttttttttttaatatatatatatatataaattggtttcatttttaattaaagaaaagagtttatgttataaatttaattgatccagaaaaataaaatatttacatcaaatactattttttgtaaatcttttacacttttacatttatttttttatttatatttttacagtgttcataaaaataatacaaaaaaataaatgaaaacaacataaaaaatagtcctcaaaaagttaagtttgatatagttaagtccccaacctcgaaaaatagcgataatagtcctcaaagtcatgttttttatttgtccgttagtcctaattttaactgagccgtttactttttaaaattgccacgtgtcgaaatattattggaccaaattattattttaaatttaaaaaataaaaaataaataaataatttgaaaaaaaattctttttttttgctttttttttcttcttcgtcttcttcttctcactgccagaaagccaccaacccccaaccccaaaccgacactaccaccacgcctaaatagccacgacccaaacttgggttgcaatcacaacccaaataccctcaaagaaaaaaaaaataaattgcaaaactcagattggtttgtaatacccatcaccccaaccaagaacagaagcaccagaataatcatacgaagactgccagaaaatcgcgtaagtccagctctcgcgtgctccttcaatcaaagcctggagtcgttgatgaagagtctcctagttgaaaggcgcgacctgaggaggaggaggaggttgttgttgttgagggtcggcggaagtggaagcggccgagtggaggggttgaaggggttgatttgaggtggtggtgggtgtagcagcagcccataaagaagaaagatctgaagaagtgatgaaagcttccatcatggaagcgttgtcgtcagtccagagattcatggtggattgtattctttcttttttttttctttgagggaacccacctgattatgatgatgatctctgttgttgtttttgttgttgatcttggttgtagacgatgtcgttttgtcttcgattttataggaggaataattggagttggatgagtgttgggttttgtcttcgttttgaatcatgaggcaccaattgcaagttcggcaagagataggcatgtctgggtacaaattactacagtacctacacatatgaactcacaacatataagatttattgtgatcaataaactgtaaatcttatcaacaaaaattttatcagaagaaaaattttaaaagaaaaaaaatatacaaaaatacattaaatttattcaaaaacctgtgatgggatctgaattggcaaatttatttatttacagtatatttcttcgtatgattatttaggtgcttctattcttggttggggcgatgggtattgcaacccaatctgagttttacaatttctttcttttttttttctttgagggtatttggattgtgattgcaacccaaatttgggtcatggctattcaggcgtggtgatggtgttggtttggggttgggggttggtgggtttctggcagtcagaagaagaaaagaaagaaaaagaaaaaaaaaagaaataattttta

SEQ ID NO: 32063 - DNA, 3914 bp, Cannabis sativa
tgaaagccttttctgactttacaacgtgtttgatcataacaacacaacaggcctcctctgtaatctggcctcaaaggccagccatactcatccgtggagacattatacagatcacacctgcactcagtgcaccccaatttgtcgacagcgcctcgagtatcgatcgcgtgcacattgagaaaccatctctcctcatagccatcaggagtttcagcaggattaccaacttcatggccataagggtcaggagcaaacgtagacgttttacgtgtctcggagccaaaaccatagtactgcccaagaacatcatcctggcatattccactgtttctagcaatggtaatatttgtatttgaagtattattatttttctgatattcatcttttggttgataatatctgacaatggcccaatggtgaatataggtttcgtgtagagggacagagtctcctgcctcatcaactacttcagcatgaaaactcttgagaccaatatgacctcttggaaagtcaacgttgtagaagtatttgttgaccactgatcctggttccagctcaaactttggggatctataaaccatagatttcatcttagaaattcgaagagaatttgaacatggtatcagggttgaagtgaatactagtagtagtggtagtaatgttacccataatgatcttcctcctccaaaagggtagtgcaccattttttgttctggcagtaatgaaatcaaaataattttcagtggataataaccgaaattaactaacattataacattatcaaacgaagactaatggcttggtggttaaaggttgaactttgttagtgctatataacttttgagaaagaaagaaccaaaaaaaaaaatgaagtcagaagtttgaagtactagcttacaataaataaataaatataaaaacaataacgggtgctaattattttaagaactacctagaaattttttttaacgattaatgaatcatattattggtgcaaaggaaataaaaaagatagaataaaatataagcaaaaatagtgaatgagctgtatcatctcttatctcaatcatcttttgtaagcaaaaagatcaccctcaaatgttgttacatcagtagtgatgttcaagaacacacacttcagactaaacctaatcaaaagtatcaaaactaaacttagatgaaactaggcaagaataaactaagctcgagaatgaaatcatgaatcttgattgattaagaatagtcaatagtacacaatcaaatatgtccaaaattataacttaacacactgaataattacaaaaaaatgtctcatactaatataattaaacagttttgcactaacatatttaatttaaaacactaacatatttgaaaatacaaaataacaataaaaaaaaaatactaatactaataaaataaaataaaataaaataaaaagtagcactaagttataaaactaaaaaaacaaacattaattgaaataataatttaatagtcaaattgatcacttatggatcttagctttgaagattattaaaatattggttatatatatggactttaaatattactaaaatcttgatattttttagatgattgatattattggtaagttcttttttacataattctttttttttttttctcattttaaaaatgattgcgtatgctatgatcaactatagaacttcaataataattaagatttttttaaaaaaaaaagtgtattatttaattgatttagtaaatattttattttattgaattattttaagattttaaattttaaattcttactagtagtcatgatataattcatactaattatttcataaattagctattttagattattaatgtaagaataattagtaattctaccccctgaacttttgacaatactgatcatgctccctaaactatacggcttattaagaatctcccatgaacttttatatttacaaaaatttagtctttttgttaggtattattctattattctgtttaaatgctgacgtgtctttgtaaattagtaattttttcacctaaactttaacaactattaaatcgtatcccctcaaaattaaaataaaaaaaatatcacatgttttagtaaattttaaatagttaatttagatcttaaaaattattttgaatgattaagaaaattaaaaataaattaaaattttaaaactaagtaagcgatttaaaatattatttatttttattagaaaattcatttagatattaaaaatacatatattaaaaatttaattttggtaaaaactaaattttactgcaacaagtttaagtctacttttttttttctaaaaatctaaatttgtttaaataaacataatatttttttagtttaatttttaattctttttcaaaatagtttatatttttattgaatttttaattattttcctttatttttttttgaataatatattcctttattttttaagatacgagtttataaatataaataaaattaattttttcttcaaaaaaatcttaatttgtttaaattatttattagattttcaataattttgaagctattttttattttttatgatacgtgtttataaataaaataaaattttaatttttttaagaataatttagatttttaagtaaatttaatattttttttaattaatttttattaattttttaacaaaagagggcaaaattttgtattagtcaaagttaaagggtaaaatattaatttttaatggtaaaagaaataaaatctgagacataattatgtaactgttatattttgagaaaaatttttttaagaagctgaatattttagatggcaagatcatgtagtgtcgaaaattcaaagagcaaaaattctaattttttttaatgtaaataatataaaatgagaaatcgtttcagtaaaataaatttctttagtagaatatttagtatgaattattagagttgttgtacaaaagaaataaaaaaaaattatactaaattagtttagatttcacaccaaattaatatagttattggagatagtcttacaaagcaaatccaaaagctcttgttttgccgaacttagacacaaaatttgtgtcgactctaaagccatactgagtttgaaggagttgttaatcagctaacagagtaattagttgagtgattagctagtttaagtggtgagagcgttagtttcagataaagctagtaactgaaacaagtcacctgttgtaactaacagtgtaaacatataaatagctcttgtgatcttttttccaatcaataagacaatcactcatcttcctctgaaaataaactcttacaaaaaacttgttcctttagcaaaaatctaatcagagtaagactgaataggtttaaaagatgaacagaaatatttaaattgtaactaaaaatattttaaatgagcacaccactatgttacatacataccttgagaaataagaatggagaagaaagaaaattgtgtgatgaggaggtagttgggctgagctgaggcctctgaagataatctcatcgcaggacagagaagctgaggtcaatatataatttaggagtgaacaaagctttgttgtctgccaagttggtcccttcattaattattattttgacatgtgaccaaaaaaaaatatatgtatagtaatagaaaaaagatattaacaattaatagaaaaaagacgtaaattaggagaactctcattatttctccaattttctctctctttttgtaaaatacctaaagctcattagattagattatgcttactataattttgtatttggttttagtaatagtgttaaattagacctcacctagactacttattaaaagggaaaaaaacagaaaaatacaaaaaagaaaaaaaaaattacaaaaatactttgggccg

SEQ ID NO: 32064 - DNA, 2552 bp, Cannabis sativa
agggcataaaacccaacatagggtagataagtacttgatccccttgggtgtgaactgggtcgaacaaaggtggaagtagtctgtaactctcttgaagtacatgtgcaaaaacaacatcgcctcttgtttcgtgtgggcacctgaccaggcatagtaccctactttcagacttgttgttcggtgatttggagaagggaggaagcactcaagtctgcccagatacccagccttctccaaataattttttaagagtggccctcctcagtagttattacgatggacggaggacacacccatctagcccctaaggcaccttgcctcttatgggggactacctcgataaattcttgagtgacatagtcttccccttcgaccaagatgtcaccgagctcaaataccggctccctggactcattatatcctttaaaacatagaggccgagccactccctcctcttcagcctcggagggactatcaggacagtcaccgtcctggtcctctatctcttggacctcaacatctccctcatagtcttcctcctctgtagcagacaggtcctgtttgacactcgacagtgtggcatgccgggccacgtgagggtcggtcgcattaattttctgcatcatctattcggtgcgggccatcatccttctcttaggtgggtatttttgtgtgtgccgcgcaacattcacgacagaaacaacaattggaatgccaaaggcaccagatcttggacggcctactggaagagtgtcagcaacaccaggtcggatgatataagaagtctagttggatgggaggtaataacgtctccaacccttcctaagctcccaaacaaatcgtctgtagccttctcatgtgctctgcttggagtaaaagtgatgttgcacctcgggttcttgagtaggagaactttcagtactcacttcccagtcttcgaaactcgagttagagagcccatcactcaaagaggacggactggcgcaaagacgaggttggtcctcgtatagaagctgaagcagatcctggtcgatatggtgttcgcctccccaaagctcaccagagttcatttacaaaagacaatacacgagatgagtatttggccaagatatcgaacaaaaataggcaaatttgccgaccaggtctagttgacagattaaaaagatgaaaaacatgtaaagattaagttcgtaacccaagagtttgaaatttttgaatcaagggttaatgttcacgaagctttggatgggcaaggtgaagatcgaacattgcgagattaaagtcaaaatgtcacaaacaacaaagttgtacgatctactacagtaaaaattacgaagtatcgaacctagattttctatatgtctcctaaaacaagtcaagaacaattgtattttctacaatggaaacccagaaaattgaagatacaaaattaaaggagaaaaagatgagaagcttactcactgtttgaagctttggtgttgatcggatgaagttgttcggatctttctgctagaatcccacggcagacttgggagagaaaactcattttgctctaaatttgcttagtgagaaaagtggtaaaagtaatatgtgagaattttcaaccctatttacaagccaacttgtgaaaaggtgtaatcaatttaaacccaaacgcttcgatttccccccaaaaagcaaaatattgggaaactaaaagcaatcaactgctagagaagggtaaccgtcaaaggcgtgcgaagggcgcatctcgaagaacgaatcaattaaagcattaattagccaaaaactgaagggactcctagtcagaatcacattgaatcacaaatagactcattcaacacgtgtcacccattcaaatgtaaagtcagctcgaaggaagtctacacgcaacttcgaaagtcccatacagacttgggggcaaatgttatcccattttttgcattgtgacgtggcaacacatgctggtgaaacgtggacctgattccccatatctgcccaagaaagatgctccgagcagggcacagcatacacctgcacggacgatgtcttcccagccaaggagtggataattcgaggagtgcatcaacacttagcaattccagaatttgcatcgtgaagcacaagagtaatccttatcaatctgggatcgtatcacaaagatatggcaagttatccaaatcccacaatctgtgtattctaaatatgtaatatatgttcttaccaattataaacattgtaagcaaaagggaaaccttccctcaagcatgtagccctataaatagtgatccattctcattgggaaaggggttgagagaattactttagagaaatctaagagagcatacttagatatttcattgtgagagcttcaagagaggaaacactgtgttccttgctcttaagttaatacaaatcaaggggagtaggctattaccaaactgaacggggccaaccctctttaaaaaccttgtgttctttatttatttgcttatattatacgtaaatcatattctttatcgcttattattagactcattgtcgttggctaa

SEQ ID NO: 32065 - DNA, 3228 bp, Cannabis sativa
  modified_base (172)..(176): a, c, t, g, unknown or other
atttttgtgactaattaatacctttaactacagactttttattatgatttataattagtcacaactttttcactttaagtcacaaattttattgtgactaaaaatgaaactttttgtagtgtaaattgtaaacatagacatatcattatcttattattattatttttttttnnnnnaaaaaaaaaaaaagaaaaacccacttgttttcatctaggtctaccactatatgtgtggaatgtgtatgttacaaacataaaatacttcaatgattttaatgattttataggtcttatagtagtgagggagagctagaaattttactcaagaaaaataaaaaattaaggaggcttaatttagtttttagatttattataaatatacaaaatggaattaataaagaatttttccaaaaattaaaaaattaaaaaataaataattaaaatgaaaaatgggaaacacaccaccctacatatatgggatctattttaaattttgtgagttttcttgtaattgttgatattgtacatataaattagtgagcactattatcctttattttattcttatatttcattaggaaaaaaaagtttaatctagcatctattaattccaccaacctttagcaagattacatataataatataatatatatgcacaaatattgaatccaaatcttttggaaaagaatattataatcatgctcatcaaaagggtatcatgccaaatgccaatactttcttaattaatttaaaattattttaggctttgtttggaccttagatttaaaaggaaattaaaaaaaaaaaaaatcattggattccatttcttgtttgaattgaattaatagattgaaaattctctactaataaatttattagaaaaattaaaaatatttatatatatatgaaaaaataattaaaaaaaatctctttatcaaatttatgaagaaaaaaaataatttcctttcatatttttctcgttaaaaattattttcaaattatttatattaaaaaaaatattaaaaattgagattagtatcctatttatactattttaaataaaaaaattattttatcattgattaactaaacaaaaaatctaattcataacttttgctaaacatataagtctaaaataatataaactcttaaataaacaaataaaatcttgtcatttagtctaatcaacaagaccatatttatttattttaaggtcaacaataccatatatttttcaaggctgcaatcatatataccatattatatgttattcatctttatatgatttaattaccagaatatatttattcatcttcatctcatcaaagtataacaaagataattaatgtcggtgttgaacatgtacatatatataattaaaataatatttaattaaatatatttttatatatattatcacaatttatatatatatagtggtgtttgattagaattagtacactttaaatattttataagataacttcaaatcatgcacaacgtaccaagggatcacaatacatatagtgctcttgtagtaattgaaactttttttttaattgtcacttttcttttcaataaagttataaatataaaaattattctttttacatataataaagtgaaatgacattaaaggactaagtaattggtataaatctaaaaaaaaaaaatcaaataaaagttgaattaatagttcccacaacacatgtacacattgaattttgataacactacccaaaaaaaaaaattgtgactaaaaaaaaaaatatgactaattataaatcatcatttttatgtcgtgattaaaaggttcgtgaccataagtattagtcacaaaaatcataatttgttgcgactaaatgtgtttttagtaataatattgcttgttgtgactaaaactaattaaattagtgacaacctgtatctaaatactatatattttggtcacaaataattttttgttgtagtgtaatattattagttgatcatgaattcatgcagttcatataaaattaggaccacatgatcaactttgggcaaccctagctaatattggctattttacttagtggaccacctattattcatgggaatatattttaattttgtactcaaaggtcatgttttaatgaaatacaatttaattatgttatatattctttataataattattggctactttgaaatttgaaaattgatgtaaaatgatacgtattttaggtttaaatttgatccacaaattattaagtctttatattctcataacatatattttttttaatttattacaaggtactcaataattattaaaactattaaaaaaaatctcttatcaaatttatgaatattgaatgagctatatatatttcgatattaattataatattctttattttctttgccaatatatgtagcgaaagattaacgctgagctaaacaataattaatcatttgcttatttctttctctttacatatatcattgtttatatatatttttttggctttttgttatttttttattaattaatgaaaatggttaaagatataattattttattgatatagaagaaaatataaaggaattgtatggtgtaatgtaaatgtgtatatggtaaaaaaaatagtgagaaattttaaaaaatagaatagagaaactaccgggtgtgctcttaataattatcaaaatttggtcaaccaatattataggtaccaagtgtttaattatatgctcatcatcaataacaagatacccaataatctaaaccatatgattttaaaattaattacaaggtagctatagtcattaattattatgaaaaatagtattctaaataaatataaaatatttataatatttagagcaatgttatacgtatcgattgaaactccttattcatgtgatgttaggcatgtcaaaaagattcatttagttggagcgggttggagctccgatctgacggatcaccctttatctgaaaccttcggatacttattggatcttggattagatccgctccgccccgcctaatttttttcttgatcagatctgatccaacctgatttcaatttattttttaaaaaaacttaattcaagactcagatcccagactcggatgccttgggacctggacccagacccagaccctgacccgaacccaaatctggactgagaccggggtcgagactaggacccgggacccggacttaggacccagaaccggg

SEQ ID NO: 32066 - DNA, 3283 bp, Cannabis sativa
  modified_base (1947)..(1947): a, c, t, g, unknown or other
tcaagcataatttaacttctgaaaacaacatctaacaactacagcaacaacagtagctaaaacaccatttcatgcaaaattcatttccttaaaattcaagaaactaatgaggaggttaccaagggctataccttggcttggattcacttgaaactagctgaaaatcccctagagcttctgaagaaaacccaatccctagctggttctatggatttcaaaaatgagagagagaattgagagaaaaaaatgaaattttcctttactttgtttttttgatgaaaatgagataatacccttttgatttaatcaaaataaaccatttaattaactttaaaattcagattaaataacccacaaaagataaaacacctcttgctaaaaagaccattttgccctttaacaccaaaaatcactaaaagtcactaaggggtaatttgggaaattctgaattcccgactaatctcgacattcccaatttctactaaatcgcctcgctatactaaaatactaagatgtgattcaactaagccatacaccgcattccaatgttgccggacactgaacatgcaaaaatacgaaattcctatacatgtcatataaaatgcatcctgaattcaaataaatcatcataaataatatcaataactaattttcattattaaactctaattatctactaatttccgaatttaagctaagcggtctttacactcctgcagatgcatctctcgtatttgcaaatactcgccttagcaccaagtctcaaatgttgaagagcctccttttcacccttttattgaagtatctttttacttggtgttggtatgctgcattagtaatctacgactcagtacgtttttcatcaagtagatccaaggacagttttaaaagttcttggttttcttcttggttataaatctcttgtatgtgagtcgagttatttacttctataggcaacattgcctctgagccaaatgctagcgagaaaggagtatgtcccattgctattttctcagtcatcctatgaacccaaagtacttgaggtagttcgtcgacccatctacccttagcaacatctaagttcttcttcatagtatcctttaaggtcttgttaacaacttctacttgtccatttgcctgaggcctggatactgacgagaggattttaattatcttgttcctttcacaaaacacagtgaataattcaccattgaactgagtcccgttgcctgacctgttccctagtcctgggttgccttctgttctcatttctgtgagaaggttccgacaagttattatgttcattccccttggttgggcatccccggggtctttgaggcacttctcgaagaggtgcttcatcacttggttgttcttcttcaggagcatccctagtttccctaggttgttcttcctgagagtcttgggggtctccttgagctgtctcgtgcctcctggtttgtgagccgcgaggtctgcctcgtggtcttctcacttcaggattaggttagttttgtgcggcattttcctgtgccgccctggctgtggctgcctcccgttccaacttagcatttcgttggtttacctcctctagacatcgctggagttgacgattttcagactcgaccaacggtacgtatctcgtagggtcataggaaccatcacccatgggtgtagaaccgccaacattcgtgctaggttccacattcccagtttttgggttttggtctccatcatgctgactcctccttgagcgtgtggatcgtgtcgaacgtgttgttcgtgaattaggtggcctttgtgagcccatcgactcttttctaggatggtgagtagtcacttcaggatgagtgttatcgttttccccattatcagccataaagaaaaaatttcttctttggttaggagggatttttttgagcttttatcacgtaggctctcaatganagcaccaaactgttaacgcaaattttcgtttatgattatgagcctatttttgtaatatatttttgcagagaaagtataaatgatctaagaaaaaataattgatacaaaaagaaaacaaggtttttgcgtggttttacagttaattctgcatagttcacgagtgtaatatcctgaaaattttattgatatttatttggtcatattttattaaatatgtaaatatatggatattagagtaagattataatcttacttaaagctaattatgagttaattagtgggatttgagtaaatgaataaatgaagcgtaatttattaattacggagattttatcaaattataggggtattgtagatatcatttttttaaaataaaaatatttttggttcggcggccgtgggaacttgatggagtggtcgaaaatgtcacgacattaaaggattagttgaattggaattagaccggactagtttaaaattctaagttgtcggtttggcggattagttagaaattacttaaatacccttaagtataatatagtttaaatttggtggggagggttaggatagtcattttcttaagttaattcttttgtcttctagtgcttacttaggctattctaatttagaaaaaaatgatttatgctgaaggataagttggaaataaaaagatagttgggaaattgagaaaatgaagagtaaccttctttcttctactcccttccttcgaacctaggggccagcacaccagggggattttttcttcttcaatttaattaattgaagtgttcttgcaagagcttgtggctgtccaagctttgaggtgagttttcttggtgtttgtttggagattttttaagtttaagttagttcttgttatgagttttgtgattttggaactatggtattaagttgagtttaaattatgtttataggtctgatttagggcttacttgagttgaaattaaatgtatttgatggctgcttgattaggaattggaaaatttagttaaaaaacctaattttgattctagcatggtgaattgtgtaattggatgaattaatgtgaataaatgttttgaacatgttgtatttgtaatattaaactgttctggagagtttgaataggtttggaagtgatttggttgggttttggagcatcaaaccagagttttcctgtttctgcagcagggaaaaccggttaaccggtttcacaggcatagtgaaaccggtcaaccagttttggtagcagttttaggcttcgaaactggttttgttcggggtattttcctagagcttagaataggatattttaatgatgtttgaattattccga

SEQ ID NO: 32067 - DNA, 1304 bp, Cannabis sativa
tttttttttttttttgttttgttaaagtaaaagattaatggcagaggtatagatttttgttccccatttcaacagccaaaaatgtgtaaatccaaaatccgtgtttttctttcttcatttattttcttcacaatcccaaatcttacaaaattttagctgaattttgttttgcttaggtaggtttcagagtgttagtactgaacgttactgtatagcaacacttttcgttttcctttgtacaacaacattattaaaaactcggccataatcatcaattttttggcttattgtaaaacaagacatcggttctggaacaatatttgatttggtcaagttactttttttatgcccatcagtattaaaatttgtaacaagtgaaaatgttttctatttatctagttcaatacattgatttaaactaaattggaaataaggaaagaggatctctacttggttcatttaattaaaaattaacaaggaatcaagaggattttgtttagctgaatgaaggtataagtttgaaagttaatgtcaaaaataaaaatttaaaaaaggtcctaccgagacttgaactcgggttactggattcagagtccaatgtcctgaccactagaccataggacccttacattagagaatattttcattttacatattccatagtaccaaagatggatataacactgtacggagatatgggtcttgtatttggtgcatttgtatgttgttttattatgtttttttttttggggggtagttttttatttttatactttaaagtagtttattttttaattataaatttacgaaaatttatgtagtaatcaacgaagtagtttgaatcacaattaaaatttaaatagcaacccacataaaaattattggaaaaattcaaatcgtaaatttgaaaaaaaaaaattaaaaaatagtataaggagtaattttttttccttattttgctcatgaacttttgacactaccttattttatcttctaaaatatacagaaaaaattattttcacccgaaaaaagtataaacataccccaagacaaagtttatcccattttatttattttgaaatagccccattttatttattaaaacattattttttataattacatccaatttattttccaaaatagttcttatttgaaaaataaagtacaccccactcctcccacttactgccacaatttttgctcctcccatctaattaaaatatataattgagttactattatgaaatattagtattatgtaatattataatttagaaaaagaaaatagagaagagatgaga

SEQ ID NO: 32068 - DNA, 1008 bp, Cannabis sativa
cccaccattttaattttcaaaaacataaaatagttttcaaatcctaaaccaatcaaataaaacagttagacctcgcggtcattgtaaaatagattctccaataaagaagagatcggaatagatccaaacagttggtgggagaaggcccacttagccacattacaggcaacatagttacaatacctactaacattagaaaagatacaacaaataaaagagtgagatgacttggtacaaaatgagacatagttctcaagagcccaaagagatatcttcccattaagcgcattgataacttgtctcaagacactctctacaatgacatacttataccttaaatccatagccagcgaaacaaccaagcagcaggctgccttctccacataatgcatccgagaagtccaaccgagtagtgttaacccaaaccaccttgcccagatgattacttgctacaactgcaatgcacatagtctctaagcccactctaacatcacaattcggtttaatccaatcttgaggaggaggattccacatctctctcgagatcggattaggagcaggcaagaaagaatcatgtaactctgcaaaagaagtacaaatattgtcaatacatttcaccacatctagaggagtgttattgtttaccatttcattgcgcatcctccagatagtgtcaacaacaatcgaagcaaagagaaatacatcctcagcacagatccccctatgcctaagatcccatataaatttaacccagtcccaaacacaaattccagtctcgcacacagggtagataccccaaggtgaagctcgccataagtgttgcaccacctcgcatgaaagaaataaatgctcaatggattcctcccctaagtcacacaaagggcaatttgagttctcaatctgaaaccttcttccaattactgatctctcaatagatgtttaaattatagaaaaaaaaattataaaattgagcttttcaacatatgaggtaaactttaactattttac

SEQ ID NO: 32069 - DNA, 1042 bp, Cannabis sativa
ttggattccaattgtggaacaatggacagaggagctgaagaagaagtacgagattttgagatcaaagatgccatggtacagtttgcagctatttactccgatttcagggataaagttcattaaggaagagtggcaattccagggcaagcctatgctggtggtgaccaacccacaagggaaagtggagaacctcaatgcttttcatcttattagagtttggggtcttaaggcctttcctttcaacaagaaagctggggaagatatggacagagaatttcactggattggtccagttgtcaacaacatccacccaactatcgagacttgggtaaagtttattattttatttcagtatcactactttccctactttgtgtcattatttgtggttttactaactttgaagaaaaatgttacaccgagatattaattaattaatcatgaacaggtgaaagaggagaagtatatcttcttctatggtggaaaagacaacgatttgatccagacattcacgaagaaagtcacagccctcgtgaacgatcctttcctcaaggaagcaaagatcaacatcgaactgttttgcgtaggaaagacagccaaaggaggagaagaccacggcattctagggcggttctggactggaatcgagagcttgttcttcaccaaggctaacaaggacgttgacccagtaactctagagatccaaaagcttctttcttacaagaacgagagtgcatgggctgttctcagcaaaggatcttcggtggtcaccacaggccatggctcggccatacttaaggtcattgaggagtttgaactgtggaaggaaaccattaaggttaagggtttcgaggtagctttcaaggaacattacactaaggtcactcaaactgttcgccactgttgccgtcttgatgtccctgttgtcgccgggaaagctccggataggatgaaatgcccagaatgcccccgggtgatggagacttacgtcagttacaagtgttgccacgtcgatggaccacatcactaattaagatactta

SEQ ID NO: 32070 - DNA, 1480 bp, Cannabis sativa
ttacctttaattttatatttaattgaaacatacctctttttatatatattgtatccaaaatacactgacataagggagtcacatggagaggatattaaggtgagacaagggtaaaattagtaaagtatttaaaaaaaaaaagaggtaaaaataatatgctttaaaaaagaggataaaaataaaagaggacaatataaaaagagtatagaatctaattttttcaaaaaaaaaatcctaatagtatcaattaactggactcatagataattttgtggctgattacacgatggactaatatggtgccaattatctcacctactttactagtataggaaatttataataatatagattatataattttattacaatataatatatctgcataataatttatttttatataattatatattattttatctattataaaaaaattatttttaatttatcatacaatatataaatggtaagtatttaaatgttgtattaattctgactcattattatagttaatgaatgatgctatagtaatatttattttttattttttatataattttaaaaatcaaccattacgtttataaaaattataataaaaagatttggtttttttttatatatttacaagtgttttctttttattagtatttgtgttataaatgtatgtaaattcttttgtttatattttgttaatatattatcaacttttttaaattgtaaaatatatgattctcaatatgatttttttatagagttataaataatttttatttttttttcataaataattttgtgttcattaggtaaactatatacatatatatacttatttacaatttatattttattttttctaattaaataatgtttgaagtttttataaagttatgtttatttatttattttttgatataagaattgtatttcaatagatgaatttgtttactaactcattagaaaataatcaacatatagaaacaatagaaaaaatatatatttattttagtatagtataaatattagctatgtctattttatgtttacaattataataaacataccaataataattaatataaaatattttgtatatatgtgtgtttattttattttttatttattaaacatactaatttaataaataaaataataatattcacatagattaattatatcactctatgtgtgtcatatttaactttaagtaattttttagaaaataatcaatatataaaaaattgtttatcgttttctttttctttgtttattatgtcatgtttattttctctaattaaatcatgtttggagtttataaaattatgtttgtttatttattttattttttgatgtaaaaattgtatttcaatagatgaattccttcatcaactcattagaaaataatcaatatatagaaaaataaaatattttttgtatagtataaatattgactatctctatttttatgtttacaattata

SEQ ID NO: 32071 - DNA, 1391 bp, Cannabis sativa
tatttgggttgtatatttttgtttatttggccagctgtttatttggccagctggatttggccagctggaagtatttttgtaatattgttactttttttggctaaaattgaaaaaagcccttattattttgcctcatatagcaagcaagcaagttctagaattttccaaacaactttccacgtatcaaatttagcatacataaaccaatttaattgctcgaaatttaccttttataattccatgttcttttaaagcacaaaattaaaattagtcaagaatgtaatatcaccaagcacacaatttttttttaaaaaaatgaaatttaatttgttcatccaaataagaaaattaaagaaaacaagcataattctattctaaaaatggacaatgaaaaagaaaattaactctaaaaataacataaataataggctaaaaatatcctaacagtaatacttaaatttgttcgtccaaataagatataatagaatactctattctagagtgttgaggctggcttggaaaatcaaggtgtggattcttcaacagaagttcttggattggattatcgttgattgtactaaaagatagaaggataccctaataggcttcaagaggtattgttttcttttcagcagtttagatttaatctatatacattatattaagacccttaggcttatggttcattttagataaaaaaaaaaactatttttatcaaatttcgcttctgcttttataactttgatatggactataaaaattaacaattggttttaagagcaatcttcataattatatagattaaatactgtgttgaataattttgtatttatacatatatgttgatatattgtgaatgaatgaaattattatttttatgcatgaatgtgaatcgttaattatatagtaaaattagattaggaattttacaattttactagaaaaattgtataccatgatttgtggtataggttttgatgtaattttatttttaaatttatttgtaaatttttgttaaataatatatcataaaaattcacaatacctccattaatgagtgagctcgagtttaaggactgataagaaattctgcaactcatgatttggcaaaacatactctttggttagacaatgagctatcttagttcgagaaagtaccgccgtcgattatgaattgctgcattgttaatcatgtgtgattttgatcaccgcgtaaaaaaaaatcaagtaactattgtgctaaacataatttgttgcaatgtgatttagaccaatagcttgttgcaatgttatttataagattgcaacaaagtttttgagctctagaatcagtaacatccatcctgaaataattttccactcacaatggggatttattaaaggaagattcg

SEQ ID NO: 32072 - DNA, 1765 bp, Cannabis sativa
acccgccccgatatgatgtatgtatatatttaagttttaaaatcataactactacaattaaaataacttcatgctttcggctttttattgtatactctttttttttttactatacacactattccatttaagtttattgttttactaagtttttatgattttttttttttaattctctttgagacatcattttttctcaaaactatatatgtaatgggtacctgatgggaatccttcccccgtcgggtaatctctgtcccgccccgctttaatttaaaaaggtattggggcgagtatgagggtgaatttaagaagcgtgtatgggggtgggggagcaatccctgcacccaccccgccccgtttacatccctacctaaaggcatggatggaaattctacctttaattgtttcgagcaacaagatttcatggtaagtgaactcaccctcttttgatttctacatctactgatataaagaagaagtaatttcaatctaaatagattgttatcatggtaaaatgagatcgtttctaataattataataaataatttacaattgtatatttggtatagttatagatgttttttttttttgaaaacttgtatagttataaatatctataacaactatcttttatttttttatatattaatcaattagtttacaatatgaataattaatatgtttaaataattttattttgttttttagaaaattcagctgctattatgaatcacaaatcgtttacaacaacagaaaaattccagttttttttttttttattctaacaaatatgaatttactaatctatatgtatatataaatgagagatatgagacgacgacatgacattctaaaataactttaaataactctatttcttctttacttaattctcttactttttttaattttttagcttaattctctaaatattttaattttttattaaaaaaacatttatacatataatttaataacttttattttttttttaaaaaaaaatctaaaatatacggcatgttgatctcatttaaaattatcatcatagttatttatatagtagtataatatctcttttatatatatatataatcgtgataatattattgttgtagattcatatattttattgttaatttgttattttttttatctattttttttactttgcattgtaaaggttattttattcctactttattaggtagattcaattatattactttgatatttaaattttttagtgagagattacatttacaaatattgttcttataacgtatttatacattagtcaacaatgtctttattattgttttgagtggacaagagtggtgggtgttgccacaaaaaaattatttaaacaatttatataaaaaaatttatgaattcaactacggtacgaatttttggtagttagttagctgtatttatctatctatatatttatatcaagctgagtcataagatagtgacgttaactttaaatgtaatgatgactataagtgagatacgatgatgacagttattttgaaatagtttttaataagtttatggtcttctttttgttttagatttatattttttgtgagtattatttaattttcaaattttcttcattataatatacatttgaaaatttttgagttttttttttttaaaaaaaaagttcttttgagttctttatatagattttttttttaataaatatatattttaagattatacataaaataaatttaaaattatttgatacaattt

SEQ ID NO: 32073 - DNA, 1052 bp, Cannabis sativa
aaaattgtgtttattttattttttaaaatttatataatagaaagtattagaatcattttcactttattttgtttagtctaatgtaatccttttaggtttttcaatgtaataaaatttttcttatatgatgtaattatcattatattacaatcattacatcatttttaaaaacaaactaaatattataattgtaattataatttcattactattatcattacaacaaactaatgatgtaaaatgctaaaattctcaggggtaaagtgaaaaattcttacccttgccgtaaaaatttagggggaaagttctatattagattcttagcatgatgtcctactattttgattatatattattttggttgccaaaattgccaaaataaaataggagaaatgactgattatatgatttaaaaaaaaaaaaagaaaaaaaaaatgaattacaattccaaaactggggtaataataatgtggtagggtgtctcaatcagtcttctaatgtgtctctcatagtttagtttaaccttttcaagatcttatcatgtctttatgtttttgtcaccacagatgatatatttatataaaattgtatcaagttttaatgattttttttttcctttccaatttctctttttgaggggaagttttgatgtgacaaatttattaatatgctgtctacaacaaattaagtaatattatatagagaacttaagaataatattgtataagaacattaatacagaaaaatattaaagaaaaagtacaatcagtatttcgtaattgcaagtttacaagtactattaatattatgaaatgactaggtgtaatttaaatatagtcaattgaaggatttctttagaaacaataatgtaaaatttgagtcatgataataaaacctgatagaagaattaacattagaatcaactaattcatttacatttattgaaatacaactaatttttaataaggatcaactaataaaatttacatttaattgaaatacaattataattttcaaactacacgttagactgatttttttttttttttttt

SEQ ID NO: 32074 - DNA, 2308 bp, Cannabis sativa
actcagaaaattctcagaaaattctcatctattctcatctcttctctcatctcttctctcttctctattttctttctctaaattataatattacataatactaatattttataactagttataaatatttgtttgtattaatatataatgtatattattaattttataataaatttattttatgaatacatatccatacaaaggattaaggtaattaatcccttcattatagtagtataattgttggagttgccaacaaaaataagccttatttaataataaaatttaacagagacaaatcttaatttcactcatcatggaaacatcaattgtaaatagtgaaataatcaattcgaaaagtaaaaacaacaacagtaatgataggcactaatttgaattaaaatattaatttcttaaaagaaaaaatattgagcatactttagaaattcactgggtgatgggttgcctcatcatatcacaccatctacctaataacccaacattcctccaaaccaaaccattcattaaaaaataaattcaaaaaaaaaagtgaatcagacttataaagactcatcacaagagatgagaaacgagagaggaatgtgtttacatattacacagattataaactgaagcaactgcccatttaagagatttttactattctttaatatacatgaaaaaaaaaatggagaaaagggaacatttttgttatatatatcttgcaaacaacgggtcttttgcacttttagtaagccatttttagtttggtgagtacctccactctaatataaagaagaaagaaatcgataaacaaattagtaacaaaattacagatattttgttgataataaataaaactaattctataaatgttattatgactgcatatagatgaaagcacatgtaactacaaaagaaacacaacactgcagaaccacagagaacgatgaaaaaaaaagattattatccacaaactaacccaatatcaagaatttttgaaaatgaaatttggaatcgatatcaaactatactcacaagtcacgactactcagtgaaattgaaattgttaggtgtaggttaggttatatgtatattgttgccactattctaaaagggtgcaatactcaaatggagacctttttgatctgttagttttttaatttttgttgttgttttgtcgttaaaactaacagaatgaacaacaaaatctgttaaaccatacgaattactgtttaaaccatatgaataggcgcttattgtgaatggttgtgtgggaggatgcaactgttaaaatatgctattagtaatttaatttcggttaaaattaactttttattaggaaatattctgtcaaaaaatataacaatctgttaaatgcacaacaaaaatggttagataggcatttatataataggtaagatttttttgttacttttatgttgttttcgtgttgtttttatagaaaaccgtaaaaatgtaaaaaaaaaaaaatctgtaaacgtaaaaatgtaattttgttacaaaaaatggtattcatgtaattatccctacttagaatgcatatacatatagacattaaagacccaagttttttgccataaaattcaattaatttgacacaaacaaatgcaatttgaagaagaataacaccaaaacaataggaaaaaaccaatccacgtgcactttctcattttgctttgaaattaataattgtcttttaatgtctcacattgagaattgttaagagacaatactgcctagcactttcctcagtatcatacccttataatagcacgtttattacacagtattcaaaattagaataaactaatggagaaatgtaatagaataaatgaagaattattagaattaatatttgtaatatactgttttttaaaaatagaatgatagtgatttattttgtttattttatcagaaaaaataatcagaatacttaaattgactaaattactcttttcggttaaactatattataaagtagttattttgtaagacatattttaaaaaataaaattatcactacaaatttaatattaaaaaataaaataaaaataaaaataatcttacccttaatgacttcttttaaaaaaattggtagaaaaaattcttttttttttcttccttatttaatcaagttatccctttcttaaatttaataaatataaggaaataacttcattatcattgattttcattacttattactaaacatattattaagtatcgagtctcatataacttaaaaaaaataacttttagaattcgtttggtacgccgtattata

SEQ ID NO: 32075 - DNA, 1631 bp, Cannabis sativa
tttaattttattattttagagattttcatatttagaatgttaatcaacatacttattagtaaatctagatcctcataaactattccctacatataatatatattatatatacattatatatatacattatatatatacaacatttataccgaacatatatacatatacatatatatacggttgggtatcaaaagggagaggggtcgaccacaaccatcaaccactgtggccggaagtggccatggtggccacgtgatgagcacgtcgcaagcattatcgttcaaggggagacggatcacgcgtgacccagtagacccgagtgggtcttctcccaagcaaggcctcacggccttcaatggtggtcgaatcaccgtgtatggcttggggacgacatgatctttgggtcgaatgaccctaaacccgttcgggtctcaccatgcatggagaagggacatcgaacctatcatgcatgtcgtcgatgttggggaagaaaggactgaagatccttgtatggtggtcggaccaccatgctccccctagggactcacgtcccaatccatgcatcccatgcatgggattttctcacatgggcatggtacccaaaaccactcgagtagttgtgcatggatgggaaaatattcttgagctcacatgcatgtgatgttttcgatgtgcatggtcagatttcaacattagaaatagagctcacatgcaatgaatattacaacaaataatttttacgtaaaatttaattttaaaaaataaataaattacaatacataaaaatttctatgtctcattttagcttacattattttttaaaaaatatataatctccacctaattataccatataattaatgattcatcacgtctcatacatttataataatataatcatccattcacgtaatatcacatatatatatataaatgcataaaattcacacatcatttaatgtatacacattcatgaaactgttcttgatatcaattgttagttttatggtactaaatcaggtacgcagtagaagagtttcgtattatctgattatcattggaccatatctcaaagaatcttcagatgtgtgtactttaaattaaaaaaaaaataataataaatttagagtatacctcttgacgcttatcttcgaaacttcttgtaagttgtattccttaattcagatgatgagcaaattgcaatttgaactcacaccagtgtctttcaaatcgatcgaccacacacaaggaatagtgttggctattagaataaagtgtataacattttttcttgttgagttctcaacacataagcaagaacaactaagaaaaaaaaatcaatttcctttttctctctataacttttgaaatttactatgtaaagtgtatatccgatttctcaaattaagtttctatttatagtaattaaatctcattaatttattcattatttaattgtttacataaataaatttttataattgaattcgtttactgatatttatgagagaatctctcaactacttgagagaatatctcaacaaccttgaaatatctataaccactttttaaaatagatatttacttaattgaattaattaaataggtaattaactcaaaaagacaaactc

SEQ ID NO: 32076 - DNA, 3257 bp, Cannabis sativa
tcaattgtctccatcatcattgacaattcaaggttttaaccaagctggagaaaaagtaaggggaagtatcacactaaaaattgaaataggtgaattaaattctgaagccttcatgtcatcaattcaaatacatcctacaatgtgttgttagggcgaccgtggcttcatgaatatggggtcattccttcaacactttatcaatgtcttaagttttacaaggtaaagtcaaaagtgtcaatgcagacccgaaattccttttacggacaacaagtgaattatgctgatgcaaaattttacaagcgagctaatgttaccattttgaaaggaaaacctgaggagggcaaatgtcatgaaagctcaacctcacaagactctctgaaaattaagcaactatccccttgaaatctcctcagcccaaagaggagaactcttgaaggtatctaaccaaaaacgaaccttcaagtacacccctaaaagtcgacgaggagtagggcaaaaagctttgacaccgatcgaagattcgatgacagcccttatgacaagctttactttaccgctaaggaaaatcgatcagtcactatctatgggtaaaatgaaaattttaatttcatttggtaaagatagcaagaaaaataaaagagttgttactcttaataaaaaatcctccacttctgtaactctgaaagcctttaaaatggagaataaaaagtttcatttcaagaagcaaaaaggagttacaatccatcaaaacaatgattgtttaaaagctacttttgaaccagacgagttaacagaagaggaacaaaaaatattttgcagtgacaatgtacctacacattctccacgagtctcagtatttgatagacttgaagcaagcacatctaccctagaagtgtcaacatttgaaaggcttattttcccaagtgttccacagccaaagggaactaaaaagcaaaatagtgggtaccaaaatagacaaaacctttgagaattactattcaggggcatcaaacacaagaagatgaaaaaaaaaaattgttgaagtcaatcacctctcttttgaagaaagtttgactgtagaatatgaaggcttgagctcaaacccttctgaagattttatagacatctttcaaccaacacctcaagaattcgaagacagaggacaagcaactgtggatgatttaatagagatcaaccttagaaccgaggacgatccaaagcatgtgtttgttagtgctttattaactgaagaagagttaccacagtacaaacaagtcctttgtgagaacaaagatgtatttgcttgggggtatcgagacatgccagggttgaatccaaaggttgttgtgcataggttggcagtatcaaaatatgctacccctgttaaacaatctcaaagaaggattcaaccataattacttcccaaagtcgaggcagaaattgagaagttaagagactgctggtttatttgggaggttaagtatctatttggcttgcaaacatcgtcattgtgatgaagaaaaatgggcaattctacatatgcatggattaccgagatcttaattgggcttgtccaaagatgaattgccactccccatcactgagttattggtagatgctaccactggtttcgatgccttatcattcatggatgggtttttctgggtacaaccaaatcaaaatggcacccaaaaacgaagagctcactgcttttcggacaccaaaaggcatagtttgtaataccgttatgccatttggcttcaagaatgcaggggcaacctaccaaagagcaatgaccataatttttgaaaacatgatgcataatactgccgaatgttatgtcgacgatttagtggtcaaaacaaaagaaatggcaaatcatcttgataatttaaaatgagtctttgacagacttaggcaacacaatctcaagatgaatcctttaaaatgtgcatttggggtaacttcaggaaagttccttgggtttatcgtcagaaatcgaggaattgaaatcgaccccgcaaaaattaaagtaattttggaaatgcctcccccacgtaacttacgtcaactacatggactacaaggaagacttatatatattcgaaggttcatctcaaatctgtctggtagatgtcaacctttttcgagttagatgcagaaaaatatcccattcatttgggatgaggcatgccataattcttttaaaagtattaagaagtacatgttacacccccagtgttgagagctccaatcttatgaaagtcattgatgttatatatcacctcacttgatcgctccttgggagccttgctggcacagaacaatgagggggaaaaagaagttgttctttactacctaagtagaattttagtagaggcagaacaaaactaccctccaattgtgaaagtgtgcttggctctaatttttgtcgtcataaaattacaaaattatttactctcacactttgtgactttagtgtcaaaagctaaccatttaagatacattctatcaaaacccgtgttttttggatgactagccaaatggtcttctgtcagaatttgaaattaattttgtcctgaaaaaagcaatgaaaggacaagctttggctgattttcttgcagcacacccaattccaaatgatgtggagttgcgagaagattttcctgacgaagaagttttcacagttgatacttcatcatggcaattatattttgatgtggcatgaagaagtagtggggcaggtgctagaattgtctttgtgacaccgtcgggaggcatgatacattactctttccatatactagctatatgcaccaataatgtaacaaaatatgaagcattagttatcggccttgaaattgcactcaaaatgaaaatacaatcattggaggtatttgacgatttttttttggttattaaacaaatgagtgagaaatttttcagtcaagcatgagaattgagtcccttattatgataaggctaaatatttgcttgaccaattttaagatataactctaaatcacatccccagatcaaaaaatggtaaagttgatgcatttgctaatttagctgcatcactaacacttcctgaataaatggatatccaaattaccatagggaacgccgtgtattatcccaatctacaaaaagagttgaagaaaaaatacagtcaacttgataactttcctagatagtgcaaataaaatgactggcgtcagccaatcaaagactacatccaaaaaggagtcttgcca

SEQ ID NO: 32077 - DNA, 1937 bp, Cannabis sativa
tttagtaaaagtagaaggagaagaaaagaactagaatgaagaacacttcgaagccgatgtctgtctcttctttgctctctctctctgagtttctctccctaatttgtagtttttagaattaataaatgtgtagcctaagatgtcctatttatagtgcttgtaaagatagatggatccccttagaataaggattctatttatagtattaggaaagatagatgaatccccttagaattaggattctatttatagtattaggaaatatctcactaaaagaaaagataactcatcttttaaaaaaagaaaaaaaaattgcaacactacttgaaaaactatcttttttttttcccgttatctttttatctttttttcttcatcaatttcctgctgccacgactgatagtattttggccataactctctcgatattgctcaaaattaaacgattcaagatgttctagaaacttaagaacgagatctaaaactttcatattgagtgccaagttcaattctgcttttaagatcatcaaaactagaaattaagctctgccttgtaaaactgagctcgcaaacttccacaattttccaccaaaatatgttaaaagccctccaaaagactctaaatgcatgaatagtctttaaaatatcctaaaaaactaaaaccacactaattaataatttaaagaatcaatttaagaatattaatacataaattgattatatttataagacaaatatggactcatcaggccctgatgtgatgaaagccgggcagtggctgacagttattacaagaattttgaattttatgggcatcaccggtaatgatagattggcttgtgccacattccaattctaggaggatgccctggtttggtgggacatggtggccctgactcgggatgttaccgatgttacctgagaacagctccagagttgtttaatgccaagtactacaacgaagtagtcagaagtgcgaagaggaaagaatttacccaattgacccaaaaagagaatatgagtgttaccgagtacacaactcagtttgattgattggctaggttggcctcgggaatggtgccaactgacttcagtaagaaagagaagtacctagatgaattgaacccaaaaattaaacatgaccttatgattaccactgatgacaacaccacctatgctgatatggtgggaaaggcactgcgagctgagggcacagttaagtgcacacaggagtcccaagaaactcaggtttttggtggagcccctactcctcctacctctagctatggtaggggtggtagtgactcgaccaatgaccagaaaagaaaggcactagttgcacccggcggctcatgtaaaaataagagatttcaggggaaccagggtcgaggcaacggtcagggtggttctgaaacctgatatacctacacaaaatgtcccaattttaagaaacatcatctgggtgagtgtagaggatcaggattttcagtgtgcactactacaaaaataccctttagaagctgtttttaaggcctttccgcatcagttttggtaaaattcgctactgatgctgatccaggtgacactgtagggtctaaaataactgaagccataggggtacataaagcgtcagttatttgctaggaaccgacgccatagaggtgtatatggcgtcggttcctagcaaataaccgacaccatatacatccataacaaccgacaccaaagatgtaatgattatttttttcaacttatttagtttaatttatttaaattatatatttattaatttatatattatagtatttaatttaaatttaaattagatatttatttttttaaaaggtaaattaaatattatttaaaataattttacgattttccaaaatccttaatttcatttcatagaaataattaaatattacacaaatattgta

SEQ ID NO: 32078 - DNA, 2197 bp, Cannabis sativa
gtacttgctccaggagccttcaaagtccatcacgtagggtcgcaacatatccttaagtatttgtattaccctctcggactgtccatcagtctaaggatggaaagttattctaaacttcagcttggtacccatggctcgctggagcctttgtcgaaatttcaaggtaaacttcggatccctattcgatataatggacttcagagccacatgtaacctcactatttccttaacatataggtctgcatattgatccactataaaggttattttcactgttcgaaaatgtgtggacttagtaaatcgatccaccacaacccaaatagaatcgtacatccccgcagttctaggtaacccaaccacgaaatccatggtgacatcttcccacttccatttaggaagagtcagaggctgcaacaaccctgcaggtctctggtgttcagccttaatttgttgacaagttaagcatcgagatacaaatgttaccacatctttcttcatgctgcaccactagtaaaagggttttaaatcctgatacattttggtagtgccaggatgcaatgaataaggagtggtatgaccttcctcgagaatctcatttctaagttctacactgcttggaacacaaagtctggttttatacaacaacatcccactacctgacactacaaaatcctttaacttgaccagctaaaacctcctcttggatctttatcattttttgcttagttaactgagcagctttaattctgtataacaaatcagattgtaatgttaaattattaagttttcctacaacaaactcaatgcctaatctgaccatatgatttgctagctgaggtaaaatcttgatcatactatttacttgcccgacaccctttctactcagggcatctgcaaccacattagcttttccgggatggtaaaggatttcacaatcatagtccttgaccaattccaaccactcttgtgattggtgtaaatttcacacttttctccgtagagataatgccgccaaatcttcaaagaaaaaactaccactacaagttctaaatcgtgagttgggtatcactgctcatatttctttaactggtgggaggggtaagcgataacgtgatcagcttgcatcaaaatgcatcctagaccctgtctagatgcatcacagtaaaccaggaacttctctttattagatgatagggccaataccagagttgtgatcaatcattgcttcagttcttgaaagcttgcttcacacttgtctatccacaaaaactgttgattcttttttgttagatctgttaagggcattgggatcttagaaaatccctcaataaatcgatgatagtaaccagccaaacctaaaaaacttctgacttctgtgactgtctttggtcttggccaatccttgatgaattcaatcttccctgaatcaacccaaaaagttgttggagcgttggttagtccaaaagacataaccaaaaattgatagtgcccataattagtgtagaaagcagtctttggaatgtcctcctctaagattctcaactgatgatagcccgatcagagatcaatcttagagaagactgtttttcctgaagctgatcgaacaagtcgtagattctaggtaaagaatacttattcttgatagtcagtttatttagtttttgataatcaatacacatgcatagggatccgtctttcttcttaacaaacaacacgggagctccctagggtgacacactaggtcgtgaaaaccctagcatcccctgaagccaaatcttcaattctttatgttctgctagagtcattctatatggtgctttagaaactggttttgctctaggtactaaattaattacgaaatctatttctcgctacggtggtaagcccaaaagttcatcggggaatacatctaaaaaattcctgaaccactttgatgtcttttagccaaattgaatcaagtcgtgtggtatccaataccactgacaaaaaacctagacacccatcttgtaacaaatctctagctttcaataccgagattattggaatttgggatccctaaattgatcccataaatacaaatgattactcgccctcgggttggaagatcaccatctttcgttaatagtcaatactagtagaatacttggacaactccttattctcaattctgatcgacatagacctaacccaccttttg

SEQ ID NO: 32079 - DNA, 1040 bp, Cannabis sativa
atcaagtttctatcgagacatcttcagatttaacaattaaagacgtgtttaatacacgataattctgccccggtaaaagcgggaaaatcacagctaaatgatttgcaaaatcatacaccgcatttacctttcatgatatgtaatcagatcccacgatttaagggataataactgtgattacattttgatctgccttgtaattaactgccactatgcaatgacaaatagtggcatacaagatcaaagagggggacgaaaaaaaaactcttacgcaagaggttctgaaaaaaaaaatactcagaaatctgaataagattgactcgtagactatgcagaattttaactgcaaaactacgtaaaaaaattcccggtgttcatattttatttttctatagcttttattatttctatgttgaattatcattgtgaggctcaaattcagttaatgaaaatctgcgtcaacagatattatatttgaatgtttatgaattaatatagtcaaggtcctgccatccacctaccaaaagagagaaagtagatttatagagagtagaaattaatgaataaaaaataacccttaactattattaaaagttaaataaaaaattgacgatattagtaaattattaaaatttatgaaaattcataaatatagatatatacatatgtatagtaattatatatagtatagattttttttaaaaaaaatacgtagataaatataaatcatatatagttcatcaaatataattttacatctttaatatattatatattaatcaagttttaaaaaaatttcaataccattattttttttttcattttttttaaatgtgatatggagccaagaaaattattatgtttaaaaaattagatgaataatatgaaaaaattaggaaagaaatatgagaaaatagataaatatttataaatttaataaaaagttaaaaaaaatgagagaattaaaaaaaaaatagtactatttagaatgattttagagcgactaccttatatccctactttatatatatatatatata

SEQ ID NO: 32080 - DNA, 2110 bp, Cannabis sativa
  modified_base (33)..(70): a, c, t, g, unknown or other
  modified_base (510)..(510): a, c, t, g, unknown or other
  modified_base (2017)..(2022): a, c, t, g, unknown or other
gtgtttacttcattattttagaaattcatattnnnnnnnnnnnnnnnnnnnnnnnnnnnnnnnnnnnnnncctggtaaaatatttccaacatacacatcctaagggaaccgtctttctttttcacaaatagaaccggagctcctcagggcgatacactgggtcgggtaaacccaatatcaagcatcccttgaagctattacttaagctccttgagttctgttggagccatcctgcacagagctttagaaacaggttcggctctaggtgcctaatcaatcacaaagtatatttctcgttgtggcggcaatctctacaactcctcgggaaaaatatcgagaaagtctttaataactctgactacctcaggcccaaatgtttcgggtctgctggagtcaatcaccactgctaaaaatcctacacatccattgtgtagtagatccctagcccttaatactgaaataaccaggatatgagacccttgaaccgatccaacataaacaaatggatcntcaccttctggctgaaaagtcaccattttccgcttgcagtctatactagccgaatacttggacagaaaatccatcccacgtatggtgtcaaattctgttaattccagttctataaggtcagcactcaactccctatctttcgatcttaaccggcataaacctaatatgcctattggagataagcaactccccgctaggcattagggttccaaaccctctttccagaaaatcacatagcctactaaaaagatcgattactcgtgtagccacatattagtgtgtagctcccaaatcaaataacacagtataaaaggagttgttaacaggaagctaacttgtcattacagaagtagtggctgcagcattagtttgagcattagcatacaccgaagtaggtacaattttgcttcctgctcttgctcttctttctccgcctaagggcaatctttcttaaaatgcccaatcatgccacattgaaagcatgcttttcggttgcattctctgggatggtgtttcatgcaacgtgggcactcggggtaagaataaccctggcttccaccttttccttgaaaccttcggagctgtttgcttcgtcttaaacccaccactgctgacgtaggtttcctcctctgctcaaccacggagcccctaccacttccaccataatctgaaataaggctagtggtatcctgaccttctgtcataacctcttgatgtcttagaataaattctttagagcttccagtccaaagagcatccttcataactgaatctccttgaaggactgaaggttcacacatcaaaatttttccatataatgattccacttggttaccagacattcgaagctctgctgttgataccgaatcatgaatgactgtcatatgaggtaaatgtactacacgagacctttgttgtttcaacctttgaatctcctcttcatgtcgttggatcatagcttccatttttgcgaacctttgctccaaatccaacatagcctatgacggataacaatcactcccatcagaagtcctctaaggctttcaccttgcttatggggacaacttagactccattctctttaatcgttactagccctgaccacactactcttactctccatattgcaccagatgtccattctataggacaaacctgtcaattagtaagccagtctggtcaggcaacgacccaattgcaaacttactaccacacttatggattttaaggcaatgcaaataaggtaaataaccataatctaatatgcttcctaacatgttttaatattcaaataaatactaaacaagtacgggcttactgaacagtgagccgagctttctttgatgaagattgtacatgtcttgacgagcttcggtagacaaacctggcggctctgataccaaaagtgtaacaccctaatgctaaggcacgctacagtgatttttcaattacagtgctatcgttgataatcaaagaatttacctaaaaatcgtgtcaaattaaaacnnnnnnattaaatattaaactttataactttacaaaatcatttataagtaccaagatcccgtttttaaacttttatacaaaatactcaaaatac

SEQ ID NO: 32081 - DNA, 3260 bp, Cannabis sativa
atcgatatgtttatagtattttccgcattacatatcgttatatatatgctgtatttcatatactatattatagtctaacattgggtgccttccattagatcaatgatttgacttttgcatattccccgtcttcatcaaaaatagggatacaagtacttttgaggatgaaacaacacttcctaggtgccagaaacaaggcatagcacccaagttgacatttttgatcaacatggactgattttgatgatgtttttcaagaactcttataagcatcttctttgttttcaacaaagattaagattcaactattttcggggaccaaacggaacttccaaagggataaaagggaaacttaatgcctaggttgatatattgtcaacttgggttgtttccaatcaagttctcaaaaatgtgttctgggcatttttccatcatcagaaataatgaagatttaggcaaactcggggagaaaatgataatctcgagaccctggaaacaaggctggtgctcaggttgacctggtgttgggcccaacacccaggttgacaatcaacttggtgtgctagtttcgatcattcaaatgccaaatttgatttgatcattgaatctagaatggtccaaaatggggcaagagacctcatactcaagttcaagagcattggaagtatcaaaacaacatcctggaagctccgaaatgagtacccaatgcctaggttgacaaatggtctggtgcgctaggttttgcttatccaatcctcataccgtttcggccgtccgtctagtttttaataataactaagatttatgaagtcagagaagtcaaagtcacaacttcacatttctcatttcgaaaatgggaaattcacttggaaatgaagagtttcgagtctctgattttcgcaaaatatcaacatctccgagaactagtgagtgtcttcgctagaacataaaaacagactaagtgatgcaaatacttagtaggcacatcataaagtacatcccttggatgtttttttgacttacccaaagtccatgttgcgtcatatgtcaacctgggcactgggatgtcaacttgggcactggatgtcagcttgggtggtgggtcatgaactgccttcagtaaaacagtcataactcacttaatattggtggtcttattattgttgacgcggttcaacaactttcattttgaagatatttcaatgctctatcaagtcatgcctcacactttaatcacaattctgaagttatcgatcttccccaaaggagttacgaaaataagctcccaattacccgcagcgggtcccgctgggctctgataaataactatcaatctcacaagttaattttcaccgttagatcatcatctacggtaaaagataaccaacttgtgtttttttatttttatccctaagtttaagggcttccttcacctagaaaaggagaactcccatagttcatttttcacagtcagaaaactatgtcagagcttctctctctagaaattagaactttgacatttagccttttctgtaataccatctcgtgagaaataaaaactcaaagtagacgtagctccattactgtcatgatacaaggagtgaactactataaattattgtgtctctctttacttttacttaataaatacttcattctcgccaatctagtaagcatgtgtggcttaaaaatcttattctaaatttatgagtcaacaattattatttaaacttattcatagttgataaattcatatcttcttattattaataataataaattatcatatgttttaatatgtcgtgtcatgctttttgggcttgtcacgtgtcgtgtttttcgggcttgtcgcgtgtcatacttttcgggctagtttattcgtgcttacgtatcaagtctttcgtattccttgtgtcgtgtcgtgcttaaggacatacttttcttaccgtgtcattttaatttgtaccatcatgttgtgtcgtgcccaaactcgtaatttttcgtgcctagttgtgcttgtgccttcttagctcgtgccggttttgtgccacgtcaaaaagcccgacccatatttacagcacaatcgatatgaaatacagaataatataaatatatcgagtgtatatgtcaacaatgaaagagatcataatgtctctagtcattgatctttaagcttcaatccccaatgtagcttcagattgggaatccagcttccaagctctctcaactctctttacatggaatttgtagttttcacagaatgagagactgagacccctatatttataccattagcgagcaatcagtaaaataaaataaaatcgatttgaatgattttagggtaaataccattttggagcatgtgttttataaaagttactaattggactatttattttgtgaaatgacaaaatgaaccctatattttccaaaaagataaaaataagaccctgagctcaatttttaaaaaaattatctttaatataaccaattttaagacaatttttaacacgaacagatacataaaatgtaaccagttttgtcataatttctctatatcagattattattaggttttattttgacaaaaaatcagttcagaattctatttgtataattttagaaaatattgtgtcatatttttaacaaaacataaagtctaattaatagttcttgcaaaacacaaagtctaaaatagtatttagccataattttatagcaatattataaatattctgatattaaatagaaatattttaatacatggttcttattattctttggggttagtttttgctaccagtctataaatgtatccttttatttcctgatcaataatacaacttagtttctcattctttctgtcaaaccttctttggtaagaagaataatgaatgggatggtactagtgcgttttacgcttcaagaaaaagaaggaaaaggattttctaccaaaagaagaagaataagaaaagaattgaaagaaaaagaaaattatactctgtcattgcttgatacaatagggaaaattatcatttaaaactagggataacttggcaaagtaaaagttaaagaaaaagacatgaacatattgtaatgtagaagacgatccttttcgtgctaatatactctattgaaatgactttttttttttttttcctcgtatataacaaaagaatatcaacatcaacccaattgtaatttagacaattttatttttataaactaaacgatttttttttttttttttttggatagtg

SEQ ID NO: 32082 - DNA, 1427 bp, Cannabis sativa
taattttatacatataaattgtctaacagtactcatccaaaaaaattaagagatctaaacctaataaaaattgagaaaaaaaaaattccactacaaatccaaagaaagaaggcccaaaaaaaaaattaattatagataaaaatatcatatatataattttatttaagttaagctatacaaacaattcaatccttgtaaaaatagaaagaaaaaagcaaaataagccagaaaaaaaaaattaatctataaatttctatctagtaaagatattagaaatttaatattagtagagatagaatttggataagtttagggagaggatttatataagtttagggttataataagtaataaatattagaattgttttctttaaattttagaattgttatggtgagagggagatgattatgtatttatagaagtttatagggttatacggtttatggttatagtttaatttttttttttaaaaattgtatataaatatattttttaattaataattatatagcatacataaaaccaaagacgcgtgatgataattttggaattagaaaaaataaattattaattaatataattaataataataaaatgataaaaaaaatatgagaaaataaataatatttataaatctaataaaaaatttaaaaagagagaaaattaaggagagaagagataaaactatttgaagtgatttcagactgtgtcaccgtttcatacttatcctttatattaatatatagattattgataaatatatacctccatggctagttttatattgagtttatcaagaagaagccttctcatacatatcgatgacttctgtggcttatgaattaaaataagaaatcctaaaataataatatagcacttgaattatatgctcttgagttaaaaagagaaaaatatgagatattttttttaagaaaaaagtaatagtaagttgaactattaatttattataggtattttttaaaaaaacaaaaataaataaatacacttgttgtctgttgtgtgcgattgagtgattaatttttttttaaaaaaataatatgtgataaaatattagaaaaaataataaaataatatttaaaattagaaaaatgagagaattaaggagagaataggaaaaactatttagagtgatttgaggctgccatgtcaccgccccatacttctcctttatgtacatatattgattattatattgccgacgttggttcagagtttgaagatgtacctcacatatggtcttgtaggtcttaaagacctcataattttcctgagcacatttctttgaggtggcccaataatcatcctgaaatgcaaaaagtgtattgtcaacttttgggctctgatactattgatttgggccaagatgcaaaataaccctaaatctaacaataaagttaataaat

SEQ ID NO: 32083 - DNA, 1737 bp, Cannabis sativa
agaaaagaactggttgaagcaatcgatccgggtcgccacaagccgttcttgaagtcctctcctttgtttctaaggctccaattcggaatattaataaataataacgaggtccctttaaaatgagccaagttttctctttaaaattcgtgaaattacaaaactgcccattttttccgtcaagaaggctttgtcgcggctaagctttttcccgccgcgacaaaggattctacccgtcgcgatgggctttggcagaaaagagctttgtacatttttttctcaactttttgatctcttctcctctattcttgtgaatacttcctttaaacattcggggacctaaaacaaaagaatcaagcgtaaaatagccctaaaactagaaacaaaagtcgaaaactaccgaaaaatgcgactcaaaacttagactaaaattagcctaacaaattcccccttcccccaaactagatctttactctcccttgagtaaaactaaaaactaagacaaagaaaaaatgacaggacagataactgagcctccaaataattaaactaccgctgccacctgtgcaacttcaatcatggttaaaccaaattttcattccaacaactctaaacattaactcggatgcacaagctagaaaaaaaaccatgtatagatgcaaaatacatcaatttgaaacatatcacaatcattctactcttaccaacgttccaccaaccaatgttcaatatgcttgcatgacctacctctctctactaatgtcagcaacccctgctctgaatcaaaaggtctttctcggttgaaatgtcatggcttaggtgaaaggtagatgaaacgtcatttcggctacattataccataagcatttaacccaaacaagcacccatataaatccacatttttcaatatttaccaaaagaaacttgtaaaagattgagaatttccactttatgtttccaacatcactttttctaagacttgttactcttttttctttttttctattttgttttgttcttccttttcctttttggatacattccttttgtttttttttcttaaggaattagcacaattttttctttctagtgatgatgaaaatattttttctctacacaactttcctcaatctcccacttctgaaataatacccactcataacacttcatccccccaaacttatttaaaagcttatggcacaataaggtacattgggaattaaagtaaataatggaaacacattagggtcaattaagttgttaaaatttttgaaacatgctaacgctcaactttgggtatactaaggacgaaattttactggtaagcttgaaaggccaatcggtccaaagaaaaatgcctaaatcattttccaattaacagtcatcaaggattttagcttcaaggaggtaagtcaagcaagttctattcgatgtcaagcaaacattccacaaacccaagtagaacaaaagtgatactatccaaaaatcaataattcacatctatatagcaaaaaaatttcacaaggcatccaattcaatccaaagagttattgaattaagcagacgatttaaatttcaatccatcatacaaataaacaacatcagttcaatcaatatattatcattggctcaactatcaacacatggaaacttaaaactaaaaactaaacaatctaacctactaaaaacaaagacattgaaaacgtaaaaaattttaaatccctccccccaaactaaaga

SEQ ID NO: 32084 - DNA, 1368 bp, Cannabis sativa
agagctcaagtcacacttgccagtttagggaatcgacctacctcaaggagttggataaaatacataagttcggttgctagaccctggacctaagtcacagtggatgcattaaatgtggcttggagaaaacatttgcgagtgatcttgaaaacacgtgtcaaaggctttaaacccattattatgtgattatgcactgtcctgttatccaaatttgggaacttgtgcaagtaatgctcatacactcacgacaatggtaaccttttcaccatttttatggggttataaacactccagctatattctgagaaatgggtcgaaaaaaaatagtgtaaacaccctctgtaaagaactaatatatatatatatatatatatagttgtgatttgtggactacggttcattaacgcccaaaccacgtaaaaattctttgcattaaatctcttttaatcattaaaacaactctaattaatagtttccaaaaatcttggttgaccttttagtgctttcatttagagctgtaggaattattccatagaaggaatatcataaatagattcttagtgtgatggtgttgaccaaaaaccacacacatcgaccacatccaccttaaggtcttgtgggtccaggtgaagaagaagtggcttcacgagtagatgtggaagagcaagatgaaactgaagatctcgagtatgaggaaaaccaagaagagtatgaggtgtatgatgatagtagctatactgaactgatggtattaagacaaaaagttgttgaccatgaaactaagttggtggagcaaagggagcaaacagaaggatgcatgagataatgatcgccatgcaaagagcgatggaaatcacaggcattcacatgcatgtgtgacctattggacaagacaagacgagagaggagtctccgcaaccatcgcaaaatcagaggcacaagaatcgggagccaagtcctatccgatacctttctgggagtcccccaaaggcaaaccctacaacaattttggaaaggaatagaaatgctcaagatccatgtaaggttcgattcgatctccctaaagggaaaggtccctagaggggtagatttcctaagggaaaggatggtccttaggacttaggagaccggaaaagcgcatctatgcatcaagagacggtggagagaaagggaaaaagccaaaaggatcctctgtttgacttaagacaaaagctcaatgccaagcacggtgacctcagagatcacttagagcgaaagaagaaaaccgcaccagtctcaaataacaccttgaatgaagaagtcttggccgaactcgctattctttggaaggatatagctaaagtttctcgaagacaaagggtagatgat

SEQ ID NO: 32085 - DNA, 1195 bp, Cannabis sativa
gtaaaataatttccaacacataacggataaggagatcttttaacactgacgtttcccttttaccggcgtgattcctcgccggtaaaacacagttttaccggcgcatttagtctacgcgccggtaaaaagtcttttaccgaccaagattctctgacatgctttgccggcgcagtattgtgccgacgaagctttaacggcgcattcagggcacttttgccggatttttgcccccgcaaaagtagggtttcttgtagtgtattcttaatagaatcaaaacaaaagaaaagttgcagtatattagacttgagaattctaaatgttttctttgcaacactgaagatgagaccgtgcttcacttattttttgagtgttctttctccttggaatgcttggaaaaggcgaaatcatggctgaattggggaatgactgctactaccttagaaagaattgtaaggtggataaggagggaaaaattaagcaaggtgaagaaggcaattttagttgctgtcattgtagccctcgtttacgaaatatggcgcacaagaaacaatattttatagtagaattctaatacaagtgtagcgattgtaattgctaaagtgaaaacatagtgaaaaaaaaaattacatgtatatggccaaaaaaaaaaaacaactagaaatgagaaagaattatgtaaagttttatagatatttagattctccttacttggagaatctactaggttgtataaaaagttttaagcaatacacatatacgattcataaaaacaaatatgtactacaaagttatgaaagtagttgtagaaagtcaattaacataggactacagtttgattttatttgtctcgtttacggtatctcaaacctcatattgaagtcacgagggacttcataaattcccttaattattttatatttatatattataggcagattcatttttggaattattacataaacaatataattaaattgatattttatttacaaaaatactttcataaggtaaagtcaacatttataccttttatgtaatattaattaccaaaatacaacttacactatcatcacttacacaatcagacggtagttgcagagtggttgttgcgtggttgcgcggtagttacatcagacgatggttgcaaggtggttgctaggtggttggctgaaagttgcatcagacgaaggtttca

SEQ ID NO: 32086 - DNA, 1910 bp, Cannabis sativa
  modified_base (1460)..(1463): a, c, t, g, unknown or other
ggatcaggctaagcagcatctcgcaagaaatgacattttccttctataatttcttgcaagaagcatctgtggcgactagcaatgtcatcttggtgggttttcactagctgttccctaatttttgcaacatttatctctagtttggatttgggttctaaaattctgggtttatatgggatggcaagttcagtgggacactctatttctaaatattctggacgataaacttctgaacaagattgggacattactgcaaagagaaagcaatcccaattccgggaagaagtttatcaaactagaagttggtaaatttgagagacccaaaaacctacgttctgcctaaacattaaaatttacccagatacaattcaaccctaaaattgataataccaaatgaggcgacaaaggtgctaactaagaaactagtgatcaaacccagaaacgtaaaattaaaagcgtgtaaaaagataaagagagaaatcacttactgtttgaaagtcgatttttggaacgatgaatggtcctacaatcaacgaaacaacgaacagcgtgatgatccctctgaatgctatgcttaaggtcaaaaataaaatcaaatcagacgaaactcgcaagaagaatgtcaaagacaaagctggcatgcaaggtttcgaaataatctgggtatagttttttgcagaaaagctcgaaaaattttcaaaatttttgaattggcaaaggtaatgaaaggtggttccttttttcattttatactcttgggttgatctccgtcagattaaggtgacaatttctccaacggatgaaattttgaaaaggaagtgaaagatggttattaaatgctgatgcacctcgaaaccataaaatcaccaaaattagaggacatgcattttttcaaaatagattatggcaaaaataccctctgtaatcatttaaaaagtactttttcttgaaaaaaaaactttttaaggggcaattgttatactttttcagaggatgacacgtgtcaatcttggagaatacgaatcaaggaatataatgacaattatatttaaggatattaaaatagaataactcattaaatttggagattgatagagcatatctataactcactgactgtaaagtcttaatcgagacgaggatgtacgaactattgattcacgcattgatgagaaacaatttcgtgtcagaagacacaatcgtaaggatgacatcagtaatgcatagcaaggcatcaaccttgctatgtatgaaatgtgatgacaatacatgtggattgttagaacatttagcgtataatatacattgtactaactaagtatcacagcttgaagaacctaaatgacggatagcgaggcatctatctcgctatagaaaggcatactcatggtaccttcactaatcagctttagacatctttcaatgagatccactgctctgtcgagtcagctctctcagannnnagctgacattcaaatgatgttgactactgaagttcaccttgtcaccaagaactgtgattatcagatggagcgttatgtcttcaatcgcagaaatgacgagatctacattatcaacctcagaaagacatgagagaaggtccagcttgctgtcagggttagtgttgctattcaagtccccaataagatgccccagcgagatgcactttacaatgcatctgaatccacatcaacattgacccagtaaaagcggataaatcataaccgtaaaatttttaattaataaccgtattaatttatgtggtttgtaaataaagttcacaattttcgggaaatattatttgggattcgtatctgattatgatgaattgccaccctatgttactataaataggggcagaatgtactgaaaaagagacgaaaaattcttgtgtaatgaccgctctagta

SEQ ID NO: 32087 - DNA, 2484 bp, Cannabis sativa
  modified_base (824)..(828): a, c, t, g, unknown or other
cgctaataatagtattagcggtgggcattagcagcggggtccccccgccgctaatgaattttaaaaataaaaaaaaatgtattaattaatatataaataataataatataaataataaaaatataaataattatttaaaaatatataaataataatttaaatataattaaactaattacaaatattataatttaactctaataatatttattaataatttaaaaatatctcaaataactcaacaatattcaacgttaatactattaaaatgtctcaaaattaaactaaattattaaaaattaaacataaactgattattccataaaatcttcattaaggtctctgtaatgaccgcataagtttaatatgttggattattaaataatttgggtttaattatgagattgaattattaattatgatttacacatttgtagaggtttattataattcagtatgtattaattatgctatgtatgagtttcttattttctgtatttgtacttggtagcagtggaatgcgacgttggctattagagaatcacattttcatatggttcaaaattttattgacagtggggcatcattgttagacattggaaatatcaggaaattagcgggatttgaaaatgaccaaattacccttggaggcccttaaacctttgaattgtgtcaaggagcaaaatagtctttttgcttagaaattcttgtcttttgtgggctttataactctaaaattgaattaggtttaataaataattaagttattatttatttagaaaagttgagaaataacctagaaagatcacctctctctctctctnnnnntctctctctctctctctcgtcttcaagaaccagcaggagctgggatgttctcagctcaattcagtgaggtttagctgtatttggaagagtttcaatccaaggtatcacctcttgactctcttctttgttttttttcttgtgaaattaaggttttaaggcatgaattcttaggttttagtcctatagtgatgtttggtgcttaggtttgtgttctgaagttgagttaggttgatttaagttgaattatgccatgtttgtagattttggtggcacttgagcaaggtttgagtttaagaactcaaactttgcactttaatggtgaattaggtttctttatttgaaactgaggtttattgcttgaattttgttcattatggtatatacaggtattttggaagctattgtggcgtttggagttgaattgaagtgttggggatgtttttgggtgttcctgcactgaattggtcgactggttcaggggtacctgtaagaaccagtcgaccggttggtctcgaggaaaccccattgaatcaaaattctgattggggaaccggtctaccaattgggacattttatgaaaccctaattttcccgtttttgtgatatttagagtattatcatgttatccatcaatagggataattctagttttggttttaagtcctgagaactgttttagcatgtctctcatcaaagttatgaatattgtgatatagggccctgtaaagtgtcgagaagctattccactcaggctgaccgacacacctgggcatggaaaacgaggtaagactagcatagaacatattatatatgcatgctgtgtttaagattgtatatgttttgggtgatatcatagcggcacaactatagtttcagttcggcagtacaggcatcgtactggttaagagtgatatgcaccccaaagagtattaattgccgctatcatagcggcacaaccattgtgtcggttcgacagtacgggcatagtactggttaagagtgatatcatggccaattgtactcttgggtgctattgatgttatcataacggtacgaacgtagtgccggtcctgcagtgcgatcatagtgctggtagtgggtgatatcatggtcaatatcactaaccattaagaacgttctcaatcttttggttagtcttgtgaataggtgtatgggtgcctagacacaagtcgattttataattttttatatgcatatcttactgagtttgtcgactcatctgttgctaccatgtgtaggtaagaattaagcttggctggaggagcagtgagttggggctcggcaaggattgtacatatcgcggcagtgcaacctggaggatttcgatcttatcacattttaagttttattttggtattgccctgtagtttgtaaaaaaaatatattatgtaactttatatattgaatatgtattttcaacaacgattttaaactcgggatcctgacttacgagattttataaatataataaaataagtttaaatctgaattagtcagtttttaaatactggcgttacaatttcggtatcagaacctgttacgaaattgtaaaacaatacgcaagtggacgtaatcaagtagtaaactcacacaagtgaggtcgaaccacagggaattggattaagaactactaaa

SEQ ID NO: 32088 - DNA, 1195 bp, Cannabis sativa
acaaaagaagaggctgcacgactcttgtctgaggtacatgaaggattctgtggtaaccatgtggtgagataaagtttatcgaagaaaatactaagggaaggatatctctggtcgaccatgatggaaaattaaaaggtctatgtaatgaaatgtgataaatgctagagatttttgaagatccccgtgcatcccccaacgagctaatacaaatccaagggaagagtacaatagatctgatcggatagttaccaaaaggagggcagagtacaatatgcagttagcacagtggattatttcatgaagtggacagaggtcgagcccttggcaacgataacattaagaaagtgttggattttgtagtaaaaaacatcatatgttggtttgggcttttgcacaatgttgtctcggacaatggaaaatagtttaatagcctgatgttcagagatttctgtgcagcatatggaatcataaatcatttctccgtagtgccacatcctcaaacaaatgggcaagtcaaagtaatcaacaagacagtcaaagagaccatgaaaaaatggcttgaaggagctaaaggaaatctgtcagaagaactaccgaagtattgtggtcgtacagaataacaaaaagaacaacaacctgacaaacaccattctctatggcttatggtgatgaagtaatattgcccgtagagttagaacctctgtcacccaggagactaacctataatcaagaagctaatcatgccctcctagcagaatcacttgaaaaagaaaaaagagcctcagcagaccttaagctagtagatcatctgcagaaggtggctcaatactttaacaagcaagtgacggcaaggaaattctttgtgggagatatgacccttagaagagtgttcttgaacacaaaagactgcatggctggcataatcgaacctaacagggaaggtccatatcaagtaattgcagtcacagactctagagcatacaaacttggtcggtatgaaaaaaagatggaactcgttctagtaccaaggtattggaacggagaacatttgagaaaatactaccagtaagtgtacaaggtctgatgacccccctttaagtacacgatgctcaaacatctactcttaattagattgtaatacccgaaattaagaaaaggattagcaaaaccctaattagataattatgaataattg

SEQ ID NO: 32089 - DNA, 2929 bp, Cannabis sativa
  modified_base (1293)..(1301): a, c, t, g, unknown or other
gtaaaacataacaaatatgagggaagaaggtcgcttatcctcaatgtaaattaagcaaaaaaatcagtgattaggttttattttgaaatttagtaattgttttttaagagtttttagcagccgaattctcttaattatcgttttatttgtatttaattttttaagcttaaattttagccgtaaacttttttaaacaattgaaccgttagcaaatttaaagtattatatattcttttttacagttaactgtcactgtagactatttatgcgtatactcttgtacatgtatcatgtttatattagtataccttatattatttcaaattttattttaaaattaaataaacttataattttttatatttttttaaataataaaaataataataggtatattaatataaacatgtcacgtatacaagagtgtacacatatttagtcaagaaggataagtgtcagtggaataatagttgagagggcttaaccgcaaaaaaaactcttttttaaaatactattagtgattgcttcaacactatttagccatataagagtactcccaactaggggcggaaccacatacaccccaagaaggccctaagcatatatatatatatataaataatcatattaaaatatataaaatgatataaatgcatgatttttgataatatatatatttttaatatgtatattaatgtatgtcctacaattatatacaataaaataataattgtattattattattattttactataattaatttaacttgttttaatttaaaaatacatttagtaaattatttatttaataatagtaaaaataactaattatattattctcaatatgaattttttttccttaagaaattacatatccttattaattttgataatattaaattgaacctcgtcaaattttataataccactcgtattttattttaaatttaattatttaattatgttttaaaatattgtgtaaaatatttataaaatttaataataataatattttctacaattgacacacatccttaaaatgttctttagttatcgaaatttaaatttattatacattacgctattcgatattggcccgcccaactatttagttctgggtctgcccctgctcccaacccaacaatttctctactctattatttaaaatacattattaaaaatctactttctctattttatagcacacttttacattacatcatatatcaacttcattaaaatatatcaccaaaatctcacttttttttaaaattttaatatattttatttannnnnnnnntataatattaatatatacacataactccatataaaaataattattaaaatctaaaataattaataaaatatgtttagaacaataaatattattttataaatattaaacataaatagtaaattttaaagaaattttaaaataaagaaaaaatttaaaacatctattgtaatatgtttctagtatggttctttaaatattttaaaactctttatttttattttagagaaagtgttagagtatctgcaatggtacacattttactaaattggtgtgaaatttttacaccattttactccaatgacataccaaattatgcaccaaattggtgtgcaccaaattctacattattaatagtgttggattttgaatctacaccaatttggtgtacactttttttttttttttttgcattctaactcttatttaattttattttaaaatataatcttacattttagacctcaagtttgaatttatcacaaaaataataattaatttaaaatactaacatgtttgcaaatacaaaataaataaaaaatactaatactaataaaataaaaacaacataacactaaattataaaactaaaaataataacattaaataaaatcctttcaaaaaaaaaaaacattaaataaaataataatttaatagttaaattgatcacttgtgaatcttgactatatggactttaaatattttgagaatcatggtattcatgtttgatattattggtaatctctgttttgtataatcatttttggatcgtttaaaaatggttgtatatattaggatcagctataaaacttcaataagatttttttaaaaaaatatttagtgtttaattaatttaataaatatttattttactaaattattttaaggattttaaattcttattagtatagccatgatataattcttactaattattttgttaaactagctatttttggttttaatgtaaaaaatataaaatatgagatcattcaagtaaaatatatttatttggtagagtatttaatatgatatttgatgtgaaaattattaaagttgttgtaccaaaaattaaaaatttttacactaaattagtgtagattccacactaaattagtgtaaccattaaggtgaagtgatccttttataaacaatattattgtaggggatatttgacactaaatttgtatcaaattggatcatgtcactttattttcatgaggagaatctacattcttttttttttttatatactttctgagtaaagaatctacctattctttggcaaagcttaatttgcacaactcatatatcaaaccaacagagcaatctaaatcgtaatcaaaatctatatagaattctccataaaaaccaccagctaaatatttacaaaaattctattataacttaagtattattaccgctaaaaattaaatttaggtatttatttacaatcaagagttaaacttagatatttacactgtaaattactcttatattattattatctaaaaaaataaaaaaatattttttcaaaaacgatgaaaagtattacggtaattagattaaaattatagttaacaataaattttgaatattattatttgttttttttttttatataaaagaaa

SEQ ID NO: 32090 - DNA, 4370 bp, Cannabis sativa
agcttttcatttagtgtttggattttaattttaaaagaacttcttctccatttgaagagcttttataagtgtttggtagtaaaaaaatatgaaagctcttacaaataatatatatcaaatttaataataataataataatataattctttttcttgtttaaaaaaattaatcttaaaaaataaaataaaaatatataagcgtgccaatgggtttgtgaagaagaatagaatggagattattttggtgagtcttcatggattgactccaagttaatgatgccaccaccattatttttgcaagagaatctgtgtttgtaacattaattaacaaataatgagattttaatgagattttaatatttttaaaaaaaaaaaaaaaagactttaacgtaacaataaggaaaaaaataaaaaattcaaaaaattaattatttttttacagtattattttttattggcggaagactattaggtttttattatgagaaaaatatgaaatgatctggtgtaatataacaatcaagaatgtagtttaattatttttttagaaaaaaaagggtaaattaggtattataaaagattcattaaactaaaaaatagttttccctgtttttttagaagcccttcctaaaaaagctaaaagctagtgagtcattgcttctctaaaaagtctttttaaatcaaaaaaagctcttctcatattttatccaaacatatctaaaaatagctttgagatttcaaaagctcttccaaagccatgccaaacaagcccacagccctgcccctctcacatatataggggtttttataaaaatattagatttgggtaaaagtttacaattttactgtcacacgaattttttttacaaaattactgtctttttataaaataaccgtaagagacaactaaaaaataaccgtagaataactgtgaaaaattaacacagtataaaatttacatagtgcttttgaaaaataacacaatatttttttaaaaaaattatgccctgtagtgaaaaagtaaagaaaaaaaggaaattttattgaaaaagtattttagtatgtggtgtaaaaattttacatatatatcatctttatttttcacttttagaaacatcatgttttgaaactgcacactttcaaaagggtgaagttataggtccccacttatgctaatcatgcatgattttttttttttttttttgttggaatcatgcatgaaatcgatttcaatatgtttggtaaatccattataaatcatgataaatgggttacatatatagtagtatatttataagctgtatacaaccataaatcattaaattatcttcaagcaacaatgtgtgttaaaataacttattcattactcatggttatgatggtaaagccaataactgtaattgaaaatatttatgagacaattattctaaaaaagataagcagaattgttagaataaaatagaaaaataagaagaagatatagcagtagatgtaggtttttaaaagtgtaactttaattaagataaaatagtaagcccaaaatttacatttgaagagtttttggagccagtctaaactaactcaaagtctagtcttaatgcccttctcgctagattatggccaatacacttacaatagttttagaatcaatttcattttcaacatataaaattggaaaggaagtgattaagcaccaattgagaagacattggtgtagtttggtttctctacaattccactaaatttaataaccttttccctactagccctaataaaaaaacacacacacaaatatttataaaatgagaagtgaaatattcatcctctcacgtgaaatgctaaaaagtacacatggtgcttagcattattgtaaaatataatattactattggtgcaactcaatatcaggttccacttactttattaataaatattataaaaaatcgctaactataatgctaggcaccatgagtgcatcatggcaatgctctcctctcacatgagcattgctatgaggcactcagggtgcttaacaccacggtaaaatatcgctctataattgattagtgattttccataatatttaataaaataaaataagtggaattcaatgttaaattagatcaataataatattaggcactatgagtaccttttaatatttttcactctgttcaattttagggttgttttctaaaatgtaaaagttgtttcttaaatgttttttttccatctttggaattggatcccaatttatattagtttctccaagtcaattaacgtatatcatatatttctataagagaataaaataaaattaacgtatacgatatctaaccaattagagcacgtacacacaatttcacagaattatttgaaatttgaatagttatatttttttaatttattttatatatatttatatgatggtgtatatgacaattatttaatggcttgttagctacaccattctattgtattgtatagtgttgtattgaattgtattgtattataatgttagtattttttttgaaagagatatatcagtaatatttaatattatactgtgtttggtattaatttgtataatatattttcaataatttcgaccccaacactgattccgggtcagattgggggtctggatgcatatgtccggggtccgagagctaggtttggagtccaggtccagtccagggtttgggttggatttgggttagagtcccgagtttcgagtccatgtccaagtcccgggtcggggtctgggatccgagtcagagattgggcttgatcccgaattctttgtaaatattattatacaagttattataaactatttgttatgtattaaataatacaacttatattatattaaattttttatcgcaataattaatacaatacattattattttattcaaaaatagagttaattattatttaatataatacgacttttacactatctaccaaacgagtcctaagatatcacaacacaaaagagagttcaaacgatttattaaataaaaaaaataaattttttaaattttacttttgacgtgttaaattattttaaaatttttaaaaatataatatatatttcaaataattataatatacacagttatataaaaaaatttaaaactaaaactatctcgataaaaataggtatcaacatatatattttttatataagaatgaactgtagaatttttcttaattatatatcttatgagaaaaattatatgttctttattaagttggttttagataatttaatttatgggagcgaaaattttgactaattacacaaaaatgttattttttgttaattgagttcctgaacttaaattcaacaaaactcttgttgactcgtccaaatagcttacttaataagtttataagtgtatccataaaaatataatatgattattgtcatttgtcactagtagtatattatatttatatgtaagaaataatctaatcttcctactaaaaagaagaagaaaaaaaagtggtcaatagtttagactgaataaaattaattatactttaaccaaaaccagtattacctaactatatactgtcatcatactacatactttataactgtcacatttacagggtgttaaaataacaataaatacgatcacgaagggtggtaagtagtaactacgaaattgaataaaatgcaaatataaaaccaataatagcataaatgtattaataaataaataaataaatttataattaggagtagatatatgatggaataggtagcatgtgcaacatattgagcctaaaaaggccagcaaagcgtgacagacatacccaataaggactgacttttatggaaaattattaaccattttgtgagttggtctgctcacatctcactttattagatttcatatcaagtttttaataaactcttcctttttcttttactgtttatattgcatggtttgtatacttatatatagttgttaatttatctatttagacgttatatatgtaggtcaatagagtcatcaagtttattttgtttacacttttttaataagaatagtagtggtctaatttaattgagcattacataaaaactataagaactatattatatattgatcatattattaatttaacatggcatagcttcaaaatcggacagcctttttcttaacaaaaaatgggacagcctttcttttaattttttgttcttataatcaattatttaagaggaagaaaaaaacatggtagatccaataattttaaacatcttatcaattttaattaagggtttttttatttttacactttatttttttttattttttattttttattttttatttttttgcatttttacg

SEQ ID NO: 32091 - DNA, 1526 bp, Cannabis sativa
  modified_base (1130)..(1136): a, c, t, g, unknown or other
gtaatgggttttatttagggcacaaatactgatggccatgtcagtataaatactgaaatgcaaaataattactgaaaacagaaaaaacttaaaaatctcgcttactgaaatttcagtgttttgcaagttttaaaaaaagcaatctttcgattgcttttgaggtaaataatatatcaattagttactttttattaaaaaaaattatttcaaaataatttttttctcatacacatttggttgcttattttaatcaattactttaaaactataattttataattttataatttttaatttttaggctatattatattatttaagatactttaaggttatattattttagtaattttaaactatactttgagttgtgagaaacatatatattttttaacataaaaaaagataaacaaggtaaaactaatatttttcattcttttataaattattaacaaagaagtaacttaaaattatatttgaacaaaactagtatatcaactaatttatgagttactataataaatattataatgttagatttgttttttaatattatacttaaaattgattttatttacaaaaattcaaaattataattaaaaaaatttgagaatacaatttgctatttaataacttttaaattaaaaaaatatatatattttagtaaattataaattttgttgttataataaatcttatttaattaaattttagttaactagatacattaaggtaggagtataatgataattttgtggttggcgttaataaaattattttaggtggaagtgagtagtgtgttttgtgtgtaagctataaaatagtgacacacaagcagtgcacaagtataaattaaagcatgtgacaatcattaaaagtatcacatgttttagaaattaaaaagttgtctaatatattaagaggtgttcattggatcacaaatatttttaagcctatctagatccgatccaatcatatattggatgttagattttatcatccgatccgatccaatcaatttcagtcatccaatcgatcgaacattctttggatgttggattggatcggttctatccattggatgtattttatatatatttatttctttaatttgagtttatctaatattnnnnnnntagtattttttggatcggatcagatccatccaatattttaggtccagtatgtattggattagactggatctatccaatccaagtaaaaaagagtaaaattttaatgttaattttcacacctacatatagatttgacgtataacaatataaaatctaataactcatccaaactaaatgaaaatacaaataagttcgattggatgttagatgtattgggtttttagataccccatctaccatccaatctgatccaattggatattttaaaataacattcagtctgatccgatcataattagatatctaatgtttagtggtcggttataattagatcggtcagttctcattggattggatcgatttacacacaccactaattaagacaacaaa

SEQ ID NO: 32092 - DNA, 1810 bp, Cannabis sativa
attttctatataataattccttatttaattttggatttaaaatttaaattcaaatatccataactatattaagaaaaatagtgtcttttttttaatcagaaaaagagtgtcttaatctcaattaaaataaaaataattattattttaagacaaaacatatagtaataataaatttgtcttaaataaagtgtttatttaagaataaattaattaaaaatattttaattaatttatggttggtaaaattatcttaaataaatatatttatttaagaataaattaattatattgttttaattaattaaaagggtttaagagaggtcataaatataaatatttaagaataattaattaaaaatattttaatcaattttaaggcctacaacgattctacaaaattataaaaatgaccttgcaacgatagagagaaggatttgtaatttaatttctaatttttctaaagagttgtaaaattaaaatactcaaattttattcggttcatcatcattgtttatttattgcttttaaataaatcttcattaatagtttattaataatatgctcatgcattagtgaataacatggcatacatacaaattctacatagttatattatcatgcatctcatagtagaaacatgatatattaggattgtcctatgtatttatgtatttatcatttttgaaaccgaaagtatgtaaactgacaaagattaatttagaattaatttggtagttcaaaattaacctcttaatttaaaataattttaaattatgaattaaaaaggttttgatttagatttaataattgtgatggaaaatttatttataatataaagcttttattataaataaattaatgataattattaaagtggttaatatgtattaattctgaaaattaataaaatagagagtgggagaaggagtacatgtcaatgtaacctatggtctccattattggtcaacaccgaaggaatatagactagcctcgtgacgactttgctttcctccccttacgaaaggtatttatctatattattcttcaaggttgatctcttgactaatataggaggaagtgatgtattttagtacgataccgaccctacgactggaatataaaataatgggttacactcacaaagtgtaactgagcttccatgtggttagttgttagcttgaccaaatagtggtacattatattttaaagaagaaatatgtgatatataagtttcaaaattataaagatgggatcagtctcataggctcaatgaaattgattcgataccaaccctacgacgacgaacaattgtcaaagagttttattgtataataacttaaataacattctatgtgttttacctgtatgcgctcatgcatcacgtttacaatcattccaaaataatatttataattcaagtatattcattatgttatctctatttatttttaatcatgtttactaagaaaaattcccttaatgctttactagcaattaaaaaactggatggtaaaaattttcttaagtggaaatctaatatgaatttgatgctagtttgtgagaactacacatttgtccttattgaggagtgtctttgtataaattcatgcattacacatgattgagctaatacataagacagagacacatgggtctatcgtagataagatgattcaagtgagcattattcttgagtcgctcactcattgcttcaaagtattcaaataaaaaaaatataatttaataaataaatttgaatttaaataattaattaaataaaacttttattgagtttatttaatacaccgta

SEQ ID NO: 32093 - DNA, 3490 bp, Cannabis sativa
atccctaacatcatctccttcaatcatcttcaactcatataattatttctttaaatatagtctatttattagggattttgacatataaaggttttctaacttttttccataactcagatggacatgcttcattcatacactatactttgatttaggagccaaaattaagcaaatagtgcttactgcttttgcttgcaactcctcccaaacttcatcagtcatactcttaggtttctttccctagagtgtctttaagagcccttgttgtaccaacacatctttcactgtgctctgccagatactaaaattattcttcccatcaaaaagctcgatctcaaattttatggaagacattatctttgacatttttggtgtagcctgaaccttggctctgataccacttgttgggaaaaataataaacttcaagcgtagcaaaaaaaattaaagaaacgaatcaaagaaatttacccagtttggtaaaattaccaaacccataaagagagatatatttcacttataactcataattacacactcaatatctcaatgtcttcaccctaatcccaatacacccttgcttctttctcactctacactacaaactcacactcaattttcttttcacaactcactcttcttctcacacacctcctctctcacacacaaaaaacatatttataaagttacaaaacttggacatcaagagaacttagggaccaagatattttaaagcttcctctagaagactctttaaaacttggtcgccaagacgttccttctcacattcgcttgttggaccatcggacatcatctatctccactccaggtatgatattgtccgctttcggcctaagccctcacgattttattcttgggcatcttcccaaaaggcctcataccattggaaatattgtctatccttatatacccatgatctttcttatttctagccaatgtagcactttagttgcatacctaacaattctcccctcaaacaaaggaccacatagcattccctcaagcgatcttccatctttcaccgttgctatcaccaaacgtaacacgctgcctaaccttcattattaggaaaactttcgacataaggcaccaaacacagatctccatcttgtatcaccgtaatcactaacgagacacgctacttgactatcacaatatcaagtagactttcgatacaaggcaccatacaaatcttcaattgtgaggttacatcgaggctcatcacctttgtttgacatttagaaaattcattcacatagctaatgttgggatccagctctgataccacttgtaaaggactgttggacatcatctctctctactctaagtatgttattgtccgctttgggcctaagccctcgtagttttgttcttgggcacattcccaaaagggctcatactaataaaaaaatattatccatccttatatacctataatcattctcttagccaatatggggtttttgttgcacacccaacattactaacacatcactttttaaaataattctatacatcatcattaaaaaaaaaaaaaccaaaatacaaaaaaaataaaacattaagaataaaaaaatactttgtccattgaacttttgttttaagaaatcgtacttcctcacctattatcgatgtatatatttcccctgaattttgaacgttaataatacataacaatccatttgggtatttcaaaggaagccattcttaaacgaggagtgctatcatcaacttcatattacgacttcttagtcaatctctgtgcttgaaaacacatgttagaattatttttttttaatttttttcatggcaattttcattatagttacaacatcatccctgtaaatttttgaatagtttacagtgcttaaaataagtttgaaatttttagaacatatgagtgttaaactgaaatatcaagaaatttgtttttagtagtgtaaactattcgaagttttttaaaaatttatagggatgatatcgtaactataataaatatcactatgaaaaaaagtgaaaaaaaaaacatattctggcatacaatttcgaacatgaaaattgactaagaaattgtaatataggaggttacaattagtatttctctttttaaattttaaactggtctgttctttcttatccaaacatctttattatctaaaagaattggttgataataattatttttaacaaaacacttttttaaatatttagttcttaaaaattatttagttaatttaaaattatgacaactttactgtttttatttttataatctttcaaaatattttttttaaaattaggtttgaattgtgttacaaaaaaaattatgtacttttatttttcaatttatgttttttaataaaagaaaggtcgcagtggtaacaaatcaaaaatataaaattgctaattatttaatagaagaaagtataatagaaatcccatattttactaacaattataggggatatttaacattggtaataattctgggcttgaatctttttggtcaaactataagtttaggggcaaaatacatattaatttattgaaacatttaaaatataaaataaaaaaaattgtagtttggtggcattattttaaatttttttataattgcagtggatttgaatcattgttgtcctctgctacattagctgctcactaatcatcctagttggcaaatgacagttaatttagttggagctaaaccagtcaagtcaagcttctacaaccaatataagaggcaaccaccctttatgatcaatcaaggcttttaattcaattgtacatagattcatacagttagagagtttcattttttagagattagagggatgttaaagtctccctcatgtttttgattgaggggactcaagtgaggttcaattgtaattgtccttgtactgttttttctatacaaatgtacttcatcaattcgagatattctctttgtattaccaaattgatcatcaaggaataaagtggctgtgagttttgctattttttctctaagtgttcattgaaagttctatgttctttactcttattttatctccgattttctggtttatattttcttgtctttgttgtcattgtttgaattaaatcttgccactattagttgagtaacagtgagaattaagggtgagtttgattcaccacaagtggtatcagagaaatgtgtcaagaggatgtttcaagatccacatttaaacctccaagattgatcttcaaacattaagaaactgttggagttaaatggttgctgcaagattcgaggtggataagtttaatggaacaaatgaatttagtttatggaggattgagatgaaagcttccttgtgcatcagggaattcatgaagctcttgatgaagaggctatgaagctggttgaagacaagaagaagaagctggaaatcgaactgaaggcacacagtgccattcttcttagtcttagggatgaggtactta

SEQ ID NO: 32094 - DNA, 1376 bp, Cannabis sativa
tttagatctatggttatacacttataattatatgtaatatgtttatctatggaattgaatcttgttgttgcatattttatgagtgatatagaaactaacaacaaaatctaagaagagaagcttcgaccttgttggtaggtttctgaatagtgagctaagggagctctccttttataggtcaaggaggcccacaaaaataggaaaaaaaaataaaaataagatatttttgacggttgatgactatctaatggtgaaaattagttattggtagtgatagccatttttgggatcccaacaggtctcgctgcaggtaacacagagcttatttttgtaactcttttattggtgaatttttatgacaatagctttagaattaggtctagagtgtgagaaatgatttgatagagcattgaattagcttcgaaacgcaagttgaatcgggtcaattagatgagaatttagtgggttacaactgttttattagaggcaattcatgatccagcccccatgttaacatatgacgtcaatctggatgccgggtaagtgtaaaaacgtccaagggatgtactttcagatgcctaagtaatattttgacatcacatagtctatttatatattctagtaaagttggccactagttctcaaagatgttgctgttttgtggaaatgggagactcgaaactcttcatttttgggtgagctggaaaggagaaatgtgaagttgtaaattgacttatctgacttcatagatatttgctattttgaaaaacttcatggaaaaggtcaaaacgacatcaaattcagataagtgaaaccccatgaaccaagccatttgtcaacctgggcattgggtacatactctcgagctccaaggattttctttttgttacttccaaggcttctaaacttgaggacaaggtctcctatccaatttttgaccattacaaatttcatggtcagattggatttgatatttatgcaattgaaggcaacatcccaagttaattgttaattgcggcgtctagcccaacaccagatcaacctaaacgttgggacccgtgtctaggggctcgagattatagttttctcccggagtttgcttgaatcctcattttttatgataaaaaaaaattcttggaacaatttttgctgaacttgatcagaaacaaccccaattgacactatgtcagcctgagtgctgggcctagccccaagtgtcaacctgggcgttgggtcccaattttggccgtttataaattttttttggtccccagaaatagttaaatctcaatattttctaaacatgaagaagatggttgaaataattcctaaaaaactccatttgaaatttccttggttgacaaaaggtttacctg

SEQ ID NO: 32095 - DNA, 1244 bp, Cannabis sativa
agtacaatattggtcaagcactatcctagccgatcggaccacatcaatagcagaacaactttttttattccatagtagctcattacgaacagaccatatcttccaactgacacaagctgcttctttgacaacagcagcagagtgatgcacggttagaccagaaagccatctgttgaagccaacactgtccacaccagtagggacaatagagacacaccagcagcttctcgcaaaccggcactcgagcaagacatggctaatagtttccactgccgagttgcagaatggatagtaccaatcgacattaatctttttggtgctcagttgaacctttgttgggaggcatccaactagaacacgccacagaaaatgctgcactttcggaggaatttccaacttccatatagctttgaataaagtctgatcttccacagcaacatgcacaccagaatcttgttgcagcattcggtatgcactcttcacagtgtatagacgattaacttcttcactcaaataccacttatcatccgttgcattcgcactcagttgtatagacaacacaaggttcttatccctttcatcaaacaggtcattgataatatcatagtcccaactcttagattacatcgaaaataagctagagacattttgattcactaaaccaggatgatcagataaaataaagggattagaaggatctggaagccatggatccaagagaatactcacattatttccatttccaatagatttccttgcaccagctttgactaacccttgtgcttccaaaatgcttttccaaataaaacttgggttttgtcccaaagtagcattaagaaaactacccgaaggataataacaagctttataaatcttgcttaccaaggaatcctcattagtcattagccgccatatttgtttaccaaggaatgaaagattgtaatctcgaaggtccctaagcccatccctccatcagtcttatgtctactcaaccgcttccaacttatccaattcacgccctttgagcccgaatttgattgagatttctaccaaaactttgccatcattccttcaagattagagcaaatctcctttgttagcaagaacacgctcatggcataacaaggcaatgcctgagcaaccgactttaataagacctccttacccgcttttgacaagaaacgactctcctaagtaaaaattttctccttcatcttttcttgcaaaaaaccaaggatggcttt

SEQ ID NO: 32096 - DNA, 1566 bp, Cannabis sativa
ttgagcaagagcagcagcagggggttcttttcttgaacagaagcaataaggggaatttggggattctttagtttcctttgtgtcgcttcatgaataaccatggagaagactttagacaaggaatgaaatagatcaattaataagatttgagcacgaacagaaaaaaaagattcatttaaaccagtaaggaattgaagaacctattcttgattcaagaagaccgaattgtcagtggaagcagcacaggtacatgggatccgtggccttaattcttgaatttcatcccacatacatttaagctttgtaaagtaggaactaatagagtcatctccctgtcgaagagtgatcaatgtttctcgtaattcaaaaattctagggccattaccttaatcgaatcgagccttgagttcagtccacatttcagcagaagtttcaagaaacataatactgcttttgatttctggtgtgactgaatgcaaaatccaggacatcaccatttggttgcatcgaaaccaatggtgatggaaaggatcttcgatcggaggttgaggcaaggttcctttgagaaacacagttttgtttcttgctccaacagacaactcaaaatcgcgatgccacgcttggaaattgtgatcagacaaaggaggattaaccaagattaatcccggatgatcaccggagctaagatagtacggacttgaactgtcttcatgagcaggtctgtgaagatgagtctgggtgagattgtctgtagtcatggtcgaagccggaggaatgattagtatgtttgttggtggagcagctggaattgtagaggaattatttggcagaggattatggccagaattcctggaagagttctaaccatggtgggatatcaatggcagaaaaaacagagagaaaaagagatgaaaaagattttatcgtctataccatattagtaaaaatagttctgaaactttattaatgcaatcatagagatttatatacacacctgtgtattacaagactcaaaatatcaagtaacagaattagttacaaaactaactgtatttgacaataaaactaaattaactaacagttcaatataatcagctatatctaattgtaggaataacaatgggaaatgtctgatgggtgaagcctatttcttcattcacacgaacagatattagctcaggtctatttgttttccctttttatatacttttcaattttatgaagagcaaatatactctagtataaatgccttggtttactgtcttagtggttagtgtaataactactgaagaactaaaatttatttgataatacttttttctatttttctaatttcttttgtgtttggatgtaagatgcatttacaaatttaagttagagaaatatttgattttggcattaacaagtttttattcttttgtcatgactcaatatcatttagcatatcatttagcaatgtaataatgatttggatactgttttctattttcacactgctgggttgtggtggttaggtctgtgccttaatttttttaaccttgtgttctctcttatatgtttttaatt

SEQ ID NO: 32097 - DNA, 1260 bp, Cannabis sativa
caagaaatgtgataagtgtcagagttttcacatatacctcacgtgtcgccaaaagaactaagaatgatgacctcaccctacccatttgctatatgggggattgacctaattggggcactacccactgggcgaggaggagccaagtacgcggttgtagcggttgagttcttcactaaatgtactgaggttgagcctcttgtttccataacctgcaagaaattcctcgactttgtcgtcaagaacattgtctagaggtttggaattcccatgaagatagtatctgataatggaacccagtttgatggcgacttattcactaagttctgtgagagaaacaaaataattaagagcttctcgtcagtattcaggcctcaggtgaatggacaagtggaagctattaataaaaccttaaaggatactatcaagaagaagttagatgatgccaaaggcaagtgggttgacgagttacctcatgtactctaggctcaaaaaactaccgagaagacggcaacgggacacactccctttttgctagcatttggctcagaagcaatgttgtttgttaaagtgaacatatcgactcacagacaagagttttataatcaagaagaaaaccaggaacttctaaagttatccttggatctacttgataaaaaatgaactgagtcgcaagtcactaatgcagcgtatcaacaccaagttacaagttatttcaacaaaaaatgtcaagaaaagactattcaatgttggagactttgtgctaaggcaggtatttacaaaaacgagggatgcatctgcaggagtgttcaacccaaactgggagggtccatatgtaatcaaagcagtagttggaattggagtttacaaattggttcgactcaatggcacgttaataaagaactacttgaacgtggaacatttgcgaccctattacccataaataaatgatgtaactcacaatactgatgtaatattttaacttcagttatgaataaagagaatcatttctattatttaagtaattacaaagtttcattctttaaaattacttaaggggcatttgtgtatgattaaccggaattcatctggaaatacatgatacaatgcaaacccactacttcaaaaataaaaataaaagttgaattttttaaaggttctcgactaaacctttttgacgaaagaggggtcgaactgttataacttactaaccaaaccttttttacgagagaggggtcgaattgttatagcatcctgatcaaa

SEQ ID NO: 32098 - DNA, 1497 bp, Cannabis sativa
aaggctgtgaagaatctagactcatgagaaggagattcgggctcagatcttggtgatactctactacagacaggatacaagggttagaaatctgagtggaaggagccattattattcactacacccaaggtaaggttttctgaaactttatatgtgtttatttacaattttttagaaattcatatttaggatgttaaataatatacatggtagtaaatctagatccttgtaaaacataatccaatagattcctcatttataaaatatatacatggcatttaaaatacagataatcacaaagtgctcggaacgtgctttctaacggtatatagaactcccaaaacggagttcggatcacaaagttatgaattttcaaagttaacactcgaatctgcctagatactcgagggcgggccgcgacacctgggaccaactccaaggttccactcaaaggggtgggctgcagtatgcaaaagccatgccgcggcacctgagttccaaacccagaaaaccagcaaaattcatacgaatttcagcttccaaactcaactaattcatgccaataactaaccaaaacctaacaccaaacaatagattttataagaatcatacagggagttaaaagcaacaattcatgcattaaaattcaacattagaccccatcatttcagattgcacaacaacacaaaatcatgctttaaactaacaaaactcaagctcaagaacttgagcttcaaaccattcaaccttattgtttttttttcctgcagccaacacctaaaaaacacatggattcaagctagaaaaacactctaaaaatctcatctaaagctcaaccaaaacccaattcaatcatataatcaaagattatgtacaaacatgctcaaatcataaagagaacaccaaaatgcaatcctaagctcatcctcaacctatttcatgatcttccaacaataaaatttcatcaaattaatcaaaggtcaatgctatagatagctacctcaaattaatccaaaggcaagctcaagatcatcacctacaaagcttcaatccaagcacttctcaagaaatcttaaattttgaaataagtgtagagaaagagaaaggggggggggggttcgggtttgaggtgtaaaaactagaaaattccatttccattttcctcaaaatatcatcttttatcgaatataacttagaggtcaaactgaccattttgcccttagggccaaaaagcacacacataaacatttaaaggcatttaagtcaattcacacataaataaatccaattaattttaagatttctcacacataactttaattccaataattaatcccaaaattgtatttcggcaccgaacccagttcggcctgaaatatccggttatgacaacaccgcgccaacttttcagaacacacctgaaaaagacgacacaggcatactatataataatattgtcccataagcacgttcataaattaatttcactattttacc

SEQ ID NO: 32099 - DNA, 1084 bp, Cannabis sativa
taggactaagatctttcatagcaactggatttttttatctttggaatcaggacgatgtttgtgtcattaacgcatataggaaaacatccaatctcaaagaacttttgcaccatccgaacaacatcatgatgcactatatgacagtatttttgtaagaaacccgaactaagcccgtccgaactagaagctttatctgaatgcatttgtaataatattgttttaacctcattagcttgaacagacagcagaagctcattattttgcgacttagtgaccgaaactctcacaccatccaccatactaacccaatccacatcagaagtagagaataaattgtgaaaataatcagccataacatcttctaagccatcgacccatgccaccaaatccccatcattattctacaagcttacaatcaaattatttcttcttcttgcaccagtggaagcatggaaatatttggtgttttgttcctcatctttgagccaaagttgtttagatctttggcgccaataagtttccgttatactaagaagagttgacagtctatcattagcctcattaaacctcctgtacgattcatcatcccgatgttctttaaactttctaatttcttttttacacaagaacatttaattctttaaatcccttataattccttgaccccagttagtcaaacgatcactacagacatgaagattctcaaagagattacaatcaacattttcttcccaataatcttgaattatttgaaagcccataggatccttcaactaggctttttcgaaccgaaacttaaggaaaaatgaagagtaaacaattggacaaaggaacaaaagaagaggacaatgatcagaagtactcacctctaaagtttgaagcttagccaacaaaaaatatgatagctactcccaattcgccattgctctattgatacgaacctcaactcaattattcgagccccttcctctcttttaagtaaaagggtacccctcaacgtttaaattatgaagaccaccatcacataaagcttgattaaaaccatttataagaacctctggatacggacgtccacctcttttat

SEQ ID NO: 32100 - DNA, 2483 bp, Cannabis sativa
  modified_base (261)..(261): a, c, t, g, unknown or other
tatttgtatgtggactgtataaatgtttaatgggccgacccaaagtatttttgtaattttttcccttttttgtattattctgtttttttccctatttaaagagcttgtttggaatattaaattgaattatttatatcatatttttatataataatatgttaaacattaatttatactaaaatattatatattaaagtgtctataaaaattaatactacatatagtttgacataaaaatattgcataaaatacaatttaatntaatactatacaatacaatacagtataatatggtgtaccaaacgaaccctaatattatttattaatcaaaataatataagacttaatattaaattgtactaatagtggtatgtcacttttcgtggtacttaatatcttaaaattaggagtaacaatttgtattgacatgttaaggttttaaatttactaaaaaactgttgacacgaacaccactcgtggcacgaaaaatttataaaatacgaacaagacctgaataaatttcgtgtcgtgtcatctccgtatcatgttggagggttgtaagctaaattgttatttttagtacttttgtatcgtgtggagttattaaatttattttagatctgacacaaacatgacccgggacacgaaaaattgataaaacgcgacccacataatttttatgtcgtgtcgaactcataatctgttgacccaaactcttaagtcttcttgttttgatgattaacaaatatttgattattatttgtcactaatgatttgttgattttgtagcacaattaaagataattaagctatttaaagcaaaactatttcaaagggcaaaataataattttattaaaattctcgaaagtaacccgaagtggactcaaatgctcaaggaactcaaaacaagactccatgaaggtttatgtacattttctagtcttgtacagtgatttacaagtccacacttgaacattttaagtatgaaatttggctcactaacttgtgtgacaagttatttcaaaaaaaataatatctaaaatttctaaattgatttttaagattaaatatcatttaactaagagaacaaaactagaatttttgaaatcgaataaacgagtagaaagttatgcacattttagagcctaaaaaggtagctttttgccactaccttattttcagtctaccctttttaaatggcaggccgtttttcatagaaacagcagacagtttttcccagtatttctttttgaaaagcatgttaacggctataaacggctagtttttgttcctacactatataaactcgtttttcactcaaaaattaaggttggttgagcatttattcaacataccaaacatttcaagtgattttaagagctcacaagtttaaaatccaacaaagctattttcacacactttgagccaaaatttatatttatttcttataagtgtgcttgctaatcactctaagttcttcattgtatcattatacttctagagtgagtttgcttgtaattctaagcacatttccaaactgtaattgaggtgaggtaggcaccggtatgtacaactcggttagagtgagattgacactacaacaatccgagaaagaggttgatagtcttcggcggtggaaaactattggaagaggtttggaaacaccttggtgtaaaattcccaattgtaaagattagtcaagcccgttaacttggctcgatagtggaactcaaagctaggtccatagtgtaacgccccgatattttgccttactttacaaaaataccatttaaatgcataatttgaaaagattaaaaaatccttaaaatacaacaatgagttttagaaatcaaaatgcaatagagaaggatccttcatttgtaaaataaaatacgataagtaaatgattttaaataatacatttccattgtgtttagatttatcaactgcttaaaataaaacaggcgccactagcgttctagatcgtttgcccgtccgtagccgctcacagtgtacgtaccagaactcaccttactcactatacatacttatgtgtctaatacgtgtaggggaaagtaaggggggtgagctaaaagctcagtaaggaaatacttatcatacaataccatataatatcacacataccattaatgcatttattaagttttagcaatatcatacaccttattttataaccataaccaaataactgtatacatggaaacttttatcatataggtccatactaattgttcacaccatacatatatacagagatcataactccaatattatactcataacataatcatattaatactataaataataatgtcattaccataacattagcatatcatagccattatttgcataattcgggcctagcctggccctacaatatcatgggtctaatctgcccatataataacttgggcctatgcagccctaccattgttataggataggatatctctatatt

SEQ ID NO: 32101 - DNA, 2505 bp, Cannabis sativa
gactcaaataccgacccatacccagactggcatcgtaacacgggacctggacccagacgtagacacagacccaaacctgggacccagatccagaacccaaacctggacacggactcaaacctagacctagaccgagatcaaaaaaactcgtactcggactcgaactaagactcggaccctgacccaacctggacccagaccagaacctggaaccgaacccggacacagaatcagaactagaactgtgactaggacccaaagctaagaaaagaaccgaacccaaaaaataacccaaacttagagtgagacctggactaggactgggacccgagacctgggactcgaacctggactgagacctagacccgaatccacactgagacctggactaaaatcaagactcaagacccaaacccgaacttggacctagaccaggacctaagaaccagactttgatatgggacctagaccagggacctacgccctggaaccaagacccaaatctaaatccaggactcgaacctaacccaggacttgacctacaccttggaatccgaagtcagacctagacccggagccaaaacctggcctgaacccaaacaaggataggaacttggactcaaacccaaaattggacccataccacgaccaaacccgaacctggactcaaacccaaaattggacccgaacttgggacctgcacctgaatctaaacttaaacccagatcgggatcgaaacccaagacttagacccggaactagtcccaaactcatatcgagatcaaaaactgggactcaaacccgaacctagaccaagactcaggaccctaacccacacccgaagcccgatccagacctagaacaatatccggacccaaacccaaactcagaccaagactcaaacgccgacacgaacaagaaccctgacccaaactcgaacccaaacttgagctcagaatcgcaagtggaactagaagcagactaggactacgaccaggaccaggacaaggaccagcactgagacacgaacccaaacccaaataaaaacccagaccaagaccaaacccaaacaacgactaggacccaaacttgaacctagaccaaaactaggacctagacccataatcgagatagggaccagggcaacgaaacaaggaccgggacccaagacccgacccaagacctagacttgaaccagaccaagaccctagattgggatttggaactcgggcccagacccagacctaggaccgaactcgaacatagccccaggtctaaattgagactgcaactcgggcccaaacacggtcgtgtagcaagaccaggacttgggacccgaactcagacccgcacctgggaccgaaactcggaccttgacccgaacctagatccagactgggatccaaacctagacccaaaccagacctagactcggaccaaaactcataccccgacccagacccaaaatagatcccgaaccaagacacaaaatccgagtgtgggtcagtgtttcagtccgggtccgagtccctatatagttttaggtctgggtccaagtccttatcttggtcctgttcttgggtcccgatccacttctggtttcagttctagttacaactcatggggtacgggtcgagtccaagcatctagtctcggatcccaagtcttgaggtgggtcttaggtttaggtttttgccaaggtcgggtcaaaaatctagatccaagttctggtccaagtttgagggcccaattcctgggtctgggtcccccatctatgttcgggtcctaggtcccgatctaggtctaagtttatgttacggtgtaggttcaggtctcgggtcctgattcgagtccaggtctcggtttgggttcaggttcgagtttgggtcccagtactagtctgagtctgggttttgggtcccaagtctgagtttggttcttcggtcctaggtctgatctcgatttttgggtctaggtttgggtctgggtcccggtcttggtctaggtcgcagtcttggtttatgtccaaggtcacaggtcccggtccaggtccaggtccaagtcctagtattgattttggtttgagtttgggtcctgtcctagtgctggttagatgctgtgtccggaattaggtttggatcccggttttgttttgggtctgggtacggatctgggttcaggtcctggattcaaacactgactacgggtatggttgaattctcaggtccagattaggatctcggtcttggatccctatcttgctccagtttgggttccgggtcccgggtcgagttttaagtttgggtttggggttgggtcccggtagttaggtcctaggttctgggtccaagggcaggttctctgtcatgagtctggggtcaagtttcgaggctcagtcccggttctggggcctagtttcgggtccaagtcccccatctaggtcgagatccttggtttaggtctaggtctaggtttgggttgggggcccaagtcccccatctaggt

SEQ ID NO: 32102 - DNA, 3114 bp, Cannabis sativa
aatatgagtggaaaccagtcctttatgagcactgcaagggaatggggcatcaaacaagtgagtgtaggaaaaaagcaggaggcaagcaagaatgggttgttaagaaaaatcttgaggaggtaccagggacaaataagatgcaggctgctgactcggatggctttcagatggttcagaaaggctggaaaccaaaggactctaaacaacctgctatgacagtaacagggaatgcttatcagattctagaggagactgatatggaggccattattgagaacaggaatgtggaaagagttaaggcaggttgctcaaaatgatccttggttagtcatgggagattgtaatgatatccttacaagaaagaattgggaatagagttaaatatcgtccctctcatgactttattgattgtgtttctaattgctttcttgaggatgtcaaatcttgtggcaacttttatacttggagcaataagcaacaaggagatgatagatttttttcgaaaattgatagggccatggccaatctgagttggatggacaagtttcctaatgctgaggtgaattttatgaatgaagagatgatggatcacacaccagctgtcatgacattctatgatatggctcatagtggcaagaaaccatttcgatacttcaaaatgtggagcactcatccagacttcaaaacagcagtagcagcctcctggaatcaacaaactaaggggcataaaatgtatcaagtagtcactaaactcaagagattgaaaggggtactaagggagctgaacaaacaagctttctcggatatacagatggtgaatgagaaagccaaagacctgctaaatcagattcaaagtagaatacaacaggacccgctaagccagaatttgttgcaggaggagttagcagcccgaaaaaactacattgcttcctcaaaaaattatcaatcctatcttcatcaaaaagcaaaggtgacttggctcaaaagtggagatgaaaatacaactatttttgatgcaagtattaaagcaaggagaaggcaaaatagagtgttatcaatacagaattaggagggggaaagattaacagaagaaacaaagatatcagaagctttctttgcatattataaagggctgctgggcaacacaatgcaagggagaagacatgtcttatcaagcttggtacactcgggggatgttgtatctgatcagcatgctacttggttatgccaggaattctcatgtgatgaaatcaaaactgctgtgtttgcaatactaggagtcaaagccccaggtcccgacgggtactcaagttatttttttcaagattcttgggaactcattaaggaagatttatgtgctgcagtctagaatttcttgcgttcggggcagatattgatggagatcaactccactgtgcttacactcattccaaaagtgaaatgtccaaaaactgtaattgacttcagacctattgcttgctgcaatgtcatatacaaagttgcaactaaattgatctgttctagattgaaacatgttcttcctgagttagtggcacagaaccaggggggatttgtacagggaagattcatagcgcacaatataatgatttgtcaagatctaatcaggagttatgggagaagaaacacaaagcctagttgtgtgatcaagttggatctacaaaaggcttatgataccattgagtgggacttcttagaagagatgttgagggcttttaagtttcctaataagttcataactctcattatgaactgtgttaggactccaaagttctctatcatgttcaatggcacaatgcatggtttttttgaatctaaaagaggtttaaggcatggggatcccctctctcccttgctatttgtgctttgaatggaattcctttcgaggattatgactaagattgggcagaagcaggaattcaagtttcatgagagatgtggaagcttacaactcaatcatttgagctttgcagatgatgtactcctcttttgtcatggtgactttaagagtgtgtacttcatgatgcaaggtttaaaattgttctcactcacatcgggacttcaaccgaatccatcaaaatcagctttctattgtagtggtatgcaagaagctgaaattcagaggataattaatgcaactgggtttggtaggcaagatctcccattcaagtatttaggaattcctatatgtgctaagaagatttcagggaaagaatgtactttacttgcagaaaagatggcagctagaattaaaacttggagctcgagaaacatctcatttgcaggaagagctgtcctcatcaactcggttctactatccatccacacttattgcagtcaaatgatgaagcttccaaggaaagtaatttctgaactagaagcaatatgccgtgccttcctttggaagggacaaagcatgatgcaaggtgcaggacttgtagcatgggagaaggtttgctctccaaagaaggaagggggcattggtttcaggaaaatactagagtggaatcaagctgctctatacaagtatgtctgtattggaaacaggtggtgtatgaaaaggatcaaataaaaagcatgatgcatatacatcggtttgttggaacccgatataccattgttgaagggtataagttaatttgcccagatcagccgaggatcacttgggatagagaagtttggggaaggctaaatgttcctaaacactgctatatcttctggttaacaatgcacaaccgcctgagaacaaaagcaagattgaaggctcataacatactgcaggaagacacttgtgtcttgtgcaaccaacatcaagagaatactgaacatttattcttcttatgtgaggcttcagctcactgtctgctggaaataaaacagtggctgcaatggggctccaaatccaacttaatgcagcagctggtgagagggataagaagaacaaagttgtcaagcttcagaaagaaggtattttcagcagccattgcttctttgatttataacatttggaatgcaaggaataaacacatatgggacatgaagacagtaaagacaaacgagattattcagcacactaaggagatagtaagagcctga

SEQ ID NO: 32103 - DNA, 2082 bp, Cannabis sativa
gctccaaaagacaccaatagacgagataatgctaactttaaagacccgaaatataggttaattataacctaacaacaggctgccatcatattatcacaaacagagttattgaatagccatctcaatatgaggcggtccttttcggacagtaaaaaaaatctgaaagagatttgttggctaagatcgccattttgatggcaatgttgaagccgaaggagggagaaccacaacccacccaagcaatagatgacaaagcaaattaccgacttgtggagagcgataatgaagatgtgttcccaaaagattaggaaccaaatgataatgaggcaccgtgtactccaacggaagcaattattacgaccattggtgatacacaatcacagggcaatattctactcctgactggacccccagaagatgtaccatttgtgaggaagaggaagtcaccttgctacttgaaggactacacttagaaaaagaaaaagaagtgagtttttccaaagaacgtagatccaaaaatgccagcagaccgtagattgctacgtacgttcaagaggtggttgattggggacattcccaatacccgttctaggaatgtgcacactagcgtcggtgatgtgaagttcttcacgaagttgttactgatgggggattggttggacgatgatgtaagtatttaattatggtactcttttataatgtttttattgttttttttttcctgtaaaaaaaatttatattttgcgacataaaatgccatccattttatgattgctttttgctctctgttaccttttttgacatttcacgacattgtcgcgacatgaaatgttatccatattctgtttgttttttgtttcatgttatctatatatcaatatgttcgtgacattttgtgacctttggcgacatatacactcctcaatatagttttttagcttgtggttagtatagtactttcacaacatgtggcgacatatcgcgatttaagttgcaatgaaatacgacttgatttgtaacatctcgcgatttagattgcgatatgatgtatttgatgcaatatttgtcctttaatttaaacttattggttttttctctcattttcatgcagcatatagatgtcatattacacatgctgaggaggagacacttttattttctagaattgtacccttagtcgggtgtgattttgacacaacactcccacaattcctcaggggcatttgggggtatcaccagggtgacagaagcatcttccaatggccaagtgatagaatactacaagggtatggagggtcattacctaccatgttagaaggaccaagccttcttatacttcgtcctgcactttgatagacaacaacattgtgtggctattggggtagacattgaaaagtggcatcttcgggtgtacgataatgatttctcgtgtaccaacgaagacaattttaaagcccatatgctaccttggcgctttttgatggttattagcatgtctagaatctaggccacatgtgtgttcgttgtggaatacagtgacctcaaacatgtcataacgtgtcttcttcctccccctcactctccatttgcaatttgaatccctgcaagttgcgtaaaaaacattggcgccagacttcttcaccatgaactcaaaattcattttcaatgcaaaccttctcactacacttttcaattcagtcttatttgtgtacaacttgccaacgtgcatttcccgtgaaggtgtaccactaagagaagttgtatacacattattttcctctatgtcttctcttgtccacacaataggtttgaattttgtacaaacttcaaaatcaaatggtacagtactacgagaaggaactggctggttgctactagtacgtgtttggtgattttcactacgaggggttcttctttcatgctctgtcctctggttcattggaggtagcggaggtagttctaaccttaaagcatgtacctctatagcttcaccaagttgcaactctgcatcaccatcctcgttcaaatttaccacatgatcattgttgtaaaagggagcatcaaactcatcaaactggtcaa

SEQ ID NO: 32104 - DNA, 1815 bp, Cannabis sativa
  modified_base (414)..(414): a, c, t, g, unknown or other
agaagagaattgagtgagttttttagggttgttttttttatttttaattttttagggaaaagactttttaggattgcaaatagggagtgttcgtaacttcgtagttgcgggtttaggttattttttaaaaccaaattgtatatagtttttgtaatttctaaaaatgtaaccacactcaaatcgtgaaaaagtgaaaaaatacagcagtgcggtttaagcggtttatcactattaaacattaatataaaaattaaagattagtctaataaaattttaacaattaaaaaaaaaaaatatacgtcataacatatatactaatcaagttagggtaaatagcggcatagatacctaccgttttaagtttgtaagcggcataaatctaatgtttatttttaacggcataagtacccaatntttgtaaaactgtaattttcctctagttttgtcagtacaaactctattttgaatatattaaaggaatatttggaagtaactgatactacatattttatgtctagacccaatgatcaagattttggaccttctatgtggcttgtttaaaaaaataatagagcttgtactgacaaaattagagaaaatttacagttttacaaaaattgaatatttatgtcgctaaaaataaacatttagattaagctacttacaaacttaaaactttaggtacttatgccactattcacccaatcaagttattatattaaattttctctaaaaaattatataatgtatttatacacattatattatatatataaaaaaaaattgagaataatttattatggatatttcttaaatttaattgtatgacttaagttttgtaagcatatgagttgttcatgtataaaaaaaatcatagtgtaaaacataatatttttgtaatatatgcagtgtggtttgaaccgcgattattaaattcgaaaccgcaaattacaccacaccttgcaatttgacaaaaatacaaaccgtaaaaaaattcaaacgcattttttatgcgatgtggtgtggtgggtggtttgtgcggtgtgagcaatttaataaacatttctaattagaaatgcaaaaggcataaggattagacttacgattttagttttttttttttaatttttacttttttttatatgttcgtttatagttatattatatagaagtctacaatgcacatacaaataaggtgtttcgaaagatccctatctatttttgtacacaaatgagtttttcagtcttatttttttatgatcgtatacattatagttatttaagactacttgtaaattttcagaaaattcgagtattttacaatgtcgaaaataagatttacatattttgttgcacgtgcgatagtttttcttatatgcgtggtaaatacctatttaaactttatttctgacactataaattattcaaatattctaaaaatttacaagtgatcttaaataactacaacatatgtaatggtaaaaaaaaataaaaaactctgtcaaaatatataagagtttaccaaaataactatttaaggagtactacataaattttctattttatatatataaatattataaaatataatataattttttaagattaaaaaaacaaaatataattttaaaaaaagtttagattgctcggattaattaggtgggttgaacctgtttttaacctatccaattaacaaattaaggtgatttataattttatcgaattttttagatttgatttaaacggattatttaatttagagggtttaagaaaatttatatacaattatacatatactagaaaaaaagctacgtg

SEQ ID NO: 32105 - DNA, 4323 bp, Cannabis sativa
aacacccctaaatgtggtttagaatgtgttgaacggacttctttaacagaagataatccaaggagaaggttttttggatgtccaagatagaaggtttgtttaattttaattttgtttttggtattattttagtattgaaaatttgttaatgggtttttttttggttttgacagagtaatgttcagattgggtgccgttttttaaggattgacccaccagctccaaggaatgatataaatttagtttaaaggctagagatgattgagaaaaatttaatggcactgcaaaatcatgttgaaaaaactgatgaagaaattagaagattgaagaaatatttcaagtatggcatatatgttgttcttgcaattttgttgtgttcttatttttattagatttgttaatttttttttaatatcgtactcttgacaaactagaatgaagatgtaattttgtttgtttgattcattgttgttgttgagattaattctgcttttgggtgagatttttaatctttaaaatttattaaagactaacctatatatgtatgtgcacatcaaagatgagtagtgaactttgcaataaatttactaaacaccaattaaaatctgatgttatttagaaaccccaaaaaaaattttcattaaagaatcacttattttcatatgaaactagagagtgagaaataaagagcaaataaaatgaagacttttcactattctgttaaggtatttgacatgaaatttaatcccatttctgccatataaataccaattacatctcaaaatatcaaaacaaactcaatcctccatgataaacctccatgataaaattgtacttaaatagatgttcatgttaccacatgacacttttgaacaaattcccataactaaaataacctgtctaacagaacaacattacaagtccagttacacttcataaaagatgtaacttttggctttacaaagaaagttatttgacatgaaatttcattaacttttgtcatataaacaaaacaccaattacatctcaaaatattgtaggttgatgatttggtatgacatccatactactcaaaatactgcttaaaatacttctcgaaatactattcaaaatactactcaaattacttctccactactctttgatgttgtttgcataatccataatcccttagtaagttggtgcaatttgttggggtgtcctttgttgcaatgaacggcaaaatgtgattattaatgcacaaacagttggaaaagtttaaaatatagaatatcatacaaaaatgtttgaggcccaaaacaaattcttagacatcacagtggttgaaaggttgaagcttttttcagtttctggttagagagatagagagaaagatagaggaattgcactactgattctttttaaagaaaaagggaaattaagagcatgtgtatgtatgtgtggtgaagacgaggatgatatttttaagatgatgatgataatgtgtgtgaaaataaaaatgacagatttgatgttttaagctatatttgtatataaagtgtcagatactaaaagttttagtgcataaactattgactttattgacataactatgatggtagcattaattacttgcaagttacaaagataactctgtaacaacactgagaagaaatcatatttcttgacaatgttattaatggtttccaaagttatggcccaatgacagattaagaagagtattaacaatgttattaccttgttcttgttgtttgtattgcaagttatgaaattatgaccctctttcccgcaaccagaacacctcatcttatggaatctcctcctaagtttcttggcacctggtgcagcaacatcatccaattcaattgcaagtcaatgacagaactcaattcatttgcatgaatattcatacacacacacacacacacacacacacacacacacacacactaagtttaacataataaacattaggaagagtattactaatgttattacctagtgcatcaacatcatccaatttaattctcctatttttttttggcctgcctggttgtatttttccaacaggcttgattagttctaccttcccagtccttggccattcatcttgatttcttaatggatagatttgtggggagtatgctttcatgtagtattccttggtgtaccacttgctaacatacttctctggatcctcgcgattacaccaaatggcagcaatggcatgactacaaggaatcccatttaattcctactttttgcaagaacacatccagtgatttaaattcaccaaaaacatgctaccatacatattctccacttggtaaatcaaatttcctgaaagtgttggcaaatgaccccatgcatcaatcttgttcttctcgagttgttctgaaacttttggttctatgttagacggccacatgactacagagtgtctatttttagaaagtctttccattaagtacattcgaatcctctcaagcatagagaagatgggcttatctctagccgccaatatggacttggtgccattaaatccttcacacatgttattgacaagtatatcacatttaggagtggtcctaaagtgtgatctgctccaatgttatggtcccgcatccatcaaccacttgtaggcttcctcattcaacactttgatctcttccatcacaagttcaaatcttcaaacagtggactctctagcagccttccacattaaggttttcagtgttttatccctaaacaccttaatgaattttttttccaagtgcctagcacaatgtctgtgctcagcttcgggtatcccatcttcccaccctttaatgcctgctctaaccccttttgtttgtctataataaagctccagtgaagaggattctcaatctttaaatctcccttcaacaaattcacaaaccaactccaagagtctttgttttctatctccactacagcgaaagcaactggatacatctggttgtttggatctatggcaactgcagtcaacaattgacctggatgtacccctttaatgtggcagccatccaatcctatgagtggtctacacccctcattgaaaccctgtttcagtccaccatagcaaatatacattcttttgaaacgaggcttaccatctttagttgcttcagtgagaacttctacagttgagtccttgttggtgggcttgatctcttcagcgtaatcctaaaggtcattgtattgttcttgataagtcccttctatctcttttgttgcaaacatccgagctctatatgccttatctcttgagataacgagggtcttctctttgccaacagtttgttggaaggccgagacatcccacttatcatgcatcttgaatcgatccaggtacttttcagcaagccattttgaacttgcaaatttgtttttattggttctcgggcacttgtggtcatcgttaaacgttttcacaacaaatgtacgagtatcatctattttagatgcaaacaatacccatggacaattaactcctttgcattttgccctaaccctattagagtcatttttctcaaaataaacatccttaccctgttgaatggcatactccctcactgcttttttgaattatgcccctgaagcaaatgataaacctggtttgaatattggattggccatgtcaacttctggcctaaactcaggcaattttggcagcttcgttcttacaaactttttcttcctcttatgcacatttgtaggttcttcatcttctacttcagtgcctttatcagaagaactactatgcggtttgaaatcactatcagactcaacataaccatcattgacaacatcaatatgtacatgctttttcactaactctgtcaactgattctcggctctctcatcaactcccaaatcttcttcatccatgttgtactcatggtcttcctcaccgaaatccgcatattgtcctatcccaaaagtattttactcatggtcctcatttgtcttttcattttcctcttcgaatggtggttgttctttatcatttctagagtgatcttgcggttcatttcttggctggtgtttctctgatattgcagaaatttcttgttcaacagaaggtggttgtggctgattccctggcagatctagaacatcaaattcaggcccattttcagatgattgtgtggttggtaactcaccgaaaataggcctaaattcaggagcactttgcacattacaatgaggcccagtttgagacaattgagaggctagtgactcacccaaaacaaccccaattttagaagtattaaacccaatgtgatccacttgtccttc

SEQ ID NO: 32106 - DNA, 2375 bp, Cannabis sativa
atactttaaaccaaaacacaaaaacttaaactggtaaaccacaaatcaaataataactattatgtatatattttaacaataatacattacaacaattacatataactatgtattgtatcaataaatacaataaacgttaacttatacaatctgtatgtaaactaaaatattatatacaatactaagaaattacagaaaaaaaataaaaataaatgcaacaggtaccatgttttataagactaaggcagttttgtaaaatatgtttacaaaggaggtttacagaaggaggtatttaaaaaaatatgaaaaatttgaaaaactatgatcatgtgctctgcgcctcctgacgcacgtcccatccaactgttgctgacgtcatccctattttcagcatgttcaaaaagcaactgaaatggattaaattttaaaaacggtataaagtaatgataatattaataattagaaaaactaagttattattggaactaaatatacaaacatgtgtccacatgtaaatttccaaaaaaaaaagtctcaactctcaacactccattatttgaaggccatcactatcccataataaaagaaaaattacatataatatagtcaaattaaatatttaacgtaagagttaaacttagatctatataaaagaatttaataagtgggatttcaaataaagaagaacaaacttttgagacttgacaattcaaatacaatagtcataaaaaaaaaaaaagtagaaaaacaacccaagaaggcacaaaaacctccaaaagaggcacaaaaaaacctccaaagaggtacaactagtcaaagcatacaataattatagcttgacaattattaatatgattaattaattacatcatttctctcaaaaaaaaaaattaattacatcattcttaatttaatgggaggcaccatttcatgttttattgatgaactcatatatatcaccaagttagttgagatgttttgcccaatccaagtagtgaggcccaaggtggtgtgagaaggcctttgcctggcccaatgacccacactgaaggttgaagtacagcagtttctactgagagggggtaacatatcaaattttgataaaattacattccacaccatttttttttttttttagaaaattcgcattttaccgcataagtaattaatttcgttttattcagcaacaaaaaaaaaaaaaaaaatcttttttgataagtaattatttacaaatgtacagtatctaaacttttttataaaaaatatttataaacatgtaaaagtttttgcaaacatgtaaaagttgctcacaaacttgtaatccgtatttttgtaaacaacatacgtatttttgatattttctcttaagttttttagtatatttgaaaattctccaattaattaacaatacaaaatgtatgcattttttgacgtagtgatcaaaatcacacatgattaacgatacaacaatttacaattggcggcagtacctcctcaaaccaagatagctcatcgtttaaccgaatgacatattttgccaaatcatgaactacataattcttatcgtgaggggaacctacaaaaatactgtaaaataggagaaagtttacaaaaatactgggagacggagatttttcacatttttactgtacaaagtttacaaaaataatgtgttaaagttttaacattacaaaaatattgtgtttcagtaaaataaaaaaaacaactaagatagctaaactaaccctagaacaacttaacaaacaacatgaaaaaaaataactataaagtaacagaaaaataaaaaaaaatgttgacctaattacaataagtaaaataatatcaattcttaaatatatatttttgtactgcgattttattatttttttagtttgacaacttgatttattttttgtactattacattatttttttcatgaaatttgttgttacaactttattctttcaacttttcttctctttttcgttttgagttagtgatagttaaaatgataatttattttttaaaagttaaataaatagtaacattgtttacaccaagagtagccctaatgacgtggacatcaatgtttgacacgtggcaagaaagatgacatctcggagttgagtagtcccaagtcatagcaagtcgatttgggataggtccctagccctgcattggttgacttcgggaactccagaatggaagttcagactttgataactcgtttccaactcactatctttcagtattctgtagcatgaaaacatggagaccccaaatccaagccctgggaattgaagatacatgaacctacaccctgattcaacttgggccaaaattgtaacgccctaatgctaaggcacgctacagt

SEQ ID NO: 32107 - DNA, 1001 bp, Cannabis sativa
gtttaaaaaaatattgaaagtgatatttttttgtttttaaaatttagattcttaattaaaaaaattaaaaaagtaaaaacagtttttagaagaaaaaaattcactttttttaattttaaaaacaaaaaattaattaagaaaatattaccaaatgcacccagtaaatttttattaaaaaaatctaatttcttttggctttcttaaacatgctctaaaattaacgaatacattagtatacctacttttgagatgtaatatataatttctctattttaaagaaaggcagcattaatagagtttttagaagtaataagataattactgttgctcaaaaaaataaaagataattactaggaagtgtaattaataaagtaataattacacagtctagtaattatactatattttaaaatacaaaatgtgtttggatataagatgttgattacaaatgaattttaaatattatatttgacaaaatagataataattacacagtaaaataatattttttagtagtttatatgtaatatttataataattacatagtataattataatcaatatagatgtacccttacttattttggcatctagaaaaaatttttagtctattttttttataatcgtttacgttatatttatttaagatatctaataaaattttaaaaaattcgaaataatttacaatttagaaagcaatgttcaaacaatctattttacacgcgtataaaataaaatagtcagacgtgcgacacactttttgaaccttattttcgacgtgttaaatttttctaaactttttaaaattttacaagatgtgttaaataattataatgtacatgattatgaaaaaaatataattaaaaaattatttcaaatgttaaaatagataaaaatatatcaatacatcccgggacggacccattaagattgatgtggggctatatcctcactaacaaaaatattgcattttaaaaaattaaatgtaaattttttaatt

SEQ ID NO: 32108 - DNA, 2131 bp, Cannabis sativa
caatgtctttcaatcttttaagtagagtccaagtatgtccatggttagaaagagagggggcaccataaaaggctgtaaagtgccaagaagggccattgttgcaagccatgtaacaatcaaagacattaacattaaaattatttaaggatacctcaacatcatctttccaaagtaacatcaaaccaccactaagaccaactctaggaacttctaaaccattattaaaatttaaaatactacgaaaacgagcaatagagttacaagctaatttagtttccataataaaaagtacagtgggggattgctctttaacaagcaaacgaagcttacaaatagctctttggttccccaaaccacgagcattccaactaatggttttcatggctgcccgcgggactacataccagtctccgctgaaatgtcatcttcacccgtcgaatccatgaagtcagtggaaacttggaggtgatcattctcatcaactgacaaggttgattcgaagtcatttacaatattccctcggcatcttttaagtgtttgtctgagagaaagaccttcattctgtctttttgttaacacatttgggtttgagttttccttcccaacaatattaattacagcagtggcagggtttgatatggcatgagacattagtggtgtgagtgcagaagtaaccataatttgcttgttaggaaaattaatgggttgacctgtaaggggtacgtagcaaaggcattgcaagaaggagggatggtagtaaatggcatataaatggatgagagatctgtgaaattggagagggggccatgagatatatctgctcttttgtcaatgctagaagaggaagaagggcaagatatggtggaattgtttaaagaagatggctgaaaacaaattgatggtggtttcttaattgaagcagggacaacaagattattaggagcattagtaataagatcttcattgtcattggcatgagaagactctccagcatataaatgccttggttgtggatgaccacgcagatgaagttgagggacagccgctgtgaaactcttcttagcaagtcttgtcagtaatggccaagcatctcctttggtgaaatcggttctataacgatcacaagaagaagtaggcagagcagaacctttaataaagggctggtattccaaagcaggttcttcaccattatccaatttctcaagaaaaatggaacacttgatatatggatgaccaattattccacattccatacagtatttaggcagcctctcatagcgaaaatcaacccagaacttgtccttaacatggcccaaagaaatcattctccctctcttcaaaggtttagtaacatccataagaactcggatgcgtaaaaagggtccccagccttcatttaacgagtcctcaaacacatcctcatatttgccaatgatattaccaagagcaatagccaaagtttttgtcttgctgagaaatggaaggcggtatacttggacccaaaaaggagtgaacttaagatcattagagttaaaattctgaccaacaactggtgtatgcagcacaacatggtggttctggaagtgaaatggctctcgatccagtacacgaagtttatcaccttcacagccgaaggtaagcatgaacaaatctgaagattcagagattttaactgggaatctaccatcccagtgctctgccatttgctgttgcaaggttgaaagccaaacttttttcttagtgaaagtcttcgcatataacacagtatcagcactaacagtaggggaaatggcttcggaatcatgaaattcaaagactgattcttcatcctcagtgagattgatttttgatttcatcttatctaagagaggatccatgaagaaactaaagaaagagagaataaggtagcagaatgtgaatgcaggggaatggggaattgaaatgatgtttttagattaggggcagagacaaaggagaggctttgaagagtggaagataattgcagaaactgtaactaaagcggttgatatctagaaaaagatgaagaaaacggttaaaacccataagggacaggaaactgcctcagagcacaaaacgtgggcagacagctcaagttaaaaaaaaattgtat

SEQ ID NO: 32109 - DNA, 1377 bp, Cannabis sativa
ttttgactaatgatcaattagttgaaaattagttttctccttttttagtaagtctcttagtggttgttaggttattagtaaataacaaaatttgctatatttcctaagagtttttcattagccattgattgtatataaagatttttctttaatgagaatactcagaatattcattctaatatttctcaacaggtattagattgacctaggtcaaattctctctctcatcgattcttgacaaacttttttcactctgtaatggcagcaccaccagaaagccctcgtccaaatacacaaccaaatccaaatccaaatccaaatctagctcctgttctagtcatcccagtgaatatggctcctttgaatctcagactcaatcacacaaattacccctattggtgatcccaagtgcttccatcagttcgtgcatatgatcttgagggatttctcactagagaaagcgttcgaccaccgtcaaccattcaagatccaaccaatcgcacatgacagattccaaatccttagttcaaccactaacttcatttggatcaatttctcatgaactggctcttcaattctatctctgagaaaattcttggacacgtcgcattgtgtgtttcctttgctcaaatatggtctaagcttgagaaactcttctctagccattctcgagctcaaattctacaaattcaaaatcatctccatatgacaaagcaaggttccacacctattgacgaatacattctcaagatgagatttcttctagatgctttgatggcgactagacaaactctcgcagatgacgagctcatcctatacatctttcaaggtcttggccctgagaatgagttggttgaggtaaatcttactgcccgagaatcagtcacatttctagaactttagttcagttttcagaatcatgagatgagactaaagcaacactttgctgctggtgctatggatcttcaaaatccaacgacaaactacgcctcaaccaccaagaagagtggtaatcaacagtcttacaacaataacaacaatcaaggaagtcgtggacgaggctacaatcagtcccgagggagtggcaatcatggttatgatggtcgcgacaataataattctaatcatccaatttttcaagtatgtggaaaacctagccatgctgctctgaagtgttatcaccatttcgatcccagttatcaaggtgaagcacaaaaatcttggacctaaaaccatttatactaagaaatctcctcaagctttgatttctacactagcttttgtttccgatccaaattggtatatggataatggagcctctcaccacgtctccttcgacacaaccaatctcaattcttcttcctcctacaaaggcaa

SEQ ID NO: 32110 - DNA, 3512 bp, Cannabis sativa
  modified_base (163)..(164): a, c, t, g, unknown or other
atttaattaaatatctagaagtaaataaatgaatgggcggcctcctatatgcatctaagcccaaaagccaaaatataggcgaacacaggttaaattgatttggatgggccctatcatgtttctagggttacacagatgaaagaaatacaaaatttacctgttnnaaattatttataggatctattgatgattagactattggtaatgaagattttcgttaaccaaaatttgagcctcgcagtgataatttcacacataaaaaatgaaaacagtaatgtaagagatatgaaaacaagggattacttacgtatggaccgtcttctcatattctgccccactctcaaccgttaaatctcttaacttttggccttcttgtcactggagtttgagtataaaatgatgtcttaggcttgccatataccacacacttttggttttttgtttattttcatcgtgagattggattgtcattctcttgtcaagatgccccatctgagttcagaaatttatttctctagattcataataccgaaattcgccaactacctctcttctctatgcgttcccaggaccttcaaacctcaatttgagttaaaaaagaaggattccaaggctaaggagcttccgatcaatccaaaccaagggaacaccgttgatcgttatgggcgatcctcacaagtgattgttgagagtaagtattatcccttgtaaattgtgatttgaactggattattattattttttgtttctccattaatcttttatctctgtctccacaggaatagacatagatctaaggtgacaaggaatccaggaggaaagttggcattgttttgggtgaattcagaaggaaagttggcgtggtttcagattctaaagaacccaggcaacccaagacccaagcctgcacaagaagacctttgggccaatctctctctggtattgaggaatttcctgagactgggaaaaaggtctcggcagcaggaaatggcatcttctaatgaggagaatgaggtctatgcagaggtggagaccttctacatgtagacggtctttctccagctatgtgtagccggtctttctccaagctatgtgtagacggtctttctccgagctatatgaagacggtctttctgtagtttatcgaccgcccttacattctttatttcggaagaaaacttaatggtttgcccctagtggaatttttgtaaagacaagtttgtaaatcgacctgggttttctcttatcttaaatgccttgtactattttcattcgaacttaatacaattgtgtttgcttgcgtttttattcacaatggaaacaaatatattttgatcaaatgtaaagtacttttgggtttctccattgctcgtaatcttcctgtttaagtagttagttaactaccaaacttttttattttcgagcagttgttaattctacctcgtcatggcagttataatctgccttaagcaaactacttttaatgattttatcactttgtatatttttaatttgctcgtatgaatagttagtttaactatccaatttctaggttcaagtacttataacaagacattgtgatgtctcgttgagcactttcctagctcgtgtgaaccgttagtatttaattttatacgcgagttataacttttgattttcctttcccatcagataggtttttaatcaaaaattatagttgtttgatccctccttcatcaaaaaggtttgattagaatgctataacaattcgacccctctctcgccaaaaaggtttggtcaggaagttgtaacagttcaactcctctttcgttaaagaggtttagtcgagatcctttaaattttaaaaaaaattgaaatggtgggtttgcattataccatgtatttctagatgaattctggttaatcatacataaatgccccttaagtaattttaaagagtcaaactttgtagttacttaaatagtataaatgattctctttattcataactgaagttaaaattttacatctgtaatgcgagttacatcatttctttattggtagtagggtcgcaaatgttcaacgttctagtagttctttattagcgagccattgagttgagctaatttgtaactccaattccaactactgcttcgatgacatatggaccctcctagttcgggttgaacactcctgcagatgcatctctcgtatactttccttagcaccaagtctccaacattgaatagtcttttcttgactcttttgttgaagtatcttgtaacttagtgttgatgcgctgcattggtgatttgcctctcagttcgtctttcatcaagcagatccaaggacaattttaaaagttcctggttttcttcttgattataaaactttcttctgtgagttgatatgttcacttcaacatgcagcattgcttccgagccaaatgctagcgagaaaggagtgtgtcccgttgttgtcttctcgatagttctgtgagcccagagtacttgtggtagctcgtcgacccacctgcctttggcagcgtctaacttcttcttcatagtatcttataaggttttattaatagcttccaattgtccatttcttgaggcctggatactgacgagaagctcttgataattttgttcttctcttagaatttagtgaacaagttgccatcaaattgggttccattatcggatactatcttcatgggaattcaaaacctacagacaatgttcttaaagacaaagtcgaggactttcttgcattatggaaacaaggggctcgacctccgtccatttagtgaagaagtcgaccactactaccacttacttagctcgtcctcgcccagtgggtaatgtcccaattaagtcatttccccatatagcaaatgggtagggcgaggtcatcattgttacttctgtttgtggcacgggaggtataggtgaaaacctttgacatttatcacatttcctgacaaactcatcaatgtccttattgatcgtttgccagtaatatccttgtctaatgatcttttttgatagacttcttcaaacttgcatgatccccacaaaagtgttcacgaatttctgtaatgattttgtttggttcaatagggagaacacaccgaagcagaggcattgagtaccctcttctatacagtttaccttcaattattgtgtagcgaggcactgaatacaatagttttcgcgcctcgtttttgtcatttgtaagttgtccgtcgagtaagtaattgatattaagagtcatccatgtaggagagttgtctatcatctcgatgtattacgtttcacatatgcttgactcgcttaacacctccacgggaactaagttcaattcatccaagtcattctacgaggacagttttgctaaggcatcgatgttggagttcagttctctcaaaatttgttcgatattaaagtaatcgaatctttccaagttcttctgaaccttctctaaatacttcaccatttttaagcctctggcctggtatttcccaaggacct

SEQ ID NO: 32111 - DNA, 2324 bp, Cannabis sativa
  modified_base (1584)..(1584): a, c, t, g, unknown or other
ataaacttcttcattgtttcagcattgtaaatactagtctaagttgtcatctttagggatgagtaaactagatgttgcatttacaaaatacttatcttatgatatctaacactattatgttgtctaacggatgacaatctgttggcgattgtcccattaaaaataactaaccaagttagactaacaatgaagattcaaaatttatactacataaccaataacaaaaaacaatataggttcaatataaattcgtgcacatattcaaaaattagtaaacatttagctagtaaaaacatgtaaaaatacaaaacaaacacatcttaaataatttctaagatttttaactagatgatataagtgtcccatttatgcgagagtcaaatacatcatcagttgaatagagttgttaactcagctaaaatggaaactattttagcaaccttttattcgatcaaaataagaatctgacgttgtcccgtttaggcgagagtcaaggtcattctcattttataagcttctaccattgtttcatactttgtaaaccctactctgagcaatcactattaaggtgatcgttactgagaataaaagatttacaataatacttttctttcgagattctacggtattaaattgctaataaatgaacatctattagggatgaatctcattaaaacaacaaccatgtagacccaacaatggagatcgaatatccttaaactaaagctcattattttaaagaattatattttcatttgatatctattttaatctatttatttaattaaaattaccaatttaaataaaaattttaattaatatttataaaactatatatacttaggtagatctgaaaaataaatataatttattttccatccctagtatcaatttttaataaatataataaaaattacttaatctaagttcgtccaaaattaattaaaattatttttttaacacaaatttagtaaatatatatatatataatcaaatttgaaatctaatgtatttaataaaataaaataaatcttgaaaaattattctaatccatgctcgtctagaattaataaattaattttcaaacataaagataatttttttatttaattaaattacttaaaaaaatatttattatttgagtatcttgaacaaatcagcttaaacgttaattttctatttaattaaatatatctaaaaaatacaaaatagtttcttagaaaataactatctagatatttcataaactatttattatttttctaattaaactatattatattttagtctatttattttaattaatcattaatgaaaattacttaatttaagttgatctaaaattagtaaattaattttcaattttaatctaattttcaaaatttgaaatatctacgtttaaaaaattaaatgcatttcaaaaataattattaaaataaataatatataatttaaaaattattctaatttaagtttatctgaaattaaaaaaatttaaacttaaatataatttcctatttaattaaatctattaaaattaaaataaattattaagtatcttgaataaaatcaacttaattattnattctaatttaatatctaagaaaagtatactaatttaggttgattaataaatcaattaatttacaacttaaatatatttttctacttaattaaatgttagaaaaataaaaaaaaaaattagttactagaaatggcttgtctagaatttatttcattaaactaagtgtatttttctaaattaattttaaaataatctaataaaaaattaattttcatttattttaattaattatgttactaattaaactaatataattaattaattatgttactagttaattttaattaggttaaactaatataattagcctaataaaattatttaaatacggtaaataagccctcatagttgggtggttcatttgaggaagagttgggttcagtatgtcgtacccactactatgaccccttaactctcacacaagacccaaaagagaagaatttaaactttaattaaataattgttattaattgaataagccaaatattaattggccctaaataaaactatcaaagttgataattttattttaacaacctagtatatttaaatatccaaaattaaatggactttctatatgcatctaagcccaacaacatacatatagactcatataaataattgatttggataagccctatcatgttactaggtttatcataaataaaagaaaattacaaattacctgttacaaattatttatttgatctattatcaattagactatgattaatttaga

SEQ ID NO: 32112 - DNA, 15875 bp, Cannabis sativa
  modified_base (15843)..(15850): a, c, t, g, unknown or other
cggtggctattggattgctatgggacacttggaattcattcgagcatgtttgatttagaggttgtttatgtgcttctcagggggggcatcatggcactcgtttcgcaggcaggttcatcatacggcatccagacagaaatggttcggagtaaagctgggcagatttttaatttgtcaagcaatttggaggcattgcgaatgaaggaaaatcttgctggtggtttttcttccttatcatgtacttctgctaaaaagacaaatattttgcatatggattctgcaaggttagaaaggaagagggggaatcatgtggttgttgctgcgagtcctccaacagatgatgctgtaattgcagcagagccactaacaaaagaggatcttgttgcgtacttagcctctggatgcaagactaaggagaattggaggtaaaattctaatttcagactttacatcagccacatgtgtgtaggtttttactacccaagggtagttcattattattcttgaagcttggtgaatattttaatcgtactgcctaaattgtccatgtgaaaaatgttttggaaagcagcatatttctcagtctgtccatctgcctctctttttcttggcataattgatcactttctgattgcagaatagggactgaacatgagaagtttggctttgagtttggctctttgagacctatgaaatatgagcaaatatcagagctgcttaatgggatagctgagagatttgactgggataaagtaatggaaggtgactacattattgggcttaaacaggtaatggtcttttttccctatcctctgtgaaattattttcttttcacaatcataagaatatttgtaagtgaaacagctacttgcaaaatgctgaaaaacaaatgtttcacattttgtcaccagttctgttaaatctttatccattcttatgggccagggcaagcaaagcatttccctggagccaggaggtcaatttgagcttagtggtgcacctcttgaaactttgcatcaaacttgtgctgaagtcaattcacacctttatcaggtcagttaaaatgatcttttctaatactttgcggtcttatactattgcttgtttacaaagtcttggcaattatctggatttgtttttttcttttttaatagtttcttagattgtaaacccgcaaaagttcaaatgaattatgtgatgaacctttcttcgcttggtactatgttattcaatttatcttagataaattttgtagtgatgagtgggcaaagttttccataatttcttatattatttcatcattattttcgttgttaaatatatgcccaaactcaaccgagacgggtagctcaattggtcaggcatgtggtttgctactttgcttaggtctgaggggtacctaaatagcagttgccatagcttcctggtctacaaatattgtagaattaggcggggatcctagttttaggaaaaataaatagtatatgcccaaactctttggctgcctgttttccatttcgaaacctcatatatacatatatatttagagatagatagattgcatatctaacttcttttattcacgaaattatacaggtcaaagctgttgctgaggaaatggggattggattcctaggaattgggttccaaccgaaatgggaacgtaaagacgtacctgttatgccaaaggtactactttactttagatcatctgaatgatatgatgtatattatatcatctgaaatatctttaggtggtattggaaaaatgattaagtgggttttgaggtattgcctctgtgaggcgaggcataggtcctatgtactttgagttataaactttaaaacagactataacttcatagaactttgataaatataaaattgtgattataaataacgtgcaatttcttaaaataaataggcgtgtaagaagtttaaatagtccaaaaatatgtaatgagccttcgtagaaaggcatgaagactatcattgaatactctacctctcaaacccgttagctcgtgtaaaagaataataccatttcctaaatcagttttgtctcaagcagccgatgaattatctctctgcaaaactgatacatctaaaatgacttagccttccacaatatattaaaattaaaatgtctgccttatgtcatctaaaatttttaaactaaatgcagttttgattgacctgtgcctcgacatatgaagctcacacctcatatgctccaaggcacaaccccttacggttttaacattacaagtgtaatgtttaatcactctgcttgactgctcatgggacacttgccttatggcagttttttgggaacctgaatatatgcctttctaaaacattgtctggagaccttgatttattgaagatgctgttaaaataatttcatggaggtgtttagaaaggctttgccaagcacaagattgttgctgcatttctaaataataattatgaggacatatcactttatattactactgtatcctctccctccccccctctctctctctgtctcattgtttctttaatttttgtttgtacttactcaatgatggagttacttttgcatgttactttggttgttgtgattaatcccacactgacagagtatttggctcagggaagatacgagattatgaaaaattacatgcccaaagtgggtacactaggacttgatatgatgttcaggacgtgcactgtacaggtaaaatgagttttatgatattttttaggtaatttgtgtataagctcttcaaggttgtcatgtttatgatattctggtaaattataaaaaaaaatcatatcttaaaatttgtgcttctgtgagaaagtgatgaaatgtagtgctctttctataggttaacctagacttcagctcagaagctgacatgatcagaaaatttcgtgctggtcttgcgctgcagcctgtgaggaactctgcttcattctgtttacattgaatgttttctctttcttatggtatgaaatttaattggtttttgacaaatgaaacagatagcaacggccctttttgcaaattcaccattcacagaagggaagccaaatggttttctcagcatgagaaggtttcttatataccgctgtattattgctccctgtaccccatttcagaaaaaaaagttgttgtctcttttttaattatttattcttctgtttttgttcagccatatttggacagatactgacaataatcgagctggcatgcttccctttgtttttgatgactcctttgggtatattttctatgctttctgaataatctggctttcaagtttgtagttcaagtggtttatcaataacaatgtagttgtgtatgatttcttcttatgcaggtttgagcagtatgttgattatgcacttgatgtcccaatgtatttcgtttatcggaaaaagaagtatattgattgtactgggatgaccttccgggtttctatctatccttaattgtcttgtaatttaatactttcccttctgtatctgtgctcatctttgtattgtaccgacacttttttccttcaactgtttttcatcttgccttttttttttaaaaaaaatacatagattttgtagcggacatcatacaaggctgacatggtattagttatttatgtcaggactttctggcaggaaagcttccatgccttcctggagaactgccaacacttaatgactgggagaatcatttgacaacaatatttcctgaggtttgtagcctatatggttaattttctgaatatttatgctctcctgcttattgatttttccaaatttcatattttctgttcaggtcaggctgaagagatacttggagatgaggggagctgatggaggaccttggaggagattgtgtgctctgcctgcattatgggtagttgtctttagatattatgcatcattactttgttaattgctcctctcacatatcaagctactagaatagcacttcactacaaaatttattgtttcctatgctcgtacaaagcagaattaataaaccttgcgtcatgaatatatgctctctgctctgtgtaagtattgcacttggattctgatgatctgatgacacctttctgcatgtagcttgtgcaaatatatttgaaattcattgcactttcttctaattgtcaggtaggtttgttgtatgatgaggtttcactacaaaacatattggacatggtagctgattggaccccggaagaaagacaaatgttgagaaataaggtaaaattatttttacaaattacaaagtccaagtgtcttgcggaaaaataactgcaaaaatttgagtgttttacttgtctagattaactttattgaaattagttcttataaattttctatttcatttgagtaggtcccaaagactggtctaaaaacaccatttcgggatggattgctccgtcatgttgcagaagatgttttaaagttggcgaaggtgagctatgctgctgagtccattttgatctttataatatatctatttaatatttttcctttaatgaatccattggctaaatactctgttacaggatggcttggagaggagagggtataaggaggtagggttcttgaatgaggtagctgaggtggttagaacaggtaactaagttttagatgtaaacaactagtttttgtagttatattcccagaatttgtttttttaatggacaaggaataagaaaggcgcaaagcttaggttatttttccccttgggtttaaaaaagctaagcttaaaagattagtacttgtacatagactctccaataggggtagcacaaatgatcagagatttgatcattaattgttatggcttcttgatcctcaaatattgtagattagactgggagcttacttaactaatacaacactgatttttgggtttgtggcatttaattttcaggtgtaacacctgccgagaagctactggagctgtatcatgggaaatggggacagtccattgatcccgtttatgaggagctactctactgagtactgaggtgaatcggattcttgtggactttagaatcttcttcgtgtaggcctcattgatctagatttaagctgttttccttttgtggttgctgacacattgtctcggatgaataaagttgtgttgtaaaatcttcacccctcagggcacctattgtagttgtcagccagaacaaacatggttcaggttgtgtaacaacaagtgattatctgaataatcaaacctcttgacatttttagtccgaacttactgtagtggacaactgatcatgtaagttttcttgctgaacaaaaaagtaccagttcgaatataacaccttgtggtgcaatattcatacaataataaatgttttattttctctttccaagagttactcattaaaattctttgctttaagtcaaacctttactcatggtttctctctagaccatgctctggtcatgtgactttcaacatgtgccatgtgcttttgtatctaaccttgcaacactattgctatcatgagatgttgatagagatatagaggcatataatatcctcgaaacatgaatacatatgatgcccattctcatgtgggctttactatttgcctgtgtttatactcattcagtggtcaagtgaatggttatgaacttgggttgtttttcatctaacatagtttccttatgtttgcatgaccagttgtttggatgtatgtaatcaaccaattcaattcaggggtaaaaattagtattatcatataatgacaagaggtaattggagttggagatgattttaggagaagtgggtatgttcttgaatgaatgattttgatggaattgtagtcagttgtggggtggctgtgaatggaacataccaacattatgtggtgataattgagatgtggacagttcatctaatccaactgactaatatacccctttgcattgataagataattatgctttaacaacaaatttgtcacatcaaacctctctttctctctctgtaaccttttattttattatcagttttactatgtttatgtaactcgttcagaattatttttttagcagctgttagtaacataggaatgtttttggctaagtcaacaaagttcatatgtatagccataggaaggtctacaataatccaacaaaatgtgaatctttttcaacagttttattagattttgatagatttttttcttgttgattggttgaatttgaaataatttgacaatcagaagcgcataggcatgtgcaaatatacgaatgtcattttcatgtttagcttctgaatgtacagtttaagttcatttttgaggcattggattccgaattgccctcgtgaggttgtagaaatgaaggtgtacaggaagaaaacacaagctgacagggatatctcatgcctccaataattataactccctacctctcacctccatacttccttctaggttttaatttttaattttattggcacaataataaggcataaaacttctattctttatatacccaattatacaaaacttgatctggatctctcttaaacaattgcacaatgattcatgtggtgtaactaccctatctttttgtgaacttcactatcaaaatgccaagttttaaagtatttattaaatgttagcagatgcgaaattggctttagtcttttatttaatcaatagactcatatgtattttgtttctgtcctttttttttttttttactttacaagggtagtcttatgactcttatcttattgaacatacttttttccactgatctaaatgctaatagtattaaacggtcaagtaccatttttgacattatcacaaaatgataacaattaatacattacttaagctgatgtttatatattaatttgctagatctgtttaagattaaggattatattatagtttgccgtaagtttaaggttgattaatagtttgccatcatattaaggttgattatagattgccataaatttaagtgtatcataattttacccttttgccgactctgaaagagaagctaaactattttagttgtggcatctacttcatacatttagggtaactggtctaatcaattattgagaagatatgaaatagctaaacaaataaatgaaatcaattcaacagctattttgtttgagatatttgtgataatcttaaaattagttgacaattagtatgataattaaaaaattaaccatactgttaccagtcaaaatagatcaagtaaaagcaatccattggttttcagatggatttgaaagcaatcatgttagacaaagcaagattaccaaataaagaaatggacattttagggatctaaaaatgataaatgggggattaaacacaaggatttgttggtaatttaagttagtgtgggcagaaacaaaagcttgcatcttgttgtcacattcccatatccagctcactactcttgttggagtttgacatacctttaatacaaacaaacccacatgacattattaattgaaactttattattattattgttattatttgtttggagagagacagaaaaatatcacactctcatatcttgaaatccacccttctcagttctaacacctacaaaaggccataccagttccattcttccttgctctgctcttccccactttctcttctctaaactcttttaccattttccattacactgaaaaagtaaaacatgagagaaatcctccacatccaagctgggcaatgtggaaaccaaattggaggcaagttttgggaggttgtgtgtgatgaacatggtattgatacctctggaaactatgttggggacaccccttgtcagctcgagagagtcaacgtttactacaatgaagctagtggtggaagatacgtccccagagctgtccttatggaccttgagccaggaaccatggacagtttgaggacaggtccttatggaaaaatcttcaggcctgacaactttgtgtttggccagaatggagctggtaacaattgggctaaagggcattacactgaaggagctgaattgatcgattctgttcttgatgttgtgcgcaaagaggcagagaactgtgactgtttacaaggtaggtatacaagtgtttcaaattcttcctaattcaatccaatggtgctagtactaagcgaactctagacactatgaatcaaaatattagatcaaaaagacaatgacactaacttaaacttctagctgacccttcaggttgaccatctgctatacaatgtaatgaacagaaaatttattatagttgattagtttctaactcagaaccgctttttatatgtcatcttatatttgaatacgagaatattctaagtagtgaatgttatgtaccttgtacaacacaggtttccagatttgccattctctgggaggtggtacaggttctggaatggggaccttactgatatcaaagataagggaagaataccctgatagaatgatgatgaccttctctgtgttcccttctcctaaggtctctgacactgtggttgagccttacaacgccacactttctgttcatcaactggtcgaaaatgccgatgagtgcatggtccttgacaatgaggctctctatgatatctgcttccgaactctcaagctcacaaatccaagctgtaagtcaactcttctctttagtttacttccaaatgaatgaatctcgtacactgtaaaatcacaccttttgcacttgacaagatcataacctattcagttgttcaagacttataattccaatacttatctgaagtaacatttcagcttcatatccatgttatcatctaaaacttgtgttaaaataagatcataacatgttaacttgttagaacaccaaaaacaaagttttgagactattttgagtatatgtatataatcaaagaaactaagatttgaacgaactgactcttctcttaactaaccaataagccattgattatcctgaaactgcagttggtgatctgaaccatttgatctccacaaccatgagtggagtcacctgttgcctccggttcccggggcaactcaactccgacctccgaaagctcgccgtgaacctaatcccattcccacgtctccacttcttcatggttggttttgcccccttaacctcacgcgggtcccagcagtaccgatccttgaccattccagagctgacccaacaaatgtgggacgccaagaacatgatgtgtgctgctgacccccgccatggacgttacctgacggcttccgccatgttcaggggcaagatgagcaccaaagaagtagacgaacaaatgatcaatgttcagaacaaaaactcttcttacttcgtggaatggatcccaaacaatgtcaaatcgagtgtttgtgacattcccccaactgggttatccatgtcttcgactttcatgggcaactccacctccattcaagaaatgttcaggagggtttctgagcagtttaccgttatgtttagaagaaaggcttttctccattggtacacaggtgaaggtatggatgagatggagttcactgaggctgagagtaacatgaatgacttggtctctgagtatcaacagtatcaagatgcagtggcggagaatgatgatgagtatgaagaagacgacgcagaggagatttgagctgaatgaagtgaagaagaagagtgtggcagggggcaagggggaatgtgtaaagaaatcttttggtcaagggtattatgggaagaagaaaaaatatatgatatttgatatttgttttgtgcttcatttttaataatgggcaagcaagtgcaactacatatgtgatatgttaatctttgagattttattttttatttgtatgtatgttgttaatttggttttatcttatataatcttcatatttatttaattttagttctgtgtttgcttcttcttttcagtaacttttctagttttggtaattagattacactttctattttttcacttcaaaaaaatacataagaattgattcttatttttatttttttaaaacaaaaacgtaaaaataagtgatatgtggatttggcaccacaatggatcaggttatcattttgcctgtactttggaaaattgtgatttgtcttcaagcttcaatggtgatatatgttttggggggtttaaatcttccttccaaagtgaaaattttcggatggaggataatacaatcttctcttccagtggcaaaattgttatttcacaagaaaattttaaactcagccacttgtttcttatgttcaacggcttggaaatcaataggacatgctctatatattttggcaaactactggttcatccataaattttaaaagagaggatcatatgaaggatggcgacaactttatgcatttatcaacatttttttcaaggtctaaattagagaagattatatgcataatgtagtatatatagtcagatcggaagaactttgtacatggtaaacagtctaaaaattatttcaaatttcgtcccaagctgctacatatcttcaaaactttcaatactttaataatgcagccaaaccagtagtctcttgtcaaattggtctagtagcttcattcccgtggcaacctcctccaaagaataaattaaaaatgaatgtcgatgcgacttttgattcttcgaggaacaaaattagtattggtgatttatttggatgtgttcttgctgcactatctaaaccagctcttggaaattttaggccacagaaaatgaaggcaaaaacaatgttctttggttttcgttgggctgagcaattgcatctacaacctaactttgtaaaaattgattgtttgatacttgttaatgctttgaatgatagctcatcaaataattctagtttacatgatttggtacaagatgtttcgtatcatttatcctcactctctttttctgcttgtgtatctcatattaggaggaatgttaaccaaaccgcacatggtttggctaaacaagctttacagtaggataatgattgtatttggttagaagaaatactttctaccattttctttgttgttgtaaatgactatgtttggtttataataacaaacttttcctcataaaaaagagaaaattttatttgcacctcacaaaattataaacatatcttaatatttaaaagaattaaattagtttttaaaaatcactcacgtttttaattttttttactatttaatgttagtttcaattattgctttaatttttttttaatcatgtatatatatttcaattttttatctagtaaaattttatataattttttattatgacaaggaataatacaattttaaaaaactaatataaatttgagatatattattttataaaaaataaattattaatataagatgcatttataaaattttggggtgcgattaaaattctatagcaatttttctaaaaagtaaattaacatgagaaataaggctagcactaaaaatagagaataaaaaaaagaataattaaataaggcatcattttttgtaaaaaaaaagttacattttttacgttttatatttttacggtttttcatagaaataacacaaaaaatataaaagaactacataaaagtaacataaaaataatatttaaataacatcaaaacaacaacaaaaaataacatacagataacaacaaattaacaagagtataacataaaaagaccgtatattcggtaaatggtatcaacgatgaagacaagacaagagtcagtcttttgacaatgcgacaagacgattggttgcttggttatcatcgatgaataacaactaccaaatgttctttattccttggaatatcgggtaaacactatttaattttttagtgctaattgttcatttctatattgtaacttgaaattatttttatactatcttacttatatcccaatataattttttagtgcgcattggatgctagaggttgttgcgcaaaggaaaattatccatttagaccctatacatgaccaccaagtttccgaacaaattactcaaatgttgagaaggtaataatttaatgactatttatgtaacaaactatttaattaactaataaattgaaatgctaatataattttttaaacagagcatacgaatatataggggcatcaaatgcgtatcttggcccgtagccaggaatttcactagcaaattgtccaagacaacctaaaaatcaagaatgtgatttttatgttttgaaatacatgactgatatcatcgcacgtgtaaaccccaaatgttacatacaagatcaaaaaatttgtaagttttaattattgattatagtatttattataataacaaataataatatatatataaactaatgtaaatttttacttttttttaacagtttggagtagggttgtacatcagtcggtttagtcggtttatactacatattttctaacccaacgtaaagatcggtttgtaaaattctacatacaacctaccaaattaaaaaaaaaaaaatcttaacccgacctacggtttgggcggtttgggtcaatttttaacccgcccaattaactgattgggcagtttagaattttgtcgagttatgtcggtttgtattttttattggttttgtcggtttggtttgggagggttattcgggttgggcggtttacgacaatttttgtacacccctagtttggagataagcaacaatacaatccaaaaactgaattgttaccaatacaacgacagtagatagaacagttgatggcggtgattcatgatggcttagacgattgatgctgaaaggcctaagaatttttttcccctagcttatttttttaggttaacttgtagttagatttattaacttgttaatacttgaactaattttataatatttgtgtaatatttatttgtaatttatttaattacttctatgaaatgaaattaggtattttgactaatcctaaaattaatttaaataatatttaatttaccttttaaaaaaatacatatctaatttaaatttaaataaaaaataataatatataaattaataaatatataatttaaataaattaaattaaattaaataaactgaaaaaaagtaatccttagggcttttggcgtcggttcctaggggtacatatggcgttggttatttgttaggaatcgatgccatatatacccctatggcgtgtcggttcctagcaaataaccgatgacatatgtacccctatgacgtcgattattttagaccctacaacgtcacctggatcagcgttggtagtgaattttgtcaaaatcgatgctaaaaggccttaaaaatcgtctttaaagagtgttttcgtagtaatgggttaaattgactatttatgataataatataggttaagattggtacatgcaaattcatgtttaatttattaatagggtaattgaaatctatttttgatgaagttggctttcatataaatatatttttatgaagcttgccatctccatcaaaattaatctatagtactatataagaaatatagtgggtatgcatatctcacattatgtacaatctctattttgtagtatatattgttcattatgtaggtaacaataattgaaagggtattaataaaatatttaatcacatcgtgtaaattgttatcttaaataacaatcacgcactagagacagaagcaaagagttgaaaaaggagagaaagcgcaaataattgaaagcaaaaaaggttgaggttggtgaaacatcaaggaaaagaagaaccgatgtagaggaggagaaaacaatggagcacaatagtgatggtaaacaagaagaggtggagaatgaatcggaagtacacggaaggtgtgtctttctcgactttttagaatttataagcattttatgcctgagcagaaggaggccataatagctgctggttttggatcttgcataagagatgatggtccatacgtcaaacattctttacttcaatagattgttgggaatgtggacatcactgcatgaacttttaacatatatggatgacaaatcccaataacactagttgcattcagacaagtaatgggtataaaggatgggggtgaacttgttgtgatgattgggaaaaacaatatgaaagagattgagcaactccttaatcattggtgttagtaagcaactagttagcttgaatcatttggagaaagacctggaagactgctaagactacgactatctgtttgtaataaaatttgttctagtagttcttggtactattttggtgtctaagaccctcacaataatcaacagtggctatatccactctttgcttgcttttaatactatcccaaagagaaaattggccacaatgggagtaaattatttcatgaattcagtctggagacatcaccaggccaaaattggaagcgtttctggatgcatgttatttttacaagtaagaggtgtttttgtttgaattttggttaaaggacttgtaccatacatatgtgtaactccttataaaaatcttgtgctttttctacgacaacttctttatttaaactctgtggattgggatttcaggtatgtggataggaatgtggcccccatcacatggtagaatcgaaagcgatgcaaaaaattattcgattggctaaaggataatgggggaacatagcatgccacatgtaattattaagaaatgagaagaattagttttaaaatttcaccaatgtaagaaattaaaaattatatttttgtttgtaaattaagttggcataacattctatgctattgcgtgaggcaaatcccaccaataacaacaaatgaattgaaaagttgaggcatgagatgaaagatatgaaggcagtgttaatggaagtggttaactttgtgaagtcttgtgtagttaatgctactgagaagcattcaaaagagaaggaataattggaggctgaagtccttttctaagaggatgagaaatcaaagactgaagcccctatcaagagggtgagaaatcaaagactgaagtccctatgtaggagggtgacaagtcaaaagtccttttgcaagagggggaacaatcgttagaggatgagcaatctgtgaaaagcccaagcttaatggacctgggggaggcggaggaggtaaaaatgatcaaactccaactagccaaacacccatgcaaaatgtaattgatcgaaagaaggaaaaagactatagtaaggatgtggcttcaaatgtgaagatcactccccgaagatgtactcaatatagacaagatcatcaaaacacaacctgagaagaatggaaaggagactgagagagaccagcgggaagcaaagcataatgttattgaccttgatgatttctgggaagttggcgatgccctggagatggcaactaataggggtgttcacggattagtttggtcttgattttcatatttttttgaacaaaaccagtataacagttttttgaatattggaaaccaaaccaaactaattaattatttaaaccaaaccaaacaaaactattaagaatggtttggtttggtttggtttgaaacactgtttaagtggaattgataattattaatattttttaagtaattgtactaattttaccatgttttgaattttctttttcaaagtagcttgatgtacatctctgaaatttgtaactcgcacccctggtcgatgcatgcaagtttcttacatgaccaagttggttgaatttccaccagtgacattgttcgaacatcctaccattcatgcatgacttcgagctgttgagaatactttaccagcaagatctagatttactaacaagtnnnnnnnntaacatcctaaatatgaatatcttt

SEQ ID NO: 32113 - DNA, 1985 bp, Cannabis sativa
actaatacttttaaccacggaccttttagtcacaacatataggaatagtaatttataattagtcacaatttttttacttttagtcacaattagtttaatttgttgtcattaaaagtaagattttttgtagtgctaagtgtatggtaaataaatgtgtaacttatggttttaacctacacttttaagtaacctacatgttgtaacttggagaggagttacaatttgttgttatttgtaactcttgtgttgatcacacattattaatgtaataaaagggttattacacaatttgatttaaggaattcaaaactatgatactatagttgttacaaaatagattaatactcatttatgggagagaaatgaggtggtgtgtttgaattctaagtgtgataaacactataaaaaaaaagtctttggtgctcatttcggatgagaagttttctataaaaaaaaaacactttgttagaaaatcctaaggcttgataattcccaaagctatttctatgagagttcccttagtgcttagagatagggagaaataaacttttagacaaatgtgtaataccttgttcaagtcatggtaatccccactaatctacactcgaggttgtgagtgagtgtatatatattcattctcttgctatatatatgtattatattacatgtgttgtaatcttcttcttttacctttcatatatatatatatatgcaactaggtggatcttacgtgccgaaccacgtattgttatttagttttatttaaggttttgatttttttaagattttaataactaaagtcgtatgattagttgaacgatttgttttataaaagtaaattgtgtgttggtgtatttggtaagtaaaatagttgtgtctataatcttatgatatgtatattgttcttaataataaaaagtacgttaatctcaatatatacatactcatacagtagttatccttaatgtaaagaaataatttatgataagtcataacaatatataacatttattctttgtttcttaaaaattcaaaggaacaatgtatgtgttttgtaaaatttaaaggaaacattatgaagcgaaaaataaaaaaaaaaagtgtcatcttaaaataaaggaatagaactattgaataaagtcttaatgcggtcaccaagaacaggaagtccctctaaaagcttcatttggatatagtcatttgatcgagcttgcttgaagaacgaatactttagcaatttctttacagaagggtgccttgaatggtcttttatcaagcaagaagcaaccatttgcctaaagctaaaataaataaaatataggttaccttgactgaaatgatgaaatgcgaagaacgtacaatcggaggctcaggcagcggttgctgaaggtgcggtggcacgtcctcgttggagtctggtggagtttttttttttattattattatttattttttattttataaaataaaattgaaaaaaaaggaagaaaaagagagaaaaaaatgatccggtagagaaaataagggcttgagatggtgaaaatggtagtttatggggaaaataggggctgccgacggtggtgggtcggaggagttgcagagaaaatcaaggaagaagaaagagaaaaaaaataggaaaataggggagggggttcgtcccaggttttattcagcctggacttttgccggcgcacttaggcgcaccgacaaaagttgaagctgaacaaataaacatgaaacgcagcgtttcattaatgtgggaacttttgccggcacatattagtgcgccggcaaaagttcccatcagaatttttacttacgttttcatttggcgggattgaccgccaaaaaatttcacagcttttaccggcacaattgtgcgctggcaaaacacaaaacttgatgcaatatgtcgattcgttaaaatgtcaatacttttaccagtgcaattaagtgcgtcgcggcaaaagttttcacctactttt

SEQ ID NO: 32114 - DNA, 2117 bp, Cannabis sativa
ttgcatccgatccgatcaaattataattggatatctgattctattggatcggttggttgggattggatttgattggatgactttctgcacacccctaattaagtgttttgagtctagcaataaaagggatgagtttatttctatatatatatatatatatatatatactctaaatatctaagaaggacgatgatcacttaatatggaccaattgaatctttagttttcatgtaatggatgttagacttattattgtggactaatataattatgagcttaatacaataaacacaatcattaactatgtgcccaatatttgttcactaccataatgggatggttaataattatatattatgttagaggcacatgagagcacccttaaaactatagtaggcccattaaattatagtataccattattggaccacttaagcccatttagtgagtaaccctttagggttagaggggcatgatatatatatatatgtgtacgtcttaagtgaagcgatggtaggttaatggtaataaggtgaagaggggatagctccacattgtgctcctctccaatcttggttttacattgcattgttggtgattcttggattcaaatggctcacatggatggctcaatgggaggtatgtgtgtgtttatttggatgctctaaataaaatatagatattggttgatgattatgagtaataaagattagcatttaatgtattttggttagctcataatcatagaaatttaacacgtatgagatatcattttttttggtgcaataattaagcaaactaaaaagattacaagatcgcacgtaaattagttctctaagtttcttttaaaaaattcaaaatttttataatgttcacaatacaatgtcatatttgatactatatcatcattttttgtacaataatttagcaaactacaattattataaaaaaccgcgcggagcgcggaataattccctagttgtaaataatacatatgtctcaaagtatttcttacacaacaataaaacaacattaatatttaataaacaccaactatataaacaaagacaacactaaataaaaaagcacaaaaaatagtattgtgaatcttctattacaaacattgaaataaataccaactgaaacagaaatatttacaaaaattttcaacttttatagtaattgaatgacaacattgagtcatcaagttgggtatccgatttacatgaaatctgcaagaaaataccaaacatgtaaatacctttgcacatttaaaataatatttaatgaatggtaaactattattctaaaatcatattgacttaccataaatgttgttggccatgcaatggaccctccaacagcatcatggattgtctttatacatccatatagtttaatcagtagttcattaggcttgataggaactttaacaataacttcaggaaaaaaaaagatctaagttcttctcctccaacttttttagatggatctttgctacaaacgataccaatagcaatggttttaggctcattagtgacattcttaatgttgactgtttccccaacctgcataaaaaaatttataaatcaatactaattattaattaagggagaagaagtagtgttgaaagtggatgatcaggtaatgagttcaagattattgacattatggaaagaaatgtgcacttttataatctcattgcatccctgcaacctgcaacctatatgatgatatcactttctgttgatatgcttcaacaaagctagtagaagctaactataagatatacatatacatacatatagaccgagaaagtaatgtagagaaaaatgatattttgagaatgtagatacaattcagagaaaaattaagtgataaaaattgttgtgtatgttcaagtttcaaatgtgatgcaaaagtgatgagataatattttataaaactgataatataagagtactagttacctcaatgacaagagtatcatatgcagaagatgaaaactacaattgacgtctagtttctttattaagtgaggtgctagcatttatgtcctacatacaataaattaacaaaacaagtatatagttgatagaatagtaagttaaaaatca

SEQ ID NO: 32115 - DNA, 2820 bp, Cannabis sativa
ttaggaataatcttgagaggtacaggtggtagagcttattatgtgtgctattctatctaaacagtgtagctgttatttgtttaactttctcattatctctgttgctgtttagtagcgttcccttatatttgctgctgctgagatgtaaaactcgtaaaaaaaatgtgtgttgtgctgctgctatagttataccatgtaattgcaagcggagaagcttgttttttcgttggaaagaagaagataaaggttgaagttttgagtttaggttgaagaagaattagctgttgtatgaaataaaatttgaaaatcaataaaataaaacacaacttcattttggttaattataatataattatttatttatttatattttattattaagttttcttcagtatagtttacatttaaaatatgaataattgggttggaagtccgtaataaaagaataattaccaaataatagcaattatttagtttggattaaagttgaccttttatatcggagaatttggaggaggaatcaaatatgaccattagtgacctataaatagttgtcacaattcaggttcccacaactaataaagtcatttattattgttattttttggtgtagcagtgagaagtttgtataagtttttactagatgtaaacataaagttatgtaagtcaaaattatctaaggatgagtaacaatattgacatcagtgttagtgatttgctgtgatattaatcaagttacttagatgagtttggaaattttgttgtatactaggcctaagtttactgtatgatgatttttaaaaaatataatatttttatgggaggcacaattcattttattctaattaattttgtcatatagaccaagtcaatagattaaagaaaaatagtttattaaaaaagtatgtattaaataaaataattaaagagttagtataatattataatttcctatacctaaaattcagtcgtacttcagaaagtgacacatgtcagtctcagagaatatgaatcaacaaatataatgctaattatatcattaaatataaaatggaataactcattaaatgcataattaatagagtatatttataactccctgactatatcgtcttaagcaaaattaggatgtacaaactattaatttacgtattgacgaggaaccattttgcactagaaggcacaatcccgagagagacatagacaacgcatagcgaggcgtctaacttgctatacgtaaagaggtattgacgaggtgaattggttattagaacacttagcatataatatacattataataactaagtgtaataacttgaaggacatgattgtccagtctgcaaggccttatggttaaagagcagttcttaagtttgctcactacactggagctcatgccactgttggaatacaattaacttaagtcattcacttatgtactaggcgagatgcctcagcgaagtacatttggtagcgtgtcctaatttacatcagcgttgatctccttacaaacagtttaaattatagctgtgtgatttcctaatattaaccgcacgtatttaagtggagcgtaattaaagcccacaatttcggggaatattgttatggtattcaaattttaatttaattaactgctaacctatattactataaataaccgcagattatacaaaaaaggggacgaaaaaatctttgagagaaaatggagcatactgtttgtcaaaaacccgacttccgtattcaaaaatatctaaataagatagactcgtggactatgcaaagttagctgcagtgttatttttatttctatcatttttcttagatctcttataatttctgtgccaaatctattacgaaaataggctcataatcattaacgaaaaatctgcgttaacagtttggtgcttacattgagcgcctacgtgacaaaagctcagaaaaatccctcctaactaaagaaggaatttcttctccatggctattaatggggaaaattacaacactcatcttgaacagactactcgtcgtcctggaaaagagccaatgggctcacggaggccacccaattcatgaacaacgcattcaacacgatcaacacattcaagaagaagccaacatgatgatgatcaaaacccaaaaacttggaatgaagaacacaacacaaatgtcaacggttctacgcctatgagtgagggtgtctatgaccccactagatatataccgttggtcgagttggaaaatcatcaactctggcaacatctggctgaggcaaacaaacaaaacgctgagatggaaagggaggcggtcgcaaccagggtaacacaagaaaacaacacacaaaaccaacctaatcctggagcgagaaggccgcaaggtagacctcagggctcgagaactaggaggtaggagacggctcaggaaaacccccaaaacactcaggagggacaacttggggaaactggggatgttcctgaagatgagcaaccaaatgactaggcacctcgttaagaagtgcatcgaaggccctagggattcacaacctaggagaatgaacacaatgatttattggagtcttctcgtagaaacacgagcagaatacaatctaggactagggaataagaaatccatcgtggtaacgagagaaatcatgggtctgaacctaggacaagcgggttgccaccgggacagcgttaaggtccttgtcgcactgatagggaggaggcatatacaaaccccatcaagggatatgtatcaaatcttacccaaaagatcaggcctgtacatgacgaggtaagttctagctgttgggttttatgccc

SEQ ID NO: 32116 - DNA, 3324 bp, Cannabis sativa
  modified_base (2097)..(2100): a, c, t, g, unknown or other
aatctcctttcccaaagaaaatctctcatcattttttctaacgagaatgatccccacgcatctgtactatataactaaaacaaatgtatataaatagcaggaaaaaagccccaagactcaaaagcattgctacatatatgttttccgtatgctccataatactatttatttttcttttttttttgtttattttttctaaaaaaacaaaaaaaccaacaaccacaaagcagatttacttatatgtagtttgcttttctttttctggaagagatgtaaatacatgtccatgagtgaccttcacccaaatttattgataagcctcagttatggctaatgaattacggtggtaacactatttttactaacagtaggttgctatcataatatagcatggaaagcctagtaatgttgaagaaagaaaaagaaaaaagatttatcacattaaactaacagaagtcgaactttcaatatatgatactagagtctgattagatattatcccaaaagaacaacatgaagaaagctagactatttaaccatattgcgccatggagtacatttgcagccatgttataaaaacaactcacattacatgcatataaatttaggcaagcaaatcaaactatcaatgactgctttatttgaactctttccccttaattttgacaaattatacaaaaactttacaccaaaaggacaagcttaatattgaaaagattcatttcaggtaccaaagtaaaaatatttgcccatgtttttactctacacactgtcaaaggaaactgaagaaatattgtaacagtttgttcaacaacacattttgagaatcatagaaacattacatacctgagttaaggaaacatctccatataatgccagagcaagcgtccttggaattggagtggcagacattgcaagaacatttggagccatataattgtcaccttttgaggtctcatctgaattgcctgttgcgactttggagcttatgttattatataactgcaggtagaactcccaagttacctcataagtcagtgttgatataagtaagctataaatgtaaaggtcgtaaacattaaacattagttggtatagtccttttcttatggcaatccttttcgggttagattgtgatcttcactaacacaatctcctatagttggtctgaataaattgactaaaagagtttacaataaagaagtctaacttctagctaatcaacaaacaacaaacatgttagaatatatgagttatacattagttgtagaaattaaggttaattgtaattagtaagtttcctattttctcttctagtttcttatttaaactttctaattttgtatataaatacacattattttattgaataatatacaatttcattcattgttttctacatggtatcataacaaaattataaatttgaaatttgaaattagggtttatcccaaaattgaggtttgcaattggatttgttcttcatctttcttaaggtttatttttcgaaaaatacatttagagagcacgtgagctctcaacgccagcaccaacagacaacccagccgtcaatctgccaaaccctagagtttggtggctggaacagtagcgcttgagaacacgcgctgccagaagcttcagcgacaactcccacgcgccaaggcgtgggggcacgcgtgaggtgtccttttcagttgtttctccaccggttgtttttttcggtgtttctgaccttttggtgcatccgtttcgaccattattctcttcttttatgatcgttgaggtttgttcgtcatcctttggtgtgattctttgtcctttatctccggagtttttctttgtttgtggtttggtttagattctcctattttggttgtgagatttagattgctaactcaatatctcaatttgttcccagcttgttgtctcattttgttttctcctttattagatttgttgcttggtttgttgtttgagttagtttggtgggacgaatataatatttataatggcttctggaactccaattcttgtttctgcggatgaatatgccaaattcttacaatatcaagagtctcttaagtattcatcttcttnnnncactactattgttgattcaggtaaaccaaattcgtgtcacctttcctcgtctttcaaatgggtcattgattctggtgctacaaaccatatgacaaataattttagcttcttttttaatcttcaacctcacgcttccacttctactattacctcaactgatgggtcacacttcacgtgtgttcttgggtctggtacaatcactcctacaaacataatgttacttgaaaggagcaccaggacaaggtattgtttacagagatcatggacacacccagattaagtgtttctctgatgcaaattgggcagactccaaggtagatagaagatccactttaggtcattaagtttttgttctggcaatctgatctcttggaagagtaagaagcaaaatgttgggtctaaatccagtgcaaaatcaaatataaagctatgccataatttgtgtgtgagatagtgtggatttatcagcttttaactgaagtcgagtttaagactttagtttcagcaaaattgtggtgtgataatcaagttgctcttcatattgcctcaaatcaggtgttccgtgagcgaactaagcacattgagattgattatcatttgttcgtacgaaaattcaacaagatcttatcttcacaggatatgtgaagactgaaaaacaattatgggacattttcacaaaagctttgaatagggtgcggattgattatctttgtaacaagctggacatgattaacattaatgctccaacttgagggagaacgttaaaatatatgaattgtacattagttgtagaaattagagttaattgtaactagttagtttcttatttagacattctaattttgtatataaatacacgttattctatagaataatatacaatttcattcactaatttctaccaaactctcactattctacaatgagaactcatacaactactaaaaatatagaactttatcccacaacttccaaaattctccttgtatgttctgctccaaccaaaggacatatgtggaagacttatttcttcttcactaaccattgtataacactattttaagatttaactggagcagctcttcaaatgcatccaaaggagcatttcaagcccagacgggtttcaagaattgaggaaatagactaaaagtcagtcttcggtgctctgacatcgtgccaatggaatcaattatacaatacggctatgtttggaagttagatttt

SEQ ID NO: 32117 - DNA, 3206 bp, Cannabis sativa
  modified_base (2039)..(2045): a, c, t, g, unknown or other
aataagtattcattccaaaatactgcctaatattcacataaaataatctaggattttctaccaaaccttgtggtaaaaacaccctgaaataaaatgcctcacattgtagagctcttcacaagctttgaaacattgtatagaatgtctaaaatggacacccgagtaaaaagttataactaaaatatgaaattcggtattttccaaaaactaaccaaacagaatttcaatttgtaccatctggaatttctgttctgaacagtttgaaacacaattttcctcaacttacctactaattttttaaaagaatttctagaaactttatagggcacatttgtaattaatttttatgaaagacatatattttttttttttgaatgaatattcataagctttattaaacttcaaattctgctaccaaacatgatagcagctcagttggaacattccccatactgaaattacattcaagatataaactagaagctcttgtaaaagcatgaaccactatatttgctgaacgcttaacaaaataaaaagaaatattttatcacaaaatacaaattcgttgccaccaacattattgaaatatcaattaattcattgtctataattgaaaggacacgaatatataaattaattacaaccacattttacaatttttttctcaatttctgcattcgaaagtacatgttaaaatatttttaattttttttctatatgacaatgttcgttacagtcaaagtattatccctgtaaattttgaatagtttacagtatcgagaacaaagtttttgatatttcaatttaccatgtttttgacactgtaaacttatcgaaatttttcaaaaatttaaaaagataatattgtaactataacgaacattgtcatacgaaaaaaaattaaaaaagtattccaataagtatttcgaacgtagagattaagaaagaaattataacagaaagttataattaactcttttcgtatactaattacttaatgaactctataaccttaacattttcaatagaacatgcaaagttgatagtactaaatccagcagcatttgctattgcctgaaattcatgttgatttctctctttgcctcctggaatttgacttaacataaccaaatctaattgaaaaatactcttagcttcatgagtagtctctgccattattggaacaaccatatcaacaacaataacctttccattgcttggaatagcttcataacacttcttcaatattttcacacaatccttatcattccaatcatgaagtatccactacaaaattaaaataaatgaaatttacataatagatcaaaaaaaaattaaaaaaattataaaaacatatcaacacggaaaaaaatttatttttactgtttgaacttttttatttacaaaaatatctctttagtaaaattaatatactgttttttgtttgttttatagttgtcatgatattgtttttagttgttttatagtttatttatagttgtcgtgaagttaatttctcgttgtgtttttactttttgcagaacaaagtatatttttgtaattttaaaaatttacgagcatatttttgtgattaaaaattttaaatcgtaaaattgtaaataaaatataaaaaataatatttttgaaaatttctcataaaatatatgcaccgaaatactaaattcaattatgttgttatagttttttttatcgatcttaatcagatgtaattagcaaaaaaatactgtcgtgcatagtgacagagccacttgatgagtaggagcatgtagcccttcaaacaaaaagaatcttatatattaaaattgtaaaaatataataattatatagggacatgattttgtcctgtgattgtactttcacggaatgtattctgtgatgtacgacaaccgttagatgtgagagttatttgatctgagggctgagattgatctaggggtaattagggttaaaaaatagtaacgtaccctgacactcatctaatgtatcctgagacccatctaatgtaccacggaatacannnnnnnaaagtacatcacgggacaaaatcgtgtccctaaaattatatatagttaataacaacttaccacccaaattaattttttaactcgataaacttatacacacatatatcatacaatttttttttattttttatttttttttaaaaaaaaggaaagaaaattactttatatatcattttttaacttttttattaatttacagtttgaattgctctagtaattgttctggtagtttctgggtgaattttatttgtgagtcaggttgctatgtgggttgttatgtgaattttcgtaaatataaaaaatgaactcctttaaagtataaaaataacaaaactcctaaaattaattaataaaaagtttaaaaatttaaccttcatgaaaatggcatcaccatttggaatcttttcaaacatatctccttcaacatgttcaacacctacaacaatacatataattagtattaattaaaattacttataattattatttttgctaatttttcaaattaagaaatatactattttgaattttgtgttttgtaaaagttaccgattagacattctgttttattaaataataaattgaaccttgtattttttaaaatagtactcttaacttattttttgtcaaaataaaaattaataataacttgatctaaaagtgttatgacaaaactgattacattttctacatctattcgtgataagaattatcttcaagttacttataattataaaaaaaattatcaaaaataaagctcaaggtcctatatatttgtactattaagaaaaatatagagtatattttgtcatttaacaaaatagaaggtctaatcagtaatttttgtaaaacacaagatctaaaatagtatttaccataaataaataatatttcaattcaatttatttatacctggataagtaggagcatttttgatgacatgaggtaagtcaaaattaatagccttaatttgaggatattttgaaacaattaagctaattgtgactccaaagcctccaccaacatctactaatgtctcaatattgttctcaaaccctttgtaagactcaattattttcttggtaacaattgtggcttgattgtacattgctgagttaaatactttaccaaatctttgatctgattttccatactcaaaca

SEQ ID NO: 32118 - DNA, 3006 bp, Cannabis sativa
tttagagtcactcaatgtgtatcactaaaatccatttttctagtagtgagtctgtgtttgtgttctattcacgcgacacttattggatggagcagtgcttgagttgggctaataaatctttagctttacttaagtatgcgatcatgtttgacccttgggcttgatactcgtaaagaatctgattacacaactagctgtgaatctgtagatctggagtgactcagctttgattgctagtgttaatcgtagtttggctaggagtggctcatactctgctttgttgtttattatggtgaaatcaaaccgcaatgcattgtgagttaaaaatccctctagagtagctaagatgagtccaacataaaaaccatgcttcttggaggatccatatacatatagttcgaggaaggtctagggtcatcctgagctgtagtctcatctgtgttgacctggtcttcacaaatcatgggattatcttcatcaaggccagtgcattcaataatgaagtctactaatgcctgctatttggttgttgttcgaggctagtaggttatctaaaattgacctagtttaactgcccatttgagtcggtgccctaatgcttctggcttcatcaaaactttcctaagtggttgttcagttagtaccttgactgtatgagcttggaagtaaggccttagctttttggaggctaggaccaagcaataatattctagcttttccatggggggataccttgaatcagccccaatgagatgcttgtcgatgtagtagattgggtgttttatctcttcatcatcatgcacttgagcagcactggttgcaagctcagtgatggccaaatagatgaatagttcttcaccatctattggtttagataaaataggtggcctgactagatgatgtttgagagcttgaaggcttgctcgcattcatcaatccattcaaaccccttgttgcttcctttatttaaattaaagaagggaacacaattgtcaattgactttgagatgaacttgctaagagcagtaattcctcctatcagacttttcacgtctttaatccgcgacggtgactttatctctggtaaaacctttatcttttctagattcgctttaatctctcttgagttgacaacaaaaaattttctaactggatatcgaaggcacaatttagagagttaggcttcatttgatattcccacgggatgttgaagcattcctctagatctttgatgtgatcttcagatttcttggacttaactagcatatcatcggcgtagacttccatattcttcataatttgattgtggaacatacggttgactagcctttgatatgtagcacccacatttcttgagtctaaagggcattaattttgtagcaattaaaagctcggatgtcagttcaaaaactagtatgctcttcatttggtgtgtgcatgttgatttggttgtagctggaaaaggcatccatgaatgtgaggagttcatcaaacgggtgttgcgtccaccagttgatcaattcgtggtagagaaaaaaagtctttaggttatgctttgtttaggtcagtgcatttgatgcaagttctccacttacattttggctcatgcaccagaatagggttggatacccaaactgggtagaaagcttccctaatgaagttgttctcctatagtctttcatcttcttccttgagagctttggagagctctttgtcaaggagcctgcatttttgttgtacatgcctaaaatttactttgtctatgttgagggcatgaaagatgacctaggggttgatcccgatcatgtcctcacgcgacaaggccaaaatgtcttgatttctcctgaggcaaaccataagcatcttgctcaaggcctccatcatctttgttctaatcttgacaaccttggtcgggtctactgtgttgaggggaagttctttgagttccttagtcgaaccaactcccaatttgattttcttaaaaagggggtcaatgtcatccctatcttgggctcacctttaagtggctttaggtgccatttccatcttctatgtagtttgaatttcaaaggtctttgtcatttctctggattttgtaggtaatgtcttgtatgtccccctggagaaatagatttagaggaggtctttttggcatgataacgaagctttatagcacttacgggtcattcatctattgccaaggagacaatcgatactagccaccattaggaacttgacagacaaatggtagattgacgagatggctcgaaggtcgtatatgcagtcctttcgagcattaccttgtatggagacttcacatccaccactatgaacgtggccatgatggtggtctgccttggggcaatgagtggcagtttgatctcaccacatggaacgatgtcggccccgctgtaaccatacataagatttttgcatggttccaggtcttctaaggtgaaaggcattctgatcattgatcatcacccttatcgccatcatatttttctattttcacctaaacaaccaagggatcgttatgaaggtagcttacatgatatgagtctgattctacaaatgtgagaggatcacacccataacattgagactttggaggaaaatctgctacctccttttgtacttcagctatatcttggttcatgtctcaaagatctcgcatacctttctaatgttgttctttaattttctagctaggtgagggcctctaatcacaatctctaccctacctacaactggcgcatgctgaagaggtgcattgcccccaactgaagcttcacgtcatacataccgctgaagagcagcatgttttaatctgatgaaaaattctatctcgtccctcaacagattacactcattagtgtgttgaccgtaattgttgcggtagcaataaaatttgttcatgtctctctttcatgactcttcaaaagggagaggtttgtggtacaacatgttggaaattattttaccaggatcttagatctattcaca

SEQ ID NO: 32119 - DNA, 3947 bp, Cannabis sativa
tattcactactaagatgatataaacaaataaaataaagtaaaaataaactaatagagacagtctttattaattgttttgtcacaccccaaactttttgcgacattaaatttaagtggtagctcaacatgtcatggcatgcgttaatgtttcaaaagaaccattttggtactcttaagatcaatattatattctctagatgacccatattatgtaagtatgtatatgataaataattttatatatgtggcggtagaggtagcttgatcctaaaccattcaataacaatttaagtaaaataaaataaaacccatcaatctcagccaactagcactccaccgtatgtcggagagatcagtttcttgcaagaacaagcatatatttcacattccaaccatagaaaaggaatataggtatatattgaggaaagtttcacttcattaaaatttataaaattaataaaaatacaatttacatttatatatatatatatacctacatacatatggtatcataataatttcattattaacgtatcgggattgaattattatattttccttattcttttttctttcataaaagaaagattttgcatatatataaatatgtatatattcgacctatggaatttattcggtattatatgtatatagtactatatcccttccttaaattgtcttgtgaaatttttagcatattattaataattataatcagtgattaattaaaattattcttacataaacttacataattattaattattaactagtgagttgtactctctaggttttctctgtaagttcttagccgccgcttgactctctaggttttctctgtaagttcttagccgccgcttgatttttttgcctgattagggctccaggccgtttctagccatacaacgtgcctctagttaggtctttttgattttcaatctattctcaatttcaccgaggttgttgttgctatattatccttctttctgagtgttcttttcttctcggccgatcttctttccttagagatttgtctctgagatttaagttgctcattgacactggattagatcttcactatagtgttaatccgcgtagcgtgttatttttactttctatatatgttttattttttatgtgtctttctatttttaatatagtgttgctacaccacattgttatggtagtaggaatttattcattcatgcatgcatgggattttagtcttttttgtttttgagatattaggggaatgtcaattggcttaaaacatgtttgtgttagtagaatgactatttttgtccatgtttaaatttgggggattctttaatttttattggtctcatggttttatggtgcgattatttattactagttatctttatggttggtcggttggttatttacttttattctagattgaataatagggtttttattagaagatctttggcgaataaccattaataggtgtgatttgacaaatgtttattaatttgtattataaatttaattagcattcttcacgcgctttgttgatgcttcaacactctagcaagtagcagcctatttgtattttagttgaagatattattacggttttgattctttatataattttgtaaataatatggtgttcttattatctaatcttattgattctgctaatatattatcatgtaattttagataataatgtgattagtctattaatgaaaattttcatttttttcaaaaccaataaaaataaataactagtgagctgtttgataactttgatcagcattcagaaatatatctatgcatgcatgtgtacgaatacatgcacgttacttaaaataagcaagcaccggctaccacttacgtgtatcaatgatcgatcaacatatatatatatatatatatatatataaatatataaacaataaaccgaaaattaaatcaataccaattagtttaaaaattaatcagaaatcttatttgctaagatatatatatatatatacatatatatgtgggtggaacctcattcgttattctatacaatagaccaagatgatgatgattatatatagtttataacattatactacaagatgaaacctggtgaaagtaaccttacatttttatgcactaaccaaaaaaaacatacattatatatatacacatatatgtcaccctttcgatcggaatccacagcatattattacagaatcgtatacacccacccacctactcatcaaatcctctcaataataataacaaaaaataaaacagaaaaaaataattcgctaagggaacaaattaattaatattaagcctcactccatctacatgcatacacacacataatatatagtattataaataccccacttcatacaccactacatatgatatacagtacagccaaaaaaaaaaacactactcatcaaaggaataatatagaaataaaatgatagggtgggtagatgtttacaaggtggtggaagccatggttccattatacgtggccttaatattaggttatgggtcagtaaaatggtggaaaattttcagtcctgagcagtgtgatgctatcaaccaattcgtttgcttcttcactcttccactcttcacgttcgaattcacagcccacgtggaccctttcgagtggaactataggtttataggggctgacgttttatcaaaggcgatcactgtggctttgttaggtttttgggccaagtggagtagtaaagggagttatggttggtccataacaagcttctcactttgtagtttgactaattctcttgtcgttggagtgcctttagtgaaagccatgtatggtcgtatgggcattgatcttgtcgttcagtcttctgtcgtacaagccattatttggctcactattcttttgttggtgttggagattcgtcgtacgggcatgggtatttcatcaaaccacaacaaagtagttgtcgttggtgattcgaataataataataataaggatttggaaggaaataacgacgatgaagatgctggtagtgatgatcaacggtcgtactggtttttcatgaagggtgtgtggcttaaattggcttccaatcctaattcatatgctgtttatattggcctcttttgggctctcatcgccaacaggtacgttatttatttatttatttattcaacattattcaatattgttttatatagatatttggtaccctatattttatctaaatacagatttagtaccttgtatttttaataataattattttataccatgtgttttaaaattataaatattcggtaccctaaactcaaaattttttaataatattttatcaatacaatcaaatcattttcaattttataaattctaaattcaaatttaattatttgattacaagtaattgagagctatttggttaaattgataaaattgtattaataatattttactttaaagtattaaatatgtacaatttcaaaatataagatactaaataagtattattaaaaatacaaggtactaaatgtgtttttggtgcaaagatagagtactaaatgagtatatttctttgttttataaggattattataattgagtaatataatgttttagaaaaactaaactgaaacctgtgatttcaacaaattatttttattgaagatgggttctacttattaaaagtaacttgtcaatgtgtattgtatttgtgagtgattcaagtgtccacatatcattttctatattttttttaagagaatatatgtaaaattatatatatttatttgatatagtgaaacgagatatttttttgatttttttttaattaagtagcttataaattaagcatattcaaatttctatcaaaaactaatagtttaaaatttttaatttaatatatatttaaatttttggtaagtacctattctcaaaaaaaaaaaaaaaa

SEQ ID NO: 32120 - DNA, 3519 bp, Cannabis sativa
  modified_base (57)..(67): a, c, t, g, unknown or other
  modified_base (3464)..(3472): a, c, t, g, unknown or other
cacaaaaatttcaatttgttgtaactaaatgtatttttagtcacaatacttgttgtnnnnnnnnnnnaattagtgacaacttgtaactaagtactatgttttagtaaaaaataaacattttgttgtgactaaaaattacatttagtcacaaaaaaagtatgatgtgactaaaaaattgtcactaaaagtaacatttttttgtagtgatgggcggctgaacttttttatctttttattttgagtaattttacggtatagtaaatacttaagtttaattttcagttgcaaattttaatcttttacggtaataatacataagtttaatttagagattttttttcaaaaatatacgtaaaatgtaatctaattatacaaaaataacttaacatatctcaattacaataatgtcttgttataaaaaataccttaattccaaactattagattacacttacctgtcatatgcgtataactgtttttctgttatatgcatgttctggtgttagttaatttgttagaagattagttggtagttaagttagtttccagcgactttagctagttggttatctgctatgtatatatatttgtttttctgttcattttcaattcaataagatagttctttcttttcttctcaattgttcaatactgatctctattcatttcgcaacatggtatcagagcgggaaagaatgctttccccgatctgatctaattcgcttccaccttcttcatgccttgtcgtgcgttcttctccaacaaaggcaatgaacaattatacttcctgaattcttctccgatcagtactctgcatcgtgtactctgtcctggttcctctgttccagcgcttcttctacttttcttttcatcatgtccaacgaaggacaagaaattggatctggagctgaaattccaagccctgccatcgctggagatcaacttcgaactacagatcctaacaatcaaagtcttcgtgttctaagctcaagaaacccccttgaagatccctcggatccttattatctccatcatggagataaccctggtaatatactcgtctgtcaacctctgactggccaagacaattacgtttcttggagtcgtgcgatgcagcttgccatttctatcaaaaacaaactaggattcttggacggttctattcctaaaccttctcccattgattttagtctttacaatgcttggattagaaataacaatatagttatatcttggatccttaattctgtttctaaagaaatctcttcgagtttgttgtatgatgaatcaactgcagctatttggactgatctcaagatacgttttcaccaaagaaacgggccacacatatacaatctttgaaagaatctgatgaacctgcgccaagaaaaccagacaatcagtatgtattatacaaaactaaagaccatctgggaagagctgtctaactatgggccaagttgtacatgtaatggatgtacttgtggtggtgtaaataaacttcaagaacaacaccacatggaacacataatgtccttcttgatgggtctctcggatcacttttctcaaattcgcagcagtatattgttaatggatcccttacccgaagcaaatcgagtctttcatctggtgactcaagaagagaatcaaaagggtagcatcactactggtaatgattctaattccaatttagcttttgctttccaatctgataaaaatgtccctgccaagcctgattctcagaacagcaaaaatcatcctcctagaagaaatagacccttttgcactcattgcaacattctaggacacacaatagaaaaatgctacaagattcatggttaccctcctggtttcaagggaaataagtcgaaggatgcttcagcaaatcaattacagactaaaaccgataccaatcctgctacagatgaggctcatacgattctacctcaattgaatgctacttagtatcagcagcttttgaatctccttgctaactaacaaaatggtatgacaaacactgatcctagcacctctacgggaacaacaggtataatactttccaactattgtgtcactcctcataatgaatcttggataatagattccggagctacaagacacatatgcaataacataaaattattccaatatgtttgccccatgtctaaaatcaggttaatccttcccaataatgaattcatatctgtccaacaaagtggttcaattatcattaataaagatcttactctcaatgatgttttatatgtccccaactttaaatacaacatcattccagttagctctttaacgattgatgataaagttaaagtaaaatttttcactaatagtttttatattcaggacaaactcaacaagaggaagattggcagaggtagaacgattaatggcctatatgtactggacaacaagcttcaacatgctgcagtacacaatgtctctgctgatctttggcatgctagactcgggcatctttctaaacaaagactctctcttttaagtagagaactgaattgtaatgtgaattctatgcataagaactctccttgttatatttgtcctttggcaaaacaaaagaagttgccatttccaaataaaaattcttttactactaacaagtttgatcttattcacacatgggatccatatcacattccttctcactcaaactataagtatttcttaactttggttgatgaccataccagatttacatggatttaccttctcaagcaaaaatctgatgttgcttacataattcctcaatttatttcatatgtgcagacacaattcaaatgtattttcaaaaaatttcgttctgacaatgctcccgaatcggtattcaaagacctttttgctaaccttggcataatgcatgagttcacttgcattgaaaccccagagcaaaatgctatagcagagaggaaatatcaacacctcttgaatgttgctcgggacctttattttcaagccaaaatgcccatacaattttggagcgaatgcatcatgacagccacctttctcatcaatagaactcctactccccttctcaaaaataaaactccttatgagctcttgtttaatgcagcccctgattacaccaatttaaggaacttcggctgtcttgcttttgccaccactctcacggccaatcgaaccaaatttgccccaagatcaagatcatgtgtttttattggatatcctcaaggcactaagggttataagctatatgacatcaataataaataaatttttatctcaagaaatgttatatttcatgaacatatattccccttcaaaaattaaatgctgaaatcactaatattgatcctttttctcacatggtatttccttctacacatatctctaacactcatattagtgactttcctgtagttgtaatatcaagattaaaatagtatttaattttttttgggatattaatnnnnnnnnnataattatctcatttatttgtgttgttagtgagtagagactattgct

SEQ ID NO: 32121 - DNA, 2027 bp, Cannabis sativa
  modified_base (433)..(439): a, c, t, g, unknown or other
  modified_base (715)..(715): a, c, t, g, unknown or other
ccaggttaatggtgtcgatcagcatattaaccaaaccaataaatcactaagatagccaagcgtatctgtatttgaaaggttggggatgactcacgatctctgaaacgatctcaacaaaagaaaaggagtagacgatcagcttggcacgccgatcgtgcagcccagaacctgtgctcaaattcccactcagaaagatgctgatgtgactcaaatcgaccaaaatgctaaacacgtcagtcaagctatgcaggcacaattggacgaactatggaatatgtttcaaggaatggccggacagagaaacgatgatcttgagttggaccgagcacgttgaacccctttctctcccgagatcaatctcctggcgttaccccacaagtttaaaatgccaacctaaaagatgtacattggaagagaagatcctctttcccannnnnnntatttcgagatgcaaatggattttcagggggtacgaggtgacgtatcttgcagaatttttcctgttaccctctcggaaaccgtcaagcaaaggtatttcaagctggcccctggaaagctcaagtcatggaaagctttctcctcggaattccatgcacaattctcctcctctcgccaaattccgttgcatttaggagacctggtcaatgtcaagaaaagaccaggcgagcctctccgagcatacaacagtagattcatgacagaagcaaccaaggtntcacgggtaattgaagatggaaagttgtccgtgatactggggggcattgaagtcctcgatgaactttggaaggacgtaaggaagaacgacctagtagactcaatgagtgatttttgcgactgtgctgaaggcttcataaaacttgaagaggctattcacaagcagaaggtgagcaaaagcctgacaagtcaaaagcgccttccactggaatgtctgcccaactccctcgttacccaaataatttgagctcaaatggtaaacgttccaacaataacaggcaagggaatgggaagaagggaaagttcactgacaaaaccgaggaggctctccgagagaatcaagcaaagtacactgcatttaccatcttcactgaggatatagaaagtgtttacatggccactcagtcgctagccccatataagaagcccaggcccatgaagaaggatgtcagcaagagagacatgaccaagttttgtcaattccacggaggctacggccacgacaccaatggatgcaactatctgaagcgggaaattaaattcttgataaggaaaaagaacccgcatgtacaaaaatatgtcaagatcgattagaattaaaggaacaacaataaccaagacttgctacctccaccgatagatggacatctgcaagtcatcattggaggcccgcacatagttgcagattcaggcaaagctcaggagaggtatgctcaaacagcacaacatgatcaagaagaagtgatcatggccgtagaagaaaggaagcctaaaatcccacgggcaggagggcctaccataaccttcaattacgaagacgctatccaaattaggtttccgcataacgacccattggttgtggaggtcgagatagctaaaaatatggtggccagaaccatgattgataatggaacctcttccaacatcttattcaaaactgcctatgaaaagatggggctccagcataaagatcaaaccccctgtctccgacctgcatatggtttctccggccaaggagtcgcacctctaagacaattttgtttacccctcactgttggaaaggcttcgacgagcatgactattatggcacaattcctggtattagatgttccttcagcctttaacgtaatgctaggccgaccaactttgtatgacttaaaggctgtcacatcgatattccactcgtgcctgaaatttccaacaaagaatggggtagggtgtctgagaggaaactaacagtctgctcgggaattttataacctttcagtgaccaaggctaagaaggaagtatcctccagccagagcacagacaa

SEQ ID NO: 32122 - DNA, 1715 bp, Cannabis sativa
  modified_base (436)..(440): a, c, t, g, unknown or other
gcggcattatctttatggtgaaaactgtgaaatttatactgatcataagagtctcaaatactttttcactcagaaagatttgaacatgaggcaaaggaggtggctgtaactggttaaagactatgattgtgaaattctatatcaccccaggaaagccaatgttatggttgatgctttgagtagaagaggtctcgggcaggtttgcaccacggttttgataacccctcaactagcttctgaaatggttagtgcagggattgagtttgtagttggaaagttgcacaaattgacacttcaatctaatctattagaaagaatcagaaaggcacaactagaagatcctgagctagtcaggattcgagatgaggtactggttggtcagcataaagacttttcagtctcgaataatggaatgttgttatataaagctcgggtnnnnnttcctagtgttgatgagcttaagaaagaaatacttgatgaagctcataccacatcttattcactgcatccgggaaccaccaaaatgtatcagggtttaaaacgctacttctggtggtatgggatgaaaatagatgtggtggactatgtgtccaaatgcttaacctgccagaaaatgaaggctgaacatcaaaagccggcagggatgttacaacctctaacccttcctgagtggaagtgggaggacattgcaatggattttgtaacgggattgcctagaaccacaggaacgtatgattcagtatgggtcatagtggatagattcacaaaatcaactcactttctgctagtgaaagtgttttgaccaaaaatggttcattattgatcaaaaaccagtcaacaatttttagtttttgggaactcttttactccctgttcattcccccctttctcacctgccccctcacttctatttgtactcctcttttatccttaggtgtcaatttcttaaggtatcatttgacatgtgtctatttttacttatgaggtgtcattttatgaggtgtcattggatatctttgacaagtgtcttgtataaaaggtgagtcataagtctaaggtgtgtgggtcatcctgcctgagatattgagtcatcgcgtccgagataagtgagttcgaactgatcgaggtaggccatatcttggaccgaccgtgataggtcatatctcggactccgtatctcgaaccgaccgtgataggtcatatctcggactccatatctcggaccgaccgtgataggtcatatcttcggactccatatctcggaccgatcgtgataggtcatatcttcggactccatatatcggaccgaccgtgataggtcatatcttcagactctatatctcggaccgaccgtgataggtcatatctcggactccatatctcagaccgaccgtgataggtcatatctcagactccatatctcggaccaaccgtgataggtcatatcttcggactccatatctcggaccaaccgtgataggtcatatctcggactccataggttggaccgaccgtgataggtcatatctcggaccgaccgtgataggtcatatctcggactccatatctcggaccgaccgtgataggtcatatctcggactggttcgagataaaacatattttgaattgattcgagataagaggagtccaagactgaaccgagataggcaccttctgttggaaattattttaccgggatcttagatctactcaca

SEQ ID NO: 32123 - DNA, 1436 bp, Cannabis sativa
ttttctttttcttttcgagttgataaaccaggcaataaatatttatagtgagtagaataattgactcactaattcttaaaatatatggaaaaatcactatagcacctgtaccactagccacatcatggcttatgtaatttttcaaaatataactttgaatattttcattaaattatgaagagctcatatatgtgtttcaacttccaaagcattggaagcacatcatttatttcagattaaaaacactaaaaaaaattactggatgataatttttataaaatatcgttaatcattctcgtagtagtactattaagtacaattaatacctaataacaatattcctttaaagaatacataacaaaacacaacagaaggtgttaaggaaatctcttgaagaaaaaagaaatgatcaaatatatataataatggctttatctaagagagaaaactaaatttacaatgaagtagaccattaatattttccagaccttgtttggataattaggatgaaaaagatgatgaagcagcaggaggaggagggtggttgttttgtgcaatgtccttagaaaatgctttgtgaagatcctgtttgagatccaagaacagcatcttcttctttgcttgctcctctggggtgcccttatcaggaaaaaaggcatcatcatgttcatgcttctctatttcgtagtctaaaaagttattaagaacttctgagcaatgagggaagtgtagtcggcccttttccactgccaaaacatacaaacttttttaacattttaatctttggtttccccaatggtttgtttcatcactattattaactcaaaattaatatattcgttctatgacacaattagacaaataattgagggacataataacttaactagatcattgttctttgtcgtactcattacccaattcagcaaataacataaggcaactgaacgggcctacactagtcaaggtttccattttgatgtaaacattattttttaaaataaaaccccaatttattttgcaaaaatgccctatttatatatttttcagaaaaattatttaatttattttgtataaaaatgttatgcgtaaattatataaagcatcccctaaaagagaatatatctttatctgttttaacatctgaaataattttttaatttaatatttgttcaataatgagttcaagaaatttatttattttataccttattttatattataaattatttaaataactataaaatacccaaactattacaaaaaaattgaataataaaattctcattgccaaaacaaatcaaaatacatcagctcattcccaaaattttatgtataaatgtttacaattataattacttttgtttttttttttttttatgaaaagtccaatttaaaatttttgcacagcccctaaattggttaaaaccagaaaa

SEQ ID NO: 32124 - DNA, 2856 bp, Cannabis sativa
  modified_base (1009)..(1012): a, c, t, g, unknown or other
aaaaatttaattacccacacttttggtataatatagtatctatataagtattttattaaattgcacacacgtggcgtccctgttggacaaggcgttacatctaatgataagggaattcaaagaaaagactttacagctgtgactgagagcagtggagatggaagttcacatgggaattattttctatttcagaaaataataacagtaaagagtggatccttgattcaggatgcacttatcatatgtgtccaaacttagaatctttctttgattataaagaaaccaatcatggtggtagagtactaatgggtaatgatgtttcttacaggattgttggaatcggtaaggtggctataaggcaattcaaatgtgaagtgaagattctacataatgtgaggcacattccagaattgaggaggaatctgatatcacttggaaccttgaaagatgaaggttatggctataggtccttgaatgggagcctaaggatcacaaaaggttcaatgcttgtgatgaaggaaaaatagtacatgggttgtatgtactcgagggtaaaactatacctgtggccgagacagatacagtaaaaggtttagaaagtgatatgcagctatggcatcaaaggctcaaacatatgagtgaacaaggcatgagggaattgcacaagaagggagtcattgaaaagcttcagacatgtgcattaccattctatgagacttgtgtctatggcaagcaacacaagatcaaatttacagtagcaactaacaacacgaaggcagtcctagagtatgtgcatgctgacctttgggggccaagtagaatcccaacacattcaggtaaacactacttcctatctattattgatgatttcaatagatgtgtttggacctacttacttaagaccagagatgagtgtctagaacaatttaagatatggaataatcaggaggaaagaaaaccaaatttaaaggttaagacatttaaaaccgataatggtctagaattcatnnnnactgagtttgatagattgtgtaatgagcatgggataactggggataggacagttgtgaaaactccacaagaaaatggagttggtgaacgtatgaatagaacccttttgaacaaattgagttgtttacttcttagtttggggttgggaaagccttattggggagaggctttagctactacttgttaccttgttaataggagtcctaatagagtcatagacttgaaaacacgttatgagatgtggtatgggaagatattgttgacctcgcttctagccaacgatagtgagtcaaaaataaagcgattaagtaagataattaaaagaaagcaaaaatagtgaaataaggtgaacaccagattttaaagaggttcgaccccgtaagtatggtaatagcttactcctcttgtattgtattgacttgagagaaggaatgaagtgttcttcctcttgaaagctcttacaattgatctctgggtaactctctctcttagatcacttttttctctctagaatagatttctacagtaattctctcaatccccttcatagtgaggctaggccattatttatagagacttaatacatgagggatggttttttttttcttacaatgaataaaataagaaaccacattaattttataattacaatgtgaaaaatagaaaacaagaatgtgttgccattattctctgactcaatcccgtgattataaggattgtcttcacatctggtcacaacgagattgatctctagaatcgccatctctcatacttcgcttgagatagacatatccatacttggttggacatcttctcaaaaatcctgctcggacgcctgagtgttacagatgctagttagtcttttgtaagcttctagggatatgttcctccacccaggtattgaaaatatgggacacgtgtcattcatttctattggcacgtcaaggtgcaaaaaataggataacatttgcccccaagtctgcgcgggaccttcctagttgcacgtggacttcactcagcctggagtcttgtctagatgagtaacgcatgtcgtaagtgtcaaatgacaaaccgacgtgaccctgactaggggtctcttcaatttctacccatttaatgctaatggataattttacctcgaatcacggttcgatgcttgtgcatgtttggcggttacactccctataatgagtacataatttacacttggggggggggaattagagaaatttgaattttcaaaatgattaattctcttcttggattgcttataaataagagtaggaacctttagtgatcctttttagccattttaactcttgaaaaacaaaagcaaaaatttccagacgagttttctctcaaattctttgaaggatacataggaaaaatcttgacgatatcattcgaggagaacgaaagcatcaaaccaatgagtaagttcttcatttctttcttttacatattttcaatgaaatgcatgcttgatttctagatttcttgctataaatctcgcctattcttgaaccgctataggttaaccatagaatacctaggtttagggcttagagaatcttggttgtatttaaccatatcgtctgattatctaactatgcttcgaattttaaccttacaatattcattttcactcatctattagagttttagtgaaaatcagattccaatttgaagttttgaacttcaggggcaaaattctatttttgggtgaaacttttgcttttgatttttaacctattttttattcgttgctctgaccaattctcactttcttatcccctaccttttgtagatgaaacctggtgagttttagggaggcaaacatcatat

SEQ ID NO: 32125 - DNA, 3202 bp, Cannabis sativa
atataaaatacatccaatggatagaaccgatccaatccaacatccaacgattggatgactaaaattgattggatcggatcggatggtaaaatctaacatccaatatatggttggattggatctagatgggcctaaaaacattggatgtgatccaatgaacaccgatggatttactttggaagaacaagacttgggtggttgtactgaaactggagaacaaaaaggttgtaatcaatgggaatgaactagtatggttcaaagcctagttagtggctaagggatttactcaggtggaaggagttgactacaatgaaatcttctcacatgtggtaaagtacaagatgataaggttgatgttacatttggcagctcaaatggaatttgaagttgaacaacttgatgtcaaaactacttttctaaacggattcttggatgaaaaaatctacataaagcaaccacctgggtttcaaggtgaagggaaagcagttgaatcagtgtgcaagctcaataggttcttatatgatttgaaatagtctccaagataatggaataaaagatttgatacttatatacaacaaatcaggttcaaacgatctgcctatgatcactgtttatactagaagaatctggagcaatctacagtcatggtcttattactctatgtggacaacatgctcatcatgagcaaagaccaatcaatgataaaaagtatcaaagccaagctcaagcgagaatttgagatgaaggagcttaaaccagttcaaatgatccttggtactgaagtttcaaggaacaagaagaaagggacgatgagcttgaagtagtctagttacatcaagaaagttattcagaagttcaacagggaagatgcaaagagtacatctgtactgttaggaagacagttcatcctgtcaaagaaacagtgtccgaccagtgctgaagagttggaaaaaatgaaggatgtaccctatgcagtggttccaggatgcctaatgtatgtaatggagagcatcagaccgaacatagttcatgctctaagcatcctaagccagttcatgtccaattcagacattaaaaattagaaggtccttaaatggttattaagatacttgaagggcacatgggattatgatttgatctacgagaaagctaaaggagaactaaaacttaaaggattcgtggatgcggatatgcctcgaatagagatactagaagattaaccacaacatatatgttcatgacaaaccgaaactgcatttgttggaaggtccaattacagtccgtggttgctctttccaccacggaagcataatttatggctacacaaaagcgttcaaggaagctttatggattcagggattttgtacaaattgaaacaactaaaaggatgagtgattgtgtactgagatagccaatcatccattcatctctgcaagaacctagtgtatcatgaaaagagcaaacatatagatataagatatttctaccagattagagagaagaacagagaaggactggttgaattagagaaggttagatcagaagataatcatgctgatgttaagactaagatcttaacagtcaataagttcaagcattgcttggacttgatcaatctcaaaaattagcatactgagatacctagaataccaaccatgatggttgcatattttcttcatcaccatcacttttaatttaatggaactaggtgaaattcgtggtatagttcctccaaatgaaaaggccttgtgggaagtcattcggaaaggagtttcagaagtgtagcttggccacttcgaaagtagtcttcagggaagcttgtcatcctctggaaggctagatgtttcttcttaaaaggggttccggataatcttctccaggtgactttatatctatctagaacatccttccaagaacacacttcatctttctgggacttccgttcaagaagtgttcggagagctctctttagagttgatgaggagatcttgttacaaggagtttgttaattctgttaagttataactgacttaacaacttagtttttgcagccaccgactttgggattcttatcccagatttataaataccaccatccttatttttagaagatatagaatacaagagataatttcgagagtgagattgagtggtagagagagatgtatagagaaaagagggagattgggtttcgagatttgtatgaagaagtttctgtagaggaagaattttattaggtaagaatgttagagagataaacactttgagaaaagccaaacagagaatcctcttgactgtattgtactcttgttcttactcaatcaataaagactattcaacagtgttctagaactagagtaaagtcataaatctcatcgatctataggacttgaaccggtataattattaatcttgttttattatttctgtgctttacttgttttttattctaattactctattctatcctcttttatctctaattctcagttcgtgatttgttagtcttgtcataactaattatttgttaatatgttttaagttgatttgattctagatattagttataattttttcacaaaatacatatctttagctataactttgttaatttaacatattttttaatgcatttgacacttttttagtacattattaatttattaacactgactacactacatatagtgtagccgattccatctaattattgtttatttcattcatctcttacatcataaaaagagagatataagaaaagaaaaacaccactttcgaaactaaaactttataaatgttcaatcaattaatgtgacaaaagatatttagtggctctaaaagtgagagattaatgtataatatgagaatcctattacttgctttgtttctactaataatttcattcagctcaacttaataataatataaatatataagataccgtatcccacttttaaatattatatatgatatcctaatttcttaaattaattaattatagtcatcaaaaggattactccaaaaagaaagaaagaaaaaggttgacatagatttgatttgataacttttttccaagataggtgtaaatccaagtaataataattaacaataagatactactaaatataatagtatatttgttaataagcatgatttcggtgttaagtttttaaatacacacactcctaaaataatagttaat

SEQ ID NO: 32126 - DNA, 2292 bp, Cannabis sativa
ataacatggcataacatttacacattgataatcactaggttaataaccctaggccattaaaccgctcatgttagggtaataactctaattacggtttctaattactcacaaatttcatatttaatataagtgccaccgcacataactttacatgctaactactatcttacctgatgtcccgcaaacgtggagattccgaatccccggatactcctgaacaagtaccggtaatcttagtcataattctcgcgatttacaaataggttaatcccaaaattcaattttaataatcacataattagcattccatttacaaattaacataaagagcttaaaacaagctttccaacgatataaagaacgtccaaaacagagtctcgagtcaaaagttatggccaaaacaaaatcgggaaaaaacagacattcccactgccaaacccagtcgtggcgaccaataatcccgtcgtggcaactgggttcagaacacccaaaaatctcattttaaggcccaaaaatacccaaactcaatcctattttcacctaagtcataaacaccaataactcactccaaaacctcccaaaacaataaagatgcaacaagcataaacctaataacacaatcaaacaaaatcaccactatctactctatttctaccaacatgcacacaccaacttaagaacacatttcatggcattctacacatttttacttcagagttacagcaactaaattcaaaattaaatggtagtgaaagctacctcaaactcttctaaaactccaagcaccacacttcacaaaatcaagcttcaaccaagactaatttctcaaagattcaacaaattagagaggtgagtatagagagagagagggtcggttctaggtctgaataacaccagaaaatgctttcaatttcagtcaaaattccttttttaaaaaaataactcaaataagaaaaatgacaaaaatgcccctggggccataacatagcatatgcacaattcaagggcaagaatgtcatgttcatcacatacacactcaattaaattttaggttattcatttaattaaagtatgccaaaataaaatcccaaaaatgtattttggcctcgaacttgattcggcccgaaatacccgattatgactataccgcaccaacttgtcaaaaaatacatgaaaaaggacaaaacaagtatactatataataatatagttcataagcacacaattaaattaaattcacagtattaccctttttgggtcaaaattacgaatatacacatggctcgccaatggggtcttaacatgtcatttatcaaattaattcacttataataaattatataataatattattctacattaatacatatccaactggttagggttcgctaatccatttttttaatcttaggatattacaggaacattagatagttataaagcacattctcaagtatcttcagagaacgagagatctcatgcttgtatattctggtagagagttaaatcctactgggcatactgattctaattttcaattagataaagatagctgaaagtcgacatctgggtcagtatttactcttggtggaggagttgtagtttggagaagcattaagcaaaccagtattgtagattcaaccatggaagctaaatatatagcagcttgtgaagcagctaaggaagcgctctggctgaaaaaattctacacttctttggaagtagttccagaagtagaaaaccactggtactctattgtgacagcagtggagcggtgcccaactctaagaaactaaggagccacaagagaggcaagtatattaagaggaagtaccatctactaaggtattgttaatatttattattgaataatttatattaaatataagaaaattctttattcatatatgaggctgtggcttgtagctgtatagagaactaagaccagttagctataaataaaatcacaacatattaaaattatagaatctttaatcaatagtcactagtacagttcactgatgcccgttcttcagtgcaagtaatcttggttcagattactaatgtagtgagacatttaagtgaaggtgttgtatataatagagattatatatgataaggactgatatgaataaagttgtctttattaacatgtcgtttatcataaagacataattcatatcataacgatgatcaatagtagtttgacataaatcctgaattattatgagctcctgttcatgttattaatttctttgattcactcgttaaagtttttcagagaagatgatt

SEQ ID NO: 32127 - DNA, 2743 bp, Cannabis sativa
aaacggtgggtgtttcccagtaacttcagggtcatgctcgtgaacgcatgccccttcagtcactgggattctcccagccgttttttgaggcacatcgccagctgaagattcgtgccatattcgcaggttgtgattagttaggttcctcgaaacggtaggtgtttccatgtcacttcagggtcatgcccgaaaacgcatgtcgcttaggttactaggatacacccagccggtttttgagatatccttctattcgcacacctgacatttcatgtcttggtgggctgattggtttttgcaagaattcaaatcatccccctaagacgattttatattttatatgcgggtgggtcacttactttgtttttgcacattcaccacgctgaaaagatcttctatctttaagatgagcgacctatcggatagccaaatgcttggctcaggaggtaatgtgtttgatggcgattaggaagacagcttcattccgacatcgatctcataagaggaggtccctactgctggagacacagagttcggtccgctgtcttctgtagacatcgagaggatggtgtaggagctcgccgaacgaggaaccatcgagattcgagacagcgagtctacagtgtcggtacgcgatcatcttattcattccaggcatgctcctgaagtcgaagtcgaggagatgggtgaagattgggaagttcctagtcgtgagtctgacgaaggtggagatgccgaagggagcgagtccgactcgttggacaacacgcagttgaatgagccattctcctatgaagacttagtctcgcgggttaccaaatctgacctgaccaccttttcgaggttaaacctactgcatcttagcaccatgcgtcctcatcctactcaaaggccacacctcccttttaccaaccctgcgatcataccctcagaagatgtcatagtgtctatccccattctccgatgcagagtgtcaatccccttccatccattcatctccactatcctcaaacagtacgatgtgtcccctttccaattaacccctaatagctatcgcatagccttaggcttttacgcgatgtatatggagtacgtgcatagggcaccctcgatagaagagttagctttttctaggacataaagaatgtaggtctcctcaaaagcttctattgcttcagcaagtgggccacttctgaggtcaatggggtcgaaggcatggtttccaacatgggagattgtaaatcgaagtggttttatgtgtttaaggttccagggattaggactaactttaaccgtcgacctagtatgtcgcgtatttctttacttagtcaattttttgagttatcttgtgactttaagctaactcgccctttttattatcgcagatagaccggctcgacctacacttgacgcgacgcgcagagaaactgccgaagttcttggaagccttcctgtacaagatcgtgacgggcgattactgtgtacgacttcagagctgcgagaacacaagctgattccagagaacgcaagacttcaaagggagccagtgtacaaggagccgtctgagaagcaacaagagcggatagacaaatgcctttccgagctccatttcactattcctccagcttagcttttcctttgcctacacaaggtagcaaactgatgagtcaacagactcagtaagatatgcataacatatataaaagtaatgctagaccgggtttatacttaagcagccctgggctcaaaaacagagctcaccaaatggttaagaacgttcttaagggaactacgaccactgtaccaaatgcactaaagtaccaactctgtactcgtgttggtagagccattattgtaccccgaaaatcactaagtgttgtaccacatgcacgacgtaccccctggtactcgtgttggtaacaccgtaaccacactgatatcctacactatactaacacccttaaaatcacataaaccattagtgttagtagtgtaaatagttaaaacaagcatacattcatatatacgttattatgttatcttatctcgttctgtgctcgagtgtgccggtcagcttgaggggaaacatagctcgacgctttacagggccctaaaccataacgttcaaaactcaatgagagacacgctaaaacacttatcaaggatttaaaattgaaactaaggataaccctattgataaataggattcaaacaccctaaattacgcaaaaatagggaaaactaaggttcgggaaaaagccccaatcggcagactggttcccaactagaagcccgattttgggctaccaaccggtcgaccggttacaaatggtccccctgaaccggtcgatcggttctgtgctgggaacccaaaagtcgagccccttaactcaatttgacccgaaaccttccaaaactttccaggatacctattcatgtccaacaaactcatttcaagcatcaaaatataagaaaaaacttaaaccatgaaatcaccattagagctccatcttgagctcttaagctccattttgactcaaacattaaaataaccacctatcttggcttaaagcaacaataataatctctatataacaccagaaaacaaattcaaacaattctaaagcaaacaaccacaaattcctcaaattcatacatgagtaacctattttgagttgagaaaacctaaatacactaagatcaaaactccatacattgattacagcttcaaaccctcctaaaaatt

SEQ ID NO: 32128 - DNA, 1315 bp, Cannabis sativa
cctatgcccaatatgtcactaggaaaattgcatcacctaatcaggtgagctcgtacctacgctcggtactcatcatatatcactgacgcccgtacttacacccagtacatcataaggagaatcgcatcacctaatcaggtgagctcgtacctacgctcggtacttatcatatatcactgatccatgtacctacgctcgatacgttgccaagaaaatcgcatcacctaatcaggtgagcctatacctacgcacgatactcatcatataccactgacgcccgtacctacacccggtacgtcgctaggtatattgcatcacctaatcaagtgagcccatatatgacatgcataatatcatcacattatcaatactcaaccaatcattcttttcattatataacaatattaactatatctcagtatcaatcaattcataacaatactaattatattacatacaacgtactatgcagtataatatacttttttacctttaatccaagttcatccatgttggtcaacccaagtggagaactatccccgatgatcttgaccctatgccacaacaacggtaaaccaataagtgtttatcccaaaacactgcttaatatttgcataagacaatctaggattttctatcgaaccccgtaatataaatacacaaaaataaaacttatattttcgctctaaaacatacaccatattgtagagctcgtcccaagcttcaaaacagtatacaaaacatccataatgaacacccgagtcaaaagttatgacaaaaatataatttatgatctcctatgaaattcttaaaactatgaaacacgaaaatctcaatttttccactcaccgaaacaccaccaaaacttatccaaatcactccaaacttcacagggcacatatataccataaatattaccatccttatgtaacagtaattaaaattgagcccttaaatgaaaaacgtcattaacgttcggactaagctttaaaaagttctaaactcgatttctaactcaaaatcacctcagtttcagcaagaaaatattgaaactagtcccatgactacccgagaccaatcctataaggtcagaaccttcctaactattctaattcataaaacccctatacgaaactaattattttttaaacttaaaacgaaattaaaccatactttaagctttccctcttcaaggatttgttatcctactactaccggggcttagattgctaggtttcgggttgaaaattgaagaaaataaatttagagggagaaagttttgttgaaggagggagaacgagaattttgttcttcg

SEQ ID NO: 32129 - DNA, 2226 bp, Cannabis sativa
  modified_base (2190)..(2201): a, c, t, g, unknown or other
tttcatcagtttgtctctcaccactttctctgtaacgtccctgctttaagcctctattggcccttccaccacatatttatggctcttatacacgagtacgtcactcttggctgcttcttagactgacggctggccctacatgttagagtttatgtcctgaaaaccctgtaatgacatttctaattattaataagaggtgaacgttttgatatatgcatgaatgttaaattattaatatttagtattgaataacttatatataaatataaaaaaaaattcttattcatacatgaagttgtgacttgtattgtacggagaattaatatcacttagtaattgataaaactgtcaacaacatattaaagtttaggaatctttaatcaatgattgctagtacagttcactgatgcctgttattcggtgaaagtaatctcgatttggattactgatgtagcacgacatctaagtgaatatactgtatataagagagattatatatgacaaggaccgatatgaataaagttatctttataaaaattatcgtttactataaagacctaattcatattataatgatgatcaatagtagatcgacctaaatcttgagtaatcacgaactcttgttcatgttattagtttatttaattcactcgttaaagtttctcagagaagatgattcttacaacttctgttttgggaatctaataatgtggatggttgggagcatgatctataattatggaattctaattttcctaacgaattgaatgttggttccctttatgtgttagttctggaactgaaaagttgtgcacaaatttagatttgatctaaattatactttcactagtgaattaacaacactaaaggataaagaagtaatttcaagggtaaaatattaatttaacaaaaactaattacgaaacgatacaaggagggctaatcactggaattaattatatcaatatacactgcagtaaaacgtagtaaatatagttctataattactaagagttcaattccatatttatagtagcataatcgtagaattaataaacgtgattatttgattgatgagattcgataaataaatctagtttactggagcatagaattatagtccatggtcccaggatcgacaccttgaaatactgtcaaggactgagataaaagttgtacatgaaaattcaaaaaagatctattttgaattattgaaatagtaattatttattttcgtaataaataatttattttcaaattaattaaataggaaaaaaaagataaaagttgtcaagacaaaagttattaagacaaaagttagcaagacaaaaagcacattccttgtcctaagcaagacaaaggaggcaccacatgcactgtgtctagacacagtgcatgcaccccgtatagtgaggggtgtccatattagctttgtctttttgagttaattaatttatttaattagataaatatttgaatttaaaaagtagttgagatcttttctcaagtggttgagagattccctcaatcggttataagataaaaatatatataaccaaatcctattatattatttattcaaatgattgaatatgatttaattgatagatttgaatttaaataattaattaaataaaatgttcattgggtttatttaatatatcgtataacaaaattataaacaacagaatttttttgaataaaattttcacgtaacttttctaaaagcctaaaaatatttttatctctatcacaaaaagaattcctcatatattgagataataacaagaatttcatatacactttgtcatagtagcccacactactccttgtgtgtggtggatcaatttggaagactacggtgtgagtttctaatcaactcgaaaggatacaacttgcaaaaagaatcaaggataccctgataggcatcaagaggtaaatattcttttcatttgtttacttttagttttgtatatatacatatggtgatcttgggcatatggtacaatgataatcagaaacaaactctttcactgcgtacctaatttagtactgtaaaactaacactacagaccaacacgagtgtttctaacgtgctttgtcctcacacgcaccattttctgagaaaacttcctaaaatgtcacccatcttgaaattactccacgtcaagcacgcttaactgtggagtnnnnnnnnnnnnggctaccaaaaaacaagatgcacct

SEQ ID NO: 32130 - DNA, 1444 bp, Cannabis sativa
gttattcttattttagaatctcttcactgtttcatattgcaaacactaatctaagttgacatctttagatgtataactagatgttgcatttacaaatacttatctgttgagatttaacactattatgtttgtctaacgaatgcaatcctttgggatttgtcccactaaaaacaacaaactaagttagatcaacaatgaagattcgaaattatattacaacattaataatagaaaaacaacatgattcaatataaattcatacaaatttagaaattatcatacatttagcaagtaagaaagacatgtgaaaatacataacaaacacatcttaattaatttccaaggtttccaaaaaattgatacaatgtcccgtttcggcgagagtcaaatatattattcattgaatagagtcacctcttctaatatggataccattctaacagccttttattcgatcaagactagaatctggcgttgtcccatgttgacctcgcttttagccacggtaatcagtcgcaattgtaagcgataagtgatataatttagatgtaatatgataagataaataaagaacatagagtttttaaagaggttcggctccgagtagttcggtaatagcctactccccttgatttgtgttgacttaagaacaaagaacacaatgattcttctctgagagctcttacaataatatctctaagtatcctctcttagataattccctcgacccccttgcccagtgagaatagatcactatttatagggctatgtgcttgagggaatgtttcccttttgtttacaataaatataattggtaagattacacgttaaatatatagaatgcactgattgagggattttaatagctttccatatctctgtgatatgatcctagatttatagggattacttctgtgattcacgatgcaagtgatgaagttgctaagtgttgatacgctgtttggattatccactgctcagctaggaagacctcatccatgcaggtatatgatgtattctattatgcatatctcctttgggcagatatggggagtcgattccacgtgtcactagcatgtgattccatgtcaaagtgcaaaaattgggataacatttgccccccaagtttgtacgggacttccgaagtggcatgtagacttcatccgagttgcctttacttttgaatggtttacatgtgttaggtatgtctgttcgtgattcgatgtaagtctgaccatgtgtctctttagtttcgactaattaatgctttgacttaattagtgcatcaaaacacggtcttcaattgatggtacttgttacttttgatttcccaatatttattttttgggggaaatcaaaacgtctgaggtgtttcgaaatgattacctcttttcaccagattgcctataaataaggctggaacttcttcataattttactttca

SEQ ID NO: 32131 - DNA, 1235 bp, Cannabis sativa
  modified_base (1187)..(1206): a, c, t, g, unknown or other
tccaatgtgtaatcatgaatcatgaacaatgaacaaaaaatatataatatttacatatgttctggacttaataaattttatacattgaatataattgtgaaataaatcacgtgaaccgtgcaacataaaatgatttctaatcttttattaattagtaaatctgatttttagggcacaaaacccaaaagaaaaatcataggcattagggttgttgttctggacacacacgaccaggtgattgcagctctctcaatgccattaattggcaatttggcattgcatgaaatggaggctaaagctatttttcatagtctaaattgggtaatttagatgcaactgccaattgcacaagtagaaattgatgcattgatggtttcaattgctttgagagcacctttgtctgcaattccttcatttaaagatttaattgtatatattttaattcttttatcctttttctcttgaatgaatgtagttcatattaaacgttcaactaatatgactgttcatgttttgactaaatttattttaaaagtagatgaagcttgagaatatacctccactccacctatctacttgtcaaaaggcttgagatggaaagttggaaatggacagcgtgttagatgtgctaccgacccatggcttctaggaaacacaacatttaccccttatcactatggaagggatcccttttttacggtggctcattacataacgactgacagaaaatgggacttaaggatcttgaaagatcactttgggaatgtggatattaagcgtattctttctatacctctcgctcctactcctagggaggacatgctcatttggcatcacttggacacaggctattacatagtgaaatctggttaccacttagcggcgagtttggaatctatggatgttgattcttcctcatcatctaatcgtcaatggtggaaccgattctggtctctgaagctacctaaaaaagtcaagatgtttgcatggcgttttattaatgatgcacttcccactgctgtaaatttgatgcaccgcaaaatctcaacttcatcagcttgtatactttgtctatgtgcttaggagtctgtgggacatgcaatcttttgctgtactcatgctaaagcagtttggaagaagtcacatattaatgtgcttatgcctaacatgttgggttttatgccctnnnnnnnnnnnnnnnnnnnntaatcagatttgcttattaatatagatca

SEQ ID NO: 32132 - DNA, 1231 bp, Cannabis sativa
  modified_base (618)..(627): a, c, t, g, unknown or other
  modified_base (868)..(870): a, c, t, g, unknown or other
aaaaattattaataaaataattataaataattcatataaaacaattattaataaaataattattaataaaaaaaatagaacaataatttaaaattaataacaaaacaataattagtaattataacttaaacaataaaaaaaacaataattattaattaatataaaataattattaatatgaaataatcaataaaataataactaataaataatataaaacaattattaatagaaaaaaaataataattcataattaataataaaacaataattaatcattaataataaaaaaattattaataaaaaaattattaatcattaatataaaataattattaataaaaaaattattaatataacaattattaataattaatgtaaaacaattattaataaaacaattattaataattaataataaaacattaattagtaattataactaaaacaataaaaaaaataataattaatatttaatataaaacaattaataaaacaataactagtaaattatataaaataattattaataaaaaacaataattaataattaataataaaacactaattaataataaacaaaattattaataaaaaaattaaaacaataattaatannnnnnnnnnaaacaataattaataattaatactaaaacaataattaataattactcaaacaacataactaataataaaaaaacaataaaaattttaaaaaataattaataatcaatactaaaacaataattaataacaaataaaaaattcttaattggtaatcaaacaataactaattaataattaataaaaaaaagaataattaatagaacaataaaaattaatacaaaaattaataattaataataannnaataattaataaataataaaaattaataattagtaaaaaaaattaattattaataaaacaatacaaattaatacaataattaataattaataataaaacattaattaataattaataaaaaccaataattaataaagcaataaaaaataatacaataattaattaattataaaaaaatacaataattaattattaataataaaacaattattaattaaacaatacttaataaatcaatacaaataaaataatacataaaacaattactaaatcatttatatttaaaataaaacgaaaaaaacagctcgggtccgatgggtccgattggcccgatagggtacccatcggtccaatcggaccc

SEQ ID NO: 32133 - DNA, 1114 bp, Cannabis sativa
aaaatatattcaatttttactaaagaaataaagaaaataaataattaaagtgaaattaataatgattaaagcttagggtgattaatttggattgcatctactttatctggtttaacacaatttaattctcaaatttcaattttcatgtgatagaaaatttattaaaaaagtttatatttaggcttagcatataatttcaacatttatgtaaattttctactctcgtgataaatttaaacaaatagaaggcattaagcataaaaatcttaaatgctacacgaaccatataggtactctcgtcctatattgaaatcggtctatttcactataacataataaacactcatttctcagattttagattaaaaacattaaacaattaattggtgatcagacaattaaaagtaattaagtataaatgaaatagatgcacatagaaaattgtgggagaactaaatgatattaaaaccaaaataaagtgtcaaacaatctccattaatactctaataaaaagtctagctactcataatcattgtgaataattgataacaactacttaagaacataaaaataaagtagaagaaagaactcgtcgaaaaaaataatgttgaaagtatccagagccgctttctacctctaatttttgtctcccaaagttgtctgctgagaagtgttgaaaagaggcctttatatagctaaaaaagatataaaaaaaaatctaatttttgcagtttaaaaaaggagggccacgacactaccttgtagtatcgtggccctgaagcacgttttttggtagcgagcttcctgttacatcgactgataatattttggtcataaatctttcaatattgcttgaaattggacaatgcaagatgttttggaaagataaaagagagatctagaacttttattcacaatatttttcctcaaagtgaacacaccatagtcaaaaattggcttaaagcttcagacttgattttcgatcacaaatagagcgtgttgaacatctaaaatttagatttttttcaccacttatatcctagaactctaaattctatgataattcatcatattcttctcatttaaaatgtttttttctcattttcaatttaca

SEQ ID NO: 32134 - DNA, 3413 bp, Cannabis sativa
  modified_base (26)..(27): a, c, t, g, unknown or other
tatattaataagtaaatctaattatnntgaaatgagttttatttagtgcataaaacccaacatatacttctactagtgttatataaaggtaagattgttgactctttcatggttactgccgttatgtcttgtgggattttggctcgatatttttgtcattgtgtgcccatctgtggtttagagatgagatacacttttgtgggggcgagttataaaatttcatgttccaagggcacatagttggtgaaagaatgtgtgttaagcaaatacttttgttataaaagcatcaagcatcaagtatcagtcgactgtcatttgaacaacgaattgaagctggaaaacttcttgttcaaaatcaagcttataaaagcatcaagcatcaatcaatcgattgtcatttaacaaattaatttttcaattaattgttgtgacaaatatgtataggaatttcaatttcggctttttttctaggcggggtctttggcccatgacaattgggctttattcgggtcattgacctgattcggcccaactcgataacagttgtgttggtgattgttagagaattaaaagacaacatcgatttatgagaaatgtcttgatgtactatgaaaattaaaatttatagagatatttaaaattaaaaattctaccattcaaaaaaaatgggggtcgggcttgactcgccaggctgaaagaagtggtcgggccgggccagatcgtgacaaagagatatcgtgccgggccgggtcaatttcgggttgagtccgatctggcccgattgaaattcctatatatatatgtatattttactctttataattatttatttttgttaattttttttataaaattatatgaaaaataataaataaaaaattattttgattatttaaaaaaatattaaattattagtattttacaaaaaaaaataatcattattgtaaaaaaaaaatgtcacattccattcctatgttagaacaaaataaagtaatcttcatattcctaagcatcatcatagtattacttcgcacaaccaaatatggtaatgttgcttttctaggtttataattctcttcatcactttccaagcaatgttaaacttattgccatgaaatcaaacctgcataacaaatggcccttaagtgcatacagaacttaaattcaggaaatttaaccaccaatactatcaaaatttaagttttagagattaattgctagagtgattaatctctaaaaaaacagaactattattaataattattaatattggaagcctttcttcttctggagccttctagcatgctgttcatctcctcaattgagtttttggtccctctcatggggaaatcagtccaccctcccgtgttttgtggtggtttcaggtgttttcatcctatttgtgaatcatttctctctgtttctctctcccctttgagcatttattgctctgggggatattattacatcctttcccatctcattaaaatccctcagagcatttattgttctaactctcaaatttcgtcctctctctccttctttcatcatctttctttgtcctctcttcatttattacagatctcccaaatcctctccctgcaaaacccccttgaagatcgtaagaaggaggcgggcgactggacttccgaagctcctcagcttcttttcatcattgcttcttcaatggatgggactagggaagtgactagggcggcaatgaggaaaattctgaaaggattatggtttttcctatatataaccaagccaaggtaccattttcatcatccttttctgcttatttttctttttttagcctttgttcttgaagtttatttgtctgtcagtatggatgagttcttaagttctgtttctcatgctttagccctcccccctgatgaatccactatttttacttatgaggttggttcttcgagttcctcctctgcccctataagccttattctgaagcttcataccattaggccctataatcgtccctctctaatgaaaaccttgtctggtatgtggtcatcgttgtgtcgattccctgttgtagtctctgaacatgccgagggtatgtttcttgtcacttttggttgtgaaggtgataagggtcgagtcctagatggtcagccttggcactttgcccagagcatcaccatatttgctgctactaatagcagttttccccttaccccagataatctacactatgttcccttctgggtgcaagtttatggtatcccttttatgtgtaagtctcatgatctggctaggttcatagctgtggaagtaggtgatcttatagagattgacaaagataccattaaggagggtactgatccctacatgcgtattcgtatactccttgatgttaatctgccattaaggaggggaatgaatattaagttcattcgtatgggtagggaatttgtcaagtggtttgactttaagtttgaaagacttcctgacttttgttttttctgtgggaagcttgatcataccaagaggtactgtgtggcttttctccaaaaatgtgatgagctttactctgaacccctgtgcccttattctattctccttcgtggaaaggaaaaaatcattgataagtcccagctattccaatatcctcatccccctactataactatgatgaattaccaacctgtcaacctcaacttaccttcccaaaattttactggtcaaggcataaacttcccctctttcttgagccttaatgataacttttctgcaccctatgcccctccaacatctaatgtggttgtcatgatgcctactcctttaaatcctaacctctccaatattgcccatccttgcaacagttccactttcaatatctccttgcgaccttcagccttcacctcatactctactgactctgttattgtggctgctagccaaccttcccctggtgctgctctatctgttggtctttcttccccagaggttgctagtactgttagctctgtagctgctctacctcagggcactgctgacaatgctaatatggaccccaaccttcatcgggatcatcctgatcctgatgttcgtggaaaaggcctggcatctgcttctggtgttaagaggccctccttccagcctcactttgctgttgttggaagctctgtgcggtctcagcttaaacgtgctcgatctggtgcaagggagaatgaggcttctgtggatactacccaagatgaacaggcgggtgatgccatgcacacccgcctagaaaaatgagccttttaagctggaatgcacgcggtttggggagtacgcgtgcattcagacgaatctccctgatggtgaaagagcagcagcctgatgtggtttttttgatggaaactcgtctgcctactaaggccattgatcgagttcgagttgctttg

SEQ ID NO: 32135 - DNA, 1602 bp, Cannabis sativa
  modified_base (41)..(43): a, c, t, g, unknown or other
acgaaatagctcaatgcggttataactaaaatagaaccggnnntataacataatgaatacaaacaaataacacgaaataactcaaaaccgattacaattaaaaaacgaagaggaaatcagttcctaaaacactaaaacataaattaaaaacaaaactagtacataatatctcaaaaaaccagttataatttttgaaaaaaatgtgcagttcaattccaaaaaatattgaaacataaatatgaaaagaactgtttccataaaaaaaaaaataaacacaaataataacacacaataactcaaatataatataaaaaatcagttacatttatcaactagttaaaaatttgagacaaaaaaactggtttcgtaaagcaagtaagataaaaaccgacacacaaaaaccagttaaataaaataaataaataaataatccaatacgttgaattaactaaataaaaatcaattcccaaaataactaaattaaaaactcgtttctaaactaaataattcaagaattattttttgaattgactaaataaaaaaatagatgagataaattaaaataggcttagttccaaaaaaaaaaaatagtaactaaaaacaaataatacacaatctcaaacaccggttataatttaaaaataagagagaattagttcaaaaataaaaatacagagacataaaataaagtagaaccggttacacaacaaaaaaaaaagtaaaaaaaaataacacacaataattcaaaaaccggttcttaattaaaacataagaaaaaatcagttcaaaaaatactgataaataaattaaatggaactggatccacaataaaatgatgaggtgacccaaccacacctagaacctaatactgatacataaattaaagcaaaaccagttccacaataacatgagcaaaatcaaataacacgactcagagcagctggaccatatcaaaaattgcccaaggaggacactcaaaatgttaggaaagtttttgcggaaaaaactgatatgaggacgaagagaatggcacaaaaagcaggagcactaatattcaatgttcttaaccacgattttgtcacatgaattttttttctttttttattttattttcaagaaacagaacatagtattacatcaaaggggtagaagaaaaaaaagcatgctatctttgaaatagagagaggttgtgaaacctcaagaataacaataaacaataaacaataagagtcgtatatttcttctccagccatataaacaataaacaaagaaaaaaagtaaaaaacagagagagagagtactaacaagaaacaatgaaaataaaataatgctgaaaaagattatttttgtcagatttcgggccataataaattgaatcttcacttatcaccaaactgtgtacatgcacactcctccaaccactgagcagagattaaaatgttactcattacagcaattgcaagtttataaaaaaatttgacaaattacctgaattttctttggtgaattttcaacaatattccagcttgacacaatatcaacttcacactcttcatgcatgtcttcatcagcttttgtagggattccaccataattatgcta

SEQ ID NO: 32136 - DNA, 1601 bp, Cannabis sativa
gtaaatattagagtatttagtctctagttggagaatgctatagagttgtacaaattttcttggagtaatgaaaatcacctgattcataaaaaaaaaaatgtagcaatagttaaaaaaatatttcttaaaaattaaaatctcaaaccccattttaaaaattagaaaaaaaaatatactacctaattaaaaaaaatcaaacatacatgtattgtatttaacatcacctaattgaacctaattaaaaaaaaaaactaattatcacgtaacatcaacctaatataaatataaattcaataaattaatttgttgattattaagtataacaatatgttattttgagttttagaatatatattaattattaatatagatttttttaatgtaaatttaatttcatgatcagattaaacttttaaagtaaattttaagaaagaaccactaatcttggcagtgatttgctaaaaatgtgaagcactataatactagagaattttaaaggttataatataatgaatgagaaaattatattttaagtatgcatattaaaaggctaaaaaatattaaactcttttattaccgtatctagcttatagtcactgtgtcgctatatgtaaactcgttattattattattgtatcttatttgtatttactagaacatttgaagtcgacatcataattatatctcacttgtatgtacattaaaaattattattatcaccatacattatcaaaatttatagaagaaaaaattaataaaatctttatgattgctaccacactgtattattacataacttataaatatgtatacataaatacattaattatatacgtgacattaattatatttcttaacatgtatgtttaattattaactataatttaacaccctaaatataaatttcctaatacgatgaaataaacacatataaagtttagaaaacattatattgatggcagcggagcaatatgactcattccgttcagatctctagctattgattcccttttgtagcagatcattatcaagatctgaacctggatcttctctcctttagtttggttaaccacagtcttccacactatgattgagtacttgacttgctatgagtgggcatgacactctatcactaaagttttgaatttgatgaagaataataagaaggatcaaaatcactatgaaggaggctctcatttactagttgtctgacagagaatgaaaactaggttattggttagatgagaatgagagccatcttatttcttttatagtatttcttctagggtttaggatttaattatatggattaaaaaaagataaactaataggcaaaaataacactaagtggccgaccatagtagtgggccttacaagttacaattttgcaattttattcaactatttatcttttctttcaataatgccatatttttcaatttcaatcttataaatgtcaaaactatttatttaacaattataattaattatcaaataaaatttccatttatcttatttattaattagacctgacaaagtctctcaattaataaataaatcccaaaacttcttttattcataattaagcccttgcttagtga

SEQ ID NO: 32137 - DNA, 1841 bp, Cannabis sativa
tagagagagtgagtgggattattatattagagttgccacctcttgactgtaattgtactcttaaattttctggtcaataaattaggatcaatgaccttctatgtgggactatatgctttcttttcttatgtttgtgcatttaactcacttcccattgcatatgtctattgactaaccgtttgaattgttgttcactgacttctgttttctaagtgaattgtttataggatctttgaggttgaaatctgtttagagttcctacatatatatttatagcagcaaataatatatatatgagaaatatgtacctggttggccattgggttgtgagacatgatgagttggcgcctcaaagcttgagtgttgacctcgtccatcaagtcgtcggctttgggaactacagtgctgagcctttggagccagttcttctcagcatctaaaagcacagcttggattgttgaaatggtttccttgagatcttgaagttcattctctacaccccaaaccagagagatctgattaatgatgtttgaattttcaacattcatttatttttatgaattgaattgattcttttacctatatacatattttcattttgattctatgagaaaacaagttctgaaaggagttgttggatcaaaatgctcacctaaaaagcaactaccatttctctgggttttgtcttttgttaagtttgatttcattgaaagagaagagctaaactaccacaaaagggtagctccccaacagtgaatgctgaaccattaaaggatatagctacaaacttgaaattacaaccccaaaaggatttcactatactagcactagaacagaaaaaaaaaaggatagaagctatattccaatgagggaaaccagagactccctggtagctgcggaacaagctttgcgaattgccagcacttccatttgaagagtggaggagccatcaagagcatccgtggccacctagtttatcccgaattctagtgatctctgccacatcttcaaacacttttctctaaacggaggccccctgtttgtttttgttgggaaaacctattgcaattaatcacaatattttctctctttgtaggttaaaaattggatacttataaacaccacaatgagcaatatcaaatatcaaccaaaataccacaaacaatagaaaatatacaaatcaagcataaaagtaagacatcaagatttttacgtggaaacccaatgcgggaaaaaactacgaggaccgtagtctgatcaaatcatccactatcaccaatgttcaataatgggattacaaaattcttatctagtataactagaggctcacaacaatatcaagattaaacaatgtttgatcaacaagacaatcatcatcatctctaaagatgaatacacaaagaaaaagtttgagtctcaccaaatgggtattgtagaagagcaccttaaaagtttgggtctcaaagatgagttgatttctagctcgcaaaactggttcatgcacctgttccggactgcaaaaccaagccactaaatccttggggtggacaaaggaaagagcctccaaccagcctaacttcccatcttgagccgaaccataaaagcattcacaaatgggcactctttaaacatatgcatcactgattcttcattgtgattacagaacacacaaatgttttcctggaaaagaactctggcactttgaacccaccaagaagcaaatttccctctttcctctctcagtaaatattacaaagggaataattctcaaacaaacttgtccttccgaccctttctgccatactgccatacgagcttttcagagctcagccaatgatttt

SEQ ID NO: 32138 - DNA, 2073 bp, Cannabis sativa
tctaactcccaagtggcttcctccaccctgctttttctccagagtactttgactaaagctatggtcttgttctgaaggaccttttccttcttgtctagaatttgaactggctgttctgaaaatgacaaccacggttgtagctcaagattttcttaacttagtacatgagcagggtctcaaacatacttccttaacatagagacatggaatatgtgtgaactactgaaagagctggaggcaaagctaatcgatatgccacttgtccaaccttcttgagaatctcgaaaggtcttgtaaatctagggcataacttgcctcttttcccgaaacgcttgactggcttcattggagacattcgtaagaacacatgatcccctactttaaaatctacatttttgttttttgggttcgcataactctttttcctgctctgagaggcaagcattgtggctttaattttcttaatttcttcattagtccgctgtactgattcaagacctaagtatttcttctctcatgactcatcccagtgaatgagagatctacactttctgccgtataacaattcataaggagccatccctgttgtactttgataactgttattgtacgagaactctatcaacaataagtatttactccaggagccctcgaaatccataacacagacttccagcatatttccagtatctgaattgtccttttcgactatccatcagtctaaggatggaaagttgtaccgaacttcagtttggtacccatagcttactgtaaactctgtgaaaatttggaggtaaactttggatctctatccgaaactatagacttcggtacaccatgtagtcttactattaccttgacgtacaaatccgcatactgatccacagaatatgttgtcttaactggtagaaaatgtgcagacttcatgaatcgatctaccacaatcaaattgaatcaaataaacctgtggttctaggtaacccaaccacaaagtccatcgtcatatcttcccatttccacttaggcagtgttaaaggctgcaacaaacatgctggtctctgatgttgtgtcttgatctgcagcatcgcgatacaaattctacgatattcttcttcattccgctccaccagaagtagggtttaagatcttgatacatctttgtggtgccgggatggaaggaatatggagtggtatgagcctcttcaagaacttcatttctaaatttcgtactacttggaacacaaacccttctcttgaataacagcattccactagttgacactgtaaaatctctggctagaccaaatgaaacctcttctctaatcttcactgactctagattagttaactgagcagctttaattcattctaacagatcagattgcagtgtcaagttatgaagtttgcctacaactatctcaatgcttgatctgaccatgtcttctgctaacttagttgaaatctgaaccatactagttacttgcctggaacccttcctgctcagggcatcagccaccacattggccttcccgggatgctaaaggatctgacaatcataatccttaaccaactctaacccacgcctctgttgtctcatattcaagtctttatggttagaaatatttgaggctcttatggtccgtataaatttcacatctctctccgtatagataatgccgccaaattttcaaagcaaatactaccgcggcaagttctaggtcatgaattcggtaccgctgctcatattctttcaactgacgagaggcataggcgataacccgactacatcagtacacaccccagaccctgtttggatgcatcacaataaacaacaaacttcactttatcagaaggtagggctaatactagagctgtgattaatctctatttcagctcctgaaaacttgcttcacacttgtccgtccacacaaaacgctgattctttttagtaagttcggttaagggtattgaaattttagaaaacccttctatgaaccaacgataataacaaaccagaccccagaaacttctaacttctgtgactattttcggtctcggccaatccctgacgga

SEQ ID NO: 32139 - DNA, 1165 bp, Cannabis sativa
cttggtaattaatttttgcaatagaaattttattttcacagtccttgtggagacgatactcattacttatcactatattacttgtttgtgactacgtgcacttgcgtatcaaaaatttaacacaacagcagcagctgcgagggctacacgagataatgcccctctaaaccaacttgatatgtctattagacaacctcagggaagacctagaggctctaggaccaggagacatggggatccccctagggggaataatcttggaaatccctcgaacactcaggaggattaacttgaggacacgagggacatcccaatggatgaagaaaaaccccaaaatccaataaacactggaaatcaagaaactcaacccaacgatccaggaacttcccgtggatatacaaactgtgggaatgtacaacttgggaatccagaatcatctcgcatgaatgaaaatcccaggaaaacatagcctaggaattaaggatttcctcagcacgatgcgacaacggtaaggaatcagcctggatcaagccgaccatcgagacatctgaaaaggccaaaccgtaatgatagagatagtacgtacacctatttaaataggggacgcttatcaaatctattttgaacatagaggccattgcaagaagaatctcaagaaaagggtcaagtacagatcctagtggctcaaggtcaaggacccatgggcatatcagatcgactagaactcacgcacgtgaaaggcgagcatgagatggggaagattcacaccacacttatcgagatgatcaagatagcattagtaactcttgaagttatcaatttgaaagttattctgcaacaaggttagaaagcaattacgaccaaagaaacgagaggtggtgcaaccctgatctacgcgagcatctgaaccgtagacaactagacttgcatgaacgattgaatcgaaacattctagatcttcatgatcgattgaaccagaatgcaggtcgccaacaataagtcaagcaacaacccatggatattaggggtgaacatcgggcaagtttaccgagtttcgagttcgcgagtttcaggttcacgggtttcgggtttaaaaaaatgaaatcgaacccggacccgaataggggtcgggttggcgggtcacgggttggcaggtttcggttgg

SEQ ID NO: 32140 - DNA, 3321 bp, Cannabis sativa
attctcactaattggttagcctttggttctcagacctaagaaaatgcctctaaaaggaaggaagacaaggagaacagttggagaagatgcccctccaattaatgtccaacctccacaagctgaattctctatgaaagctcttctcgaagacttaagagcagttctcgctcatcagatggatcctgctactggatagagtcatcattattagatctttcatcggatctaagtacctgagtttgattgtggacaagatcccatggtagtttgttttatgtgaattaagtactataataataaaaatattctttgttgtgtaatttttggaattatgattggaatgagaaaatacataacagtctatctcataataaactttttttttgttatactctttaagtgtcggtttataactgagaccaaaggatcttttactctcggttataaaccgacactaatattcaatctgtatgtatatatttttttttaacttcttttggtgtcggttatacttttattatcggtctactaattgacacttaaagtcattataaatgtcagttataaactgagaccaaagaattgggatggtttttagtgtcagtttttttaaaaaagcgttcatcaagccgacactaaaagtctattttgtagtagtgttagtggtattatttttttaaaaaaaagaaacataataaaaaagaatctttaacttagtgggtaaactatgctttcattattgctgaataagcttaaagttaccttacaacttacacctcatatcatgcccctataatagtcggtgactaatatggaatgcatttaatttcaattaattgatgagctctttagtacttcatctgtactcaaatattttacttttttttttttttctacttatgatatttctctaatatcttgtagtttgtggtctagattagaggttatacagtaataacatttatgattatctaattaattcaagctagatagatagtgcatataagttgagatatcgtaatcaagacacaggacccccaaggaaattaatatatgttatataaaaaatagtgattgaaatcatcaaaatattcaaactagtattcagtacatgaaaattaactagaaaaaaggtgagcaaattatttaatttttttttttatgcaaaaggtgagcaaattattacaagaagagaatatggttttagttagcgggattgcagattctattgattataaagttaccataatcatttaggagtttttataaaatatcgaattttaagtaaaagtttacaatttacttccacatgattgaaattatatttatattgtcgttcttttttttttttttttttttttcattttatactgtatacaccaaaaaagaaaacaagatctctatcttctacacccacgaatagaacgaccacagcaataccaaaacagccagaaaacaactactaattttggcgagattgagtaaaaatagtaaaatcgacgtcaaataaataatcaagacaaaataactgtaaaaataacactaaaacaaatcaaacaaaacaaaaaggaaaaaagattaaaaaaaaaactaacaatcttctatacagtctcaacaccagatgcaatgacggctatatttgcaagtccaatccttaaaaattagaataaaaaagttactaaaacaacacaaaaacaaatataaacaatgaagcacatatagccacttagaaaaatataaaagaactacatacctaaaaaactttttgccagtgagctcgtttaatgtatttataggacaatgagaatgaaaaatcacaaaaacaaccatagagaagggaaaaaaaaatgttatttatagcctctattttttcacactcacggatagaaccaccacaacaacacaagaacatctaaaaactaactataattttggggagatggagtaagaatagtgaaatcgacgtcaaataaataaattgtggcaaaataacaataaaacaacactaaaaaaataaaaaataaaaaacaaaagaaaaaaaaaaactaaccatcttctacacaatctccacatcaaatgtaatagaggctatttacaaacccaatcttcgaaaattagaaaataaaaaattacactcttatcttccctaaaaacgtaacttaatattcaaaaactaaaaaaaaatatgaaaagaaaattaagaagaataattgaacgaaaaaaaaaacttatatgttaattaaggaacaaacgagtttaaaaaaaatatatatcattaatacacaaagaaaataagcgaagagaaaaaaaataaataggatgaaaataaccttaacatatatattgtaagttatatgagtttttcatcatcaatttaaataataataataaaaaaaagaaataaagaaattgtcacaaaagtgacacaagataaaatacactttataatataccttaggttgccacgttccttaaaataatataataaatttttttatttaaaatcagtacacaagtgtaataaattgagtagtaaaaaagtagaaaaatgcatgtgataatgaaattaaaataaaataaaataaaatattatgaggtgtaaattttccaactatttatgtgtatcatgtgtttattgtcatcattaaactttgagacttttacactaatcggtacttgtttataaatatatattatatatgattgcacaaatgaatagatattgtttgttaattctagcattttgtgcattttggtgacataaaaaaagataaagagtatatggagatagcagagaaaaagatccagaagatatatttttctatataaagatcataaagtattgtctaattatacaattttctttgttcaaatcatggcagcttatgacaaaaacattctacttattatatgaatacacatttatcccatatatatacataggcagatctatatagagtctaagaaaaacttaagcgcaccctcaaatatcagaatagattatataaaattagagatagaaataatgcataattgttagacaacaaattattcgttattcagcagacctggttttgaatctgatttccctcgattttatcttctatttttatttatatataaatctacccttttgaaagaaaaaaaaactaaaaagtattaacatagagtacattcaaactacaaataacttttctgttagaaaaaacttattatattaagaattatatttaattatatttaatttataattaacataagttctcacataaaaaaaaaaaaaaactataacaagagttataaaatctcatattattattt

SEQ ID NO: 32141 - DNA, 3300 bp, Cannabis sativa
  modified_base (1003)..(1006): a, c, t, g, unknown or other
  modified_base (3267)..(3273): a, c, t, g, unknown or other
aagatacttaattatttgtttattatatttaatacatttatttaaatagaaaatttaaatatttaaataaattttatctagatacttaaatattagttattttcagcacatttatttagacagaaaattatatataagttagaaattttaatttcaaaagaacttaagttagaataattttcagaatatattttcttttattaatcatttcccattaaatttcgaaatgcattatatttaatgcagatattttgatttttttttttaaaaaaatagattacagtcgaaaattaattttttaattaattttggaccaacttaaattaagtaaattttttattaataatttattaaaataaatagactaaaatatattatattttaattaaaaaataagtaattagttagtgaaatatctagacaattattttctgtatacttgtggtatttttctagttgtatttgaataaatagaaaattaatatttaagttaatattattcgagatacttaaatatttgatatttgtctaagaaatttaattaaataggaaaaaaatatttacattgaaaattaatttattaattaattttttaccagcataaattagattaatttttcaggatttattttattttattttataatatatttcgaaaatgtatttattttaaatacattgaattttgaatttttccatatttatttatagaaaattaaattttagttgaatattaattttaattaattttggaccaactgaaattaagtaattttcatattatttatggagaattattactaaaatggaaaataattttatttatttgcagatctatctaagtataatttataaatattaaattaaaatatatatttagagttttctaaattagtaattttaattgaataaatatataattaaaataaatattagatgaaaatacactttaaataatgacctttattgtaaggatatttgatctccattgttggttctacannnntcttgttttagtgagattcatccccaatagatggacgttcattagcaatttaacgccatagaatcttagaagataagtattattgtaagtattttcttagtaactgttatacccaaaattcggcgagcacatcagaggaagacacgtttcaagctgggaagactaaagaactcaaacacataatcataattacacttgacatggaataactcgttaaaagcataattaacagtcttatgcgagataaaaacgtactaaattttgccatgtgcatcgatgagaaaccatgtaactttaggtgtacgagatgaggcactaacctcgttatgtggatgagatataatgagaatggagatacttagcgtataatgtacagtatacaaaccaagtacaaatagatgggtgaaccaaagtgagagatagcgaggcatccacctcgccataagagggcatgcacgcgaaaaagatcatctcgtcaccagaaactgcagttgtcagaattaaagtaaaagcattatcaaccttgggaagacatatgttaactcgactccattcccagcgaggcattccaatacgataaggcttaccatatatctttaatacacgttcattttggcccagtaaaagcgggatgttcacagctgtgtaaaatttaaataataaccgcgtttgcttaacgtgatatgtaatcagatcccatgatttcaggggataatcgttgtaaaaagattacagtcaactttgtaattactgcctactatgtggttataaatagtggcaagtaagaccaaaaaaagggggaacgggaaaaatcatacaggagaggccctgaaaaatgttcagaaatctaataagattgactcgtggactatgcaaaattttaactgaaaaaccatgtaaaaaaatcatgtgtgcgcatactttttattttacaccttttatttttttctgtgtgatattgtcactattaggctcaaatttggttaatgaaaatttacgttaatagtttggtgctttcattgagagcctttgtgaaaaaagctcagaaaaaaaaagcctcctaacataaaagtgatggatgacaacaaagaagatagtcctcatgaagaaatcaatcatcgtcctagaaaagagcctctgagtcctcagggttcttttgattcatcacctgaactggccactggctctgggaaaacccagtattggggactcagactcgaagggcctaggataaacaacggtcggtcacttcctaaccaagttgatgaggatggcgcctacgaccaactaggtacataccaatcgttgagttagaaaaccgtcatcttaggcgccgactggaggaagcaaactggtgtaataccgaattagagcgtgaaatagccgcagtcaaggtggcactggagaatagttcccaagatcaacttgaccttggagacagagatccacgaggcaaagctcgtacctcataaaccaaggggcaggagacaacccaaagatatttctagaactctcaggagaggcaacctgaggaaattgaggaaagtcttgggacacaacctgggacatgtggaacatcagtcggagattgccaaccctctctccatgttcataagaaaggagctcgcgcaaacccctatagggggaatgaggtgaatcaaaccttaagaggaagagcagaacgagaagaggcgagggataccgcgaggcgtacagtgtctcataagagatcaatgcgaggaggagagaacactcgttgcagccatgatcaagaaggcataatgcaacatataggaagagcaaggtctgatagctatcacgaccggtgtgacctactagaacatttgaacttgagaaaacctaatcttcgtcaacgacttggtccaaaacaaagggattttactccatttgcgaatggccgagttggagaataagttcagaaggcatcaagtcagggaactcagaaggcaataggggtatgattctgttgaagaatttgagttggaagccttaggatcaaagaggaaagacgattccaaaaggatgtccaaggataagaaatagaagaaacacaacaaatatatacccctttatgctgaatataccgagcttaatgaaactcgggaaaatatctacctcgcacatgtataggaagtcatttttaacgagccaaaacctatgagacacgcgagatgcaaaagggtgttggaattattttaccaggatctatatttactaaaaagtatgtttcattaacatcnnnnnnngaattctaaaacaatgaaataaacgca

SEQ ID NO: 32142 - DNA, 3266 bp, Cannabis sativa
ttttttatgtcctgctatatataacaggtaaaaattttatttttagactcaaattaattatatatttaaaataaattattttttaattaaaatatttaataaaatattttttacaactaatatatataaatatttttattttttatttataaagaaataaataaaattaagttacaggtgatttattaattatttttatttaatttttaaattaattacaaccatttaacaatgatctaagaattaaaaataaatgtaatcattgtagttacatatttaatgtaactattaaaactttttctatatattatagtgcaatgggtgtattatacgtttttgaaatataattttctaaactacaccgcactgtgatgatagtaaacaatttaattataatcgtaccataatagaaattaaccacaccacatcatacaatacagtgcgaattagggttgtttaccaaatcgctcaaactgctcaaaccacctgcaccaccctacaccgcaaaaaaaaatgtggtttaaaattctttgcggtgcagttgcagtttgaatttttcctaaaccgcgcggtgcggtgcggtttgcaattttgaattgttaatatgcggttcaaaccgcactgtatcgtatatttatttaagtccaaaggcctaacccaaagcccactaattattgtattattgtattattgtaacttaaaactttttttttatatttattttcaacccttatgatatttttgagggtgttgctcaagttttgttgtatttctgatagtttaattatttagtgatagtctaaattgcagaaattgtaccgcactattttttacggtgttttgcggtgtgatttctgcaattttttaattttacagtgcgggtgcgatttaaaaaattaaaaaaactacaagcgcagattaattttaagaaatattataaagccgcaccaccagcatataaccaacacccgtagtagaaataaacgagtttggcgattaaacagatattctcgtcagccctaattgtaaatataaaaccgacaatatcacgtggagaagcacttattgtgcgtcaaacgagttaattaataacctttacatatatctgtatataattactccataattattaaaggaaatcatgtagagaaaataatttaaaataggaaaaaaaaaaactccagagccctgaccttcaaaccaaaaattaattcttttactttgtttaaataaaaaataatatgaaaatgaatatatgacctgtaccaattaattgtaggaacaaaatgtattatttttaatgcaaagaaacaacctttcataagctaaggccattttggtagcggtaaacatggaagccgcgtattcccggcacgccttccctcgttgcgccaatctcatagaaccttcttcaacgaccatttccattgcctccaacagagattccacattgggagcaaacatgtacccaaactcatcatcaacaacaatgctcccttttatactcggaaaccttgaagccataactgctttaccactcatcatagcctccattaacgtaagatcaagtccctgtggcctaagggttgggttcacaaatatatctatagcgttataaaaagctccaagttcagaaggactcattgaccccaaaactatcacattactccctatgtccttgtacctactctgccacggtcctgaaccagccacaattaagtaaacatttgggtgttttgtgatgaggctagagaatgcttcgtacaatagagggtgacctttgtccttaaccaatcttcccgctataccaaaaactatgctagcatttttgggaataccgattttggaccttaattcttggcctgattttgaatcaacaacaaaatcatcttcatcgacaccgttaagaataacgtggactcttttagttgggatttggtacatgtctcttaacatttcaccacagctatcgcttatagcaacatggtgagcataactcttaaagaatcttatttcgtttagtacctttgggatgaccccttgtacgcttcggttgaaagcaggggacattggctcattggggtgacgtgttaaatcttggacgatattagattgcaagctctctagtgctatgccgtgccatgacacaactagattatcaagatttcgggctagccaatgggggagagctacgctttccgagtggacaacgtcgaatggtttcagcttgttttcttccaagaactgttcccacgctttgttgtatcgccatcgacccggttcaccctcgtggcaatgaataaagggagatgaagtaggagtcttggaattgtctcctccatctggtggggaggtgaagacgtggacttggtggccgcggcgagatagagcagtgtgtagcgtgtaagcatggcgctccatgccacccggggctgtgccggtgggccatttgcgggagaagacggcgattttgagggcgataggtgaggcgttttgttggttaaaggggaggcgattccaagcgaactgcgcgttgagaaggttgcctgaccaggggtttgagtggtgagaagtacttgtggtgcagatggaggtggtggtgtgtgtgtggaggagaaagagagctggaatggtgaagagaacaacgaagaatagagtggtgcagagtttgaaattggaaggggatgatgagatattgggcttttttggtttggtgttgaaagccatattgggaaaggagagaatgtagaaatgtgtagttgtttagtttagtatttttggtttttgaaatattgcttgaaaagtattggaaagcaaagtggagaggaggtgagatacgcactgaagcaagtgcgttagactgaattttgctctcagtgcgtttttcacgccccataacttcgaggaaaagaaataaaattcatgtggcatagattttgtgactttgcttaattaatattctaagagagaagggttcacatatctagtagtggttatgcacatgaaacaataccgtaaataaatgttttgaataaatatatgtaaactattcattgctgaatattctatgcttttattattctgaagatatattgtagagtaatgcttttctttctccgaaccacgtgtcaattgtgaagctgtacattcgaatgcctaactcatatttgaaagtaaaaattagataatatatgaaagaattataagattattttttatagattaaataaataatactacgagcttatgagtttttttattttttt

SEQ ID NO: 32143 - DNA, 1215 bp, Cannabis sativa
gaaacaattaactcaaaatttaaagaagataacgagcttcatcttcaacttggacaatctttacccttctgtccatccatcagacacaactcgctaggatagccatccaagtttaagcagctggagctgaaataagaagaaaataaacatggttagtagatccagaattaataacccaaggggatataattctctaaaacacatgagtttatcacaaagatagaataccttatttctttgccaaaaacataggacactgcggtttctagtggcccttttcgttgcaatagaagcactttcgttttttgctttgcctttcagtcagtagcctttttattcttattagctatgttaacagctttaagaggatacttgttgttcttccacttcttctttttttagggtttcgaagtagaggcaatgtttgcctcaggcttggtcgtaccattagcagtgccagaactaggagctttgtttcctcctttatgtggtcctccaataaaattttcaaatgtctgaaggttgttaattaactcatggaagtaaaaaagtcaacttgatcaagacataatttgatgtgaagggcagaaaagctggagtcaaactatttaagatcaaactcacctaactttcctgaacaataatagcttcacgattcttagctttctagaagtaacttgccatctagagcaggtgatcatgcacgtttcgatgaggcttcatctgtgcatttataaaattcttcgtcgcctcaaaacgagcatgatctgacgtaatcctgaacagtccagttaactggttcatgatttctgcagccatgagagtattggcaaaccttgtcttcaaggtgtcgaccatgctagacgacataaagtaccgagttttcttgttagcatttttccaatgctcgagcttttccttaatttccttggtcgcattctcaccttgttgttcaggagcttcatcagttaacacaaacatggcattttcaccgatgagagcaatattgatgttatctttccatttgacaatattagctccaaagagcttgttgtcagtcaatagtgacaccatgagtttattcatagtcatattggatactactaatatcaataaatagaaatcaagtaaagttcaatacaaaatcatacacattcagaaattattaagcacttagcaagtaggaatgataagtgaaaatacaaacacaaacaa

SEQ ID NO: 32144 - DNA, 2223 bp, Cannabis sativa
attacctgaatccaaaaatgatattactgcttcacttatgtcatcaccaatagcctcccaattgtcttggaagaaactactagagaatccatctggacctggggcttggccacttggaatactaaaagctgctgcctttacttcctctgtagtgaatccccgaagtagtaattttgattgctctgctgatacccatgctcctttagagattacactattcttaactttctttctattcaccattttagtcccaagcaagtctttgtagaacctcagaagtgcaccagtgatgagctctggttcatgtacccgctgtccatcttgtgcttctatcgagaggatgcggttttgtctaattctatgcttaatgcaagcatgggatatccaaaagttaaataatctatttgatagggagactgtttctgcaatcctaaaagggggaaattcgtcggttcagggagatgatagatggatttggactttagaaactaatggtagattctcatgcaagtcagcctacctggcccaagctgttgacagggctcccccttgtgacgttgctccttcactttagaataggctttggaattgtaagatcacaggaaggatgaagaccctctggtggtgtctcttatctaaggtaatccaagtgcgagctgagatctgtaaaaggtttcttattgaggatgttacatgccccttttgttagacagagaatgaatctattgaacacccttttctctcttgtaatgtggctttccacttgtggaagtcttctccttgaggaatttacctagtttgtggtactggaatttgattatgggaccaggtcaaattcatctgggaccctaaaaacaagggcattaatgccgatgaggtgttcctttacgcatcgctaaccgtggatactatctggcggacccaaaacgaaaaggtacataataatggtctagtcgatgtttataagtgtgttgacaatattcgctcctcttttgcaggtcaccatgcttttttgttcccctgcgtaccaccgcgtcggctggatgcctggcgtactcccccccagggctggttgaagctcaattttgatgttaaagtggtattggacagcatgtgttcagcggtcgtggcaatggattatctaggtagggtgatctgggtgcatacttctaagctggattttgctgatgctttaggtggagaagcggcgacttgctgtcttgctctagatgtcgcgaaacataatggagttaagtatattattgtctagagtgactcgagggtagcgatcaatgctctcaatagggaggttgcccattgggagattgagaactacgtctctttttgtcttagatcctctccttattttgttagttgtatttttaataatattagcagaaactgtaattttgctgctcataataaggctaagtgggcgtttatgcaccaaaatttcggcagtatttacttgtcctctatcttggaacacctgttttgtaatgaccgcgaggtctaactgcgtttgattataatataagtatgcttttcttcacaaaaaagactaaatataacacaaactaattttttttactaaatttaataaaaattttacatctttcattagagatgatctttgttgtattgataatttgatacaattcgagagtttttacaaaaaaaaaaaagaatatgcattaatattgataaattttagctaattaacaaagaaacatttgtaacacaatcatgcatactcttgatcataatctatattaacacattaccttttagaaaatgaaaagaggtgcaactaaagatatatatttacaatactatgcaatattttcataaattttaaataatttattataccaaaactatagttaaaataacttattatatatatttttacataagtgcacctttgtacataaattattaatgtatacttttttatttgtaggtgtaccacataatttttttgataaataattgagatatatagggtcatataaaaatagatgtactggcattttcattgtgtttatataagtatgaaattagtagaaattactatatagtaaataaaaattaatatttcatttacaaaaatatctacataaggtgtggacaatatctataccttttatgtgcttttaattaccaaaataccttttacactatctgttgtcgagtgaatttcgcaacaccgaattatattgt

SEQ ID NO: 32145 - DNA, 2356 bp, Cannabis sativa
  modified_base (693)..(704): a, c, t, g, unknown or other
acaaggagtcgagttagaggaggctactcagcctcattttgatgttgatccagaggttgaccatgcggaggtgcctgaggtcgacaaagggtttaaaagtcacgatactgagtgcatgaagacttctgcccacttagtgaagtagtctactgcgactacagcaaattgtacccctccttttccctttggaagttggccaattagctccatccccgatactgcgaagggccaaggagactgcatcatcatgagctcattgcattgggtggagcttttggattggaattgaattttatttttgagaatctttggcacttgtcacatctttttacgtggtccattgagtcttcgatcactattggccagaagtacccctatcggagtatctttttagataggtttgcccttggcatggttgccgtagaagccttcatacacttctatcatctgctcgcttggtgacacaccttaagagcggcatggaaaaacaccttaaataggccatgcaaagaaccaccataaataggtcagtccattttcatatccggacttaaattcgtgttttactttttcatattttttttataattactaaattatatttatattttaaagctttaattgtatttaacttttgtacaatattttacagacaatcatataaaaaaattattaacatcattagaatttaannnnnnnnnnnnaaatactcaaatttttatatcacactctataaataaattaaaatataatcttagtttttcatgttttaatagttttaattataaaattataatattcaatattatattttaattttattattattttgattagtttataattgataaattcatatattattattattaataaattaaaaagttttttaatatgtcgtgtcgtgctttctgggctagtcgcgtatcgtattttttgggctagtctattcgtgtttacgtatcgtgtcttgcgtgcttctcgtgtcgtgtcgtgcataaggacatattttttgtgttgtgtcatgccaacttgtagtatcgtgctgtgtcgtgcccaagcccgtatttttcgtgcatagttgtgctcgtgtagtcgtgtcaaaaaacccgactcgtatttacagcactacctatgatgatgcatctagactccaaagtctagacttatcaagttcaccccatcgaaccctaacaaaacccccacccgaaatcccattaataggaaaaattgttacacaaatatatgtattgttttaagtaataaagttagcacgagtatcgtcccatgaatattattaccaaataaacaacaaaagcaatttaattataaaattaaaataagtaaacaacaattatgaatttcaatgaataaaacttagggtattgatttcattaactttatttcacgaagttataattttaattaaattagtcttaattttttttagtcttaaattaatttatgatacatatgtttaataatgactctaattaatttataggaaaatgtatatacgttttttttttttaaaaaaaataaaatattttcaaacctctacaaatttatattcatgtttatgaccagttccaactataaatgtagcatattctaaatccaccaagttctttctagtcacatggcctctccaaccttactcgtgtccagaggcctccattgaaaataccttaaatgatttcaaacatatgtatgatcaaccttttaaaatcctcgtagagtgatatcttcctagactagtttgggattactctaattagatttagaataatttcgataataatcttgtgaaattttgggttaacatatgctttatataagaaatatatggctatagaaataagagaatttgcatgccattttttttaaaaaaatttaaatatatatatatactttcagatttttggtgtggctaaaggctaaagagtactaaaaggtggttcaaaagtagtgttcacgagtttggtacactacatatcaatccattgtccctttgcatatatgctaattaatgtagcatgttgttatatgccgcacaagcttatatagaaaaagaaagaaattaaaaaaatttagttagagatggaatggtttttgatatttttgatactttaatattactactctactgttaagaattataggattctatcttaaaactaattagtaattataattaaagtagtatgttcatatgacttataatactttacaatttattcaatgtaacataatgtctacaatatctactaacaatatcaacttttaatattcaaatcatgctctatatatgtaatgtcctcgcttcaagcctctattgggcccttacacccacgga

SEQ ID NO: 32146 - DNA, 4186 bp, Cannabis sativa
  modified_base (4108)..(4109): a, c, t, g, unknown or other
tattctacccagtattcgcgatgctcctataggcgacaattttatagaccgtcagatattctttacccgacagtgtaaaactgttggaaattctgagttttttagtagtgagtactagatctagagacaacatctgtcattagggcaacaaattgcttctttggtgaccaagataccaaagtttcacctaaaaatattacacaaaagccaacaactgaacatctatcattagggaaacacgctcaatcaacattagagataccagtaataattaatctattattactgctaagagtgcaatgccctttagatatctcaacacccatttaactccactccaatggacaaaagtaggcatctgcaggagctgactaagattgtttacatcattagcaatgtttggtcgagtatgggacaaatattgcagtacacctatcacactttgatacatagttatattatgcattagttttgttgtttttatgccccaaaaaaataaaaaactcaattttattgtaatcttatttactttcaataaagatcagaaatcatatattgatcttgtcatatgctttgttcacataatttatacatgattaaaggtttaatatataagttctactaaatcccaaacatatagttattcacaattacaacatcatagtggaaagtgattgtgattatatgctttaaattatttagtttcatgatttattagtgcactgaatttacgctgacgtgataatcagcaatgttatttacttacacttgtataagtggaatgtcctttccaggacattaacaaagtaaactagtatcgaatgtatcggctatacatcagactggatcgatattgatagtggaaaatatatcatgaacttacctttatatattttctaagtcaatgtaacttagttgatcttaggtcaattgatctcaatcctgagatggttaacttctagcttaattgtactattagggttgtttcacttgttcatttaagctgaccaataggatcagcccaatacttatatcttgggaacttggttgttcaattgagtgagagcgttaatcatagatatagaatttataacttctaatagaagtaaaatgatagtttccttagagcttggctaaacgcgtttaaatgattgatgcctcatttcggtaattatattagtttctcgaaatatcatttgcaagtagctaagtgtttcaaggataaaatacgttgaagggtaaaacggtaatttagttcctattcaatatagaccatctatagaggattgttgattatttagaatgaaataatagataactaaaagcgtatctattcttggtgtatagagcattctatgtaatcaaaagtgcaattttgaatctatagtggagtgaggatgaactaataagatagaaaatttacttggtaaaattcggatctacttattaggagcttggttacattggcccatggctccctaactaattgggataatattaatttgtagtctcaactaatttatttatttaatcaattaggattctaaataatgactatctcttatttatgaattttactaaggaaggacataattgagaagaaaaaagaatccagggtttgtttattaattaagagaccttgaagggtctaattaataaatatatttaaatggtaattttgtttaataattaattataattattaaataaaaaaagttagcatttaagtaattagaatagataaatgatatttttgaagatagaaaagattgtctcacttttgaaagcaaaagtgtcaaaattcaaacccataggccttgatgttaaggtcggtcaagggttgaatttttaagcaatatattcttttatttagcttgtttattctaaaacgtaaccctagtatctccctataaatataatataatggtctttgattcaaaaactaatgactctctctgtctgacaaaaagtgaatcaaaagaaaactattattattgtattcattatttttgaaattttcttggtttcttactcaaaatttcatgctccttggtgttgagagattacccacatatgtcaaagcaatactcagcatagtgaggaagactgtgatgaacaccttcgaaggacaagaagatccagattcagatcttgatcatactctacaatagaaaggattaagggttagagatcttaatagaaggagtcatattattcctaccatcattgtaaggattgttttatttcttatgtatttataatcgttttaagaatttcatatttaaggtgttagattatagaattataatcaacatacatgttagtaaatctagatcttggtaaaataagtttccaataggtccttaatcagatagagacattggcttccctactgtaatttgtgttggacatggctttaaatttggcatatttactttctgcagtagctcttcaatgtaccttgtttgagtcaaatagtacccaaaagcatccttgtgaacttctattttgagaaagtaaggtaatggccctaaatccttcagtgtgaacttcttatttagagctacaatgaaactatttactttctcaattttgttacctgtcattataatgtcatcaacatatatttgtgcaaggatagtttttttttttttttattgttgtgagaaagaagagtggcgtgtctgcttttgagtgcataaagttccaatccattagtgtattattggattggtcaaaccatgctctgagagcttattttagcccatacaatcttttctagttttcacgcatagtcttctttccctttttcttcaaaatcttggggttgcaccatagagacatcttcttctttaagaacaccatttaagaatacattattgatgtctaattatctaatatcccaatttctcgatgcaagacaatccttactgtagaaggcttgattacagggctaaatgtctcaccaaaatccacccatacctttgatgaaaaccttggaaacaagtcaaggtttctgcttcttttattccaattacttctatggctgaagtagacaagttcgtagatgattacagatcccgcggaggaaccggtccaagaagctggaggcgcaaagccaattgtagtggttgattcatctcattgggagatagatcagtacaagaacaaaattcaaaagttcttgatactttggtcttacaaagagaacaaaagtcttagaagtattcctggcctattttggaacaagctagcactaaagaacgagtctctgtgttattatgtggatggattcaggacttgaagttgggtgcacgtcgaattcggagtgcaccttcctctccagagctaattcacacgtattcgaatgaaagtaaggcaagcaccattccaactcatccccttgttatataaattgctggtgagatgaaactgttagggtttatgccctaaaaagcttataaaaatatttctaattattaataaagagttgaacattttgatataatgtatgaatgttaaattattaatatttattattaaataatttctttatacatattagaaaattctttattcatttatgaggctgtggcttgtagatgtatagaaaactaagatcactcagctatgaataaaacggtcaccaacatattaaagttatggaatctttaatcaatggttgctagtatgttttattgatgcctgttcttcagtgcaagtaattttggttcgaattactgatgtagtatgacatcaaagtgaaggtattgaatatgatagacattatatatgacaatgaccgatatgtttaaagttgtttttatcaaactataaagacctaattcatattataatgatgataaatattagttcgacctaaatcctgagtaatcatgaacttctattcatgttgctactttctttgattcactcgctaaagtttctgaaagaagatgatttttacgacttttattttgggaatctaataatgtggagaacatgatctacaattaggggtcaccagcaagggctaggatgtaggtctagttttttcttttgtcttaaatattctgccatcattgtgttggggattattttaccaggnnctagatttactaccatgtatgtggtttaacatcctaaatatgaatttttaaaacaatggaatttaaacacatataaa

SEQ ID NO: 32147 - DNA, 2149 bp, Cannabis sativa
  modified_base (1777)..(1781): a, c, t, g, unknown or other
  modified_base (2080)..(2091): a, c, t, g, unknown or other
gtggaatggtgaacgtacgggaaaatgtggtaagtaatcaatgaattgtaataatgtgctttaaaatgtaatttgtactcatttaattgttataaaataatgtagaaaaaggacctcgacgttgaagatcccccacgccactgtgtttggatcaagtctcggacaaggagaacaaaacttgtcactgattacgtcaagaaaattgtcaagaagatagtaagtttatgttaatccttaattgagtactactaatgagttagtatatacaattcatatactaattgcttgaatatatgcgtgcattaggcttaattataagagcagcttactcagggacaaattcaagtccaaggccaaaacgatatcctgacgcaggcgctcgggacaccagagcatcctagacatgtcagggctgctgggtatgctagtattgaaatgttgtttctttagtgatacaaaaaaaatcatagctaattttttttctatgatttgcaggttcctgaccagggtatctaaattgttcgacaggaagaaaaggaaagtgtctgattttgtggctcggcaacagaaggagattgataaattaaaagccaaattcaatcccttaaacagaagaaaaacattgccgaacaagaggaagaaggagaggtggctgatcaggcatatgttcaacaacaatacgctcgtgaggatgagggtccaccacaaatctatgctgaggagtttctttttgtcaacgagccacctctcctatacaatttcgatgactagagggcctttaataagcaagtatatctctgctctgacaatatcgataacattgtggcccgagcatatatgtatgagcatgagggtaaaatcactgttcattgcacgccatacgatgattcacatgcccaggttctaatttttgaaatgctgtaagaggatgctgaaatcccaatctcaattgaagggtgcagatatgttagagaagtaccaaacatgttcgttccttggcctaaacacctaattgtaacactcgaggtaacttttcttaattaattattaatgattagtgaagtttgaatatcttcaatatttaaccatagtgaagtaggttctgcaaatatatgtgctgcggtgggatggataaataaactactattatgtcagtgttatttgtcattatacatgcatgtttaaaatttttgggggcattcaattacagccgttatgctgctaaaatttcggtagactttggattaaatgtgagatattatggtgcattttgtgtaggctccactcgctcaaccgccttcaagacgtgatgtgtcgaaggggaaagctcccatgctttctccacaaggcggtcatgatgaagaagatgaattatattcttgcgaaaggtcatggagttgatccctgaatcgctaaaatggatggttcttgaatttccgaaactcaaagataaacgtgatataatcacaatttctgtacctaagggattcataacaccgcgtatccagatcacgttatttagagaggatttgcagtcggttgcattgtgtgacatcatcggcaaccagggaatgttgtttggaatgatgtatactcttctttaatctaattaaccgtatatctcaaattctagtgaaattattataagacactaatacttatcaattttatgtaggcacatctaggagcgcataaacgatttgagaaaaatcttcacgttttacgacccagagcttctcgcaataaatggtatcaacgatgaagagaagagtcagtnnnnngacaatgcggcaagacaattggctacttggttatcattgatgaataacaagcactaaatgttctttactccatggaatcgggtaaagacaatttaattttttagtgcttattgtttatttatattataatttggaattatttttatactatcttacctataactcaatataattttttagtgcgcattggatgctagaggttgttgcgccaagaaaagttatccatttagaccccatacgtgtccaccaagttcctgaataaattactgcaatattgaaaaggtaataatttaatgacnnnnnnnnnnnnaaattatttaattaactaatgaattgaaatattaatataatttttcaaatagagcata

SEQ ID NO: 32148 - DNA, 2071 bp, Cannabis sativa
tgagtatatattagggtttctttaaggttttattatggtccgaaattcatttagaattttgaaaattcttaggcttcggttattttgaaataatcgaagcctaaagtgctcaaggatatatatatattttttttctttttagcttcggttttctttatataatcgaaattatatgtgagcaagtaaataaaatttgatagaagcaccaagttataatattgtgaatagttcggggactatttttaataggctgaaaaattcaagggacacaataatacataagttataattcgaggagaatcttaaatagcctaatttttaaagttgtacattcaggctttactttttggcacgacacgaaaaaatttgagtttgagcccggcaagacacaaatacatatgggtctgagcatgacataaaaaatatggatttaagtacagcacgacaagcacaaaagtacaaattattagtgcaaaagcatgacatgtaagcacgaattaaatctaaaaaaatatatttagaattcatctatattttataactttttctgtataaatattttttaaatatatgtatattttctaaaatgtttaaattatttataaaataatatccgaaattattaattctaccatttttttgttggcaaaaggttttttttcttttaacaataattaatataataaaaaaaattcatttgttgaaacaattaatttgtgccttacaaattaatttaaaaatattaaaaaattactattttttttcataaatatggatcaggcctattgcaccaaatgttgtgactgaagcataaatctaaaataattctacttcacattgtcatacattttactcatattaaattttaacgccatgactccttcctttccagacaccctgcgcttcaagtagtgcataatctaaaacgatgccataatattatcggttgaccataaccttagaaacaatcttgtagaccacattacacaaagaaattagccttaaattatccatcttcacatgattcttattttttggaataagaacaatattggttttgttaataccaataggaaactgatccgaagagaatacatgttgaatcaacttcactacatccgccctcacaatatgctataatttatgataaaatttcagactcatcacatcaaaacccagagccttatcctgatgcatttgaaagctctgtgatctttctattctaaaacagatagcaccaaatcttaattaaatttgagaagctgatactgaagcctgaatatcatcaagctggggtgttgattggatcacatccaataaattttttttaacagaggtattttatattattaacaataacatatatgtattcattatacataaattttatgccaatggtgtacataaatgacataacgaacaaaaataaataacatagtgataaaatatatagaattattaattttaatataaaaaatacaataaaatttaacatttactaattaataaatatatttttttaataaataattatttttttattatatacaattaacattaaatagatataataaaaaatatatttttattttaattttttaaaataatatataagattattgtactcaaccaaacaatgtaatttaattaacagaaatatgattacatattatcctacacagccaaacttttacacatttccctataataatattctcattctaatatttcctataattaaattattttgaacacgtcctttacatctaattcaggctctacccctagaacctctagtaacttacattgtcaataaataggtgacactacactattgtttggaattaatgctaataagggaatggtaatgtgaaacattaccttgtttgtttggagggtttagccttggaatgttattcccctaataatagaactacccttgaggagagtaatgttcataccttaaaaaagagtaggattgatttattaccttctattattaatttgaataacatttttgaattaataaataaatttaaataccaataatattataatttattataaataa

SEQ ID NO: 32149 - DNA, 5176 bp, Cannabis sativa
acagaagattcttcttacaaaacccaaactcagtctctctgctttctctgcacctctctctctacctctcgatcttttctctctcaaactctcaattcttagtcgtacctaaaatgataagcgaatgcagtatttataggtttaggattagatcctaaagtcggtggctgcaagaaatgaggctaatagttagttagaaataactgacttaattacctcatctttgagcgaaatctccacgtcaacttaagtaacagggcctctgagaacacataagagcttccagactcaaggaccacagactctcgcaaaagatacttctggataggataaagtctactgtagtcgactatccggatcttatcattccaggagggataactagccagctggaactcctttccaaggaagggctagttatcctaaaggctgaacccagagaggataagatagacatttgggaactcccttccgaacttgacaaccattcctcaatacttttttcgggaccggtaactatgagtgaacaactctaagaaacgacaagtgcggagaccttttcatttgcgagaattataccacaaattccacctagttacttcaaattaaaagaatgacgatgatgaagaaagaaagcaaccatcattggctggtgtgctagaaatctcagtatactagcttttgagattgatcaagttcaagcaatgcttaaacttgtttaaggttaagaccttagttccaacatcagcaagattatcttcggttctgaccttccctaaatcaaccagccattcttctatcttctccttgttccaatagagtcttatatctatatgtttactcttttcatgataaactagatttttaaaaagatggatggataactagctttccaaatacataatcactcctcctttgatttgtttcaactcataaagtattccccgaagccataacacttccttaaaaagattttgtagccgccataaattttgcttctgtggtagaaagagcaactacggactgtaactgagccttctagcatatacagttctggtttgtcaagaaaacataggaagtggttgattttttcgtatatctatttgaggcgtaattcgcatccatgaacacatttaactctaattctccttttcctttctcttaggtcagatcataaccctaagtgccccttcaaatatctcaataaccatttaagggctttccaatgttccatgcatggattggacatgaaccggcttaagatgcttaaagcgtgagctatatatggtctcgtgctcaccatcacgtacattaagcatccaagaaccacaacataggatacatccttcatctcttctttctcttttgtattgttaggactttgttcctttgacaacataaacgatcctcctaaaggaacggatgtactccttgcatcttctatggtaaatttttgaataatcttcttgatgtacctagactgcttcaagctaatagcccattccttacggttctgtggacttcgataccaagtatcttttgaactggcccaagctctttcatctcgaattctctcttgagcttggctttaatacttttgaacactgatttgtctttgctcatgatgagcatatcatccacatagagcaataagaacacggttgtagattgctttaaattcttaaaatatagatagtgatcgtatgcagatcatttgaaccaaatttgatgcatatatgtattaaatctcttattccattgccttggggattatttcaaaccatataaatacttgttaagcttacacgctaatttaactcctttcccttccacctgaaacccaggtggttgcttcatatagatctcttcatccaataatccattcagaatagcagtcttgacatcaagctattcaacttcaaactgcaaataatgtgttgctaaggacagcatcaaccttatcgtcttgtattttaccacaggtgagaagatttcagtatagtctaccttccaccttccacctgccacctgagtaaaaacccttagccactaacctggctttgaacctgacttgttcattctcattgattctctttcaccttgagaatcaatttacactccacaatctttttattctctggcttcggcacaactacccaagtcttgttctttcttagagaatccatatcctggagccatttatacttgtttccatctgaaattgcctcttcatagcttccatgcttttcaattttagtttgttaaactaccgccagtgcaaatgctattatgtatgcttctgcaaaccttgatggaggttgaatctctctccgggttctatctcaagccaactgataaccttctagacctgtctatccgaatccttctggtacctctatttggtcttcattatcttgtttttttggctccacaacagcttccgtatgtgcatagtcttctagttccattctatcttctacatgtgatccttctttcgggatcttcgtttcgtactccacttccacacttatggtgtctttgttttctatttttcatgtaacacacgaagacacactactctttttagaggtcaagtgaggatattgtaactcattaaaaacaatatttctagcaatcaaaacctttggtttgccaatcctggaaatgtagattctatgccccttggttcctaaggcataacctaggaaagttcccttcacggacataggttccagcttgtcaatagattggtgtacatatatgcagtacacccaaatgtatgcattatgttgggggttttgttgtaccacatttcataaggtttcttaaggtctataactctatttaggctcatgttaacaaggtaagttgcggttgttaaggcttccccccaaaatggtttttctaacctaaaactgaacagtaaacatctaactttgctcaacaaggttcggttcatccttttagcaacaccattatgctatgaggtcttcactacgattctatgcctagtgatcccaaactcttgacacatcttgtcaaatttggagttaacaaactccaacccattatcagtcctaaggttcttaattttaagatcagtttagttttctaattgagtttttcaatttctaaactgttctagatactcatacttagtggttaacaagtaggtccaaacacattgactataatcatcaactattgaaagaaagtattgtttatcggaatgagtaggaaccttgaatggtcccaaagatcagtgtgcacatattcaagtatctgtttagttatgtgccttaccgaagtgaactttagcttatgttatttccctaaaacacaagcttcagaaaatggtaaagcacgtttaaattttcaattataccttgtctgtgaagttctttgaggccttgttcattaatatgcccaagtctatgatgccataacttcatatccgattctagtcctttcaccatactagcttcaccagctgggatagtttctccttggaaaacttataaaccattgatcttttcacctttcatcactaccaaagaacctttggtgatcctcaagcttccgtgcatggacttgtatctgtatccttcgtcctcaagtgcacctagggatatgaggtttcatttaaggtcagggatgtgccttacgtttgtcagcaccttgattccgccatcatactatttgatggccactttcccggttccaatgacccggcataaatgaccattacccattaaaactttacctccatcaattgacttgtaataaaaaaaatgactctcgattagtacatccagaatcaagaacccataccatgttcattaaagactctgagatagagaacaactctccatccgtggagcagtcatcactattttctgtgattgcagcagaatccttcccgtggtgttggtgccaaaagtccttcctatctccattatgagatttgttgaagccttgttgctccttgtacttcttgcatgatctttgcaagtgtccagaccttccacagaagcaacacttccttgtttccttctttctaaacttcgatcttgattgagagtgatggtatttattcttcaaacttattttcttgagtgatcttcctcttgccaaatacacttcttctttcttggattccttctccaactataattcgaaatcttttgacttaagtgcggcaagaatatcttctaacgcaataacattcctgccatacttcatggatgccttaacttcttgatatgcgattggacgtgatctaaccaaaatgatgacctgactttctttatcaactttgtgatttatgttagccaaacctacaataatctcattaaatctatcaatatttttatctaaagaaaggaaagaaatcattctaaaatcgtataatctctctagaaaattaatcttgctagcaattgatggcttcaagtacaattcttccaatttatcccaaactctttttgtcgtcttctctgcgatgagttttcttcgaacactatttgaaaatacatgatgatcatatagtatgccatctcctccatttttgttttttcctccggtgtcttttctgccaataacttctcgtctctaagaaccttggagactttctagtgccccaggattcctattagactttctctccatagtgcaaagtccccagttccatcgaatttctccaattcgaatctcgtcattgatgacattcaaagtttcttcaagattgtagcacaaataatcttgattctgcgttcttgattaaataccgagctctgatttgtgggaaaattacgtctaaatgtgcagaatcaaatcaactaaactttaaacaatcaaacaattagcaataacaagattatcaaatcgtaaacaacaatcgacaagaaaacagggacaaacagagtacgtaaaaaccaaaaacaacaaaatgcaaattataaggaaatcaacaccaagatatatatatatatattggttcaagttcgatagatcgatgtgatcaatgactctactccatttctgaaaaactactgtaatccttctttattgattgaggaagaatatgtacaatacagttgagacgagatcatttattgagtcctcacaaagtatttcaactctcacattttttacccaagagtcttcttcatctaca

SEQ ID NO: 32150 - DNA, 1759 bp, Cannabis sativa
tttttttttttttacacaaaatatagttttttgtaatatttttgcatcaacttttattattatgttccaatgcataattgtaaatcttgatggaaaatttaatatgtcatttaatgctcatctaatattttattaaaaatataaaataataataatacaaagataaatacaaaatttaagaataaaataataaatattatgaaagtcatttaatgtaaattagtatgctacctaaactataataataaaatattaaaaatggcataatagtaaatataaaaacataacatttattgtgatgtatattttgcatcatgctatattgcgatgtaaatttggatcacttttgattatgcgagatttttgcatcataatgtagcacactattggagtaggcttttaacaaagtgagctatattttgcatttacattaattattttatttttggtatagaatttacatcaatttagtataaaatcttttatttttggtacaacaacttcaataattaacaccacatattccaccaaacaaatatattttattaaaataatctggtattttatactatttacattgataaactaaattaattaatttatgatataattacatcatggctactattaagaatttaaaatcttaaattaatttagtaaaataaaatatttcttaaatcaattaaacattgcacatttgtttttttttttttaaaaaaaaaaaagcacacctactaaatttaattttctaattattattgtattcccacatatgatcaattaatacatttcgaaagacacagtgagcatttgtattcttaatctgtctatgtcgaccaagaaaatattaaaaactaatattttcatttgatatccatatctttgatttgtttatttttatttatgttgttcttttagttttataactttgtgttatgttgtttttattttatttaatattaatattagtatttttgttgttgttgttgtcattttgtatttttcaagatgttagcaatttaattaaattaattattacttttgtaataaagttttatttaaggactaaaatgtaagattattttttataagaaattaaaacaagagttagaatgtaaaagaaaagtttaacactaaattagtgtaaattcaaaatcttacaccattaatggtgtagaatttagtgtccactattttgatgcataatttggtgtccatttgagtgaaatggtatgaaaatttcacactcatttgctgaaatggtacaccattagagatgctcttagggcgtctccaatgggacactataatcccaaaagtagtggagtttaaacacaaaactactccaatggaattctaaatctcatcatatatatgtgggagtttatagtgtcacactaaaaatagtgggacactatagactacactattttttttttttgtaatttttaatattaaaataatgtgtttatgattaaatttttatatttatataaatattatactgagcaatagtttaataaattaatataataataataaaaaaattagtgtagatttcagtgttgtggttggaatagaaaaaaatttagtgctaaaattatactcttttggtgttgttttgatactatatttaagtttaagcattggagatgcccttagactatctccaattaggggtggcaattcgtgttcgtgtcgtgtcgagacccatgtataacaggtacatgctcgacccgaacacgacccgtttaataat

SEQ ID NO: 32151 - DNA, 1293 bp, Cannabis sativa
gtcgagttagatcaaggcgtctggggagttcagttgctatacatcagtgtgacttacacgtgaaacatctaagggggctagttgcgaggcccgtacaagtggttggaccaggatatgtccttggagccttgaacacattagggctggagcaataatccccctgcgaaacaatatggggactcacacaggtgatcgtaagatcattgtggattttccatataaaactccctttaaagatgaattcttctagacaactggtctatcccccattggcacaaccactttctgcataatacgtaagtgattatttgcacaagacttggttaaattagtccatgtcttttattctggtttagctgattgtagttttgctttatttttgacagtttactcaaaaagacctgcccctactcctgagatagtcgagcaccgcaagctcctgttaggtctcccatacgatcttcggtcatgcgactttctttggaacgaggccaaccttaggtctgtgggtctcctaactgataaggagtttacttgtgattataaatattccaagtattcttcttggtcgtaggttcctatcaaaaatgaggagaaagctcaagatcgcgtggctcaggcacaacaccttcagaacactgtccctcgggaagccaaagaaggagcatcccgaggtaatcaatgtgattggtcacagtgcttagggccgagcataatattttagtttaatttcaagatagccgctataacttttactcctggaatccccttatcacatatcatattacacataggtttgatagttggtatccctggttccacgtccaacttaactgtactgagttgtactatggcatagccgagcagtacgggaccatgacggatagggcaagtcatttagacgcgagctgggatttagaactgattaatccctatgatatattcaggatcatgggctgtaaggattttagtggattttatagtccttctaccacgtcttctagtgattatggtaaattccttaggcaggaaattatgccctaatctccccttttacatgtctttcaataaatgcttaacacttgatcttgtgtcacagaaatgaatttcgaaggtctcgtccacaggaagggaaagaagaggttgaccatcttgtaggccccatcagacatcgaggtggagcccccaaaatggcccaagaagactacactaacaagaagcgagcctcccagacttctaacctcgaggttcctgagactaagattcagcatccaatccctcctccaacctccg

SEQ ID NO: 32152 - DNA, 1422 bp, Cannabis sativa
  modified_base (40)..(43): a, c, t, g, unknown or other
tgtgtggcacttattacctttgagagaaaaggctttagtnnnntgattaaaacttttgagatgattttatataggacattgcataagcttatcggccgaaaatcactgacagatgttagttcctttattttgggaataagagttactattgtagaattaatcaatgataaattttcatttccctcaatacaatctatcacggtcctggttaccaatggtcctattatatcccaatactcctggtaaaattttgcattcataatatcaggttctggacttttatctgtagacatggaaaacacagcctttcttatcttttcggctgcaaacgattttcttagtgttgagtctatttcttctgttactacaagtttaactacttgaagtaactcctcaatttttggtaaagatggggttcccgttgtgaacaactgtccataaaaacctgtgatactcttggtcatatcttcaaccttcgagcaccattcattatccctatttaaaaggactaccatgaaaacaaatattaaaacttgaagaaacaaaattaatgttacatagttttttcttaaaaaaactttctcaattcacaaacgccaaaactatatactatccgagaatcctaccaaaatataaaatttattttttccataaatttcaccaaatattgaaatacactactagttgaaacaaaatagtaatgtaatttatttacattattcttcattgaatttttattagcaaaataatctttaaaatttcaaagacaataatcttgtggcaataaaattttttctaggaaaagttaaattggtctttttatgtgtttagagtggaaacacaaacttgtgttataatttgtaacataatacccattgaaacaaattttaaaaatattaatttataatacaactatatctaacattttagatctaataactattgttatgattacactagctttatcaaattgtagaaaattatttatttaattttttttaatagtcgtattcagttttatcaaaattgtttatatgactgcatataatttaaaattttttctctttaattttatattataaatactaacacttggatacaaactttaactttaatttattatttaattaattaattctacagcccatgatttagtttatcatgttttttctattgaaaagagttatgctagttttcaagtagttgttacactgagtacaagattgacttcataaaatacaaaaactaaaacaaattaactgaacttaaatccacttttaatagaaaataattttggtattaattccaaactatacctatccacatacttaataatattataacatgaatcctcttttttattcaaacccatccctttgatttcaaaatttatcaaggcattctaacacaaaaactcgtatt

SEQ ID NO: 32153 - DNA, 2572 bp, Cannabis sativa
  modified_base (51)..(52): a, c, t, g, unknown or other
  modified_base (120)..(125): a, c, t, g, unknown or other
  modified_base (859)..(866): a, c, t, g, unknown or other
taattagggttaaaaagtaaaaacgtaccttgacactcatttaatgtaccnngagacccatctaatgtaccacggggtacattctgtgaaagtagatcacgggacaaaattatatccctnnnnnnatatatatatattttttttttctggactttcaaattgaggtctagtactctagtttggtgctctgtgtcgtgtgtgtctggtgaagttcaaaaagtaaaggctgaaatcaaatgtaaaagtttaggtgaaggttttttacttttaatttttaattatttttattttttaaataatatataatatgtaataaaaaaattaaaaaaatatatatataatgtattaaatatgcgagttggcgggcgggttctcgggttcaacccgaaacccggtacccctaaaatctcaacccgcgaaccccgcccgaaaactcgcatatttaaaaaaaaaattgtcggttcgccggttcgagttcgggctgctcgagttcgagtcgaacccgctcaaaatgttaaattctataacacgataaacttaaaaatacgacatgtaataacaaataaattaacgacacgacaaacttaaaaaaatgacatgtaagaataaataaattaactcaataacataacgcatttaaaagtcaaataatttaataataataagagtaataaatattggtttatcaattaaaataataataatatttaagttttaataattataattatttttatatgattgcatgtaactattgctcaaaaatagatgtaaaagtaattacaattggaaagtttgataaaatatcccttcattaggtttaaattttttttcctaaagccactaaggctagcttagnnnnnnnngagggatgggaaaaagggagaggtgatggttcgaacacaagacctttaaactattaagctaatatatgattgtacatacgctaaaaaaataaaaaataaaaaatcttaaactcaaactaactaatattcatcaactaggccaacttttgtctattcttaaccttttacatttttttcaacacactcgcgcatttctcttcttttactctttcttactctcttctcggacagaaggactaacacctccgaattatcatgttttaaatttgtaaatattaaatttatgatctatttgtactattttgaaaaatatattatttgaatttccatttaataaaataaaataattataactcataaaaataagaaatgctaaaaaatagtattggtgactatcatcctctatataatttaatataataactttaacagaatatagcaaccaacactgttaagaatcatgagattacatctcaaaatcaattggtgatgattcccctcaagacatgatcactatttgtataggtgtgcatcagatagaataatcacttgcccgcaaggaataatataactctgataccatgttgagaattatgagattccatctcaaaatcaattggtgatgagtagctcatgttcttttatatggcttaataccctatcatttattctacgtgagacaatgtagacggtaggaaaaggcactacccaaaatgcccctacaccaccaccccaaagtgcaaaaaaccaaggtaaaaaggaccttccctcttgtgtggatcaagagtaatattccccctcaaaaccctacctttttatggctgaaccctagcagctcatttctttctctcctctaaccccagcagtcgcacatcactccttctcctcttcttcttgcttgaaaccctagtagccgaactattctatctcagcttctattcttcttcttgtttccctagcagctgcacctttaacccttcttcttcccttcgaacagcagcctcttcttcaagctctgtgagagctttcaaaacccgaacatgcacacacaaatgaacaatcaaaaacaataacagcaaagatctaaaaataatcttttgttggttattgaagagagacccgaaagaaccagcagaaaaataagatgaagaacataagaatttgatttcggagttcccgtcaaaatcaagggtacatctccgtgaagcttccctcaaagatgcttcactatccatatcaaaaccgattacaaggggttggagattcctagccacaaatttcagcaagtaatctctaaacttttgctcttttcttcctttatttttctggtatgaattacaatggaactctaactttctctctctgatttttctctctttttctgccgtcatctctctctgagaatgggctgccgcaatatccttttgttgagccaaaaaatacacttgaaaaaatgtggacaggttgctcccctatatttatgttgttaagagttttaaaatgttgttatttacttcttgagttgttattgtaaagagcttataaaatgttgttatttacttcttgagttgttatttacttcttgaattaaattcaagatcgtataaaaagagtggatgacacaagaacagtggacatactgagacgtgtatgtatttaccattactgataataaaagaaaacaaagttatcgaagctaagagcat

SEQ ID NO: 32154 - DNA, 1416 bp, Cannabis sativa
gagataagtgctttgttcagacgctgctaccattcccaatcggttacagatatgaacacgattattctctgtggtattagtgctgaagaacacagaagatttgttcaagttaaccttctgtccagatgccctttcatagcttgctaacatatttagtacattcgtagcttcatcatcagttgctttgcaatacacatagctgtcgtctgcaaacaacatatgtgatatcacaggtgcacctcttgccacccgacaccccaagagccatcaattatacacatatcttttgaccaaagcagagaacccctcagcacaaatgagaaacaaataaggagataatggatctccttgcctaatgcctctacttggtaaaattggacccattacatggctgccatggtttatgttatatttgaccgtagaaacacattgaacaatcaaggaaacaagcttgctatgaaagcccatatgcaacatcatttgttccaggaaaacccactccactctatcataggctttactgagatcaagcttaagagccatatacccatccttacccattctcttccttttaagataatgcataatctcaaaggatatcatgatattatctgaaattagacgtcccgaaaagaaagcactttgactatcagatatcacaataggtaacacttctttaatcctattcgccaaaacttttgagatgatcttatatagaacattacataacgaaatcggtctcagatcactcatagtttcacgtaatttcttcttaggaataagcataatattggtctcattaagctcaggacagaaaaaacctgtatcaaagaaatctcgtacttgtctgatcacatcattgcccaccacatgccagaatttctgaaaaaatcctggtgtcataccatctggaccaggagacttatcagggtgcatctgaaatagagccttacgcacttcatcttcagtgataggcctaagtaatgcatcattctgctcatccgagacaacattaggaatagaactaaccacttcactacaatcgaccacagaggcagcaaacaagttctgaaaataattagttataacacaaggcaaatcagattcccaatcggcccaggttccatcctctttccgaagcttctgaatggcattgtttcttctcctcgaactcgctgtggcatgaaaatattttgagttttgatctccctcccttaaccataattgttttgacctttggcgccaaaatatttcacgctgcaacaacacctcctgcagtttaacttcagcttccttataattctgaactgcagccgagtccctacctttcttccaacgcttcaactcagctttgcaagctttgatacgatctttaaagttcccagtatattcattaccccagaccttaagactttc

SEQ ID NO: 32155 - DNA, 3495 bp, Cannabis sativa
gctaatgggcatgtagtggctgcactgtcaatgcaattgtaggtaactttaaatctcatgaaatggaggccaaagcactttttcacaatctcaattgggttattcaacaacaattgccaattatgtaaatcgagacggatgcagttatggtggaaaacgcattgaaagctcctttcaattcaaattcctctttttcagatttaatacttgatgttatttattagtcttatatatatctatccttttccctaatgtaaatgtttcacatgtcaaacgttctacaaatgaagcggcacatggccttgctaagtttgcattaggggtggatgagacttgttcaaagtggctatttactagaaactgacacgtatacaacaaaagaaatatgaatcaactcaaaaattacaatattaaatcgcattttaataaatgcgacttgaaataactcgtttcaattaattatagttgatagaaatattcaaactcgctgttatgtaaagcatatgcgagataagaataataactattaacagatgtaattgacgagacaacatgtccatatcgagataaacagagtatataatagaaggatacaagatgagacatcaaggagcttgcaactcattgacccacatacttgggagtaaaagcttgcaactcattgacccatatgattgagcatgaaaaaaaaaaactacattcattcatctcgccctctaatatcattataatacgagagcactaagaaatgaaacatgtctattctcaatattttttcctacaaagacggtaaagaaagacaactcacatttagcgagaaacaacatttatagtcaacataaacgtttaacgataaaggcaaaagaataatccaagaaaaaatagatgacaaacttgtggagtatgtagattttaactacaaaaccatattaaatatcttgtattcatttattattattattaaattttgtagtatatttactacgtaaaaggtttatatatttagttaacgaaaatttacgttaacaaatgtatttataatgtatattaaaagaccactatgcattctaaacgatgtgggacaaaagtaaatttaataaaagaattatgtaacttgttttttaaacacaaaatattaaactctcacaaaattagaaaaataaaatgaaaattatatacagtgccacttaactatttttgtgaattcctttataaatatgtagatgtatatttaaatttattaataatttttattttaataatttaattctttaaactattattattttgaaagaaagtgttaactaattatttaataatttaattctaataaaaaaaataagttatactcgtgtatacatttatacaattctaggcaccaatattcctataaagaatatattttaacacatatttcaagaagaaaaaaaatagtatagaaccaaattatatacgaattttattctaatgctagaagattggatgccatagtgtactaacttattattcttaattaagtagtagtagatcttggtgaagcaagaggtttctagcagagtcacaccaccgaatgtaggaggcatggagattaggccactctgaagaggggcaactagtgaagtggtggagccaaagagtcaataccttctcttgatgctcctcatccaacctctctatcatctcctccaacactctctccacctctgctctcccgctcgagctcaacacgggagcctcggtgccattgcttgccctgcaaagcagtggcagccatgattgcagcatttgaatcttcatcagtttcagctgctctttctcgtactctgactcgtccttttctctcatgtttttgctctcgttgaacaagaacgctgcacatgttatgaagttaatttatttttgtgagaataagataacagaagctttatccatctttattctttaccataaactagctcgttttcttagaatattgcccagaaagtatattgttcatataatacaaattagattaaaataaataatagaaatataatttcaaaaaaaaaacttaaaaggtttttcatatatatagcctaaggattatagtaaaggactttgtgatgagttaaaaagacaatataacaaacataaccaatggacgacaaatcattactgattttaatctaattcatcgcaagtttcactattttctagtccttttgtaagtgaagattatgattatttatactctcattattacctaaaactacataaatcataatcactctttccaaaagaaacaaatttaatcaattaaataagtgttatatttgttaaatagctattagaaaattttatattaaaaatgattttaattttaatttaataagtaatatatataaaagaaaaatcaaccacagttttgagccaaaagattttttataaatagataactattggctaagaacgtaagtagtaaggaagtttttgaattggacaaatacgtagtgatttcattccaatcaattggaagtttcaatattttctaatagtccttttcctagtgaaaaaaatatataaaaaataatatgaactaagaaatatcttttataaaatattgcatccccctaagatgccccttcatagttcacagcacttgcatatattaagccaaattaataaagtgataattattgcaaggtctattttgaaagacaaaaaagatcatataaataatatattaattaggatttctgcttcccaactttgatatgtaataaatcatgtttatgaacttttaaggtcgttaaaaatattctttgaacttttgtgattgttagatttaagaatttttatctaatttcgattaattttactatttcaatgattgtttatgtactaaatcatgttcctagattttgatatctagcaaatcatacccctcgaactttgacatgtacgtactaaatcatgcctctcaacttttatccatgttagactttttttattgaaaattagaaaaaaaaaaaaaaatctttaaatctaaccatctcaatagttcaaaagcatttttaaggactttaaaatttcagaagcataatttactacttgtcaaagtttttggtgcaaaaatctatcgctattggtccaactaagtatcgagtctcatctaatttaatataataatttttaaagagtatcgctagcccatcgcaacgcgacatgtcgataaagtgctaggcacactgatactaatagcaattcccttattatatatatcttactcaaataataatgattttcctaatcaaccaactgattactttggacacaatcaaccccaaaacagtatgtttctaatctctagaagaaaaaaaaaaaaaaagagcatattccaatactttgtgccatgaacttcaaaagaaaaaacaataagtggcggcgtacctgaaagtttaacaagggaacattgaagccgcggctcagccgaaatagcaagccaagccagtcgtg

SEQ ID NO: 32156 - DNA, 2067 bp, Cannabis sativa
atttatttaatctctttgttggtctttgtattgtattacaatagagttgtaatatcttgattttcttccattgtaataaaatctctaacatattcaacatagtcaactaaagaataaacttatgctttggaagactaagtctatcccatacttccttcctccaatatcaactttgggagaaagactacaaagcttagtatattcatcaccaattttgtaattcaaagaagcaaatttttttaaatcaatgacagtagaataaatagaattgaaaaatgagaagttgaagaatactctttttttatacgttaaccaaatttaccccctaaataacatttaattcaaatatacctctttttatgagtattgtatccaaattattctcccacactcacataactataatatataattttaaatataataaatttgtgtttttatagatagatgtgtagatttgtgaaaaagttgaagtaaaattttgactagagaaaaaatgaaaattattgtgaagtgacaggagtaaaattagtagaattattaaaaaaaaaagataaatatattaaattttaatagaaaagataaaaattaaaaaaaccttaaaaaaaaatatatatgtaatataatttactcattagaaaaggagggtgaatagtttttttttggacaataaaacgacaaagttcatgctttttcatatcacaaaattcattaaggcttcttccttttctctcatcactacttcacacaatttgattcaattaatttaattccaattatattaataataattattttaatacaatatatatttgccacatcatcatgaacaatattttccactaagggttcttaaagattttgctttctcatattattatatattccacaaaaggccaaaaatatttccaatacataaccaataatttcatctacatatgtataaatagacaattaattagcttacaatatatatatatatattatatttatagatgctattattgggagatattatatcaatatgacattattccatgtaaagttcatcaaccacactaacatttatatattcatatttgtttcataagaaccacgttatatttacttatatggttaaattttattttatttttgtagggaattatatagttaaaattaacaaatttttgtagagaatatatatatttctatttttataaaaatacaatacggagaaattttaatttttactgtttgaatttttttatttacaagagtatgaattttaatcaactgtttgatattattttttgattgttttatagtacatttataattgtcacgaaattagttttattgttgtttttttttattattttgtagtttaattatataatttttcatattataaaattgatttatcattattttttaattttttttttaaattatatttctataactttaaacttcaaaattgcatctctttatataaaaattttagctggtaaaaaatatatttttgaaaaaactctaaaagttaattacacatgtagtttaatttgtataaatcagaagtgcatgtatataattactcatatataattaatgatgacattaagatactaaaataccatcatcacatacaaatgcatataaaataggaaattaaacaaaaaattaaggttacacacaaatacatatataattactaattagcaaattattagtaaaagatatatatatggtgagctagttagcattattttctaatttaaaataataataataattgatatatagataatcacatgtccacactttgggtgcttgccttatcataatatcactaattttaattgactttgtcattttacttagcatagatttttatcaataattaactaggtattatctaaataaaggccgactctaaaattaaatgagttttagtatatatgataaagattattgagcattttctttaaaatgaaaatattttttagatctctgagttgggtagaccttaagcaaggtcggctttaggtataggcggactatgttagataaattaacaattaaccc

SEQ ID NO: 32157 - DNA, 1510 bp, Cannabis sativa
ccctagagtaggtttaagtggtggactcatgttactttggaaagatgatgtagatgtaactttgcaatattataattctaatgtatttgatggttacatggctgtctctaatggtcctaagtggcacttttcagctttttatggggcccctgctgtccataacagacatattacttggactctactaaaaagacttaaagaagttgcacctttactcccatggatggtaattggcgattttaatgaaattctttctaatcaaaacaagcttgggggagggttgcggaatgaaaaacaaatggaagattttcgagaggtgttggatacatgtcctttacttcagcttccatttgaaggggatcaattcacatggatcaaaggtagacataataacaatgctaccaaagagcgtttggattggcgtttcactaatgatacctggaacacctttctcgcgcccttgaaaacttcacatttggactattattcctcagatcatcgggccatatcagtcaatattcaatacatcaattccctgcaagataaaccagcaagaagaactcgcttcagatttgaaaaaatctggttaactgaaccagatgctggtgctataattagtcagcactggaacactaactcaggcggggggattgatctctttttgcacaatttgcaatcatgcaccgatgctttacagaagtggcatgttgccaagtttggtaatcttaaaaatcatatttcttccatgcaaaagaatgttactaggcttaataatgctgctccgaggaatccttcgggtttggtggaattgaaaaaatctgaagcaatattggatgaattgcttgagcaagaagagaaatattggcatcaaagatcaagggttgattagcttcaatgcggtgatcaaaacaccaaattttttcatgcccatgctacatccaggcagtccaaaaactccatcaaattcttagtgaatgctcatggaatatctgtcaattccactgctgatctgaccaacactatatgttcttattatgataatctttttgcatcaaatggtgttgatcaatcctctctacaggcagttctctctgctgtgcccaccacaatcactaatgacatgaacaagtcattaactgaacctttcacaagtaaagaagtgtatgatgctctccaaacaatgaatcctgataaaagtctgggttgtgacgggatgtccgcaatgttctaccaaaattattgggatattgttggaacttcggttactaatttggttcttggaattctcaatgaaggtcttgacatgaggacactcaacaaatcaattatcacattgatccccaaagtgcctaacgcgagttctatgatggattaccgccttataagtttgtgtaatattatttacaaacttatttcaaagaccattgttctcagattcaagaaagtgttgccttatgtcatctctgaaactcaatcaactttcctctccaacaggttaattacagataac

SEQ ID NO: 32158 - DNA, 3792 bp, Cannabis sativa
agaggcaattgtgattgcatcacccaattaatggcatggaaaagctctttcgcttccatttcatctgatggaaaactgccttgtacatgtttggaaagagcagccaccaccaagccaatatgatccctaagaattgccccgatacccattcttttttgctccatatcagtagcagcatccacattgagtttgaagccatgaacctgcggtggcgaccacttttgaacatgcttctctgtcacagaatcagaccttgctgcactatgattgctagcagtagctactgtttttacaggagcttgatgccgtgtaaagtcttcatagaaacaagtagcatactggacaattactgatggcagtcgaggagccccaccgtggacaattttgttcctatctgtccaaaccccacacaacacacataacaagatttcaaagtctttctgctgatatgtggaagataaatggtgcaaataatcaccattgaacatgctatttgcttggcgataatcaatctgaagctttgaatgtttccaaatatctttagcatgttttcacccaaagagagcatgaccaatcgactcccaactcgacttacaaagagcacattccctagaatctaaaaccttccttttaaacaatgcagccgctgttggtaaaatattttggaaaactttccaagcaaaaattctgatcttagggggcaattttaagttccaaaaatatttccaccaatcactttgcagattagacgttgaggagatttgttgttcttccaaagatgtagctaaatggaaaccagatttgacattataaatgccatttgttgagtggtgccagattagacggtcattatcagcaaagaaactcagcggaatggacaaaattcgatcaatgtcaattggctgaaagtagctattcaagagagagacattccaaacacactcatctgtaataaaactagaaactgacatcaggataaagcttgaaaagctgactggtttaaaatcagtgtagcttggtatccaaggatcagttccacaatccacacttctaccattgccaatcttaaacctaagccctttgagaagcaattccttaccccaacagatactttgccaagtcaaagaaggtgagtgaccaatattagcatccagaaacgaacaattggaaaaatatctatacttgaggagtcgacttaatagagaatcgggcatatcaaatatcccccatgcttgtttggtcaggagtgcttgattaaaatgaacaaaatatcggaatcccatgccaccttcatgcttggatttacataaagatttccatcttttccagtgaatttttgtgccattttgattgctaccccaccagaaattggccatcatgctctccaattgatcacaaaacttctttgtaggtttgaaacaactcattgtatatgttgggatggattgaaccacagcttttaaaagtacctccttgccaccaacagaaaaaatcttctcattccaagcattaagcagttttcaaactttttctttgatattactaaatagctcctgcttgtcccgactggagtatgaaggcaatcccaaatatcgctcatggcattcagtaataggcatatggagagtttgagcaaagaaattctgtgcagcttgagaggtattcggcgagaaagtcataaccgatttgtcattgttgagaacttgccccgaggccttatgatatgtatcaagtgagttcttgatagcaatggcggaatgttcattcgattgacaaaataataaactatcatccgcaaatagcaaatgtgacacggaaggagagttgcgtgttagtcgaagacctgttaactgaccagcttgttcgtgtgattgtaataagcacgagagtccctctgaacaaataagaaataagtatggggaaagaggttccccttggcgtaacccccgagaaggctgcacattaccaaccacttcaccattaagtgagaaagagaaagaactcgtggaaatacatctcataatcaatgaagtccatgaattatgaaaacccatcttaagcataatcgcctctagatactcccattcaaccctgtcaaatgctttactcatgtccaacttaagagccgagtacccaattctaccctgagtcttgtgtcgaagatggtgaatgagttcaaaagcaattaagatgttatctgtaattaacctgttggatagaaatgcagattgagtttcagagatgacataaggcaacactttcttgaatctgagaacaatggtctttgaaataagtttgtaaataacattacacaaacttatggggcggtagtccatcatagaactcgcattagacactttggggatcagtgtaataattgatttgttgagtgtcctcatgtcatgaccttcattaagaattccaagaaccaaagtagtgaccgaagttccaacaatatcccaataattttggtagaacattgcagacattccgtcacaaccatgacttttgtcacgactcattgtttagagagcatcatacacttctttacttgtaaaaggatcagttaaggactggttcatgtcacaagtgatcgtggtgggcacagcagagagaactgcctgtaaagataattgatcaacaccatctgaggcaaaaaggttatcataataggaacatatagtgttggtcatatcagcagtggaagtgacagatattccatgggcattcactaaggatttgatggaatttttggactgcctggatgtagcatgagcatgaaaaaatttggtgttttgatcaccacattgaagccaatctacccttgatctttgatgccaatatttctcttcttgttcaagcaattcatctaagattgcttaaaaaattttcagttccgacatacccgaaggattcctgggagcagcattattaagcagagtaacatttttttgcaaggaagagatctggcttttgagattaccaaacttggcaacatgccactcctgtaaagcatcggtacatgactgcaaattgcacaaaaactgatcaatcccaccacttgaattagtgttccaatgctgacggatgatagctgcaacatctggttcttgtaaccagattttttcaaatctgaaccgagttcttcttactggtttttcttgcaggaaatggatgtattggatgtggactgctatggcccgatgatcagaggaataatagtccaaatgtgatgttttcaagtgtttgagaaaggtgttccagatatcattaatgaaacaccaatccaaacgctctttggtggcgttgatattgtgtctacctttgatccatgtgaaaggatccccttcaaacggaagctggactagagaacaagtatccagcacctccctaaaatcttccatttgtttttcattccacaatcctccaccaagtttgttttgattagagagaatttcattaaaatcgccaattaccatccatggaagtaagggtgcaacatctttaagtctttttagtagagtccaagtggtatgtctgttgtggacagcaggggccccataaaaagccgaaaaatgccacttagggccattagacacagccatgtaaccatcaaatacattagaattataatattacaaagttacatctacatcatctttccaaagtaacataagaccaccacttaaacctactcttgggacttcaagtccgtcattgaaatgtaaaagatttctaatacgagaaatagaattactagctaattttgtttccattaaaaacaatacagta

SEQ ID NO: 32159 - DNA, 2556 bp, Cannabis sativa
aaagatacataaaatgttgccactttcctcactttgatgatgtacattttcttcgtaaggatggctcctgctgggatctgctcctaataggaccgagatttttcgtctaaataggaaataagacgataacgggaattattttttgtttgtccctgagaatctgtctgtttgtttagtattttattttatatttgtagtaatattttatattttataatttatgtttgtatttttttagtatcttaataatctttttatgaattttaaacagtgttttgaataataattaatttattgaataatagtataatacttaatgtgtaataattttatttttatgtagtttaataattttataaattttatttttttattaatgaattttttgccccacccccgatagggaataagtggggataaagattaaaattcttaatagggatggagaagggaggaacactccccgccaattctccaccctgtgtgcatccctacttctcagcccatgacgttgacttccaacattagaaataatttgatataaataattccaatattagaataatttgatataaaatagttgtgcgcataccctattcaattaccttattattttttgcggttagagtaatgatattaccttaatgggcatagggtactcatgagtagtgctgtaaatataggccaagatttttgatacaacacgagctcgagaggcacagacaagactatgcacgaaaaatatggaattttggcacgacacgacatgaataatatgagtttgagcacgatatgacacgaaaaatataggcttaaatacgacacgacaagtgcgaaaggtatgacacataagcacaaataatctattatgaaagggcgacatgttgaaatgttcaaattttaatatttccaacgaattttttatataattttgtatgaaaatttgttgaaaaaatatataaaaataattaaatatattaaaaatacataatgtttacatcaatatagccttgatgacgtggacatcaatgtttgacatgtggtaagaaagatgacatctcggagttgagtagtctcgactcatagcaagtcgacctgggagggttccctagccctacacccaagttgattcgggaactctggataaaagttcaaattttgataacttgtttctaactcactatattttagtattctgtaccatgaacacatggatcaatcaaatacaggccttaagagttgaaattacacgaacctgcaccccgaaaggtaatttgggcacctagggtttcacctgacgcctaagttggcattcccaactaaggttttagttttcgagaccttcttagtgtaaatggatcaaactttgcattaggacatcaactagagataccacgaacatctttgaggcgtcaaaatcaaattttggagcaagtttatttttgagcacccggtgcccgggcaccctagcgcctcagttgacaatttgtatctgggctccttccaagtatcagatcaaagatttgacttttgaatcatctttgtcttcatcaaaaatgaggaaataggtactttcaaggaagaaacaacactttcttgggtgctaaaaagcaaggcctagcgcccaggttgacatcttgtcaacctaggccaatttcgatagtgtttttcgagaactcttttgagcatctctgttttcaaaaaatattaagattcaactattttcggagaccaaacggaactttcaaagggccaaatttgagatctaacgcccaagttgacacctgcactgggcctagtgcccagttgacatattgtcaacctgggctgtttccaatcaagttcttgaaaaagtgttccagatattttttcgtcatcagaaataatgaagattcaagtaaactcgagcaaaaaaccataaacccgaggccttagttgcagaacacaacacccagattgacttggtgttgggcctaggacccaggttgacaatcaacctggtgagctgctttcaatcactcaaatgtcaaatctgattcgaccattgaattcaaaattgtcaaaaataaggttggagagctcgtccttaagttcaagaaccttggaagtataaaaaccacaaccggggagctcggaaatggggtacctaatgcccaggttgacatatggcctactgcactaggttctgcttatccaatttcgattttgtttcgactgtccgtttagtttttcacaataactaagatcgatgaagtcagagaagtcaaattcacaactttgtatttctcatttctaacatgagaagaacactcaaaatgaagatttaaagtctctcatttctgcagaacatcaacatctccgagaactggtgaccagcttcgccaaacacatgtaaacatactaagtgatgtcaaaatatcacttaggcatcataaagtacatccattggacgttatttcacttacccatcattgacgtcatatgtcaacttgggtgttgggtcatgtactaccttcagtaaaataaccataacttactcaatattgatccgattga

SEQ ID NO: 32160 - DNA, 1607 bp, Cannabis sativa
  modified_base (1536)..(1537): a, c, t, g, unknown or other
tggcacccgttgaacacctcacggaaccaagcatcaaagccaaagaaatggtagctacaaatgagcaaggaccgagtttgatggactccaacatcaaatacgtaatgaaaggtgaattacctcaggaaagggctgtatccaagaggttacgatatcaggcacatcgatacgtaatgatggataatatcctttagtggagagggctcagcatgccgtacttaaggtgtgtgtcagaccctgaagctcgacggatcatgcaggaggtccatgaagggttctgtggagatcacacggaaggtccgagtctctcaaagaaaatattgagacaaggatacttttggccaacaatgaagaaagattgtgtagactatgtcctaaaatgtgattcgtggcaaagatttgcgaacataccgagagcctcgcccaacaaaattactctaatgactagcccctggcccttcgcgatgtgggagatagatctcattgggtctttgccaatgggaaagggaggcgtaaagtataccatagtggtcgtagactacttcacaaaatggacggaggtcgagcctacgaagaccataactgctaagaaagcattagactttgttatcaaaaacatagtgtgtcgatacggcttgcctcaaaaatagtctcggacaatggaaagcagtttcactgcgaagaattcacaaacttctgtaacaaacacggagtcgataaaagcttccccatggttgcgaggccgcaaagaaatggacaggaagaagctgtctacaaaatactaaaagtcacagtaaaggaaaagctgcttgcctacaaaaatatctggcctgaagaactgccacgagtattatggacctactggaccaccccaagaaccacaactgaatactccccattctcaatggtgtacgggtgtgaagctatggtactggtggaaaccttgttctcatcccacagaagggcgacatatcatccagcaacgaacaaagccttattacaagaagcgctggatcatatagacgagcttcgagatgagtctcatgtgagaatgacagcttactaaagaaaggttgctaaatacttcaacgccaaggtcaaagatagaaaattcaccattggcaaactagtcttaaggcgggtcttttcgaccactcaagaacccaaagtgggggtacttggaccaaattgcgaaggacattatgaagttgaggacgaaatcagctccgagtcctataagctataaagagaataaatggatccacaaggcctagggcctgtaatgctggccacctccaaaaatactgtcaatagttaaaaacaaagcttatttctattaaagaatctgtgtcggccaaatgtatgcaacgtcttatgtaatttttaaagactaagtgacctcaaaatttctttttacgtcacttagggaggaattaaggcatatcacacaggcaaatataaacagaataagtatagacaggattaacagtgaggatggcgagcttaaggcatggattacatgttaggggattgtcnngatgttttggtttaaaaatatttcattaaagattaagatttaaatattttttgtaaagctttatatttta

SEQ ID NO: 32161 - DNA, 1708 bp, Cannabis sativa
aaatatctatgtgatatatatatatataatatgtgttataaatatcttttaaaaaaaaaatgatatatatatataaaataattttcctatataattaatttaattaataaactcacaatatcattctaaaataaaataaaataaatgaaatgagtattaatatagtattaaacgtatgtaccagcaagtacttgatattgaataattaaagtggaaaaattatgattaatggtgcagaatcaaatcaactaaactttaaacaatcgaagaattagcaaaatattatcaagaatccacatgtgataagtgcatctggagtcaagaatccactccctgttaattgaagactgcgaggtagagaacaactctctatccgtggagcagtcatcactatcttctgcgattgcatcagaatccttcccatggtgagatttgttgaagccttgttgctccttgtacttcttgcaaaatctttgcaagtatctaaaccttccgtagaagtaacacttccttgtttctttctctttggactttgatcttgattgagagtgatggtgtttactcttcgaacttactttcttgggtgatcttcctcttgccaaatacatttcttctttcttggattccttctcttactataattcaaagtctttcgacttaagtgcgacaagaacatcttccaaaataataacatctctatcatacttgatagctgccttgaactcttgatatgcgattggaagtgatgtcaacagaatgatggccttgattttttcatcaattttgtgatttatattttctaatcctacaatactctcattgaatctatcaatattctcattaaaagaaagaaaaaaaatcattctgaacctgtataacctttctagcaaattaatcttactaacaattgatgtctttaagtataattcttccaacttatttcaaactcctttttccatcttctcggcgatgagtttcattcaaacactatttgatagatatatgatgatcgtgtagtacgccatctccgccatgatgatttggtacaattaagtgggagcgctaatagatcatagatacgaaaattttttatttgataattgtaattcatacatatataatacctattgaaaagtcttctatgcatatttatatgatagtgtatttcaaactttattatatatcgtattcaaaaattttttaaaataaaataattgtggtatatataattgaaatttatactcatacaataaaaaaaaaatcaaattataatttcttcgaatacagaaaatgcccttacaatatataagaacaaaaatgatacacctacccaagaaactctctaggcatatatcatattaaataatttatttagctaatatttaagggaataaagttaggctgcgttttgtcgaaagtaatgaaataaaataaaatataaatggatcaatttttattaattttattcatttatttagttgtattttaacatcatattgataaaatgaaaggaaagatcattccaatacaagatgaaaaaaaattaattatttttttatgcatttaaaatttcattttatttctatttttatatattctcattttttattccgactgttgtattttcattacttccaaattgacacaaccttattcattatttttttttttacattttttaaatcattaaaagaatctaaatcctgat

SEQ ID NO: 32162 - DNA, 3542 bp, Cannabis sativa
  modified_base (3485)..(3487): a, c, t, g, unknown or other
agctttgtttttccagacaatagaatttcttgctttccaaagagaccaacaaaccataaccacctggcagacatgatcagcatcaagtttgtgaaaaatgttatctaaccaggttggaaaggagtcatcaagagcaattccaacaggtagacccatagaattccaacaacatgaagcaaaattgcaagaaagaagagcatgagatatagtttctggagcagaatggcaaactggacaagtggaggggatatccacatgtttaattctgagattcaagcaagttggaaaaaccccagatgcagcccaccagagaagattcttgacctttggtgggatcttgagttgccataggtttcgccaaaaccctgaattgttaacacctgaccttgaatccttgttatcctaaagcatgcagtaggcacttttgacagagaagttcccagaatgttcaccagaccatgaccaaaaatcacctgaagccgaaaagctcaatggaatactaagaataagatcagcatcacggtggttgaacatatcctgcacaagttcaatgtcccaggttctagcatcaacagagaaaagagaactcacagtatgaccaactagacccacatgagaggaagtgacatatggattagtggaatgaggcagccaaggttggtgtaagatgttgaccgtcagaccggtaccaatggttcgtcttgccccccaaacgaactaaggattgagcttgccaaatactcctccaaacaaagcttggattccttccaagatcagccaataaatagtcatcatatgggaagtaacgagccttgtagattctagtaaccaaagaatttgggtgtgtcaaaaatctccaaccttgcttagcaagcataggaagattgaaatcatggagaagacaaaaacccaagccgccttcatgttttggttgagagagtcgattccaattcatccaaataataccgttgcctttgctaccagtagtcttccaccagaaacgagccattaatttttcaatttcatcgcaggtacccaaaggaagaaggaacacactcatggcataagtaagaagggattggacaaccgtcttcaacagaatttctttaccagcgccagataataattttccagtccaactattgattctgttgatcactttattcttcaaaaaccaaggattgattttttatttcttccaataatgtttggtaggcccaaataaaagctgttgtcagaggcttcatccataccgagaagtgagcatatttggtgtcgaacatcttgttgaacatttggactgaagaagatggaagactttgtgagattgacctgttgaccagaagcggtttcaaagcggcaaagaagagacatgacactgcgtgctgcacctgaatttgcttggcaaaagagatagctgtcatcagcaaacaacatatgggagatggtgggagcaccgttagcacacgacagccttgcaacaatctgtcatttttgaacttaaaaatgagagcagagaaaccttcaacacagatgatgaacaagtaagtggataaaggatcgccttatcgtataccgtaagtgggaagaatgggtcccataacatgaccaccatgaataatagaatagcgaacactggtcacacaagacattatcagattaacccatcgaagattgaagcccatttgaagcataacttcccttagataaccccattctactcgatcataggctttgctcatatcaagtttaagtgccatatagctttctttccatgaactttacatttcaagtaatgcataacttcaaaagctatcattatattatcagaaataaggcgttcgagaataaaggcactctgagtaggggagattacctgatcaaccagaggtttcattctattggcaagcacctttgcagcaattttgtatgcaacattacacaaggcaatgggacggagatcacccatggtaattggagtcttcttcttaggaataagaaccaaattagtgtcattgaggctttcgggaaaagagcctatttcaaaaaaatctctcacaagagaaataacatctgaacccacaatatgccagtgtttctgaaagtaaccaggtcccatgccatcaggccctggtgctttatcaggatgcatttgaaagagagcaagccgaacctcatcatcaccaatcggttgcaaaagcatatcattgtgtaaatcagtgatatagcaccttatacaagcttttagagaagaaagattggccttgctttttttgattttctgcttaaaattgcatgtgagactccttccctaatcagctaacaagaggctgcattgctttattttttcctgaaatgaaacatgtgaaaagtcctcccaacaagattgaacaattgggctatagagaggctcacgtgtccatgcattttcaaacttaaaatgatacacaaaattggttacagcagtcggcttaggctgaaaaaatatgggcgtatgatcggaagaagaaacatcacaattggttaaaacaacttgtgggaaagaatcaagcccaagctgagacacaagtgctttatccaacctgatttcaacccagttagtcgtgcctttgcctctctcccaagtgtaaggatgaccatgaagctttaagtcgacaagattgcatctaccaagtacactttgaaatccaagaataagagaatgtggataaagtctaccccctcgcttctctgattggtcaccaatgttgttgagatcgccaataatacaccacggaagttgagaagaagcggctaaagtttcaatgagttgccaagttttgaaccgaaagcttcggtttggttccccataaataccagtcagacgccaaggaatgcagttaggagcacgaacaactacatcaatgtggttacttgaacaccccagaaaatgaacatcatcattaactctccaaaggagagcaagtccccctttgtgaccgtgagcttccacataataagctccctcaaatccgagcttgtgtttaatccgaaccacaacatcagttttggaaaaaatttcacacaagaaaacaaaattaggcttcttttgaacagcaatgttctcaaggaattgacaggcccatgggttcccaagcccacgacaattccaacttaatgtattcataatgactggtgggcctagaaactagaacccaccgaatgcaagttttttgggtcaatatcaatcttgcctgtggtgttaatttggcccatagtagcttgggcctctttagttaaagcactagcaaatctcttcctttttcgttcagattgtgcaactcatcatcatcatcttcttgactgccataaacaataatatccttatttttgttacgtgattgagaaaaatcagggaaagacaatcccatgaaattagcatgattgaggttgacgctgtttttgcctaggccacttgcgttcacactgttggaaattattttacnnngatctatttactatcatgtatgttggattaataacctaatatgaattctaaaaca

SEQ ID NO: 32163 - DNA, 1552 bp, Cannabis sativa
agactactattattatcatctctttaaaaagacatatgaataaaaattcctttagatgactccctcatttcaagagatggtgaagggattttagcaacattaaactctagaaatttagcagtttgagattcagcaattcccgtaccacgagtagggcagtaaaagcaatagccttttgagtacattggatagcctttttaaattaggatcataaatccttatttcagttggataaccccatacacgaataggatttaaactaggttttctttcagtccacaactcaaaaggagttttgaaaaaagatttacctgaaacacaatttaaatataattagcagtcatgagtgcttctccccataagagctctggcagatttgatctgcttatcatgatgctaatcatgtccagagaatgggatttctccttttagcaatgctatttcgctcagataaatcgggcatagtgtattgagtaacaatactattttcttgtaagtattcagcaaaaggccccatgtgttgtccatattttatacgaccataatattctcctccacgatccaaaagaacaatcttaatggctcttcctaagtatttttcaagcacatttcaaaagattttgagtttatcaagatcgttagatttttctttaatgaagtaagtgaagtcatattcagaaaaattatccataaaagtcataaaatacttgtttctccacaacatagtggaataaggcccattgatgtctgtgtgagtaatttttaataaagattaactaccgttagtagtcttcttttttgttttagtcaatttttgtaacgcccaatcaacacaagtatcccaaccaaaatcatcaagatgaggaaaaattttagctcgaagtaatcgatcaactctttatttggaaatatgacctattctattgtgccataataataaggatgttttcttaatataagaggggaagctatgagagtcaatgacaatttgcaaagaccatcagaataaaagtttctaataattttgggagtcaaacataatgtcaacattattattggaaaaaaaataagaatatcattgtttaactaaaaccggaagcgaaagtaaatttctcttaaaagtaggaacctagaaggtattgttcaagacaatcttaactctaaactataattcaagaataaatgtaccaacttagataacgtcaactccaacataattacctattttcatatttggctccctgagatcccttagcctctagttgtgattgcttcttttctaatttttcatatccttttattgggcttgaattgacaaacatagagacaatattcattcttctccttttacaacttgctttccttagctacaaactaagaagttaggtcattgacgttccatgctttattacaagtgttgtaggctgtcttgataaggctaaaaagagatagaaagtgcatgaagaatacgatgaataatgtaagagtcaggaagatgaacattatgatctttcaacttggcttgaacattcatcatacttaatggttgtca

SEQ ID NO: 32164 - DNA, 2014 bp, Cannabis sativa
aatgcaggggccacatatcaaaggatggttaacatgatgttcaaagatctcatcagctgcaacatggaggtgtatgtggactacatgcttgtcaagtccaaaaagtttgggggcatgtggaagacttagactaatgcttcaaaatccttcgcagctacaacatgaagcttaaccccctcaaatgctctttttatgtaggcccactaaaattccttggcttcatagtcaaggctaggggaatagaaagcaaaccttgacaagatccaagcatttttggacatgaagttgcccataattatcaaggaagtacaaagcctaacaagacggattgctacattaagcagatttgtgtccaagtctatagacaaatgtgtacccttcttcaacattcttagacagaacaaaaaatttgagtggacaaaggaatgtgaaaatgcattctaagggctgaagaaaaaattggatcaaccacttgtgctgtctaaacccctagaaaatgaagagctagacgtgtacctagtagtcacagaacatgctgtgagtgctatcctcataaacaacaatctgtatactacatcagcaaaaggctaattgatgccgaaagtaggtaccccctcatggataagctaacttatagtctacttttggcatccaaaaagctaagaccttacttccaagaataccccataaaggtgtaaatcgatcaaccattgcgacaggttttacaaaaacctgaagcatcgggctaactactcaaataggccatttaacttggccagtttgagatcacatatcaaccaagagcaaccataaagggttcagcccttgtagacttcgtggctgagtgcataaactcatctcttgaaatcactcaagatttaggagaaaaccaagagctagagaagaagcgagagcaaaagtaccaatagaatcctgaagagctaacatggaaactccatattgatggaagctggactgatcaactgtccggtgcaggcattgcccttataacagctaggggcaacaactgcacggagcaatcaaatttagattcaaagcctcaaaaaatgaggctaaatacgaagccttgatagttgagctcaagctggcacatgaactacgggctgaccaccttgacatattcagcgattctcaactagttttgaatcaagtcctaggtgaatacatagctcgaggtgaaaaaatggttgcctacttgagcaaaataaaagacttactaagtcagctcaaaggctacacaatcaggcagatccctagagagcaggatgccaaaacagatgcacttgcctgtttggggagttgtaccattgccaacaaagaaaattttgtgccaatacagttcctaaaggaacctagcattaaaatcctagaagaagtcgacatgttggatgacaccccaacatggattccacctattgcagcttacctccgaactggaaccttgttagaaggcaagaatgatgcaaataagataaaaagaaaagctgctaggtaatctaatcctacatggagtaatgtatagacagagcttctccatgcctctcttgaggtgtgtcgcaaaaaccaaagctaaatagctaatgatagaagtgcatgaaggcttctatggtaaccatggcgaccaacaatgatcgaggaatcaatggactatgtcaaaaatgtcacaagtgccagagattctaaaaaattgtaagagctccaccaaataagctcacgatgatgcagtctccttggcgctttgtagtatgaggtataaacttgatcggtcaactcctaaagggaaaaggaggggtatagtttgttattgttattcaccaagtggacaaaaactgttacccctcgcaataatcacctacaaaaaagttcttgactgtcttgtcaagaacatcatatgtcgatttggacttccccaaaagattgtgttaaaaaatggtagcaatttgacagtaacacgttcactgatttctaaaataggcatggcatcatcaaaagc

SEQ ID NO: 32165 - DNA, 991 bp, Cannabis sativa
ctgaaatggagagtttaatggctaaatattggtggaagtcatctgcatcatctaattcgggtattcattggatgtcttggaaacgcctttgccatcacaaaataaagggaggcatgggatttcggaatttaagggattttaatattgctcttttagggaaacaaggctggcggttatgtgttaacacgaattcgttagttgcgcgggtcttcaaagctagatattatcctaatggttctttccttactgcatctctcggctctaacccgagctatgtttggcgcagcattttggaagctcaaaaactggttgtaagtggcgttagatggactgttggaaatggaagaaatatttgggtgttaggagagccgtggttgcccaataatgtaaatccaatggttatatcttcacatccaggtctggtgaatgctaaggtggagaatcttttgacgattgatggtagggagtgggatgttgaggttctaaatgatttatttgagctgagagatcgagagctcatttcaaaaatccctcttcagccgtcatcaacaatggattgtttgacttggtctttggaaaattcaggtatgtatacagtgaggagtgcctataagcaacttcaaatcctcaatggagttgctgatattgaagagaatgtggtgagcaagttctggaaaattttctggtgcttaaaagtccctcctaagatgaaaaatctggtttggagagcttgtatggactgtcttcccacgatggttcagctccggtctaagcatgtggaggttgcaactttgtgtcctgtttgttctagtgcagatgagacaattcttcatgccttagtggagtgcccgactgctgcaatatgctgggaaagaacgggtataggcacagttttgcactagaattttaattttctggtttggtgcacggaggtgttccagcaggttgataaggctggaaaagaaactgttgtggctgtgtgttgggcttt

SEQ ID NO: 32166 - DNA, 3687 bp, Cannabis sativa
ctcgctatcaaggtcattggaaccaagttcctgtcgagacatcccagaatgctacgatttatgatgtgtttaaacacacaatcattttgacccagtaaaagcggataaatcacagctctgtgatattaaaataataaccgcatttatactacgtgatatgtaatcaaaccccacaattttaggggataaacgttgtaaagattacattcaaccttgtaattaacagcctactatgtgattataagtagtggcaagttagattaaaaaggggacgaaaaaattataagagcaaaagatcctaaagaaccatcagaaatctaataatattgacttgtggactatggagaattttaactacaaaatcacgtaaaaaatcttttgtgttcatacattttcctttattgtttttatttttttgtgtgagattatcactatttggctcatattttggttaacaaaaatatgcgttaacagtttggagctttcattgagagccttcttgaaaaaagctcaaaaaaaaccctccctttttttaaaaaagaaaaatcatctccttcatggctgaaaacccagaaaaatgttaatacaccacatgaagaaactcatcactgttatgggaaagagcccatgggcgccaaaaggtcttctaacccacagtttagacagaccaccccctccaggaggactcagcctgagggtggcccccaacactcgaaccacacattctaggaggacccaacctgacgttggtcccagtacacgaacgacacgctcgaggacgacttagcgtggttattgccagaatcatggaatgagggatgaggaacccaatagtggaggtactcagcctatgggagatagcacttacgaaacgtaaaatcaccaccttagatgccgctcagaggaggcacaacggaggaacgctgaattagagcgtaatgcagccgcaactagggcgacacaagggactaacactcaaaatcaacctgaacctggtgtgagaagaccacggggtaggcctcgtaaccaggagacaggaaaatgcccagggagaacaacctggagaaaatgagattccccctgaaaattctaatgatcggccagaaccctcacatagaaatgagaatgggaggcaaccagaaactaatgaacaagaaattcctcatggaaatgaggaacaccctgggactcaacctggggaacttaggtcacctgcgaggaatcactagcgctcttctcgaacccatagagagagggctcgtacagaccctaatgagggaaatacatacccagggggaaagaacagagcgtgaagaagcaagtgtgacctcagggcgttcaaggacccacagtcgatcaacttgaagaggagattgtactcgatgagccaatgatcgagaaagcatgggaacaaataaatccgcgagtcactcgatgacgaggtccatgagcaagacgaggtatgtgagtaggacgcagtctgtgagtaaaacgaggtctgccagtaattactctagtccgatctgcgagagcacttgaatcggaagaaacctgatcttcgccaacaactcagtccaaagcaagaggatcctatccaattgcgaatagacgagttggaggacaagttgaggaaatatcaagtggaggaatcaaggacacaatctggatacgacttagacgaggagctcgagccgtaccacccagatatcattaatactccttttccccttggatttaaaaacccacatgtctcatcgtatgatggaaccaccgatccggtctcacatttgaacaacttcaacacaataatgcaagctagtaatgtgacaaacaatttacgttgtattttttttcccactctgctagttggagcaacaagcagctggttcaacaagtttactcaccattccataactttcttggaataactctccagggaattcaaaaaaacagttccaggctgcaagggatagacgacctgaggcgacatcgcttatcaatataaagcaacagcccaacgagacacttaagtcatatttaagtcgttttagcacgactgctgcaagggttagaaatttggatgatagtacacaacttacagcccttcaggcggggatctctactaatccatcaatcgttgggggcgagctgtgggacgacttacagggtcgtccagtgaagaacatcactgagttcaacgaaacgggtcaggtgttcgttcgaaaagaggaagctcgaaaacagatgaatctgttgaaaacaggcttgggaggaaaacccatgaatgtttcaacaggtgctgtctctactagagttgataacttcggggtctctggctcgaagagaaaggacgattttaaggaatcgtcaaaggataaaaagaaacaaaaaaagcacgataagtacgtgccagtgtataaaatttataccgagcttaatgaaactcgggagaatatttaccttgcacatgagcaaaaggttgccttcggcaaaccccgagcccatgaggcaagcgaggagcaaaagagatcctaaaaagtattgtaaataccataaggacattaggcacacgaccgacgaatgccgctagttgaaagatgagatagaaagtctcatcgctcgaggccacttcaaacagtatgtgaagagacagggcaatgaacacaaccagcctagtatgcccaacaacccaaacaaccaagggttacaatctcttcctgttgaaggagaggagatcctggttatttcgggagagccgcatatcgcgggggagagcaataattcccaaaagagatatgtgaaagagatgaagaacgagcggtcgatatttcccccagaaccttctaagaaggtaagaactgaggaacctccaatcatattctcaaaggaagatgagaagaacgtgagatatcctcacgtcgatccattggtgattacttttcagctcgccagtaaaaggataaagagggtgttaatagataatgggagctcagtaaacatcctttataaggaaatgttgaagaagatggggctcgaaaaagccaaattaaagccttgtatggtaaatctatgcggcttcactggtgacagtattggtagtcagggcataatcgagctcgcaataaccttgggcaaggcacccctatccgctacagttatgcaagactttctagttctcgaccttccatcggcttacaatatattgttgggtcgtccaaccttgatcggactaggcgtagttagttcgattaagcacctatccttgaagttccaaacaccagaaggtgtgggagtggtgcgaggcaatcagatgctagctcgcaattgatatcgcatagagttacagcatagaaaagtcggtcatcaattaatggcgattttggcagtagaacgccaaaagaaggaagaggatcctgaccctcgggttcaagatgaaagaaacttattaaaaccaattgaagaattagaagaagttgtcctcgaccaaggaaatcccacaaagtgtgtttacattgggaaaaacttggacgagcagctaaaatagcagttaataagtttcttaagggcgaactactatcagtccgcctgaagccatggagatatgatagggatcgaccctaacattatctgccatcatttaaatatcgatccaaactacccagtaaaaaggcagaaaaggagaccttt

SEQ ID NO: 32167 - DNA, 1323 bp, Cannabis sativa
atctggtcctaagacgagtcttccaagaaactcaagaacccggagtgggggtacttgggcctaattgggaagggccatatgaaatcgaggacgaaattggctccgggacctacaagctcaaaataatggacggcaccatggtgcctagggcctggaacggtgatcacctccgaaagtattaccaaaagtcagaaaatgtaaacttaggctctgtcaagtaaatttgtaccaaaaagtatatgcaacctccaaatttatatgtgtaaagctgagtgtcttaaaaacaatttttcatgccacacaggggggtagtaaggcataccacatggacaaatgtaaaacaggccaaaagtttagcaaagttaaagcaaaatatgtatttaagcataaatataaagatgttcggacccaataacaagctctaaaaaaatactgagggcctgaggacgggccttaaaattgtctccccttaaagaaaaagattaaaattgtctgaaaaaaggaaaaagggactgtaaatgtaaaatgaaaaaagaaagagatagtgatagtagtaatggattggcttaatcaatgcgagacggaagacgaggccccctgcgctccttgagcaaagcgtcaagtctcttcttcttctcccagaagcgagcaaggacttcttcaggcttgggataaaagtcgagcttgatgttttggccattagtttgccaggccatgaaaacaccatcatcaaagtgtttagtgcaatgcttgtagatgacgggggctaggagctcagatctttgaaatccctgagctccttcacctcgaaggtcaaattggtcgtcgactgtaagtctgcctgatgcagctcctccattgacttcaacctaatggtcagctcctcggtagcctccttggcctccctcagctcacgccttgctctggccacgacctcgtctcgggccttcagctcctccgccttggcttgcaatgcctcctagtgcctcctctccacctgtgcctccctttgctgggcctcctcccagaacgccttcctcttggccgccaggtctctcagacttttcatggcctcgtccatgcccccaaactcggacatgacgtacccatgatctattaaagtctttgagaggcgactagtctctgcagctatctggaaaagaaaacaagttaagtatgagagatcaaatgccatagggtgaagcacagacaaaaagagaaaccaataacaaagactcaccacggtcatggcagcgttgatatcctgaacctcataaatagcgttcgtggaagcgcaggctgcgtatcttttggccaggagtt

SEQ ID NO: 32168 - DNA, 1419 bp, Cannabis sativa
ttcagtatatgatatgatacagatataatgtgaatttgaaaaaattatcaataatttcggtttaaaattttctttatattgatgctttcttaaaataaactaaaaatagcgtacactaaaaatttttacacaaaatgcttgaatttgtcaaagggaaatttcacattttgcccctaataaaataccccatattaaaatttagacccctttatttttcgtacaaattgattccactaattcaaaaagattcctaaaatacccccaaaataaactttcactctctcttcgactttccctctctctctctctccgactttccctctctctcgtctttctctcttcacgaactcacgaaccaggcatccgtcgagccatcacaaaccaggaaccaacaaaaccagtaaaccccaaacccatctcgtcgacccatctccaccacaaaaccaacaaacctagcaaccggcgaaccaaacccaggaatgaggtgaacctaaacccaaacagaggtctgtcgctctcaaatttgacccaaaccaaacgtcgacccaaacccaagcaagaaccgtcgtcgccaccacgtgcaggacccgtcgccaccaccaccaagttcatttaaaggtaaggttttttttgaaaaaaatatatttttcatagatttggatgccaattattgcatgttgttgagattagtggaatttttgtaaattttgtgctctttcttgtgataggttgtagatgttggatatgtttcaatgatgtctgtgttttttacagggttatcgatgacatatcgataggatgtcgatagatttaggtgtctatttgaccattagaattgtatgtgttgttattgtatgtcgataggatatcgtatgtgtctgtttgaccaaaaaaataacaaatatcgacatcccatcgatatccatcgacattatgtcgataaaaacatcaacagaaagggtgacagttcccatcgataaacaatcgacatactatcgacattatgtcgataacattatcaaaaatgagggtggcagtcctcatcgatatataatcgacacaccatcgacatactatcgatatagactccacaatgcaattttcatgtcatacacgtgtacaatggtaattaatccattcaattatcgacaagctatcttgcatgcgtttcatttgtacggttacacatttaatgttaataaattttacatacgttcccaacaattattcctaaccgccacattgcatgtcagacacgtgtattattgataagctatcgacataacgtcgatatcttatcgaaaatatgtatttcgtttcattgttttgcatgttgtcgacaaattatcgacatagtatcgatattctgtcgacaaatacacacttcatgcgttgcacctgtacagttacacatttaat

SEQ ID NO: 32169 - DNA, 5364 bp, Cannabis sativa
caaacccgaacccaaacccaaacttaggacccgacccaaaacccgagacccgaactggaacaagactgagatccgaatctggacctaaggcttcgacctgacccgtagtaagtgtttaaatccaggacaaggacccggattcgtacccagacctggaacgagacccagactgggatccagacccggaatcagaattggaccaggtctgggactaaaacccagacttgggacagtaaagggacccaaacctaaacccaaactcataccatactgggacttggacccggaccgggacctttgacttggatcctaaacaaggaccatgacttggacccagaaccaaaaactggggccgaacccaggacctaagaaccagactcggacctgggacccaaaactcagagccacactgggactgggacttgaacttggagcgaaatccaaattgggacttggactcagaccgggactcgagactcgaacctgaacctgaacggaaacatgaacttggatccagaccgggacctagaatctgaacataaatgggggacccaaacccgagaattgggcccctaaactgggacaagaaattgggcctcggaacttttatcgacattcgggacccgaccccagacccaaacttggacctacgacccaccacgggacctgggatctgggactcgatgcttggacccgacctgcagtcagtgtctagatctaggacttagactagaacgcgaacccaaagactagaacgcgaacccaaactcaaactcaaacaaggacccgaatacatacccagacccagacccacactcgggaaccaaaaccgaaacttgaaatggaactggacctggatcttggaacgggaccgggacctggacccgaacttgtacccaaaactggaccaaacctcgaaacctaaccgagaccgaaacccgaacctgaacctcgcctcggacccaaatgaagacctgaacccagactcggacccaaacttaacaagaacccgtaccccgtgacttgaaactggaaccgaaactagaagcagatcaggaccccggactaggacctcgacccagacccaaaactataaccgaaccagggctcggactcagacaaaaacccaccgcgggatttggtcccaaacttgaatccaaactcaaatcgtgactcaggacccgaacccacacctaaacccagacccgaacatggaataggactcgggacctagattagggatcgagacccaaaactgcaccctagtgtcggtcttggaccaagaccgagacccagaccggtgcctgggacatgaaccgagacaagactaggacccgtgattgggatccaaatcttgttttggggtccgagaactagggcttggaaaagacccatagtccgtgtcttgatctgggagtcggacaaggacccgaagctggaccgagacccagacattggacttgaaactgtaacttgaactagaacgtgaccaggaccctagaataggaccaagagcgtgaccaggacctagacttggaccggtacccagaactagaccataaccaagcccaaaaactcgagctcagaccaagttccaaacccgatcccgaacccagactaggactgagacacgaactcgaacccaaacccaaatccataactcgatcccggacccagaccaagcccttgactgacactggaattcagacctactcttggacacgaacccaaacccgaaattcgaatactgagaccccagacctagactgggatcgaaacacgggatgaggactcagacccagatgcagacccaaacctgaacctggtacccgaactcagaactggaccgagcccaggattcgaaaaatccatacccattagacccaaacctagacttggacccagaccagaactcgaacccagatcgggatcagaactcaggactcagacccggaactgaactcggtcctgatcgggatcggaacatgggactcggacccgcatctacacccagacccaggaccctaacccaaactcagagcctgatctcgacctagaacgaaatctgagcttgaacccaaactcggaccaggacacgaacaccgacccgaactcgaacccaaactcaaactcggaatcacaactggacctggaaccggacttggactaggaccagaacaaggacctaaactcgaacccgagcctagataaaaaccaagactgagacctagacccgaacaaagaataagactcaaactcgaacctagattgagacccaaacctagacaagaatcgggacctgaacccaaaaacgggatagggaactaggcaacagaactaggactcggacctagtacctgaccccagactcggacttgaacctaggacctagctcgtcagctggcacccaaaatggaatcagaccaggacccgagatcaagatctggatttggacctggggcttatatcgaaccaaggtgtctagatgatttgggaacttaagaccagaacccaaacccaaactcaaactcaaatcaagaccaagacacattcccaaacccaaacccagactcgggaacaaaaactgaaacttgaactagaaccggactgggatcttagaacgggactaggacctggacttggacccaaactcagaaccggacccaacctcgaaccctaaccgagactgaaacccggacctaaacctcgacccggacaaaaatcaggacccgaacccaaactcagacccaaactcgacccaaacccgtaccctgtgacttgaaactggaaccaaaactagaagctgatctggacccaggaacaggaccacggccatacctagacccgaacatggaacaggacttgggacccagaattaggatcgagacccagaactgcacccatgtctcggtccgggacctaggacatgaacctaaaccagactgggacctgtgattgagatccagatcttgtcccgggattcgggaacacggcttggacaacacccatagtcggtgtcttggtcagggactcagagaagcacccaaagctggaccaggacctggacctagacctagacttgggacccgaaaccgaaacatgaaccagaacgtgaccaacaccctagaatagcactaggaccgtgaccaaaacctagacctggatcgggacccagaactacacctgaacccagccccggaattcaaaccaggtcccggacccagactaggattgagactcaaacctgaactcgaactcgaataccgaacctagacccagaccaaggccctgacctaaattggggttcggaccttgacatggactaatcttagacacgaaatcgaataccgacccaaagctagatcgggatggaaacacgggacctagacccggacccagatgcagacccagacccgaacctaagacccgaaccaggacccggactcaaatctcgacccagaccaggatccaaaaaacccatacccagactaggactaagagtcaaaccccgaccccaagctggacccagaccccgacccggacccgaaaccaaacttgggctcagaatcagaactggaattgtgactaggacccggacctgagactagaaccaaacccaaaccataacccaaacacagaccagaacctggaccaagaccttgaataggactgggacttgagacatgggacccggacctggacctgacctgttcctgaaccctcgccgggacctgagacctgtgaaccagactaggataccgacctttacaaggacccaaacctgaactttgaccaagattgggaccgagacctggccccgaaccctgaccgggacctagactaaagccaagactcgggacccgaagccgaacctagacccagaccatgacctaggaaccggacttggatgggggacctagaccagggacctaggtcccggaacccagacccagatctaaatccgggactcgaacccaaaccaggacctaacctagacccaggaatccgaagtcgaacctataaccgaacccgaaacctgccccggacacaaactaggaaaggaacctagacacaaacccatactaggaccgaacccgaacctgaacctgaacccaaaatcaaacccgaactcagactcagacccagaattagacccaaacctagacctccacctgtactcgaacttgaacctagaccgggatcagaacctaggacgtagatccggaactaaacatggactcagatcgagatcgaaacctgggactcagacccgaacctgaacctggagccaaacccaggaccttaacccacacccgaagcccaatccggacctagactgagatccggacccgaacccaaactcggacaaggactcgaacctcgacctgaacttgaacccaaactcgaactcaaaatcgcgactgaaactggaaccagactaggactaggaccaagaccaggacaaggacccacacccgaacccaaacccaaacccaaacccgaacctagaccgcgactaaaacatagacaagaactaagacctagacatagaatcaggataaggacatgggcaacgaaactaggaacgagacctaagacccgactctagacccagactttaacctaggacccagcttgtgacccagcacccgaaatggaaccaaataagcactcgagatcgggatctggatcttgacctagggcttggactgaacccgtactcggtgtttagatctgggacccagcccaagacctgaatttagtcccacacccaaacctagacccgaaccaccctgtgacctaaaattggaatcgaaatcgaatgtagaccgggacttgggaacaggtaagaaacaaagacttggacctggacctcgaaccataactagacttggacctagacccggaatcgtaactagaccaggacccgtactcccaacccagacctggactcgggactcgaacttggacccaaactcagacctaaacatggaagtagactcaagacacaaaactgggaccgggacctagaactgcacccaaatctcggtctcgaatccaaacttgaacttgggacgcgagacctaaacaaaaaccagatcgggacacgtgacaaggatccagatctgggacttagaccaggacccgaacccgaaccaagacccaaatcggaccctgaccctgacccagacccgggacccaaaactggaacctgagcaaaaactgcctgacaaggaccctcgaacaagactaggaccgtgaccagcacccagaccaagacctagaaccgaactcggactagccccagacccaaatcgagaccagaactcgggctcagacacggtcgtttacccagaccaggac

SEQ ID NO: 32170 - DNA, 863 bp, Cannabis sativa
tggcctcaattcctctcgcatcaattatgaaacctagaaattttcctaaggaaaccccaaaagaacatttcttaggattaagtttcatgtcgtattttctaagaatgtcaaaacattctgcaaggtcctttgtgtgatcctcgctttttactgattttactagcatatcatcgacatagacttccatattctgtccaatctacttctcaaacataccgtctaccaatcgttggtatgttgctccagcattttttaatccaaatggcacgactttataacgataaagtctcatgtttgttacaaagattgtatgctcttgatcagggacatgcattttaatctggttatatccaaaatatgcatccataaaggtcattaactcgtgtcctgctattgcatccactaactggtcaatcttgagtagtgggaaacaatctttgggatatgctttgtttaaatctgaaaattctatacaagttctccaagtcccatttgattttgggacaaggacttaatttgagatttacgagggataaaattccttgtggataaatacattagtcaacaatttgtcaacttcttctttgagtgaaccttgtctcttagaatttaatggttgtcgcatttttctttttgctgggtaattgggatcaatattcagatgatggcagactatctttggatttattcccaccatattcgagtggctccaggcgaactgatcctggtttacctttagaaaataattaattgctattttagttcttcctccaaattcttcctaatgtaaacacattttttgggattctttggatctataataacttcttcaaactcttcaattggtttgagctggttatttt

SEQ ID NO: 32171 - DNA, 1479 bp, Cannabis sativa
ctccaacgccacctgcaaaaaaaatgagaaagagagagttagagtttgagaggttcatgctttgggttgggttgagaagaaaggaagaagatgaaggtgatgattggtgaagagagggaattagtttagagaaagagataagatgagagaggggcgactaagaagaaaattagggttagatttttattttaaatgggttgaagcccataactgatttttttaatgcctttttgcatcagttgtgcaccaatgccaatagtgtatataatgactttttacgtcggttgtagactgatgctaatagtgtatatataatttttatatttcatattttgctttattttttattttagcttcgaatagataactagcgctaattaataattatttgcgtcagtggaaaattgaagcaaaaaagtgtggggttgacttttgcgtcggtcaacaagtttgacaagacgcgttgaactgaagcaaaaacccctttttgtagtagtgtcatctttagtatattcttcaacctagtcgacatcgctggacaaaagaaaatacttaataaatattttatacaaattagaaaggaaacaaagctaaattctaaaatagctaccctaaacttttaaaggggcaccctcccgaactagcaatgacggagcatcctcatctgaggagtctctttcatcttgcacctcgactaccaccttccctttttccaacaactacttaggcggcaggatgaacaaatgcttttgaatcctctctgatcttaataagtcattatattgggtcctaattttgctttttggggttcttcttcttactattatactttttctctggaatttatcgctcaagagtgagatccttggctacttggtcattttcttgttcctctttgaatggataaggcccattcttgaggaaattctcagtagtagccagaagtgagatgtttcgataagatgctggaagttgaagaatagtttgtgcatgtgttcttaacccaaagtaaaagggggacggaaataacttggagccaactagaaggagaggtggtcgacatccatgtctttcactatatagtaatcttggatgaacccacctatcttcaagacatccttgtgcgttgtgccactcagccattgatattcattctttgaaaaatagaagtaacttgactagttttgttttgggcaagacttcaaaataaagagacagttcgtatcatgagtagatggttggccccaaccttgtttggcatacaacacaaatcgtgcggccaagtacttgattcccttcagagtaaattgggtcaacaaatcttataataatttgtgatcttcataaaatatgaatgtagaggcaagattgcaccttgctcggcatgtgttgctataatttataaacactacgcaagtatacgcaatcaagtagtaaatctcacacaggtgaggtcgatcccacagggaattggattaa

SEQ ID NO: 32172 - DNA, 2789 bp, Cannabis sativa
  modified_base (2718)..(2742): a, c, t, g, unknown or other
atgctaccaacactagtacggtaggggttctaagtacatttgtatagtgtatgatgttcaatgagtacaatacagtgttaccaatagtagtacagataagtactgtagtgtatgtggtacaacacttagtggtacttgaggtatggtgcaaaccctaccaacactagtacagtatcggtacgtagtgcatgttgtacagtggtcatgccttagttaaagaatgttcttactcatctgttaagcctttgtggataggtgtatggacaccgagatacaagttgataatatattgtatgttacatgcttttcttactgagtctgtttactcacagatattactttcttgtgtaggaaaaggaaaggctaaagctgaacaatagtgagtccagagcttaggggatgattgtaaatgtcgagattgtgcgacttagagagtttgatctctcgacaacatgggccttattttgtagtcgttgtgcaacatgtgtgtaaatattattttaaatgtatatatagttcaatgtcatatagtatatgcagttttaaataaatattgatttattgtcatatattgaaatccctacaggtttattaatattattaaatatcgaatttttaaaaattcttttgatcaggaagagagaaatgcagttgaaatcaatataatgttttgaaaaatgttccttgctcaaagtatatataaaaaatatagttcaaaatgataaatggcaactgcaaattaatattattcaaagttgagttagaatgagtccaaaattatctaaaattgtaaataagaccaattgaattcataaataagtcctattctcatttagaattctaattgattaatcaaaaccagttgattgagtctataacgcaacattatctcacatagtgtgggggccatggacctatataatcaagctcccaataagtagttctaaaatttaatgattaaattccttatctttttaattcatcctgactccactatagattcagaattatactcttgattacataaagcgctcaattctccaagaatagatattgtataagttatccattatttcaatctaaatagtcaataatcctctatagatagtctacattgaatagggattaaattactcttttacctttcaatgtattttatccttaaaacatttagctacttgtaaatgatatttcaagaaactaatataattatcattaataaggctttaatcatttaaatgcgtttagaaaagctctaaggaaaccatcatttcacttctatgtacttatagagaagctatagattccatatatatgactagtactcccactcaattatacttctctgctcctaagatataagtattgagacaaacctacaggtaggcttcgaacaaacagctcaaagaatgagaatgacacagttaaggtagaatctaattatctcaggattaagatcattgatctaagatcaactattagagatttacctagaaaagatattttggtaagtttacaatatctctttgctgtaaatattaatctagtctaatgcatagccaatacatttcgatgttagtctactttactaacgctctaaaaaagacattccacttatccatgtgattgtaaaccccatcgttgattatcatgttagtataaatcctatgcactgataaatcttgggactaaataatttgaaacatataatcacagttactttctattgtgatgacatcattataattgtgaatgactatatgtttgagatttaataaaacttatatattaaatccataatcgtgtgtaaaacacgtgaacaaaggttatgactaggtcatggtatgatttctgatctttattgaaagtaaatatgattatattgaattaggttttacttagggcataaaatcccaacatactcccacttgcactaatataaaactaaagtgtatttcaatgtaatatcagatacttgatgttttgatcatatgtagtatttggcataaactatgtaataggatctgataggttgaaccccaccattacattttctttagtcacaaaatacatgattttttaaagtccccatctatatgctttactcctcttagggtacaagattctatactgttgggcaattacatctgtctcaacaccgagtcacactagtaattattcatgatgtttggaaatagtaccaaagtttgtatcaaacattcctgagtctaaataattcccaaattactttttcagcatccttattattcagccttactggtagagctagtgattccagataggcttttacactttatcagaaaccactactgcactcccagagtaatatttataaatattaaatgtcgatgtttaccgagattatcaaacactgaatatttgggagctaaagaaataataaaacttagaaataaatgagatggatattttacgttgtacaattgttaattaaccttagttcacgagtcattaaattagcctctaagggcgtattaatgttaaaatagttttgcaggaaaccctaactctatgctctatgtttctcttgaagaagatgaaagtttggagtaacaatagggtttcagatatctaggttgttatcccccttcgtatgaaaatagaagggtatttatagggtatgtggtgggtatggacatgtgttgggttttctgttgcgttttatgccctaaataaaannnnnnnnnnnnnnnnnnnnnnnnnttattaatatagatcagaaataccatttaatgttacatggttcacat

SEQ ID NO: 32173 - DNA, 2755 bp, Cannabis sativa
aaatggcgagtgtgtattgattttacagacctcaataaggcgtgccccaaagactgctttctacttccaagaatcaatcagcttttggacgcaacagcaaggaacgaaatattgagcttcatggatgcttaataaaggtacaaccaaataaaaatgcatccaccggaccaagaacatacaaatttccgagcagatttgggcctatattgttataatgtcatgccctttggtgtcaaaaactctagagccacataccaaagattggtaaacaagatggttaaagaccagatcggacgaaacatggaagtatatgtggatgacatgctccttaaatccaggagggctggggggcacataaatgacattgacgaatgctccaaagtcctaaggaaatacaacatgaaacgcaatcccttaaagtgctcctttgaagtaagctcagctaagtttctgggctttattgtcaacgctcaaggaattgaaaccaaggaagtacaaagtttgactggtcggatcgctgcactaaatagatttgtttcaaagtcaatagacaagtgtgctccgttcttcaacgtcctacgaggaaacaagcaatttgaatggacagaggaatgtgaaaaagcttttcaagagctaaaaatgcaactcgcaaaacctcatgtactctcgaaacctctggacgaagaagaacttgtcatatgcttggctgtcacggagcatgctctaagtgccgtgctgatcaaagaggaaaataatatacaacgtccggtctattacattagtaaaagaattattgaggccgaaggccgatacccattgatagagaaactcacgtactgcatgattctaccaacaagaaagttaaggcaatattttcaagctcatcctgttcgggtgtacatagaccaaccgttatgccaaatattacaaaagccagtcgcctctggacagttactcaagtgggcggtagaactgggtcagtatgaaattacttttcaacctagaacaacaatcaaaggctacaccttagcagactttgtagtagaaagcacaggcaaggaagaaagcatatcggaaggcaaccccgagccagtacaaatacctcagccaagtaacagtcaagacaagacaacttggaaagtacatgtggacaagtcagctacagatcaactatccggtgcaggaatttcccttgtcacacctggggggcaacacctgcatgacgcagtcaagtttggatttaaagcatccaataacgaggtcgaaaatatgaagctttgatttccggtgtaaaactagcctggagagtacaaggctcagggagaagagatgatatcatatttgagcaaaatgcacgatctgctctcacagttcgaaagctacgctctgagacaaattccaagggaagaaaacacgactgctaacgcattagcttggcttgcgtgtagtaatgtaagtgatagagcgaatttggttcttatcaagttccttgaagaacctagcatcactggcacagaagagatcgacccagatgtttcggccaaaaagcttaaaatttgaaaaggtttgttgctcgaagtaaaatcagcattgataaaatttttgagagcaaaccttgacatttttgcctggtcacatgaggatatggttggaattgatctttttgtaattttgcacgtcctaaatattgatcccaacttccgaccagttcaacaaaagcaaaggctattggacaaagagagaactctaccgctgaaggaagaggtagagaagctacaaaataaaaacttcaaaattgaatatttctacccggcttgggttgccaatcccgtactagtgcccaagccaaaccaaaaataacgagtgtgtattgatttcatagacctcaacaagatgtgccccaaagagtattttctacttccaagaatcgatcagtttgttgacggaacagcagggcccgatatattgagcttcatggacgcttattcggggtaaaaccaaatcaaaatgcatccaccggaccaagaacatacaaattccgaaaagatatgggtctatattgttataatgtcatgcccttttgtctccacaatgctagaaccacataccgaagattgttaaacaagatgtttaaagaccagatcggacgaaacatggaagtatatgtggatgaaatgcttgttaaatccaggaaggatggggggcacataaatgacctggacgaatgcttcaaagtcctcaagaaatacaacatgaaatgaaatcccttaaagtgcccctttggagtaagctcgggtaagtttctgggctttattgtcaacacatgaggaattacaaccaccggagtagattcaagccctcctagatatgaaatggccaacaataactgaggaagtaaaaagtttgactggtcagatcaccgcgctttgtagatttttttcaaaataaatagacaagtgtgttcggttcttcaacgtcctacgaggaaacaagcaatttgagtggacagaggaatgtgaaaaggcttttcaagagctaaaaatgtaaattgcaaaacctcctgtactctcgaaacctctggacggagaagaactttgcatatgctttgctgtcacggagcatgctgtaagtgtcgtgctgatcaaagaggaaaacaatatacaacatccggcctattacattagtaaaagacttattgaggttgaagcccgatacccattgatagagaaactaacttactgcctgattctagcaa

SEQ ID NO: 32174 - DNA, 2635 bp, Cannabis sativa
tttagaaaatacaggatctattttttcatttaacaaaacagaggttccaattaataacttttacaaaacacatggtctaaaatggtatttaccctaaaaattatatctagcattcttgaataaagatttatcagttctttaataaatttttaatttttaatattttcatcattttattttgctttttttctatagactagatctaacatctcctttttctctggatattttttttgtttgtctaattttttttttttttttttggagaaaaagaaaatttttatacaactatcaccaaaccattacatattgtagtagctaccaactagcatacaaacttaaaaattgatgtgacattgtatggtttccataaattttttataatatatatatatatatatatatataaatttcttaatatttcttataaacttctcatattctttaggtcccttaattgtttgaagttgggagtgttatatagattttgaaatattaaattttttctctttcaatatataaaaaaatattttctttttattttttttaatttatcttgatacgacatttggtaaatggatttcatattgtttttattatactctttttaatttatcaacaaaaaatatattctctttttcttattttgtggaaaaaataccatttaatttaaatttaaatattaatatggttaggtgtttatttaggataattatttaattaaattataaaaaatctttctaaaaaaattataacatatcttgataataaaaaatatcaatatataaataaattaataataaaatgctagaatgtttaaatctatatatatcaaccaaaatcgcatcttaattttttcaaaatagtacttgaataattgttcaaatctataaatatatatatatatatatatatcaaccaaaatatcaaaatgcttaaataaattagagttcaaaatgtaaatttatagttataaatatattgaataaatattttaatataatattattatgtcaattaattaaagtaaaataaattaaaaaatttaaatggtttttaattaattaattcaaaatagtaatatattgtttgatattaatcaatttcttagtaaaaattaaatgttaggtaattagttttagaataaattatatttaaatcatttattatctatatatttatataaaactgaggtataaagtgactacgtctaaaacatttctatttattatctctttaatttttttttatttttctattttttattctacttttaattttctccttaatccttttttttttctattttttattctactttatttaattagaaatcattaattttgtcaaaaaaaattaaagatcattaattaattaaaaataaataaactatatagccaactaatgattcacttaattaatttataacataataattaacttatttataaaattaagtatataccgatcattgtttgatttattttatgtacagagtaaactcttactgaaatgaaattattcatgactataagagaaatatagtaatgattcacttaattaatttgtaacaaaatgatttacaacaacagagcaaacttactaggaatgatattaataatgactacaagtgagatactttgatgacatcaactttaaatgaatagtgaccaagtgagttacggtgatagagttttattatttttttaataaatataatttcaaaattatacataaatatataataatatgtttaaaattatttgatataattttattattcaattaatatttatatgtacaaagagcgacctgtttcctagtaaataaataattgaaaagaaaatctctaatcttagaattagcagagaccgtattaataatatgatagttacatcgctatctgtcactgatatgataatttcctgacaaataagaccaaattgaattattttcatatgaaatgaaaaacaagaattagttagtaaacatgaggctagaaagcattgttccaaagaatatgcggtttttcggttgcatctaggtactactcaactcattccaataatgttgacaaaatgaatagttaaaggtttgttgcttttgagtgtccagcctaaataaaggtaggccccaatgtaatcttgaaacattttaagtctcattcattgatatactaatgatgttggaacttgttcgttcgtgtgggtctttacttgggaaaatatatcctctccaaaatgttgggcctaataataaagctaaacaaagaacaatgaggtaggacactccattggtatgtatatacttgaacaaactcatattttgattagttcacctatactctcttttggatcattaacaaagttctacattatcaatttcttatctaaaatctaaaaatatataatttcataggtgtatgttgtattgattgaagtacataattttcatttatgaatttaaagttcttttcttgcatcaaattttaatatgaatggtatattttattcatttactactgcaattttggcatttggagaggatttcttaaagtttacagtatcgattttagcaaaataagctaccgacgttgttccaagcgatggcataaggaagaaaaaataagggctca

SEQ ID NO: 32175 - DNA, 1345 bp, Cannabis sativa
  modified_base (1152)..(1154): a, c, t, g, unknown or other
  modified_base (1222)..(1241): a, c, t, g, unknown or other
aatctcaatagttcaggagaaatttttaatggcaaaaaaagtttaagagcatgatttggtacatgtcaaaatatttctactaatcagcctttaattcttaatatttaagacatttttgtttaaaagataaaaaaaaaaaagaaatatttaatattttctttaaaaaaaaaaaaagaattgttgtgatgaaacatcacaaaccctgttgataaaataacagaaaaagagtaagtgtccaatcaaaaaccagtaagtcaaatgtccaatatactaacttcatagaataacaaagcacaatagtaacttttagttaactaataacatcaataaataatacaaactataatgaattgaataggttctatctattcatctatctattctatattacaaatcaaccgttatgattgattgacatatttaaataatgttggaaaattagtagtgaattcttttccatttctattttgtttgagacattaaaatgttagaaaaaagaaaaagagaaaagaactatgttattattaagtgctatggaaagatagagtattgcagaggcagtaagtaacagtgtagtgtagggtcaaatatggaagattttggcagagaagaaagattcttagctaagctagtattgtatttgtattgtattgataaagactctgcaaagttctgccaccctttaaaattaaagactatgctatgcttttacaatttctttctttctttctcactcttactcatgcttcaattctttctgcctttatttcctattgtaaggtgcaacaacagtagtgcctactctacttgtcttgcccatttacgcaaacaccttatatgcacaatcttctcatggcccttgccccctatcctaagaaacttgcaaaaattctaaatctttttttatatattatttggtaattttatagtacccacatgtaggggtgttcataaaatagtcgatctaatcgaatctgcacgatccaatccaatctaatctgcaaagtgtagatatccgcacttgtgcggattagattggattgaaaaattcaaaattcgcacttgtgcggattggatgttaattgacatgtaaaagtaaccgatcaattccaatccaatccacacatatttatataaatttttttaaaaaannntatatatacaaataatattttaatctaaagaaaataataatttaaaagtctaatacatataatacaannnnnnnnnnnnnnnnnnnngatcaaatgtatattctattcttagggtgatccttcattcttatatataatttctttttctactgtaacgccccgatattttgccttattttacaaaaatacta

SEQ ID NO: 32176 - DNA, 1247 bp, Cannabis sativa
ttgtttctaaaattttgaagctgcaaaaggatctttctgcctttcgagtctgatttggaagatcagtctctctttatcctccttttctaatgcaacaatcatataatacactcctagaagtaataattctctggcgcataagctagcacaaactgcattaggaactgacgaagagcatgtcttgaacaattgtgtttctagtcacctttagatccttgtaaccggtgctttcttgttgtttttctttaattacaggtcttgtctcaaataaaaaaaaaaaagatgtgacttgaagagatgatgaaagctaatattgaaattgttgctaattctataatacatctcacaagggtatattttgtatatttttttttatctcttttagtattcataaaagccttttaatttatatttgttttacgattatgtacattgacattatttagaattatttgtaaaaaaattaaataattaataattttaaaaataaaattcaaatattttattacatttgtaataattttttttcacaaatatgttaagcaactatttaaatttctttttcactataaactatctaaaatttataatggtttaaataaatacatcagaaacaattaaaaaaattaagtaaaaaactctactagattttttttggctagttagaaatttaaaaatttaaggaaaaaaattaaaaactctactagttagaaaatgaaacgtattagaagaataatttgggagagtgtactatccacttttgctcactttgtttttttgttttttttcatgttttaataaagaaataaaagtgggattcttttgattatcatttttttgggtaagtagatggtgattgttttttttggtgattgtaagtaggatggtgattgtagcagagtttctactctcgtctccagtctcatctcaactcacactactttgcatatctacttggtcacttccttttattttttattttttttactgtctcattcctgcagtgttcttttacgaaacaagccctgggaagtcgtacaacaactctgtctataatgcgtggcaaccactccctcctagaaataaggtagtgtttggttacaaaataaaaatggaataagaataaaaatagtaataggaataagtttattgtaccacatctaatatttttaggccaatccagattcgatttaattatatattatatgttaaattttaccattcaatccgatctaattaatttcagt

SEQ ID NO: 32177 - DNA, 2045 bp, Cannabis sativa
aatctaattagttgtaacttctttatttaattaaatactaaaaaatgcatatagtttatcttaaattaattttattaaactaagtgtgtttctcttgaattaatttcaaaaataatctgatgaaaaattaatttcatatattttaaatattaattatgttgctagttaaatttttttttgaataaatttagcaactttattaactagtaatcattaataacaatagaccgcacttcgttggaacaattctcgaattgaagcacacgacctggagagaaacaagaatccctggctaaaacatgagccatcttgtttggagatcgtttgacaaaacaaaactcaatattatttaaagataagagaagagtacgaacatcatgaactaatagaccaaaagaggatgacaaagtaatttggctatcagtttccaaaatcaattgtccccacaaatgactgtcaatccagcttaaagcttcttttatgccaacaaattcatctattttaggttgcacctaacatttcggcataaaaatccttgccattttctccgttgcctcaatctgctgataactactcgatgccatggacacccgaacaaatccagaaccaaggaccagtaactaacgccagaaaccaataaaccaaacccaaacccaatgagagaaactataaaaccatgtcaaaagacaagacaaaaacaataaactatctaaaaaaaccatgtcaaaagacaagactaatgagaaaaacctaattagtttcaacatataaaactaaaaattctaaccccataaaaacattaattggaactagcctataatagtaaaatataaatattaaataaacaataaaaagaacaaaaaaactaaaactaaagagtaatttttcacatacgaaagccaataaattaaacaaaagatctaaaaaccaactaataaccaatcggaattgaaagctatactcgttcactgtcaaacctcttggatggaacccgaatgaaaccgatttaccaatcgcacagtatctagctgggttaaaacgaatgaaaccctagacctgtttctctctccgtcctaagcgagatattttcttgaaaactcaaatagtactattgataattgtaatataaatagtactattttatgtatataatgtatttatataaattattgctaattatttttattagattaaactagtgtaattaacctattacaaccattcaaataaaacaaatgggcattcatagttggggttattaatgtgaggaggaatgggttcagtatgttgtacccactactaatggcctctaactctcacacaagacctaaaagagaagaatttaaccttaattaaacaattgttattcattaaataagcctaatactaattggaactaaataaaaactatcaaaagtgacatttttattttagcaacctagtttattttaattatcaaaattaaatgggctccctatatgcatctaggcccaaagcaaacacataggcacaaactcacactgatttggatggatccttttatgttactagctttatacacagatgaaagaagattataaaatttaccagttataaattatttatttgacatattgacaatttaactatggttaaaattagatcattggatctgtcaacaagttaaccttagcaatttagatcaaacaataataggttttataaaacaaatttgtatataaacaataaataaaatacacatgcaacaacattggatagttggttataggatttatttaatttaaatgaaatatttaattcaattaatttccaaaaatccaaaataattaaatgttcaatttcacaaataaattaaatttatttttttgaaattaaacctataaatttaaaaattaggtttataacaaacctaaatttgaaaattttgaaaaataaaaaatttacatacaaatttacacaaaaaattataaaattaatttcatgaaaaaatataaaaagttgaaaaaagtgggtttcgtgcggatggtatgcactgcataccatcc

SEQ ID NO: 32178 - DNA, 1712 bp, Cannabis sativa
aataaattaatttgattttttaaaattaatttaagatattagtgtaatttgaacttgaaaatcctcccactctcttcttaagggcctcaagcattttttgagacatttctgtacggtatagaagtaacatagtcaaaaaaaaaagcaaaagaaatatgaaggcatgataattaagaaaattaaaaacaagatggagtatcctatactttggcaggggcattcgcccgaacaaatgatgatggggcatcgtcatccgacgagtcttcttgcacctcaacgatggctttcccctctccttctacaggggtggatggccgagcaggtaggtcgggctccctgatctagattgtatgtttgatgggcctttgtctggacgggagagtcttcttcctcttgagcggcctttcctactcttcctcagcctcatcctcctgctcagaatgttcttgagcatattgttcgactttggcgcctcccttcaacttagcctcgcgcttaagttgaataagctccttctcctgctaagaatactcctcatcaaactgcttggcccttgcacctcccttcaacttagcctcacgcttcaattgaatgagctccttctcctgctcagctctcttagcccaaccaacactagacttcttcttcctccccttcacagggtgaggtataaagtatgctggataaagcccgtaccccacaaagttcgcctccgaggttaacaaggtgatattttgaacaacatccgacagttgaacaatcctctgagctctgtccctaagagccagtgtaaagggtggacggtaatatatcgagatctgctgaaattgagtataagtggcgtccatgccttccacaaaataatactagtcaacaaaacccccaagttttctcacgaccttgtccacggtgcctgtcaaccactttaaatctggctgagagaagtagaagtaccccgacctacttttcttgggggtagacttctagtcaaaaaaccaactgacctcatgcggagaaagcacaccccacttctggatggcgtagaggatgaaaagggcagacatatacttaatgcccttggcagtgaacttggttcgacaaaggcagaaataatctgccaccttcctgaagtacgggtacaaaggcagcattgtcccttgtctggtgtgagcacccaaccaagcacacatccctttctgcgggtttgtggctcggtgatttgaagcagggatgtaacattcaagtttgcctagataaccagactggtccaaatccatcatgcgtgcctcagtgatcttggacggaggactcacccatctggcacctaaggcaccttgcctcctttgaggaactgcttcagcaagctcctcggtgacgtagtctactccttcaactaagacttcgccctccgcagacaccggctccccaacctcattatatcctccaaagtttggaggttcagcttcctcctcaacctcggaagggctgctaggacggacgtcatcctgttccgcaatctcctggacctcaatgtcctctcgatatctccctccttttagacgggcagatcttgttcagtgctcggtaatgtgggaagctaggtcacgtgaggatcagatgcgttgaccttccgcttcatttgttttgatcgagccatcatcctactgctacacggatactggtgcgaatgccgagcaaccgtaactgcagga

SEQ ID NO: 32179 - DNA, 2574 bp, Cannabis sativa
  modified_base (259)..(259): a, c, t, g, unknown or other
tctctctctctctctcttttgaatcctccttctctctttctattcataaatttcattccttgtagtgctagagtacatgcccacccatatcaagtcaagtactcaatcatagtgtagaagattgtgaagaatccaatacctgaaggagatccaggctcagatcttgttaatactctacgaaaaaaaggaacaagggttagagatctaagtggaaggagacatattatttcgctaccaccaatgtaaggtttcctaaacnttatatgtgtttaatttcatcgttttagagaagttatatttagggtgttaatcaacatatatgttaataaatctagattttggtaaaataatttccaatagttctatataccgttttgaagcttgcaacgagatttataatatggtatagattttagagccaaagtataaattttattttagggtgtttataccatgaggttttgtagaaaaaccttagattgttttatgcgagtattaggctgtgttttagaatagacacttatcgatttattattattgagaaatagggtctagatcattgggcattattttctccactctgattaaaggtaaaaaaatatatatgtaccacatagcatgccaaatacgattaagattgtttatgagttagttgataatgagaacaaggtgatggtcattaccgttatgaaagtaaggtgaaagtcattactgagagcaaggtgacaattattactgttatgaaagcaaggcgacgatcattaccattatgaaagcaaggtgatgatcattactgttatgagagcaaggtgacagtcattaccgttataaaagcaaggtgacggtcattaccgttatgagagcaaggtgacagtcattatcattatgatagtaaggttacagtaattaccataatgaaaacaaggtgatggtcattactgttataaaagcaaggtgacggtcattactgttataaaagcaaggtgacgattattaccgttatgaaagtgagaaagcaaccatgatcaccatgaaagaaaagtcatgactataaactatagcagttgttaggttccctacttgagggttatctccatagataacgacagtgacatgaataccggggatggtatttgggttgatccacatgggacaactaggaaaagtaattactatcaattggaattgttgttatgttctctactttccagttatctctatagataacgacaatgacatgaatattggtagtgttatttgggttgatccacatgggacaattgggaaatgtaatgactaaactgaaaccgttgttaggtttcttacttgtcggtgatcctgattaggtagcgacagtgacatgaatattggcgagtggtattcgggttgtctagtttgacaacgacggtaacatttggatactagggattgggtgttcatgttgcctagctcagtgataattgtgatatttggataccagttttgagtatcagggttgtttcattaaataacgacaaagacattagtatgccaagttaggcgcagagttgtttcatgaagaaaatggtctgaatggttactttatgaagtaactgttatagttattattgttagactagtaattgtgtataactgtatattcttatattggtattcattatgtttgagtagccatgcagacctagattcaaatacatgagtaacgtacaattgtttgatcctggtaatgtgagtttacttgttgatattcgtgtgatgaattatatgattgttgttattatttttcttactgagtctttgtttctcacaggtactttgtggtgcaggtaaaggcaagggaaaactaggacaaccatgagatgacagtcttcttcggtaaatgtacatatcgacttatcttgcttgtgtggtcgagttgtcaggagttattttgagttttacctaatgtgtattttaacttacttttgtatacatctctttttgtaaaacttttgtaataggggatccctaaaacaaatttttagcgatgtcatcatgttcattgctatggtcttattatagtgaagtccttactattattgtagatttgattgaatagttaatctattattacaaaactatgtttcaaaaacacacacttggcgtccctagctagggattagagcgctacaattttctccttggaaagctcatgaatggactaacacaatgccataatagttctaagcgtgtgaaagtgagagtaacataagagaacaaatgaaggtgtgttcacttgaacacaatactaccggtcttatcaattaaggacttggagattcaatccaaaagaataccaactagcccgataaggctttgtagggttttaactaaggcactattcaactcaaaagatacattattttatgcaccaacattgtctatttagagatgagaaaggcataagtatttaaccaagtggaggattgttagaattggttaaatacttaaggttaatacatgaagatttgtaaacaccaatcaatgagatatggttaggttaacctaatggttcaagttaaaagccaaaacaca

SEQ ID NO: 32180 - DNA, 2080 bp, Cannabis sativa
attatacagattggtttgagttacatagctgccaaattttttaaaatcgtgactgaattagagaattttaaacggttcgaattgaccaagtcattcaaacagaattcatttggtccgatctgaaataatttaaaattacgaattacatgaacacctctaatttattttactattaatttttttaattatgaatagtgctacaaatatctctatataaaaaatttcatcgcaagttttttttaccgaatcattacctccaaaaatcacctatcttttcgttgtataatatgttctttcgtttcttcttgtcaataatattagtttgtcaaggtttttaaacccggaataattccttgtttgcaatctaagacactcgtgattgtaaaattaagattccatttggttggggacatgaaataaaattcattttcattatatttcttagttcatttgtaatttaaagcaatacattacttttgcaccatttttttattggcaaatcttttctaacattttggtaaaaaaaaacagaagagttcattcgaaaaatattacttaagaaattattcatattgcctatcttatatttttttcttctagtaaaataaaaggtgaaatgaaaaaagaaaacgtgtacaagtctattatttgataattgtgactataattggaaacatggatcatctagtagagtaactataaagctaaatgaataaagttataacagaaacaattacatgatgtcaagtggggttcataggaagttttggttttaggtttgagcatcgagtgactagtgctattaactataaccatatctgcaagtgtttccttcattcatttctaccatctttgatgccatttcaattttcaagacgtatcaacttctgacaaccaatggtgtatttgattactagacattttctgcaacttttgtgtctcccaagtgatgcatatggattacctgtttgtctggtatcaaataacatgagaaataaaaaattaagccaaacaaaataataataacccttatgattgtacttggttaggggaagattaaaataagttcaagtttggtgggattgaactgattaaccaatgactgtttggtaggattgaacttttgtaaccaaaacggaaaagactatgttagaataacatcaaggccacaagggagggatagaacataaggaagtcaacccaaagataggggtattggtaatggtatttatttggtacaagaagacatgaaatttaaacataaatataaatttcaacgaattggtgaaaatggacttattaactactaggatttgttcctaaaaatcttccattctctatcttcttacgcaacgtaaaaagataatatcccatcttcctcaacctaatctttcttccagttttccactccaccaaacaaagggtgggagggtgatattgaatgtttccaatggtacagtactggccttgagatgtaaatgaaggattaaagatttataccttgccattaatcctgataccccaggaagaagagtttgatccatagacaggatcaccaacaacgtatgtaggcggatgagcagaatttggcagaagtggaaccctgtctgaagtatattcatcatcactatcgtagtattgatctggccctagagcttttaatatcattcccagcaacaaacacagtccctgtgagttaatgacatggatcagtcaaaacaatccagatcaaagagatttgaaaatgagcttcatttcttaaacccctacaatattctaacaaaaggctaagcaaagagtttcaattctggataacaatgtgcagatcctgctagttttggcagagataaattccatagcaaattagtaaggctcaggtagatagccaaccttttcatttacttatatgaaataacattcagaaagtttccagggagaaacctgtacagtcacaattgacagcccaatccatttgcagatgttgaagtttgttctcacaaaatatttgaactgaccgaaactcccacttggatcttctggaaagtcctagttcatattaaattggcagagcagcatgaca

SEQ ID NO: 32181 - DNA, 1536 bp, Cannabis sativa
tcatctcatttgctaactgctgggagatttgtttcacagtatttatctgactctacccctttctactcaaggcatcggcaactacgttggccttaccacggtgataaaggatctcacaatcataatccttcaccaaatctagccagcgtctttgtctcatattcaggtctctctaggtaaagaagtatttcagacttttatgatcagtgcatatctcacatttctcgccatataggtaatgccaccaaatctttagcgtaaataacactgctgcgagttttaagtcgtgagttgggtacctctgcttgtagtcctttaactgccgagaagcataggctattacctttctagcttgcgtaagaacacagttgagaccttgtctcgaggcatcacaataaacaaaaaaaatttccttacctaaagaaagagttagcactagagcggaaatcaagcgctgctttaacttcagaaaaattttctcacaccaatcagtcaaaacaaacttcaaattcttttgggtcagctccgttaagggtacaacaatctttgagaaaccctcaataaaccgacgataatacccagctaagcccaaaaagcttctaactttaatggctgattttggtgttggccaatctcgaatagcttcgatcttggccggatccaccatgatcctatcttatctactatgtgccccaagaaagagacacgagataaccaaaattcacactttttgaatttagcatacatcttgtgatctcgtaatcatcgcaaaactgacctgagatgcagcccattttcctcttctaattcaaaataaaccaagatttcgtcaataaacataatcacacatttgttcaggtaatcctagaacatccgattcatataatccataacaattatagtacatagccttggcccactattcagcctgatggtgatgcttgcatttcagacattcaaggcgtgacctgaaagaggatccgtgaccttgacggccacctatgatttccttgaaactttctaatactccctgatgttttagaagcttctgactttcgtttgtgatcagggttaccaccgtcagtccccttactgatattaccactaacaggaggattcgacgccatggtggcatcctttacaatctgctcctttattaccgttgctcagcctcctcaacaactaaggctagttcaaccatttttctctataaagtgtcgtgagcagtggtaatcatcaagtccagactgattatggcattcaatcctcacagcgatgttatgaatttttttttcctcaaatagactcttgaactcttcccaagtcatcacactaacgtcacgagtttgtcccacaatatcccaccagacgcgggcctgatcttgtaacatgaaagctgcacaattcactctctctgttcccgtcactcccatattgtcaagaatacgggtgattgtactcatccaatgctcgactttaattatgttagtacctccgagaaaagtcaaaggttgcagctgttgggttttatgccct

SEQ ID NO: 32182 - DNA, 2394 bp, Cannabis sativa
  modified_base (1404)..(1407): a, c, t, g, unknown or other
gttacacgggtcgtgtcgtgtcaacccgtttataaacgggtcgtgttcgggttttattttttgacacgattattaaacgggtcatgttcgggtcaagaatttacctgttatacatggatctcgacacgacacgaacacaacccgcgaacacgaattgccacccctaattcaaacagcacacccaaagaactagaattttaacttatatcactgaatactacacccttgctcattaacatattaaaaataatttccaaaatatctagaaaataaaataagataaaagatgaattaattccctagcaatgatattaaaacctaagaaaaaaaaaatctcaatagttagaagataacaactctaaaataaataatataatacatatcatagtttatattatattttgtattgacttttgaattatttatgtatttgtattttattttgtttgaacttttttagttatgatttttgtaaatggattgtatgatataattttattaatagttatttaattatcaaaattagttggcgattagtgtaaatcggcacttcacactgcatttttgtggtgcagttttaagtacagattatgaaaataggcaactgtttcattctgaatgttttgctgcccataaactgttgagccatcatcaagcctcaattgtgataaacgattcctgcttctgcggttaagggtttggagatggaaaactttataatctgatccccttccttaagccaatcaacccgaaagtttatctgatgcgagtgcaatttagaaaattattcaaattgcatatgcagtacaacctaaaaatttaaccaagaatcgtattacacccacacccagacccagaatttaaagtaggaggcgtaattttttttttttgtaaagcaggagggtaaaaataaatttaaaaagaaaaattaaattgttgttagtaagatttgaatttcgacctctaatatatatgtaatctatcttaaccataatataagcctactattatgtctataaatattatcttttattataaatataagttatgactaactaaaatacacatacattattttttctgatttctttttcagagagaacgactgtcccctcttgctacaatatggatccgcccctgcccacaccgcaaaccaccctactatataaataatagaattttctcaaataatgttttaagtttctctcattgtaagtggccatttcacgtgatgtatggtttggtggcctaatcttccaagatgtatttgagctttttgcttaccgtggttgttgcctttcaatgataattaaaatatgagcattgctattaggtactagtggtgcttagcactttctcaacatgtcgcgttgcgattggctagcgatactctctaaaagctannnnattaaattatatgggacccaatatttagtttgttcaatagcgatattgacacataggagggtgctagacaccactggtgccctttagcatttctcttaaaatattgaattataagaatatttgtggtataagagtactcaaaaatttatggttgcaataatcggcaaagaatcaatatttttttattatttcactaacacacaaaaataacaaaaaaaaaattacaaaattacagttatacagaagtttaaatatttttacgatttttataattttgtttacagaaaatatagttttttgatgtatttttatgttgtacactttgttaatttattattgattttttcattatttgtatgttatttttatttttttgacgttgtttgaatattatttttatgttacttttatgtagtaattttgttgttttcgtattatttttataaaatactatcaaaatgaagaaaaaaacccttaaatgtaaaaatacaaataaattataaattataaaaaaaattataaaaaaaaatataaaaaaaaaaaatagtattttatgtaattattcttaattttttttagctacaacaaatactcaaagttagtaaactcatttttatctttggtaatttataaatttcattcatgctttaaggtcattaggtagatggaattgaattaactaacagagcaactaaaattgcaactaaaatccgtataacaacttacatatagattctaacggagaaactatcggagcaactcaaaccgaaattttttttttaaaagaaagttaaaaaataatatataaaataattcctataataataataataataatcaatagattaggagaaaaaaagttgaaagtaacactagtgatatggtgattttttcttataacgttgtcaaaattaattgcaaaagtagggctcaacatggagacctactaatccgactttaaagcttaggcattaggtatttttccaa

SEQ ID NO: 32183 - DNA, 1401 bp, Cannabis sativa
ttagtatcaaaagagggcaatgtccaagtttggcctaagatgttaaaagttttttaacgatcttgaattcttcttcaagtatccatggggcgagcatgcctttcataagttgatggagacattgaataaggatatgcgcaacattacaaggataatgttgacaagaagaaggggaagaagattgctcaggatgcaaagtacattgttagtggctatgtacctgcctttcagtactaggcatacgaagccattaagaaagtgggcaagaagtatgctcaatgtagcgggaccaagttccctagaatggtgaattggaaaactttggagggccatcagaaataagatgtgaaggcaaccaacatcgcactattgttctacaggcagggatgtttttattctcttctgaaaaaaaaaaaaaattgttaattcagtcaaaatgcttgtttaaaagatgaatttgttattcgcaacttactccacgacgtttagtgatttgatttacgatatgttgattaatatttttatttttaaatactgtgttgattcgcggctttatttcgcgatatatttcgacaatttgcgattcattcgggatgtaggattgtatgcattgtccagaaatgccaatgatgtttttgcgacatgtttactaataattgcaatttagttcgcgacatggtttgcgacatttcttaattgtttttaatgcttgtgtgtttttatttgttttgcagttggtcgtaaagaagtacttatttccccggcccagtgaagaggaatatttcaagaacattaatgagggtaaagccctctttgttttaagatggacatcaaacaaatggtggagggtgatgctacacaagagtctttgtttgaaagccaagcaaagattattaacgaggtcgtggcaaaagcaaatttagttccaccaccacccgcagcagaagtaaacgagtcatctactttaactgctccgtctactccaaccaatacatctgtggataatgatttggcaaagagattggatagacttcaggcccatcaaaataaacatgatacccagcaggaagccatcatattggcgcagacggagttagtaaatagccatatcaatatgaggcggtccttcacgtagagtcaaaaagatctgaaggagactctgttggctaagatggacatgttgatggcaatgttgaaaccaaagagggggaaccacagcccaccccggtagcagaagattgccgaccaatggagagcaataatgaagatgtcttcctagaagattgggagccagatgataatgagggattgtaaactccattggatgcaattatcacgaccattggtgatacacaaacacaggacaatgtcctcctaatgactggacccccaaaagatgtg

SEQ ID NO: 32184 - DNA, 2005 bp, Cannabis sativa
  modified_base (1969)..(1977): a, c, t, g, unknown or other
tacatatggctgggagaatttcaatattattcatgtgttaagaattataatattaatcactgattatcagatttctcacaattgatatttatcacaaaaaaaaatgatatttatgtatatgtagtactactgatataatttgtatgaaaaatattgaagataattatataatgatgtaacttttgtcaatagttttgaaatgatgcagtaccatatacaaatatatttgtcaaatcattacctatctatttaaacaaatatttatggaatttgaaaaatatattttgatggaagaaaaatgatattaaatttattcaataaaaatatagttaattagtgcttgattgattgatttaataagtcatttctgctaggatttatgtataattttctttttatttttttctctaataaaatttcgtaattttttttgttataatatttaaatataatttatttttatttaataagtatattttttttaaaaaaaaattactaatataattaaagatatatatattttatgaaacataaaaattattaaaatggaattatgtagtgtatttatagatttttatggtacaaactcctttttttcacctatgtatattatggcttggtttttttttaataaaaatgataaaaaaaataaaattaactactgataatatgtatatatatattaatatatttgttaattccatttttgacatctttaatgtgatagaaatatttattatttattgtttaattttggctgtggtaattaaattagtttctatattttgtatttgacttttatgttaattaatttatttttggaatgaaagttgtatatagcttttctatttatgaaaaataaggtaaaaatagtaagtttggttacttaatttttttctatctagctatccatgatgtgatattctgatcttgtatgagtttcctattttgtttgatcatattttttgaggataaaactagatcaaaactttacttttctataaaagaaaagtcgtacttactactcacaattctgtagttacaaaattgaaaattcttgaactgattgaagatctattttagagaattgtctagtgggttgtggtcttgtgtgtgtgagctgtcaataaggtgtatattattataaatacacttatagcatctaggtcttgtacctcttttgtatctttgtatttcactcatatctttagaaaagagagtctttgttttgtagagaagagtttgtttgactcttactctgtttattggtattttgtattgtcttgagtctgtattcaacctacaaagaagaagaacaacaaagctacattcaagaggttttacaaaacttcgggagattgcttttcaagtcttgtctcgggaggaagcaagcactcttcgagaagattgaagggagttcgagcacttgaagttttagtaagattcgattagaagatagaatacatcaggtttgcaatataaaaaataaaagggagtctatttatgcataagtactcaattactttgtatttctaacaatgacaatttatagtcaaattaaagtattttatttacattttctagtacttatgtaaataaaataaaatgattctgatttttttttccgatgtttagtaaatgacaaaataaaatatattcttttcgattattttatattttaaactaatttattttttatattaattattctattttaattaaacgtgcttactataaagggatttacattaaacttacccattattatttttctttttttcttttttaagaattgttattttctcagtgaatatataaatattaataatatttagaattttgtaataataaataggttaattagtattttttttccgaactttgacacatactaaatcatgtatcctaaactttttttgccgttaaaaattcctcctgaattattaagattgttaaatttaaggatttnnnnnnnnnttcattcaattttactgttttagtgatt

SEQ ID NO: 32185 - DNA, 1729 bp, Cannabis sativa
gagcccaatagtagacccaaatagaataatagacttggtccattatcgaaatcaagtcttccatatgacggacacatgactcgtccaagtgaagtagtcctctagcatagctcgtatctagaagactttagccaaagtgtttgaagaagtagtcaaataacatccgaacatccaactctatatcatacttattaattaccagatcgtatatatcagaacttaactttcaagatcttgttcacatattatatcttcccaatataaaaaaagaataattaagtatcaaacattaaatttctttattatctattctcaagaaactaaactccacacactcgtaaaatgacaccaaacatgtgtttggttttacattatcattcccaaaaattaaacccccacaataaacaaacacattataactagttatattttattgagcattgttattaggtactttaaggtgtctaacatcatatcgatgtgatatattatgagtagttaacagtttcttatattaattattaaattaaaatatgtgagacttaatataaaatctaagatgcttgtagtgcttggtaacttaagatgtccctttcttaatatttctcacctttttctaatagaaagttttttttattagaatatctctaattattctctctaaataatttttacttaaaatagggaaattgtctttaaaaatagctctaactataagaaaaggaaaaaaaataagccactacattacaatgaggaatggatatagttaagtattaaattattatctatgtgtttttttattggtaaatttaaattaatttctaaataaagaataaaaatttaataatctagaccaattagagactgtcacgtgaatattaacttaacacttaatgaccaagtagctacgtaagtttgagaaatataacttaatattatcatagccaactcaatggtaggacagtggggacctacgcttaaggcccctaccaagcccaaaaattctttaacaaaaaagtcttaaatttattttttacaaataccatgttttatattttaattattatttattaaaaaaaatatagctatttttttaaagaaatacctaatttatttgtttaagatattacatttaatattttatttaaataaaatacctaattatgttttcaaaatactacattatagatttttactacaatatataaaaaagctcaattagattttttggcccaaagcccctaattggcttgaaacgggtctgtgtattatgaccgtcaaaaattaaatttaagtatttatctacaaccggcagataatttaagtatttatgccacaagttattcaaaaattaataaatttaacaaattataaagataagagattttgcattgttaatctcatacaaaatgaaataataataataataactcgaatggatatgatatgtagaagatgccgacacgatttatatttataagacattttttaatagaatatttataaaaaataaatttgagagaaaagtctaaagttaaataaagtaatattccatttcaaaaaaataaaaaataaagtaatatattgtcatcatttatcaatataaataaacttttattatattattttatttggtttaatctcatttagtgactactttcactttagaaagactacattttttaatttaaatatttattttatgaagtattaaaaaattcaaaataat

SEQ ID NO: 32186 - DNA, 2329 bp, Cannabis sativa
gccagctgctttctttcattaacataggctattgttttaggaggacaatcagaaatcgcaatgtcaactaaaactctagcatattttatcatagttctactttgagtaaccttatccaccattataggtttgtctatggtactcacaagagcaattaggctgttttcccccagtattgtaacccaagtccattcaaacgcacccaaactgggactgatttcaccattttcgctgtatccatatcggttgtccaaggtcttagaatcactggtttcttatcaaagtgtataaccccagtttcaagaataagatccctagtttcttcatccctgaaactcaccagtgtgaatctcgaattcatcctagctatcttctcaattcccaagttcccccaaatcctcttgataaacccttcaaaaaccctgaaaggaggattagcccctaacacaatgcatactatcgaatttttccacaacaatgcctcagattcaacctcatccaaatctagcttagcaacaatttgatcccctattttcataggttcagtaaaatcaagtcgggtagatggagtacgaacctgattggctttgaatttactccatacatccctagctttggcgttaaaatcatctctctcagcttccttggcccagctcattggcttcaaaacgtcagtcttcgcagccggactctcatcgacgaaatcggcttccaggttctcacaagtgaagaaatacctcaagtacaggatgctcttcctctccggtttggatcgaacggagatcaggctcaactctctccatcgtatcaggcacctcattctctgttacagcagctacggtcttggtgggctttgaaaccacccgtttcttcttcgccatgagagaaaacagggagcttcacacgcctttttattagaaatataatagttgaaacttactatttttgactctttcttgtgcaactcataaagagctctctcaatggaaccagattctcctagcaaagaaaactggaaaataaaattgatacaggccactattagaaccatatcatgggaccataagacttaacatgtttcttgatataccaaaacttatagtcaaacttaataacccaaagacacgaccaagaagaatttattcaccaaaaaaaagtaaagagggcctatacttgcatatttacatatgttatgaagagtaataattatagtattgaatgtatacatacatactacttaaaaatataaacaaaagagacttcatgtattaatctccattaaatctagatttttttttaagagttcagtttacatcactttatgtaatagactatctgacaagaaccttagaccatgattcacaagtgtaattttttactaaaaatagctatgaaccatgacaaggcatagcagaacatcaacaacagcatgaccattgtcaaaaccacagtttgaacatatgaaattaataaatctataattatagccgaaatttcaaagcaataattgagtaactaataaaatttatatttgtgttatcagtcaagggaaagaataagctacctaaatgcaactctgacagtaaatacaaactgaactcaataaggcaacacttatttatgttgcatttatttatgctgcttaattaggcaacatttacaaagatgggaaatagcaggatggcaaatgaccaatagaggagtgatcagttctgaaactttctgatctttcaatatgggatgcttcataattcaaatgcaaatgccttttaccaaaaaaatatagacaataattaagaagaacttacaaaagctttaaatatagacatctcatacatacaacaccctggtcagaagagaactattttaaccaaaaagaaaaatctgcaggtatgtcacatacacactgcacaaggcacatacttaaacaccaaatatcagattgaaagcaataaggaatgtcggcaagaaattcaggacacatgtaatttgaagttccaaccacatgttcagaaagtaaaaccaagtacttagttccatatacaactaaagttttcatggacccaaacagatttattttaagttcaaatggtccaaagagcattcactatgaatttcagattcatggtactcaaaaagaaactgttaaggtttaaaattattaataaatagagctaagttttatatatataggacagtatttggcacacaattaccagtacattaaataaattgttgagaataaatatgtactacttatttatgtactacacgacttaaagggttgcatttatttatgtactaagaatgcttccataaaaattttaaa

SEQ ID NO: 32187 - DNA, 2427 bp, Cannabis sativa
taaaatttgtcgtaaatttgacatgttgtaacactactaatttgaacgtattatcgtgattttgtattaactatgtagttcgttgctaattaacatgtttattgaaaattgtgattatttaaaactttatttaaatactccttaaaattaaaagaatgtaacttatatattatcaggatcccgtattttaaacttctacaaaatatttgatacaaaaattgttgcctaacgacaatacaaaatatagcttgctttctcagagatcgcatgctctaggtctaactgccccgacatgtacaatcttcattcgctcgcactcactgctgctcagccttagctttatcattacatacacatgcaaacaatatttgtgagtccacagacttagtaagaaaagaataatcataaacataaatatatatatatacagaccgtaaccaggcgcccatatacctaatcacaatcagataactgggttaggaacgttctcgacaaagtatgactaacctcgaatccaccctgtactcagtactctagttgtcctgatgtggtagcatttaattcatactatctggaggcctagcatgtggcatatctgtacaactctatgtacacttcactgataccctgatatgctaatttgatggccactgatttgcctaacatatatttattggtacctcgttgcaactctatgtacaccttgctgatatcctgatatgttattctcattattctcatggcaactatggcaactaaggcaactaacaacatgtatgctaaacatgtatacatatattactaatcttacctcgtttccgaactcaggtgtgcctatcaacctgagtggaactgctactcgacgatttacaggcccctaagtcataatattcgtaaaactagtgagtgacatgctaaatccctttttagggacttaaaatcaaaactaaaagttttcttatcgatggataacctggcaatacctaaatatcataaaaacaggtgccctaaaatgccccaaccggaaaactggttctgtggggtctgttaggggaggaatcagtagacaggttcctacaggtccaaactgaactggccgaccagttcattgtaggaaccacaaaaaaccctctaaataactcaaatcatccttaacttaatctagcgcaaataacctcaaaatcacctctaaaaataggaacaataacaatttaaacttatagaaccctaactccataaatcatgcttagaacttagttttgaacttaagaaaacaaagagaagggggctttgatgtttaccttggattgaattactatgatcttgctagaataccctgaattgagctgaagaaaccttaacttgctgttggtttcttgataggtcgagagagagggttgaagaaagagagagtgtgttttgtgttttatttctaattttgttaaatgaaataaattaatatttatcttatatcaaacctatagaagaaatcagattaatctaacttaatccattccactaaaggacaaaagaaactatatggcgaaagaccatttgcccttacttacaccaaaaagcatccttgccacctaggggtatttcagtcaaacctaatacctcgaacattttcaatattcccaatgtatatctaatttgcctcgctattactaaatactaaatcataaaaaaatgtgactctatcggccaaacgtcgcgttccactgttaccgggcataaaatacgaaaaacatataatttcatatataacataaataacacacttagaattcaaatatatctccataaattcataaatcataactaaaagtctaattccaaattaaaccctaattatctgctaattctcatattaaaatgtagcgttctttacaattatccctctcttaaaaggattttgtcctcgaaatctaacctaaataactctagatattgagccctcatgtcttactccaactccgaggtggcttcctccaccttactgtttctccaaagtactttgaccgaggctatggccttattttgagaactttatcttttctattaaaaatttgaactggttttcttcgtgtgataaaactgggtgaagttctaagttttcataactcagcacatgaataggatccaacgtagtattatttccaacatcatagagacatgaaatacgttatggactgctaaaagtgctcgaggcatggctatacgataagctaccaatccaaccttttcgagaatctcgaatggccctgtaaacctaagatataacttgccctttttcccaaaacatttaatccccttcattggagacactcgtaggaatacatgatctcctacttgaaattctacatttctatgcttcaaatctgcataactcttttgcctattctgagaggcaagtattctggcctt

SEQ ID NO: 32188 - DNA, 1591 bp, Cannabis sativa
aacagctgctaaacacatgctatcaagccccactctaacatcacaattcagtttaatccaatcctaaggaggaggagaccagttctccttcaggctaagaatgggactagggaaaatagtagcatgtaaatttgcataagagaatcgaatagagtcaatacattgcatcaagttcaaggtaaggttactatggacctctttttatatatatattaactaaatttacttctaaataaaatttaatttaaatatacataagataagatggaaataagttaaaaaatactacttttttgtattcattaattaaaaatactctcttattatattttattaaaatatacctactttttttagtagattgctcattataccttcactctctacttaagtctagcatataatttacattaacttaagggatctaatggagacatcatctataaaagtaagtatatcttaaaggatataaaaatagagataaaaattaaaataaatacagtaaagtagttcctcctttctttttatgaatattgtatccaaattatccttacacacttatataactaatacataatttcaaatataatatatttgtattctttgtaaatagatgtgtaggtttgtggaaaaattttggtaaaattttaattagagaaaaataaaaattatcatgaagtaatataggtaaaattagtagaatgattaaaaaaaaaaaggtaaatataatagatttaaaaaaaaatagtaaaaattaaaaacattaaattaaaagagatatatagtgtaatcatcaaatttacatgagctgactttgatacgagcttaagcccacactaacttcacaaatacacttactttctaaagtgaggcacatctaatctaaatcaatccccaatgaaatttagtgaatttagacaaattattatttttagtaaatttttcacacattcaaatatttttatttattatatattttataaaaattatataaaaataacaaccaacaacaaaatacgccaaccacaccctttgttttggggtacaccctaaataactttaaatgcaaatttttagaccacacattaattaattttcatcctaaatttccctataattaatgcaattgcagacacaccacctaaaatgagttgtttcctattcttacttatcatctctatattgtattttcaaggttggcctcacattgtttggaccatcaaggaaaaaaaaaagatttattcaaagaaagtaggccaattttgaaaaataccataaaatatgcatatttctgcaaaagattttttttggggggtctatacggtcttaggcacaagattggtcagtctgtccaaaatcgatccttaattaatttggaaaaatttacaagtttgattattattttttcaaaaaaattattttatggaaaaattgaaaaatatgggaaagtcaaagaagggtaaccaagtacttttatggtaaccaaaaaggtagtcatttaacataaggaggtaaccaggtaccattctgtttttttctttttctatattttttttatctttgttctaaaaaaattcataaaataactttt

SEQ ID NO: 32189 - DNA, 3384 bp, Cannabis sativa
  modified_base (2093)..(2094): a, c, t, g, unknown or other
  modified_base (2144)..(2146): a, c, t, g, unknown or other
tctcctcggtaaagtcttaaatggaagccccccaattcggaagccctattccggaagctccaatctagaagctccattctggaagctcccccattccgaaaggtgaccaattccagaagctctccctatccgaaatctctcctatttcggaagctctcccattctggaaactcctactaggcaataagggctcaaaattttccaatttttcaggcccccaaaactagctccaaacctaaccaaaagctactaaacattccaaaactttattttgggatattctaaagataacccacaacccaaaagtgttaggtccttttttggcaatttatttgccaaaatattttttaattaatgtgcatttttattgagcatttaaattgttttcattacattgattttgtgcattttattgctcttttctatcttaggaaagaatcatttttcagctggacttttctttgtttggaatcttcttgtaagagaagaaattctcttatggaaagttttctacttttgggaaacttgactttccctttttctaattgatgatttcgatttttcctttattagaacaaatcaaattatctttatttggcaggtttgaagtccaaattcgtgatcttggttcaatttgaaaagtttcctttctaaacctgatcgcaaaccacgtcttcttcgccgtggacgatcagcaacgacacctccacctcctcgaacctcccttgtagctccctgaaaaccctaaggagctccagcaccgtcgccgccctcgacctcgctgtaggtcgccgcggactcgcaagagccagccgccgcttccactcctccttggaagacaattccaggatcgacctgcgcgtgggaacaatacgccacgtggaaatgacggcggcgacgaggaagagtaggtgctctaacggtcaaggcagtttgaacttggcgcttataccgcacatggcaccgttaaggatgaccccgtcctaggatcctggataacggagagaaatgagaagagcgatggcgccgtcgagggactcgacatagaggaaagccagaagcgaaggggagtggagggatcgaaacttgtcgaagaagtcgatgcaatcgtcgactatggggttgatgtttggaatgtgagggatgagaccgtcagagaacctatgccctggtgatcgatgacacaaacggcaaaggcattcttcctcgatagaacagccttaaccgagtagagatactcaatttctactggtgtggggcatccccagttcagaattttatacaagaccttcaaactatcaagaatcctgtaggagatgggagtcagctgaaatggggcaactccaaggtgatttatgtagtccttgaagtagtctcgaagaggaagtatggcccctgcactaatatgctcaaggctccaggcgcccataccactcgagccactggtactagtctcaccactagtccctggagtactgcttgaaaacacgcaggagggaagcaactgcactcaccctctcgtactgatctaacttggcatgattgcccaagttcaattccacaggtcttcagtatatcacctgtgtagcctgagatagatcgcaccttcgattctatcaactcagcttcaaaggtgactctggggtcctggggagtctttgatgtacgtggcttaggaggcattattttaaaatccaagtcacttggttcaaaagcaatcgtgatgttgggtaaaaataaaggctttgccacaggaataaaggacacgctcggaggttctagccaagcactctttctcacaagaatcgacgtttgccttcaaagatttcttgtaagaaacgcctgtaacgagtagcaatatcttcctggtgggttctcactacgtgttccctaaccctaggatcgttcaactctaatttggtagtgggttttgaaggattaggtttatacgggattgattttgtaggaaactcaaattctaaaacttttggacgataaattcttgaaccagagcgggacattgctgcaggcaaaaagcagttccaattcctggggagaattttatcaaacccaaaggtaatgagttggagatnntgaaacaacctacatatttcctgaaccctagtatggacctaaatacagtnnnaccctaaaaactaccaaaaccaaatgagataacaacgacacaaacaaactaagtagaaaattaacgcaatgtagcaaacatgtgaaggaagaaagcaacttactattttgagttagggcttagggcaatggctggttactccgtctgcaaatcttcaaacgtagcaaggatcgctttgagaagatgaagtcggaggaaacttgtagaaaaaatatcaaggacagagatggcatgcaagtcctcatacaaacttaatggtgattcttggcgaaaaagcttaagagtttctcaaactttctaaaatggaggaaataatgcaaaggtggttcctttttccttactttatactgatgatattggcttcgtcaaatcagagaaatgtttgatcgtacggatataattcaaagcgaaagtggaaaacatggtcatttaatgctgatgtacctcgaaaccgcacaatcgccaaaatcagaggacatgcgtcttttcaaaaagaggatcatgacaaaaataccctttgtacttattaaaaaactctgttcattaaaagataactttttaaggggtaattgttatacccgaaattcagcgagcacattagaagaagacacatgtcgagctaggaagaatggagaacttaaacacacgatcgtaattacacttgacgtggaataactcgttaaaagcataattaacagagtatgtttataacttggttgactgaacaatcttatgcgagataaaaaatatactaactgttgacttgtgtctcgatgagaaaccatgtcactgcaagtgtgcaagacgaggcattaacctcatcgcgtggaggagatataatgacaatagaaatacttagcatatagtacacgatatataaattaagtataagaagaggggtgaatcaaggtgatagatggcgaggcgtccatctcgctgtaagagggcatgcacgcgagaaagatcatctcgacaccaaaaactgtagttgtcagaattaaagtaaaagcaatattaacctcaggaagacatatgacaagctccagctcgccatcaaagttaaatcagctccattcccagggaggcatcccaatgggataagacttactatatatctataatacgcgatcattttagcccaataaaagcggtatattcacagctatgtgaaatttaaataaaaattgtatttacttagcgtgatttgtaatcaaatcccatgattctagggaatgatc

SEQ ID NO: 32190 - DNA, 3426 bp, Cannabis sativa
  modified_base (2153)..(2169): a, c, t, g, unknown or other
ataatttatcaaatgtgtcttataataaaattaattaaaaaatttaaaatattaattaaaaaatatttaaattagaatacatataaatatatttaattaaataaattcaaatttataattataaatatccatttttaagaaaaaataaatccataattataagtttaataatcgaacatataggatactttcaattgcttcatataataatcaaagatgtaagtatttcgattatcaaaatattttttctcacctagaatgtcttatttgattccgagtataaaagctgaagacattttagtgaaaaaatcgaagataaaaaactactttctagtagtctgtatatttcgtctttaattaaaaatttaaggtataataatatcaatattttcaaaataaaaaaaaaaaaaatatcaatatttgttaggtttcaaaaaaaaaacaaaacaaaatatttgttaacaaatctattccttcaattatttttattagttataatttgttttctcaatatacatttcttagtatttagtatttatcttcttcttactattattaatctcgcagaaactttaatatgatcaaattctaaagctacttacattgattgatttagattgaatatatatatatattaataaatttatatagttttttttttttttttttgagataatataaatcttgccaattgatcaatttataactaataaagcaaatcacgggtatatattggggttattaaagtcttaacatattaaattattaattctcttttaaaaaaaaagtcttaacatattaattagcagatcacaaaatctttgaatagccacgaggctaatggcttgataattaattaaaataattactctattacgactgttggaccatattttctcatcataagaaataaataggaaatttacaataaatcttaattttttcttaaattttacatttatactttaacaagtttattttttatttatatttttcatacttagtttttttttattattttttacttattaaagttttttttttttttttaaaaaaaattctcttctttataatttttttaactattctttttattattattattttaagttaattgctaattttttttttctttctttctctcctctatctctccctattttttttctcgaacttatttgttttatctctaatataaatatatataataaatgtatatttttatatctcatttttcatttttttaatactcattctctttcttatttcttacaaaaaaataaaaataaaaataagaacactccttctatatttttttatcttttacatgattaatgaaagtagtatattttttagatattttgtagtgtattcaaagttaatttatgaatgatttgcatacattaacaagattgatgtcttgttatttttctgttgatttatagttatctttttgttattttatagttatttcataattatttttatgttgttgtttaggtgtttaattatagttgtttaattttatgttgttctttaggtggtttataattgtttttacgtgttttttttttttttgtaaagttgttgtttagtttatgtgtattttttattgtgtatatttttcagtttattccaaacaatatttttgttgtatatatgtgtatttgttttgtaatttttatgttatttttagttgtttttagttgttttttatttaatagttatattttaactatcactaactcaaaaagaaataaaaagaaaaattaattgaaagaataaagttgtaacaataaattctataaaaaaaaaataatgtatagtctaaagataaattaagtaatcaaaattaagtaaattaggatatcaaaactaagttgtaacaaaatcataatgaggagttgatattattttgcaattaggatttttttttttttttgttactttgcagttatatttttattatggctaattaggatttttgcctcctaaactttgacatataccaaattatgcccctgaacttttaaggttgttaaaaatgccccctaaactattgagattgttgaatttaaggacttcttttcaattttcgtaaaaaattctaacatggatgaaagttcatagggcataatttagtacatgtcaannnnnnnnnnnnnnnnnttggtagatatcaaagtttgggagcatgatttagtacataaacaatatttgaaatagtaaaattgaatgaaattcgacaaaagtccttaaatttaacaattttaatagttcgggggtatttttaaagaccttaaaagttcaagggccataatttagtacatgtcaaagtttaggtttattattttatagttatttttatattttttgttaagttgttttagagttgtttaaattttattttattattgttatatacttttataattttaaaactttaaacacaatatttttataaaattagtgcaataaaaatgtaaaaaatcttgtagcttttttttaatttttttcttaattttattatatttttataagttgccctcatatataatcccgtatatatataatagtgacttttagctttattacctaatccaatatgtatatagacacagtagtagtagtagtgataccactaataaggcaacagtacagaccgttagatcagtttccaacggctcagattgaaacaaaagaagaatttagttaacaagccaagccctatataattcataattaggcaacgagaaaacgtaaacaaaaagaaaagtagtgtttttattatttataattatttgatatagttatggcttggcttgcaagtttggtttctaactgctatttatagaataaaatgatatttacacaatccagtaacctaacccaactttgtgtgatattgactccaaatctaccatataattaattaattggcaattagtacccacacaaattaattgaactgttgagatttaaactcgtggaaaatgcctcttactaattggtctaaatcaaatcaactaatttgttgtaataatattattattctaacaagatttagtataaacatgattcattgctgattattttaatatctgataagtagtaagttagctatgtatatatggtgtaaataaagagtaaattttcccttcatcaataagtttttaataataacaaacactgaagaaagtaaatcttctttgatagatatgatctctaatttatcatgtaaataccttcttgaaataaattttgtaagatattggtaattaattaagaatctttgatatgcttaaatcaaaataaaaccttaattctataaggctgcgtttggaaagctacaatgtaattggatttgtgtgtaattagagataattacacaatttgtcatgtttgtctgaccatgtaattacactg

SEQ ID NO: 32191 - DNA, 3568 bp, Cannabis sativa
  modified_base (2731)..(2756): a, c, t, g, unknown or other
  modified_base (3394)..(3395): a, c, t, g, unknown or other
acactatatatgtacatcaatgtacatatctatattttattttaaaatatttttatatctaatataaattaaaaaatctataaataaatatcattgagtacatcaaaaggagaaatacttatactaaaagcgcggctatattgcctagttatctaaatagatcagtcaatttttatattcagagttaaattcgtactttgctttttcaatttttttacaattaataaattatatgtatattttaaagctttaattatctttatataccttttgaataatattttaccgattatcatataaaaaattagaaaaattgccatgtatactgcattttttatttttttcttcacttttatatttttttttttatttttataaaaactatttgtattttgaggttatgctgtctattttgaggttatactatgtcaattttataaaaaaaaaaaattctattttgaggttatgctattccatttcaaggttatgttggatctatttttataaatgaataaaaaatcaattataaaagtataaatgaaaaaatcttaaaaaaaatttaacatgaatttgaatacttacttataaatactcaaatttttataacacattataaattaattaatatataatcttaattttttatattttaatagttttaattatagaattataatattcagtattatatttaaagtattattattttaatttatttataattaataaactcatatcttattatttttatttaatatattataagatttttaatatggcgtgttgtgctttataggcttgtcgtgtgtcgtattttttaggttagtctattcatgcttacgtatcgtgcatttcgtacttctcatatcgtatcatgcttaagaatatattttttgtgttgtgtcgtgtcaatttatactatcgtgtcgtattgtgtctaggctcatatttttttgtgcctagtcgtattcgtatcttttaagctcgtaccaatttcatatcgtgtcaaaaagtccgacttgtatttacaaaaccaaacagtaataacagtacatacttgtatctactagctattaatttatatgtattgttatacccgaaatttggctagcatatcagaggatgacacatgtcaagctaggtaaaataagaactcagacaggtaatcataattacacttgaaatggaataactcgttaaaagcataattaacagagtatgtttacaactctactgactgaacattcttatgcgagataaaaatatataaattgttgccttgtgcttcgatgagaaactatgtaacttcaggtgtacaaggcgatgcactaacctcgttacgtggaggagatataatgacaatggagtcacttagcgtataatatactgtatacaaactaagtataacagatgggtgaaccaaagggagagatagcgaggcgtccatctcttcgaaggaaggcatgcacgcgaaaaagatcatctcgtcaccagaaactgcagttgtcagaattaaagtaaaagcattatcaaccttggaaagacatatgacgagctccagctcgcccttaagaataactcgactctattcccagcgaggcattccaatacgataaggcttataatatatttaatacacattcactgtaacctagtaaaagtgggatattcacagctctgtgaaatttaaataaaaactacatttacttaatgtaatatgtaatcagatcccatgattctaggggataatcgttgtaaaaagattacagacaactttgtaattaactgcctactatgtgattataaatagtggcaagtaagatcagaaaggggaggaaaaatcatacaaaaaagtccctaaaaagattaccccgagttaagtatacttaactccaaggtaagctcatggcaagttaacaaaaagtagatgcttgcttcttcatcgttcctacttatatttcttgttttcatcctttcgatatttaaatctaatttcctaaattcttagctaataataattaatcaaagatcatcccttgatctcaaagcttcgtatctgtgttaggtagaaatcctaaaattctccttttaacacacctagaaatacctcaagtatattctttgcttcattgataatcccttggtatgaactaccactccaacttgtagtgagtctctcgtcgatggtgttgattcattaatatctaagactcttatattcttttcctgttattaccacaaaggttttactccatgattcgtacgctactattgcttcctagcaatcatcactgtcttcatacttggctaatcattctaaaactcattttatccttaaatatgtagtccattgtttaataaataacctactttgtgacccaacattcaccaatcactcgaatacatatccattaaattgcatctcaatttataagtctttcccccaatctgggtgagtatgcctttccatcattgcttaataaggtaatcatttcccataatctcaatagtctccttatataccagattgaccatctggtcaaatataaaagtattttccatcattaccgtatcaccatatataatccaggtaatcttccttactttagtgataccactactccccctgatattcttttaaacattaccctagtaatgtccccgctttaaacctaaattgggccccttacacccacagaataatgactcttatacaagagtgcatcacttnnnnnnnnnnnnnnnnnnnnnnnnnnccctacagaccgatccaagtgttttcaatgtgctctattctaactcgcacacttcatggggaaacttcttaaatgtaatcaccccaagtcaaggacacttaactgtgcagttccttcatgatgggctaccaaaacagaatactttttgctaatataggtagtcccaaataattcattcaagtcctcaacaccatgtaatctcgtgcatacataatctcaaaatcactacatgcagcctttccccaggcaacgtggattatatagctcctggtctttccttcgcggatcacgggactctaattgtcacagcttgactcatgccctctggtagtgaatacatccactcacataattgtcgcttttaattcacctggggtttcgaacaatactcataatttgttccacttatactaacactagatcactttatattaaaagattctgttctccaaatcaattagatggatactcccattatctactcagaccctatattccacttgggaatatcaacaaatttaactcatattgccatttttctaatctgtctaccctgtcagatgagttatcactaaataacatacacgcactgccccttcagatattttgatatcccctcattgagtgtacaatgtttnntatcgatatcaattgaaacaacaactataatcttacccataaaattctaacttgagtcagtcgaaggaccaatacttaggtccccttgaatcataattagcacttttcttctttaacatcagtctttcttaactgtaggcaggttcttttcagatgacccactatcccacaat

SEQ ID NO: 32192 - DNA, 1154 bp, Cannabis sativa
gaaacttatcccccaaaaagtgatgtggtatatgcctttgattccgcgacttaaacgattatatcgtagtgcagaacattctgaaaattaattttggcatgagaccaagagagtgaaagatggaaaactcagacatcctgcagattcccaagcttggaaaaaagtaaactacataaatcctgaatttaaatttgaaacaagacatattcgtctcaatctgtctgcagatggagtaaatccacatagatctctaagtagtcatcatagttcatggcatgtcttccttgttatgtacaatcttcctctctggtgatgaaaaggaaatttaatatgctttctttaatgacatcatgcccgcaataactcgaagataatatcaatatatatttggaaccattgattgacgatttaatagaattatatgagaatggtgttcatgcctatgatcattttaaaaaataattctttaatatgaaagcagtgttattatggactgttaggaattttctagcttacaataatttattaggcttaagacaaaaggttacaaaggttgtccgatttactgcactaacacatgggctcgtcgcttggcaaatggacacaaggtatgttatatgggccatagacagtactacttgcctacaagagccatcactatctatttacaagcactactacaaaatagactttttgtgtcggttccagggatattttttttttaaaaaaaaactgacattaacgatcacccaaactctttggtctcagtttataactgagacatataatgactttaagtgtcagttagtagactgacactaaaagtacaaccgagacaaaaaaagttaaaaaaaaatatataaatacaaattgagtataagtgtttgtttataaccaagaccaaaggatctttggtctcggttataaactgagacttaagggtatgacaaaaaaaataaataaataagaaaagtttcagtaattaaaaaaattaaaaagtaaaataaaaaagggtataaaaagaatagtatacccaaaactaaaaaccctaacataaactcttctcttctcactctctctctaataccctctctctcttgctccatcctcacacggtgccggagaacctagaacctaggtggttcttctcagcc

SEQ ID NO: 32193 - DNA, 2026 bp, Cannabis sativa
attaattattttaagaaaaaagttgattataattaattatttctaaaaaaagaatttttacctattgaaaacgtgctattacaggtcaaagaaaaatgtaaccatgatggttacaataaaatgtaacaattgaatagtcacctatatatattttatttttatatatgattaaaactaaaatattgcacttatatgatacatatatgtatttttttaaagcataatgtccaaaataaataattattgccgtaaatttttctcgggtatatgttgaatttttaccaacctacgctgatagagaattattgctcttgtttgattttttttttttgtatatatatagtatctacacaatatatatatttatgtttgaatttttttgtatctatatagtatgtacacaatatatatatatatgtatacatttatgatttttgtgaagtcctttttttggcaagttagatgccaaattattttttttatgatgagattgctttgtgtttccaattcaattttctcacctttattattcggttttattgctcttttctatgttaggaaagattgcaattttcaactggactttgcttgtatggaaacttcttgtaagagaagcaattctcttatagaaagttgatttttaaaggaaactttgattattgcctttttccttattaaattagattgtttctttatacaatcagattatacaaactgtttatgataggtatcaagacccaatacaagatcggacctgtttttggaaagtttccttttctggtctaatttgttgcgtcagaatccgtttctgatgctatagatcaagtttatcttaggaaagttttgtacagctgtagattcgatcttgtggctgtctctagggtttctatattctataaataaaacctagagagtagccattcagatcagctcttctagtattcattttctgcatttttcttatttgtgacaagagagtttttgttttgtgagaacctagttgttcatctaggttctagtgtttttcatataagttcttagtctgtcttagagtttgttagaacgacttcactgaacaagagagtggtcttcgggagaagacttgttcaagccttacatcaggaggaagtaagcacgcatacttcaaagacgaagggagttcgctgtttggtggtgtttcaaaagtcagattcataaagtgcattacagaggattgaggcaataatttagagggagccgaaacttgtttaagtcaattgtctttgtaattgttgatattttattaattgatttcattctctgggcgtggccccgtggactaggagtgttcaaaagaacactgataccacgtacaaatctcttgtgtcaagtgatttaattttctgtaattattttttattctgtctgttctgttttgtcgctgcaaaactggtctctgcattatctgaagtacattctgcttcgcaaacgtttacagtcttatattttcgtatatattattgacattcgcaaaaactgggtttttcaattctttttttttacaagaggcaacatgattaggaaatataaagataataaattcacaattaggttcaattctaacaaaaagtatccctctagtaattatcatattttcaaatttcaaaaatttctactttaccaattcagaagctcaacatatgttcaaaaagtcattttctcaattctcacaaaaaatgaaaccttttaacttaagattttttttaattaaatgtgttaaaaacaatctaatcatatatttagtttctgcaatttttattggaattactatctaagtaactgttatcccaatttttgcactctgacatggcatcacacgatggtgacacgtggaatcgactcttggtacctgctcccaagacataggccgaacagggcacctcatacatttgttcggacaaagtcctctagactgagcagtgatatggcaagttgtccaaatcccacgattagtgtattccgtatttaccatgcaatctttctgctt

SEQ ID NO: 32194 - DNA, 1261 bp, Cannabis sativa
aattgatcgaagcacagaaaaattatgcctcattccttcagcagaaagctaaatcggcttggattcaggatggagatgcaaacacagctttctttcattctagtatcaagcagagattgaggcagaatagaattatttctttagagctggaggatggatctagaactcatgacccgaatcatattacagcagcctttcttgagttttataaaaggttgcttggatcaaaggtggacaatagaaggaaggtgcatccaggggttcttgcaaaaggtcctaggctctctgaggagcagaaaaacttgttgcttcaggaattttctaaagaagaagtgaaagcagctgtctttagtattcctggaaataaatcgcccggaccggatggcttctcgagctttttctatcaggataattgggactacattggagaggaggtttctaatgctgtgctgtcattcttggagtcaggtaatatattaaaagagataaattctacaattattactttgattcctaagatcaaatgccccaataatgttaaggattttagaccaatagcttgttgcaatgttatttataagattgcaaccaagcttttgagttctagaattcgaaacatcttacctcaaataatctctccttcccaaggaggttttattaagggaagatatattgggcataatatcatgatttgtcaggacttggttagacattatgaaaggaaggcaaataaaccaagttgtatgataaaattagacctccagaaggcgtatgacactgttgaatgggactttcttgaagaaatgcttgttggacttgattttcccttctcatttgtgcagcttattatgcaatgtgttagaactcctaaattctctcttatgttcaatggatctttacatggattctttgaatctaagagaggacttaggcaaggagatcctatgtcacctcttttgtttgttctaggcatggaatatttgtctagattgatgaagaagattggggagaagagtgactttaaatttcataatggctgctcaaaaatcaaacttaatcacctagcttttgcggatgatgtgctattattttgtaatggagacatgaggagtatcaactatatgctacaggcattgaagctattctcaagaacatctggtttatgcccgaatgcttccaaaacggcttgctactgtagtaatatgtctcaaagagaagtccaacaattgctggctgtttcgggcttccaaaagcaggtatt

SEQ ID NO: 32195 - DNA, 1392 bp, Cannabis sativa
tcccttggttcccacgaaatcgcttgctttgtcccgagccaccacatgccgaggtaacttttcttttctgatcagtggtggaatcaccaccatccctaccttaaacaggagaaggaagagtgggggtcccaccaacactcggagtgacacggggctcctgaagaaacttaattaaaccctcagctccaagagccttttcagctatctctgcatatgatgttgcctcattcgtagtaatcaccagatcatgtctaatttttacattcaggcctgccagatatttctttttcttgctgaagtccataggcacaatacccgaggctagcttggctagacgaccaaactttgttgtgtactcagttactgacataccctcagtttgcacaaactcagtgaattctttctgcttagcactgcaaactgcttcattataatatttgacattgaatagatctctaaactcttcccaagtcataacagtgacatctcgggtgagggacactaattcccaccacacgagagcgtctccctggaactgaaaagtggcgcaggttacccgatcatttctaacgactcccatgaatttaggaattctttctatcaaaggtgagccccattgctcacaacttcacattacatctggacctcccaagaacactggaggtacttgcttatgaaacctctcatataacggatgcatacgattgctagcaacaggttattctgctggcaccgcaggaactacaacggtctgagcttgtggtggagacactacaagaggaccctactaccttagtcttagaatttctttatcttgctggcagatacgatcttgcatttctgcaaacctttgctccaaaatcggaggagcttgttgtggattcacatgttgaccaccctgaacactgccactacctcggtcgcaaccacaaggattttggggaaattggatttccctgactgcctctggtctcgaccctattaccctgactccttgtatttcgctgggcgtccatttattaggacttagcctgcgaacccataagccaggtaggtcagacagcaatcataaaaacttagcaccgctcttatggattttaaggccaggcattttaaaatagataaccataatctaatatgcttcctaacatactttggtaatcaaatataatactaaacaagtacgagcttactgaaccgtgagccgaactttctctgatgatgattgtacatgtcttggcgagctttggtagaaaaacctagcagctgtgataccaaaattgtaacgccttaatgctaaggcacgttactgtgatttttaaattacagtattatctttggtaatcaaaaaactttctcgaaaatcgtgtcaaattaaaagttttatattaa

SEQ ID NO: 32196 - DNA, 2341 bp, Cannabis sativa
  modified_base (1910)..(1926): a, c, t, g, unknown or other
tgacattatttatttttgtaaattttgtaaaagtttgtaaaagttaaccaaaaccaaaatttccaaaatttcagtatttttgtaagtttccctaaatttttggcactttattttgtttaaatgaaataatgtgtctttttcttattttaccacctatctcatgtaattatttaaatattaattttattttaataattataaatgattattaaataaaatataatttaaatatatttattaattagacccacaaagtgtactaattaacaaataaaccccttatttctcttttcttttcaaaattgcccaaacatagtaaaaattctcaaataagatctatttttgaattctaattgacttattaaattaattagttgagtctacaagataatattattcccaaacaatgtgaggaccatgagcctatgtaaccaagctcctaataagtaattcaaaatttatcgagtaaatatcttatcttattaattcctcatgactccactatagattcataaatgcactcttaattacatagaacattctatgtaccaaatatagatactcaatggattattcattgtttcaatcacaacaatcattgatcctttatagacgattgacatcgagtaggaacaaaatcactattttacccttcaatgtattttatccttaaaacacctagctaattgtaaatgatattttgaaaaactaatataattattgaaatgatcgctctatcatttatcaagttaagccaaactctaaggaaccatcattttacttctaataggcatataagctatagatgtccatatctatgattaacactctcactcaattgcactaccgagttttcaagatgtaagtatcatgcctacatgtaagttgtaaagaataagtcaaagaactcatgtaatatatttaagttagagcttaatcatctcaggattgagataaaatgatctatgatctactgaatgatattgacttagaaaagataaaactgtaagtttatgatatcttttccactatcaatatcagtcgactgatgtatagctaatacatctgatactagtttactttatgttatccaaatttctacatagagtgacgtagtatctatttgggtgacacgtggaacaaattctatgacatggacagaagattctacttgtaatgaactgtacatggagatttgatactcaaagttagcagaaggtgtaacatccgagtagggtgtgcgataacattcgaccagcttccaacaagtgggcagctcgcatgagcttaccagagaatgcaagttggacattttcagagatatatcccatatatctttgtgcttacgaaacacgagaatatccttaatttaatgggatagatacgcagtaccaaggaagaaaggcaacttgcttagttttcttatttttcttattagtgaagtcatctgactattcaaggatagaaaattaacatagaaaacaaacgagaagaatcataagaaagagttataaattcaagagtgcatgactcaaagatcattgtaagagctttcgagagagatcaaagactccttggttctcatctcacaagtcaatacaaattaaaggggagtaggctattatcattattaagagatcgaacctcttatgattaagttcaggaaaaagttttaacagccataaaagttcaggagatataattttgtacgtatcaaagtttggggaaaaaaaatactaattagcgttatttttattattattatgtagtggaaaatgaggtaaatgcatgattggttgggtatataacgatatccaaacgacatttcccgcttcctcaaaccagataacgttctcaactccatttccatctccataccaaaactcaacaacaagaagaagaagaagaannnnnnnnnnnnnnnnnagaagaagaagaagaagaagaatgcctaactactcccacccccacatttgccactgcctcacccgcttatccactctccctcccaactctccgctcaccatctccccccaccgtccccgcccaaagactgcccccgactttgtcgacgccgtctttgctctcgctcaagctcttctcaccctcggtatcggttccggtgacgtcatcgccgtcgcagctttgaacaggtaagaaattaagcatctttattctggtccggagtggtaactggtagcagaaatggttgattgatttgaggttttatttttcatcagtgagttgtatttggaatggtttctggctatcgcttttgtgggtggaatagttgctcctctcaattaccgttgggtgagtcttgatattgttactgttatgc

SEQ ID NO: 32197 - DNA, 1896 bp, Cannabis sativa
agcaaatgtacatattcgacaagttttcaggacctttaaaactatggttgctttgataccaagttgtaatgccctaatttatagggactccacgtatgtgattttatagactagtttagtaataatagattaattaattattaaaaaatttaccaaaataaaaccctagtaaaagacattataacaacactaaaactttgttccgaggaaccatgctataaaagttttatcaaaaaggacgatatacaacaacaaatcaaatacacaatagatacaaccaaaataactcttggaaacttggcacataggtcggtagggtcaataagtacattcgtcggagaagaccatcgccccatgactgctctaacttgtaaggacagcatttttaatatggattagtaaaggcaattaacgctaattattgatatttttataattatttgtcaatttatttaattgtggttcctattattaaaagtgggcattaaagttataatttctcaatttcagagattttattaaactctacatgtattatttgtataatatttgaattatgctatttttgtaatttttgctcggcgacaacgtaaaatgcgatggatgactattttaatcacatgggtgagtctagaaccttattcttagtgggatatttatttgagaaaaatagaataccgggtttggacggggttatggtttttgactattttacccctagaccttaaattgcccaagtttaagctaaagggctatttttgtcattctgatgagaggggtgtggtggtttcttagggaagtgacacccagcaaaatttaatttcagcaaggatttaatttaccaagctttattccatttaatcacattagattaaagacaaaaaaaaaatcaagaacactctctctttcccttctctatcttcaaacccagcaagaatcaagaagaattgcagaagaatttctcatttcagcaagggacttaagtaggattcaagctaaggtaaccctagaacctatagtcttgtatttttgaagttttgagtttggttaattatgtgattttgagatataggggctgttagggtaaggttgtgttgtaattcgaattctaagcgtaaattgagttaattttaaattactgctgctgtatttgatgattgttgtggtggatgatcaagtttgagtttgaaaactcaaacttgagtcatcaatggcatattttgattcagagtgttttattagtttctattgcttgaaatatatagtataagctctttataggtgttctggaaggtttggtagcttttggacatgttttgagcaggttatgaattgtttggggaaacctggtgtaaacaggttgaccgatttgccaggacctgtaaaaccggttaatcgattttggcagatttcctgaacaactcatttcctcgattcgtgtctatttcaatgccttatttaggtcattccctgtttcctaagatattgtagttcctattagtaattacagaaccttaagttgtaggtttgggtttcccagattagggttttgacgtgtgatttacctagttttaatatgtgattagggcatccatccagcacgagacttttcgttcaggtcagccaactcacttgaatttggaaaagaggtaagaacaacgtataatatgtgatatatatatatatgtaaatgtatgtatgtgttaaatgtatatgcatgcttgttgtgattcattcactaccaacacttgtacggtagcagtaaagagtgcattggtaaagtgcacgatgtctggggagtacattatggtgttaccaacacaagtacaggaaggtactgttgggttttgtgccctaaataaaaacctttagaatctaattagttatcaatataag

SEQ ID NO: 32198 - DNA, 1704 bp, Cannabis sativa
taggggacccccattccctcttttcacattagggtttggtttgggggctaactgctggattttctttttcaccttcaggaaatgtctacctctatgtctggagccaaatcttcccgaaaggggtcgattacgttggccaccctggaagaagtgatgatgggccctgtcgtccaggagaaatacacgtgtcgatccaacggttgggaggcgaatgagcttcgctcaaccttgacctgcgctcatcagttggagaagatcgtgactgtggctggtatcaagccatccgcttctggattttttcaccgcttggctcgagatgaagagacgcccaatcacaactatggtggtttcggagcttaaagccagatccaccttatgtctggagccatgcttccacttcaagattacttcataaattttttattttttgttggcctcgcgccttaccaacttattcctcaagcataccgactgctttcaggcttgtttattttctatgtagcccgaggctgggcttcacctagctcggccaaaatcttgtatttttatgaacctttttccatccccaacaagggggataaacttaaagatggttttttcacacttcgggcccatcctgctaatgagggtccggtcccttataattttcaaaagaatgtcaaggagtatcgtcaccgatttttcttttcttccggtttccaagtcatggaacgcccgaaactgctgatggagtgggtcaggattccttcgatgcaccctaccgctcctacccaactcttccttcagcacgccaaggtcttttccacgtatgacaaggacgatcttaatgtgggggacttagtcacaacactgcactgcaggaaggctaagctcatcacagagatccaatcggtggacttcaacctatccaaggttcttttcccaatattcgcacctcggatgctgaaaaggcacttcgggcgaacattatcgcctcagcggaggaccggtaccagaagtatctctttaggagggaagagaagttagcttatatcaaggctcaagccgctgtcgggagggctctccgggttgtagctagtaaagagcaggtgtcgtcccggcctaagctactgctcccagttcccaacaatggggctcctgacgccagcactttcggatccggtaagtctcagcattgtcctgacccctgttcgtgctgatgaagagagacaacagctccggattgccaagcacaactatgttatgactgaattcactctaaagggcctcaaatatttatttgcctgttcattacttatgcttcacaaggatggggcgagccatcctcgcacgacgccaactggctttttgatctgaaatcaacccccaagcaaagcaggctggggtatttttacttttcccagatcgaggagaggtggttgacgggcactgtggactccgacattagcaagatagggaactttgtggatgagtactacttcatccagggcatggataccgtccacactcggttccagtagattccctcatattttcgccctgccttcacattggggctcagggagaaggcacaaaaaattctacaactgtcggatactgctcggaacatcacccttctggccactgaggccaattatgtcgagtacaaactcttcctagaggattttgtgccgaggcctgtgaagaagatgttgggttttatgc

SEQ ID NO: 32199 - DNA, 1881 bp, Cannabis sativa
attacgtcccttcttcaaatcaccgagccacgaacccgcaaaaagggatgtgtgcttggtcagttgcccatactaagctaggggcaatgttgcctttacactcgtatttcaagaaggtggcggattatttttgcctttgtccgacccagttcactcccaagggcatcaagtatttgtctgccctgttcatcctatacgccattcaaaaatggggtgcgccgtctccgcacgaggtcagttggttttttaacctgaagtctaccccaagcaaagcaggttggggtacttctacttctctcagccagatttcaagtggttgataggcacagtggacaaggtcgttagcaagctcaggggttttgttgacgagtattatttcgtggaaggcatggacaccacctatactcagtttcaacagatcccaatataaaaccgtccaccccttacactgactctcagggacacaacccaaaggattctccaactgccggatgttgctcggaatatcactttgttgacctcggaggccaactttgtggagtacgggcttcatccagcagacattatacctcagcctgtgaaggggagaaagaaaaagtccactgttggccgggctgagggagctgagcaagagaaggagctcattcaactcaagcgtgaggctaagttgaagggtgatgtaggagccaagcttaggaatattctgagcaagagaaggagtttattcaacttaagcgtgaggctaagttgaagggtggagctggagccaaacaatatgctcaagaatattctgagcaagagaatggggctcaggaatattcagagctggagaggccactcaaacagaagaaaactctctcgaccaagcaaaggcccatcgaacatacaatccagatcagagagcccagtgtaccttctcggccatccacccttatagaaggaaaggggaaagccatcctagaggagcaggaagattcgtcagatgaagattccacgtttgtgcttgttcgggcaaatgctcctaccagtgtgcagagtactccatcttgcatttaactttcttgattatcatgccttcatattacttatgttttttttctgactatgttatttttatttcgtctagaaatgtctcagaaaatgattggggctttgaagaagagagtggggggaagctcgagcttgtcccttccggcgaagaagtcaaaaggtgttgagaccccgtccagagagaaggcacaagctgaagtggtcattgacctctctgaagaacaaactgtcgttaaccctcctgcctcaaaagtgactaagtccaaagattctcgaggaggtagttcggacagacctgaataggcgaagggtggatctgagctgatcaaaagaaaatctgaacaggttaaggcccctgcctcacctcttgtactgcaccaggagactaaaaaaggtagaggtatgctcacccactatgtgattcggtcggtccctgaggtgaacgagcagcttgctggggcagacaatgacttgtcctgagagctggtcatgggaggagttttgaaagagctttgacgggtaagtcttttctaccatttccctttcacttctccttaattagttcagattttaatgtcttctttctgcacagactggtctgaagatggcctatgcctattcccgagctaagtcaggtgctgctaagaaccttgccatttgcaacacaatgcaaacggaagtggacttggccaagaaggacactgaggaagcccgtgttcaacttggggctgtgcggataaagctaggagaggttaataagaagctccttgctgttgagaccaaagtggccgaactgaacaaagatctgcaggacatgccatccaccgagca

SEQ ID NO: 32200 - DNA, 1564 bp, Cannabis sativa
aaagtgttttagtgggccaacccaataactacattttggagaaactatgaaccattcacttttttaaatggtataacccaaccctacttactataatgatataagggttaggttcattcagttgtgattaatattttttagctttaatatttatgtatgttatgaaaaaatgataaaattcaaatgtactataaaatttaaataaaaaaaattatggatcattgataagatattaagaagtaaaaaactatgaaaatctatgaaaatgataatattattagtactcatgcattctaaaaatagacaaaaacgcatgcgtcacaagaacatcataaatatatttaaattaaaacttaacattcaatcattcatactcagccatgaaaatagaaataggatattaaagttctccatagtgaaatcaaagtcttccacaataggaataaagttctaaagatttgatggaaaaaaagttcaagacataaattaaactagcttcatccactccagaagatgacagaactacacccaaatgtaacaaaaaaaattaataaataagtaatttatacacaataaaaaaaataaaaataaactacaactaatatatatttatatacctcacaattccttaatcaacaaccacagtttttattttcttattctcctttgatgttctgtttcctttctctaaattatctaaaattaaaaagagaaacttataaaaatataattgtaaataaaaaatgaaagaaatagagtaatatatttaccttcttcaagaaagtcataagcttatatttcatccaagtattccttaacttgaaagccttcatgtgatgcctttaaccaattctaagtgcaaattagagcatccaccatttttggactcaaagaacttctaaataagtctaaaatgtgaccacttgtactaaaagcatattcagatgccatagtagaaataggaatagcaaggacatctcttgcaatcaatgacaaaatattgtatctcttagcattatcattccaccatataagaatatcaaatgaagaagtcattggattaacaacttcgtctcccaaatacgtatcattcttctcattcaaaaaattcacctcttcttgttgcaaatataaagttagtaagtttcttttttgaattttcttgatctcactctttgctggtgatgcactactatttttatttacagcctcagtctcacctttgttttttatactatagcaagcatacaaacgatgaagggtttgctcaactttgagcataatctttgtaacagtttcagtataataaacactctcaaaacaatatttaagatacttcaacttatacctaggatcaagcacaacagcaacaaacaacataacattgatattttctacatccccccattatttgtcatacttttttttcatactggaagccataacagataatagatgttcaacacttgaagccaaataagataattgtgtgtgaatttcacaaatttcatgataaaatgtgtttgatgaaacatacaatgtaccgctaaactttagtgtgact

SEQ ID NO: 32201 - DNA, 1631 bp, Cannabis sativa
  modified_base (1538)..(1552): a, c, t, g, unknown or other
tgattttgcttttcacccgagatgtaagagcttgaaacttaaccatttatgttttacagataacttgcttctcttttgcaagggtgatttcaagtctactctcctactacttagaggctttcagttattttcgaacacatatgggcttaaagctaatgaagggaaatttgttgtttacgaagcaggtttggactccctttctttggataggattattgatatgtctagttttaaaaatggctcttaaccttttaaatatcttggaattgcaattagctcaaaaagaatttctaaagcagattgtgaaggtttagtggagaaaatgacaaccaaaatcaaaacttagagttcgaggaacctttcttaagcaggaagaatggttctcatcaactctatcttgttgtgtaacacttattggtcccaaattgttattttatcaaaagcagtaattcaaaagattacacaaatttgtcgtgcttatctttggaaatgagtgggcatgagcaatggaaatggaaaagttgcatgggatgatctttgtaaacctaagaaagatggtggcttgggtttcaaagatatagttttatggaatctatgtgctattggtaaacatgtgtggctatttgacaatttttgagtaaaatgggttaatgaggtgtatctcacaaattaagattggtgggactaccaaatccctttagaggctagttggtattgaaaaagaatagttcaaaccaaggaaataataaaagaagtcttctcccaaaaagactttagcaattatcagttttccatagctaatatgtacgccaagatacctcatgaaagtgttggtagatggcgttatgatggcatttgggatagattttgcactcctaaacacaggttcataagttggctagccttgaaaaaccgtttgtctaccttggacagacttagtcgatttaatcatgcaacttttccttgtgtttgttgtgtggaagtggagtggagagtcattctcacctttttttctaattgtatttacatcagtttgttgattcatcaagtgtggcattggattggtattactagtcgaaaaaagagctccatgatgtcctaaagtagattcagatggcaaaagtttctagaggcaaaagaaagattcttttgagtgtcattacagcaacaatttatttcacttggcatgctagaaacaaggtgctttgagagcaaaaactttctattgttaacgccacttttaattgtattgctaatagtgtttgtgctagagtgaactctttgaaagctaagaacttgagtaaaatagatagagagcgggtggaagctttaacaaaaactttgtaagtaacattatcttgtaagtgttgttggtgagctcaaaaaaaaaattaggaacacttgagataataataattgagctgataaaatgtttattatttatatataatttgtataatatattaacacttgcgtgtggcattgttggaggggatacacacgcagacccagtatttaaggaggcgtttggttgggannnnnnnnnnnnnnngaataggaatgggaatgggaataggaataggaatggaatagaataaaatttaaaatggataaaaaaaattgataaaaaa

SEQ ID NO: 32202 - DNA, 1875 bp, Cannabis sativa
attttcagaaggcttagtgatttgtcctactactgaaatggttcttgaaagttactcggatgcagattgggttagttgtattgatgatcgacactctacaggtggatatgttattttcttaggaaggaatctgatatcatggtctgctaaaaagcagcaagtcgttgctcgttctagtactgaaagcgaattcagagcattagctaacactgctgttgaactcaaataaataacatctttattatctaagcttaaagttcaactgaatcgatgtcttataatatgggttgataagcaaagtgctactgctcttgcggctaatcctgtgttttatgcccattcgaagcacgttgagattgatttacaatttgttcgagatcaaattgtagaacaaaagttagcagttcgttttgtcccatccattgatcaagtggcagacatacttacaaagtccttgtctacggagaaatttagctactttaagtccaaacttcatgtggttgtctcattgtttcgtctaagaggggatattaacacctaatctcattctgtattaagtttttaattgtttattgttaaggtagttagttagttgattttccttttcttattttctattatgtaaccaaactctctatctataaataaaggctttgctctgattgatcaattagcatttttcatactctattctttgttcttttggtcttgtatttctacaaaacatacgatatatgtttcgttaaaaagtaataaaaagataaaaagtacaattgcaaatatacaaaattggtttgttagtggggggtcctttggggtttcagaggttggtcaactcgttgtagagtctgtctgggtcgtcgacatatatatacatacagagagagatgaattggggatggaggtttcacggtgcagggaatccgtacttgaaatggctagagatggtgacaccaggtttgatagagggagtgttataccgaaagttgaataaattgaaacaagttaccgaatgaagtttctgcctgagttgcagactatatcggtttctttgagatgtttcgtggctctacccaaagtgtgcacgacaagtctatcaaccacgacgtctctagaataaaacaaccaccatatacgaatcgtcctgcaccgaacgatatcgctacataacactccaaaaattgctctgagaaaaatcataaagaaaaatagattatttttgtgtaaggttgtattttcccgttgttcagatataacttatataaagaagttgatgagaaaataaaacggtaagaaacgtaaactagatcatagttgtagcattgattcatagcagagaaatgtaaattattgaccggtcgattttactgcttcatttaattaaagttaaaataataataatttataaataaaaaatatttattttattaatttttttttttttggtaaaaattaaagtgacaccacatcgatctgcctactagctcagcacgtacggtcggacgacggtggtgcgcgagtgtatggtggtctagtgtgagtcctcaccaggcgcacaaaactaagttacccttacaacccaaatccaaatcttatatttgcagtgtttctatcctatatagaattcgttgcaatatcacacattttactttgttttttttttttggtaaaattcaactaaagtacaaacagggagccgacaaggaaaatggtatttataagaaagagagagtgttctttctaattagccataacagtacaatgtaacaatgatataagaaaatttgagatataatctataacctcaataaaaatgagaatgttcatggggctttttactatggaatcactaaaataacctttaattaattatga

SEQ ID NO: 32203 - DNA, 1225 bp, Cannabis sativa
  modified_base (153)..(157): a, c, t, g, unknown or other
aaaggttattaaaatttgagtaaacaccattttagaccctatattttgtaaaattcaattagactctctgttttgttagatgacaaaatagactctatattttctaagatgataaaaatagaaccataagttcaattttcaacaattttattnnnnnatataactaactttaagataatttctaatacgaatagatacagaaaatataacaagttttgtcataacatctataaatcatattattattaagttttattttgacaaaaaaaccaattcatgattctatttgtacaatttttgaaaatatatggtctattttgtcatttaataaaatagagagtccaattgataacttttgcaaaacacatagtctaaaatagtatttactatattaattttgaagcaaataatgtgatgacagcgggtttaaattatcaatttaattttatatttgtatatgtaaaaatatattatatgaataaatttatatattaataaattaaaaaataatgtaatgttaagccaatcttttttcctagaaaaatcaaactaatttaaattttgttgcactttagttatgtatagatatttcattttggtgttaaaaaaaagaaaaagaaaaattgtagtataaatagttaagtttaactctcaattataaataaatatctaactttaatttttagcagtagtaatacctatgataattttagaacttctataggtacttgattataaagtgttaagtaaataacaacatgtcaatccttaattggttcaaatcattaaatttttatttttgtaaaaaaaaagtttagtttaaatatactaataaaaaaatgacacataaataataacttgacatttaacgactacctagagagtttcaaacatataacttaggtattattaacgctaaaaaacaaacttaaatatttatttgcaattgaaagttaaattttaaatatttataccgtaaattatcaaaaaaaaaacatgaatttttttacaaaaaaacgttatcaattatattttttttgtatagatctttaatttgtgatttatttttcttgtgttattaagaataaaatgaaatgaaaatttagtagaatacttatattataaaaaagttcacataaaaaatatcaaaatttgcaaaactcaatttgtttctagttttattataagcataaagtggtttaagtatagatgaatgatttcacaa

SEQ ID NO: 32204 - DNA, 2503 bp, Cannabis sativa
tatcccaataatcccatcaatatttctagctaaaactgttgtgacatttttgacctccaattgggtctccagggttgctgaacttgaaattattttttcttacaaataactcatattatatccacgtatttcaaataaatttctgtaattaacaaattacacttatttatccacttatcaggtcttgaggatcgccgaacctaaaaatatttttattccacatatagctcctattacattcacacatgctatataaatctgtgtaatttataaattacgcttatttacaaacttatagcaaaatttaaattttatgctgcaatagattagcaggattataatcccacttattacctgattcatccatattataaatataaactctaatatttactattagacttatcgggatattacaaccatcccctatttataaaaattttgtcctcaaaatttatttaaacaattcaggatattacccctgtatttatgattctaagtctcaaactgttgtttctatcttgttgtctttctacggcactttcttaactagtgaaattgtctcattttatagtacttccttttctagtcaaaaacctggacaagatgtttttcccacataataaatttgtttgaattttaacatcgttaaagctcagaatatgggttgagtttgatatatattttctcagcatggagacaaacacattttatactccggacaatgtaggagttaaagctagctaataggctacctagcctatttaccccagtaaacaggtatctaatatttctcttgtaccacacttattaaggtacctaactagtggtacgtttaattatcacttttaaataaacacctcgttagggaagagattattctaagacccttgtatacttttcctgtcattaccactaaggttttactccctagttcatacgccaccattgctcccttacaatcatcactatctgcttacttggttaaccactctaaacttattttacactcaattatatagttaattgtttaataaacaacctactttgtgatccaacattcaccaatcactcaaatacatgtttgcatctcaattcataagcttctcctcattctgggtgagtatgcctttctatatttgcttaataaagtaatcttttctcaaaatttcaatggtctccttatatacaatattaactatccagtctattatgaattactctccatcattatcgaattactttaagtaatttaggtaatcttctttactttagtgataccactactcttcctggcgttcttttatatgctaccctggtaatgtccccgcttcaagcctctattgggcccttactcccacagaatgatgactcttatacacaagtgcatcactctagctactttccagactgacgactggtcccacagaccaatccaagtgcttccaacgtgctttgctctgaatcgcacgcttcatggggaaatttcctaaatgaaatcacccaaagacaaggacacttaaccatggagttccttcatggtgacctaccaaaacaagatgattcttgctagcataggtagtcccacacctacacataatcctaaaattactacataattgccgccttcaattcacctaggattccagacaatactcataaatgttcttacctttgctaatgctagatcactcctaaataaaagattttgttatttgaatcaattggatagatgcctccattaactactcatgtcctatattccacttggaaataccaacaacttaactcatattgtcattgctctaatttgtccaccccgccaaatgggttaccactaagtaacatacatacacagtccattcagattttttgatgtctctaactgaatgtacaatgtttaatatcaatatcaattgaaacagaaattttaatatttaccataaaattctaatttgagtcggccgaaggaccgatacccaggtccccttaagtcataaccagcacttgggcaggacctgtacacttttctcctttaacatcagtctttcttaactgaagataggttcttttcagattacccactaccccacaataaaacaagatccggctctacattggctcaaatggtgcctttctacatcttgaacacttaggataaggtcactattcattattcttaccttcaccgctgtcctgaacaccctcaaacctctttgttttgtcctataattggtgactcatttagtttttacttcctaatctactagtaagttggcttcatatattcttcctataatataaataaatactacaaaattaaaaatttatttagtttactacgtactaattagttatataatttatgagtaactagttaatttattactaaatagttactaatagttagtactaaaaatacatcaataggaataaaaattagtaacttgttaagtagttgtaactaactatttactagctactaaaaaaataaaaacacatg

SEQ ID NO: 32205 - DNA, 1410 bp, Cannabis sativa
  modified_base (520)..(522): a, c, t, g, unknown or other
tccttgtcatatataatgtctattctatacaacaccttcacttagatgtcatactatatcagtaatccgaactaagattacttgcactaaaatatggtcatcagtgaaccgtactagaaactattgattaaagattccataactttaatatattactgactcttttattcatatctaagtgatcttagttctctatataactacaagtcacaacctcatatatgaataaaaaaatttctaatatttatataaattatccaataataaatattaataatttaacattcaagtatatatcaaaatattcaactctttaataataattagaataatctttataggatgtttaacgcataaaccctaacaccgagaatgtgatgtcgatcgtgtgaagcccaaccttgagaaccagttgccagagatgactcgtagaatggtaagcctgaccaccgatctcactctctcattgctctccttcatgttctctctctctccatcttattctctctctctctctctnnntctctctctctctctctccatcttattctctttctctctctctctctctaagatcatgctcttaactttttttcaagtcggccaatgatggggatgacagtggcctccgatcatgtaagtcacatgttctctccaatccaatctcattccaccaaataagttttttatttgtaccatacatattaataatgaaagcaattagtttttaatgtatgtttcttttaacattttatttgtaactttgttgcaaactgttgggttgtgttctttatattctatatgtactgatgtccatggtttctatttatttttttattttagtttttttttggatactttgtgtctaacggaaactcaaaataggaatttctcgatgtgggggtcttgtcgaagccaagaatttctcctagtcgagggttttgccggtgggagtttcaaatattaaaaattaaattttataacatttcatttatttattatttgatttttaattttttttttttaaaaaaagtattcatgtccagcttattgcattcagtgggtttttatgatatatttttcatgtctaaatttgctagacttaaaaaatacccctttcatatcgctgcatatcttgtccagcaataaaaggacatgaaagagttttcatgtccagccttaatggtcgtggaatggggtttttgtattagtgatactttccttttcattgaaggtcatttcctactattgttttggatctcgaggctcccacttcttactcgcagttttggtgctcaccttctaagttttgtcatcacctctttcagtcttgaagggtggttagttgctgttttatgaggtgggtgttggaattaattttaccaggatctaagatctactcacaagtat

SEQ ID NO: 32206 - DNA, 1964 bp, Cannabis sativa
  modified_base (906)..(918): a, c, t, g, unknown or other
  modified_base (1727)..(1732): a, c, t, g, unknown or other
gtgtcactactgcgactgtacatcaacaccactaagtagacccctatttcggtatcggttagttttttcgttacgaaactagtgactcccacacactacacctaacttgattaaaaactttgtgtcatgagacccctaaacatctacagtgatagtctcactactgcgagtgtacatcgacgccactaggtagaaccctatttcggtatcggttagtgatttcgttatgaaatttgttactccgatacactttaccaaactttattacagactgtacacctaacgagtgtacaacgatagaactaagtagaaccctgtttcgatatcggttagtaatttctttgcaaaacagatgactccaataccgtacacctaacttgattacatactttgtgtcacaagacccctaaacatctacactgattgtgtcactacttctagtgtacattggcaccgctaagtagaaccctatttcggtatcaattagtgattttgttacaaaaatggtgactacgatacaatacacctaacttgattacatactttgtgtaagaggacccttaaacatcaacagtgatagtgtcaatactgcgagtgtacatcggcaacactaagtaaaaccctatttcattatcggttagttatttcgttatgaaactagtgactgtgatacactacacctaacttgattacataatttgtgtcacgggacccctaaacatctacagtgatagtgtcactgttgcaagtttacatcgacactgctaagttgaaccctattttggtatcgattaatgattttgttacgaaactggtgactaaaatacactacacctaactttattacagactgtacacctaacgagtgtacattggtaaacctaagtagaaccctagttcggtatnnnnnnnnnnnnnactctgatacactacacctaacttgattacagactttgagtcacgggacccgtaaacacctatggtgatagtgtcactactccgagtgtacatcggcaccactatgtagaactctatttcgatataggttagtgatttcgttacgaaattggtgactccaataccctacacctaacatgattacatactctgtgtcacgggacccctaaacatcaacgttgataatgtcactactgcgactgtacatcgacaccactaagtagaaccctatttcggtatcggttagttatttagttacgaaaatagtgactccgatacactacacttaacttgattaaaaactttttgtcacgggacccctaaacgtctacagtgatagtgtcactattgcgagtgtacatcgacgccactatgtagaaccgtatttcactatcagtgagttgtttcgttacgaaattggttactccgatagactttacctaactttataacagactgtacacctaacgaatgtacaacagtaccactaagtagaaccctagttcggtatcggttggtgggtgactctgatacactacacctaatttgattacaaactttgattcacgggacccctaaccacctatagagatagtgtcactagtgcgagtgtacatcagcaccactaagtagaaccctatttcgatattggttagtgatttctttgcgaaacaggtgactcaaataccatacacataatttgattacatactttgtgtcagaggaccccaaaacatctacacttatagtgtcactactgcgagtgtacnnnnnnaccactaagtagaaccctattttggtatcagttagttattttgttacgaatctagtgactccgatacactacacctaacttgataacatactttgtgtcacgggacccctaaacatctacagtgatagtgtcactactgcgattgtacagcggccccactaagtagaagtctatttagatatcggttagtgattttgttacgaaattggtgactccaataccctatacctaa

SEQ ID NO: 32207 - DNA, 1476 bp, Cannabis sativa
cgtctcgtcaagtttcttatgaattgcgaggtggacgtctcactatatgtagtccgtggttgctttgctttacctcacttattccttcagaatagttgaatcttctctttggatttgtgtactccgaggcaggcttgtgtctcgtcaatacatgttttaatagttttgtatccttgtctcgcttaagactatacagttagtgaattatgaatatactctattaattctatatttaacgagttatttctctttgtattaaatgatataactttattatatcaggttgttcatatctcacactaactaacatgtgtcatcctctgaagtgtagctaaatttcaggtataacaatattatttaaaataattaaacttatttattgtttaataaaatatttagatagatttttttagaaataaattcaaacaaaaaaatataattcaattgtattagatttaattttattattatttaaattaatagttaagtaagagaaattttaatgtaactaaacaaaaattcattgcatattatattactaatagaaacctattcttctttattagagttttacacggaaactttgttttagtgctatgccatattgttaagtttctatgcaccaaagtctaactattgatggtcgacaaggttgaaatctctgtaactcaatggaaaacatagaaatatcattcttgaattaaaccaaaggatattattcatgaaatatctgttatgattcacgtacgctaaactttggatatcattatataaatatgtatgtatattatttccaactagtaaacatcctacgcgcttcgcggttggatgttaaaatttttttaaattatatctataaaattaattatgtattttatttgatcataactaaataataaaattatatcaaattttaaatttattcatttcctatataaatttctaaaaaatgtgagaaattagatgtaaattcaggccaactcgacccaatgttcctgttgagttgttgtcttgtttggtagctgaattaatcgtttaataaaatgatgattttattttccaaaaaaaaaaaaggagagaagagataaagttatgcgaagtgattttagattaacacatcgtcggctcatactttttttttatatatatgtattgaatagatatttaaaaaaagacaataaatctacaaagaaactcatcatatatataatttaaaaataatcatcatcgccgtatctcctttattgtcagcattacatttaaagtcgatgtcatcaccgtagctcacttatatatgtatagtcattattattataattatttaattataatagatatatttcataaattatttgaatttggaaattaaatttgagtttcaataaatttgcttagtaaccactcataggtaatacccattaagaagtgttccatatatatagattctaaatattttgcttaacaatagtaccatat

SEQ ID NO: 32208 - DNA, 1694 bp, Cannabis sativa
tttttttttttgaaatatatgcatatacatttttagttagaaggtagtattcattaaatctcataataacaataataaatgcatgcatatgcatacatattatatatccttgatacataatatgtagttaatttcctattggacataatattatgttaaattatatcgaatgagacatttggatataattaatactacgtaaattatattaattatattgaatgagacaaaaaaaaggaattaagaaggaaataaataaaatctaaataatcagtctagctaagatgtgtcaatcaggaggaaatagattaaaaacgtgtgtcaatggtgaaataataaaaaaataacaaatcatttattcatacatgcaaaagaacataagaaaattataagtagaaaggaaatgaattaaaaactgaaaaaaaaaaaaaaaaaaaacaattcaaaaaaatctgtgactaaatttcttggctaaaaaatatctaaactttttggtaaaaacagtatgttcaataaaatcatatatcatttttggtggaatcattagttcttattttcctatacgcgaatgaattttgtggggaaggagtagaggttggagccttaaatgggtaatatggccaatctataatattgttattgattgaaggtagataggttttgaataatgctcttcacattattcatctctcttttcttatttatttataaataagccaatatcaaatcaaataattgaatagggcattgatcgatatcttttattaattctaatactaatagaatgggcaacttatggtgacaaacaccacaattggtagttggtataaattaatattagtttttaaatattttaatttaataaaaaatataaaaaattattaaccactcatatcgcacttatctataaaatacatgcctaatagtaatgctctaatcagtgacggacccagaatttttactttgtggcggcttatttatcattaaaaaatatttatacctatattataatcactcttactagatttatttaattttgtgggggcttttctactattttagtctacaattatcaaattaaaaaaaaaattatatttaattttttaaaaggtaatatttttattatggaggctatagccccatataagcactactgggtccgtccctgtatgtcaagtactcgaacttaaaattgtctcctagtatttttctataattatatagaacttctcacaatcacatggggtgaacgttctttctttgttttgatggaaaggtcatagttttctgtctccttagaactaaaggaagaggtacaagcttcaagtaaggtcgtgggtgaacgttctttctattgcacataattatattatatatacctatattttgttttatactttgttttaaatcccctttttttccatgagaaataataaaataaaataaaaacacttactactgattacctcggcaagtattaaaaatatgtatattttcaacttaaccatttttaataataacaacaacttttagtatcaagttttaaagtgaacttcgtataagaaattgctggcacattacatttggtggctttatatatgtgaatgtgagaatgattgaacattaatataatatctcagctaatagctagtctcatgaatcagcatttgtttgggttcgtatatattttattt

SEQ ID NO: 32209 - DNA, 1468 bp, Cannabis sativa
ggtctaggtctcggtctgagtttgggtcctaggtcccaagtcccggtctaggtcctggtcccggtgtggattttggtctaggttcgtgttcgggtttgggtccaattctcgtcccagttttgagtccttgttctgctcttggtttgattccagttgattcttattctgggtcttggttgcaggtttcgatccaagttttggtttgggttcaggtctttgttccgatccctgttgtggtccagggccgggtgtgggttttattcttgtttcgggtctggctctgaagtttgggtctcggggtgtttagggcatagggtttagggttagggtttaggggtttaggacttagtgtttatttagggtttatgttgacgaggtttagggttttgggtttatttagggtttagggtttagggtggggtttaaggtttagcatttagcatttagggtttagggattaggatttagggtttagggtttagggtttatggattaaagtttagggtatagggttcaggacttagggtttaggatttaggatttagggtaattaaatataaatcttattaccattacttttcattaattttatcactacttatgacatatcattaattatattaactttatcattactaatcattacaaatccttatttatattatctttattactaatcattacttatcattacaaatcattacttaaacttactaagtaatgattagtaatgataagtaatgattagtagtgattagtaataagtaatgattagtaataaataatgattagtaatgattactaattaagttaatgtaagtaatgtttagtaataataagtaaaccataaaccataaacgctaaaacctaaaccctaaaccctaaagcttaaaccataaactataaaccctaaaccccaaaccataaactataaaccctaaaccccaaactttaaaccctctacccttaaccctaaaccataaatcctaaacccttaaccgtaaactctaaccctaaactctaatccctaaacccctaaaccctgaaccgtaatccctaaaccctaattgctaaaccctagaccctaatctgtaatccctaatccctaaatcctaaacccaaccctaaaaaaagaaccaggactgggtcctagactcgccctaagacctcaataaggaccaggacaaggacctggaatgggacccaactcaggtttaggtcctgcttcgggttttggtttgggtctcgggtcccacatcccggttcgagtctaggtcctagtccgacttctggttttagcttgggtcctattccgaacaagggtccaggtcctggtcccaagtacgggtctgattccaggtttggtttttgtccttgtctaggtttgggttcgggcccaagttgtggtccccgtcgcattcttgggtcctagtcttgtttcagtttaggatccaattttgggtccatg

SEQ ID NO: 32210 - DNA, 2082 bp, Cannabis sativa
gcaatagggctagccaggggtggtccagacagacccccttggttaaccagttcgttgtctctttgtcctgcttaagtatttggactcctcgttaagtggtacgttgtgcatggtgacttggccttcttgccgacaagctgtatttcacgcagcatcaatcttgctcatgtggacataccacgtcatgtaggcaaaaattaggataatagttagtgaataaattgttaataattaaaaaaaaaaaaatgtatatgatattaaaaagaagtataataaaaatatggggtttttacaaaaatactagattttgggtaaaagtttacaagtttagtatcacatggaactttttacaaaaatattgttttttttataaaataaccgtaaaacaacaaaacagaacaattaaaacaacagtggaacaagtaaaaaaaacaactgtagaacaatagtgaaaacttaaccagtacacagtataaaacttatataatatttttaaaaaaaaatttaccccacagtaaaaaagtgaaaaaactagaaatttgtaaaaatctcaaaaaatatgacataataaaactataaaagaagtaaaaaaaaaaaaggcctaacttcataaagaatgaacgaactaaaaagtgccatatttttcaaaaaatatttcaaaatatcacaaagtaaaattcttcggctgtttcacatggtaaattgggaaacgtgttgattggctttaccaccaaatgggctttggcccacctatattaggcccaattttctggttgggctggtcggcccagtgtgaagaccttaaatttagagagtaaaccctagccatgcccctcaaaactcagaactcccatctttctctctaagcgcctcagaagcagagctcgagcttcactttcacccctcagtcatggcggaagctatcattcaggaacaacatgaggtcaagcttttcaatcgatggagctttgaggatgtccaggtactaattctcactctctcttttacttcttcctcaattttgacaaaaataacgattttttacgcaatacatagatcaattgtatctgcaattgagaggacagtgagatttgtgttcaacgtagtgaaattagagtcaagtgtgtattttgtatggctttggtagataatttcaagaggtttttatcaatactcgattgatattttctctgctaattactttttgtttgtatgaatatgaattaatatgaaaattattatatttgttgatttaagaaccaaccactatacattacaatatagacagtataatgtaaagctcattgtgtttattttttttaatctaatttttttttttttattataagcctcaaattgggaaatttctgtataatattatattgaattgtattttatgtaaaactataaatggtattggggcatatcaatatatagtattttagtataaattaaatttagtatagtgttatataaaaatacgatgtataactcaatttaatataatacaatacactatactaagacttaatacatcgtaccgaacgagctatatattgtttgttatcgttcagttttgttggagtttccagttcttttccagagtggattttcagtgggagtcatgctgagtgtatgtctatatgagttcagatgatttgtcttcttaatgaagttctatttcgatttggataaaaaaaggctcaaattgggaaatttccattaacttgtcaaaactgttcttttcatgaattttgcataatgagtttgatagttatttggtcattttagaagagtttcattattagactttgtgctctctgctcttgaagaaggttttttagttagttttacttatttagcataatgggtgtttggtagttattcataaccatatccttgtgcttgtgcttatgctctgatgtaggtgagtgacatttcacttgctgattatgtcggagttgtaccggctaagcacgccacttatgtcccccacactgctgggagatactccgtgaagaggttcaggaaggcccagtgcccaattgtggaaaggcttaccaactctctcatgatgcacgg

SEQ ID NO: 32211 - DNA, 1267 bp, Cannabis sativa
gctctttattcaacatccaaccgccaatacgatggtgcaaactcgtagaggcctgactgatctagcaaattcactgacgctggatactacattgcagaagacaaggagcacaagggttctgcctactattaatcctggaactccggcgagcatggggaatggtgaaacagttcctatagatggaattgcgcctggtgtgcaagagactgggaataatagttccgcacccaaccagggcattcataacacaactgttccacctagaaccaacgcccagacgaccatcggagatgctattgaattacaaaatctctgtgacgcgctcggactcatgtagggtcataacaacaccctgcatcatgatcaagacgaactgcgtgctgcagtaaatcttgcattcgacgaacaaaggcgcatgttcgccgaatggagggatagagagatggaggcattaagggttcaccatgaagagatcaaaaaccgtagtcggcaggctaccgtgctgatatgaagagcctatcaaactttaggtcagcaaccgccgaacgtcattcccctgggtggaacagacgaagatccgatgatgaatacttcccaaactacaaatggtcagccttccaatccctggtcacgagttctgctcgtgggcccagcggtaggcgagtagaccttgtctagtaattcatcaagagaagtcatacttgatggttccaaccaactcaatggtgtcattccacctatcaaccaagcgctaaggcagccaggcacttctgtgttccaaatgttgggagcaacccgtgacctaaggaatgatctgagcagaaggaggggagtgaacgaacataatattacaacgaccgtgcagcctggagcccgtactcaaatgcctactcagaaagatgctgactagaatgtcgagcaagtcaatccagccgtacaggctcagctagacgaactgaaaaatatgtttcatggcatggctggacaaaggaataaagatcttgagttggaccgagcacgcggaactcctttctcactagagatcaatctcctgccactgccccacaagttcaaaatgccgatgtggaagatgtatactgggagagaagatcctctttcccatctccagtatttcgaaatacagatggatttacaaggagtatggggagatgtatgctgcataatcttccccaccactctatcagaagccgctcagcaatggtatttcaagttggctcctagaaagtttagttcatggaaaaccttc

SEQ ID NO: 32212 - DNA, 2270 bp, Cannabis sativa
ctacatcaatagtactcattttaacacaattgatcgtgatagatagctagttcggatgataaaacttatattgaatgtgatatgaccttttatggggtaatacaagaaatttggaattatattatactaatttttgaatcccagttttactttgtgattgagtaagtgacaatggagttagatgatgagttcggagtcaaattagtagtcttgaatagagtaggacaaaaaaatgataggtttataatggcatcacaagatattcaagtgttttacatgagtgatctattagatgcccgctgatctgttgtcctcacaacacaaccaaaagattatgaaaaaaagagtctagtggagatgatctcatgctcagtgatcaaacttttaaaatcaatccatcacctattattgtgactgttggggatgatatcatatcttcacgtgaggataaagaaggattatgggttgatattggttgacatcaatatcaacccataatcgatatccgcattgatacgtgatgtaatggtacttttataatgttatttaatatttgttttgttttattatgtaggtacgttctttatgaatgacccaaatttgagtttggacctcttcggtcaatctgctggcgatgacattaaagaggatgtacaacaagatcactcagaagaagaggggaatgagtaaagatatgataaatatgaggagcaaagggaagaagacggaagttgagtacaactcatggggtcaagctgttagtgacggtgcagaaaaacttcgtagcgagattggtaaatatgttcgccaccacgttatattgcttgtggatgattgacgacttgtatcgatagaagtgaaagataagttgtggaatgaaatgcttgtaattttttatataactatagtaaattaaattaagtacatttgtttataactggcacaaagatgaaatcctatgtgttgtcagttaatggtgataggtggagggaatttaaatccaacctaaccaacttcatctacacacacaaagatgacaacccgtaacttctagacaagcctccaaagttttatgaaaatatgattgacattataatttttggacattataattttttttttctagtccaataagaatagactagaaaactccccaaaaccttttcatgtccaacaataattttgttggacttaaaataagggacattaaaaaggttttttgtagtagtgagatagtgaagaatggcatgtaaaaaaaagttagcataaggcagcaggaaacaaaacaaatacaatcaccgcactggacgaggtggtgtgaggaaggtgcgagagaagatagagaaagaattgggtcaccagatagatgatgtaatgccctgacccgcagggacgccacctgtgtacttttacaaacttatttctaactaatctattagtttaagaaatgtgttgtttaattaaaaactttttgattaaattaaaataaaacttttgtacaaaataccaccataatacgggaatcccctgtttataaattcttttacaataagtctcaaaactactattacaaaagtaaagttacatttccaaatatagccaaaaggttgatcctgcttcccgaaagccaagtcaccacagctgatatgtacatcgctcggagtcctctgactcatggccgaacacagttcctatccttctgacctgcaccatgaaacacccatgagtcacaaagacttaacaagaaaagttactagatcaaaagctttgaaaatgcaagtattcacatcacaacataatatacatactcgtgattcattacatattcagtatgcatatataatttaacgtctatataaacacatatattatgcattataagaaaatcatagcaactcatagtcaacaacttcatcattacaataaacagatattcactcaataatcacatagccaattacttatcttataagacaatcctagtttagtgcttcataaaacatcctcatcactcttcatccacgagctacatatgtcactatcgttgcctaataaagcacccgataagtaagaaacctacctacactttcaagggagtaattactcatttcattaacggtaatgaccatatctttattcattctcactaatggtaatgaccatttctttccctcgatcataatcgagtcataaatgataataattattacctcaatcataatcgagtcacaaacgataataatcattacactgttggaaattattttacc

SEQ ID NO: 32213 - DNA, 1269 bp, Cannabis sativa
aattggatcggtcggttctcattggattggatcgatttatgctcacccctaggtatcagagccacaattacattgatcttgaattcacacgacatacacaccatccctgcaaaggatcaacttgtaatcaagtaagtatgttttatttgtgttatgtcttatatgttaagtttggttaatttcaatctagtatttattttgggttgtgcagagttaataataaatcaaaacgtagttaagacaattaagggcttgagacgcttgtcggcatctaacgagagaagtaaacttcggtgaatagtagagaatatggataaaattaatcaaggcatgggggaaattatgaggagagagcttgtgttgttaatggcacacgagaaatatatagttatgtcacactcacttaggtctgaggaagcaagagctcacctagatcgaatatggagacaagtgaacgaaatcggttatatttcagaacataacaaggataaagagtcaattgagagattcctcaacactttctttgtcatggatgtgcgaatgaatgagtaaggtgtgaaaaccttgctcaaccataaactggggacagaatatcatgactactacattgccaacatcccagagacaacagttggcatttacaaggatgcaaatttttttgattatgtgccaatttcaatagacatcttggaggatggttctaatgtggaagattcagatgagcctgaagaagaattacaactaccggtaaatcctgaagacaatctagaagaagagttagaagaggatccagaagaagaggacgaatagacgttttgcttggattagtctttagctttagattttattttagttagctagaagtttaaggtatggttatttgaaacaattaatcgattcttcggagttagagttttagtataactcaaataattttcttattattgttattttttttataaatgaatgaagattattattacatggtgaattgttgcttgatgatttacgttttaaagtttatataattttagtgtatagatatttcctttttgtgcgggatacatctttggttattttcttacttcaaccatctcctttcttttgaagaacaagacgagggatttgatggaaaacagtgaacctagaagattaacctagttgaatgaaagagttgttgtaagagaccgagctggaggtcgggggcaaggaggtgctcgcagtcgaggtaggggaaaccaatacgtccctgccgaggcggtgatccag

SEQ ID NO: 32214 - DNA, 1187 bp, Cannabis sativa
  modified_base (1063)..(1097): a, c, t, g, unknown or other
  modified_base (1143)..(1158): a, c, t, g, unknown or other
gcttacaaacataaaactttaggtacttatgccgctatttacccaagaataaactatgatatatatatatataaaactcattggtctacttatgttaaaaaaccaatgttaagaaacttattttaaaagttcaaaacgtataacaataaccatgggtgtgaaatcgttagcaaaaacatataaaaaaaaaaaaactgactattattaaagatgatgattctaataaaaattttattaaaccaataataaaacatgaaagtcgtccaatgaagacaaaatcgaagaggaataaaggtaataaaagtaatataccataaattaaaaaggagaagaaacatgtcgatgaaatgtctaagatttcatgacagctctttttctgttttgccctaatttagaaattttgtctatgttttgtttattgttttacgtgtgattttaattataggtttcatatattttatttgttttgttgttttattagtgatagatttactgatttggaatatttttagatttaggttattttttagtttttttcgacattgttgccctaaattttttccaatatacgtggcaatcccacaacgtgacatatggcagattaagctcgaggactcggagataattaatggaaaatcttatataggcaggatcccctcagaacaactgaatagcttctccgagagccacgactggacccgaagggatccatcttttattcacctccgaaagctagatagcgtctggcttctccagatttagggtaccggagatgtatagtcaactagcatttaatgcaacatagaggaaacgtctacaaacatatatgaaaagacgtgtcagacacattaaacccattcttcaaccattacgcgctaattaagggtataagtgatgacttcataatgtacagtctcatcaatcaagaaaggataagagtttgtctcacctaaaccctacgtgtcctactaagtagggtgtgcataccctacttcacagatttggaaacttgtgcatagatgtggttaatcaaacaccatccaagtgttgggaattattttannnnnnnnnnnnnnnnnnnnnnnnnnnnnnnnnnnaacatcctaaatatgaactttttaaaacgataaaataaacacatannnnnnnnnnnnnnnnttacattgatgcagcggaataaatgtctc

SEQ ID NO: 32215 - DNA, 2587 bp, Cannabis sativa
  modified_base (2439)..(2449): a, c, t, g, unknown or other
tggtagtgaatctagatcctggtaaaatatttccaacagtttacaaccgtgaccgcagtgtaactaattgggcgacatcaccaacaaaatgaagaaatggaacaatagaaataagcctcttaaagttgttaacacagctaataagaaaatggctgctaatccaaagacagaggaaaaaaggaaagtgcttctattgcaatgaaaagggccattggaaaccccaatgtcctaagtttttggcaaagaaatagggtatttctaactttgttataatttcatgtcttttagagaattattatcgccgtaggttgttaattctgggtctactaaccatgtttattttttttttcttattttcagctccagctacttaaacttggattgttatcctagcaagttaagtcaaattatttgacagaagggtggagattgtccaagttaaggatgaagctcgtcttttctttaatttttgaattaatttttttatttaatgaaaaatttagtttcaattattagtttgggattctattacttatttcaaattttccagacaattcattatgacatttttgagagtattattaaaattttctcattaagaggttttcattttgaattgcttttatgaaattgagcttcatatttactttaacttttatgtcaatactgattatatttatatgtttatcatgttttatgtattttgagttttattattgatgcaaaatctatggtatattattctctgcaaagagataataccacataaacacttagaatttaaaattcaatatttatgaaaaattttcatttcttaagtaattattaagattttgtttgatataaagatcttttgatctgatagaagtggaagaatttaaaaaacaatgtatgcagttcaaagatcttttatatcttttgaactctagactatattcaaaactctataggatctccataacacttagcagtggaagacgttattgatatatgtagttcaaacacttttaacttacaactctagactaactcaatacaccgtatctctatggcacacatatttttattaaacatggatatactataataaatgaactagcaaactaataaaacttattcttgatcatgtatatgttccaatgttccccactatagaaattgataccaatgatgttagtatcacagtaccttatcttagtgataaaattttaaaattctagcccgttatacttggatcacactagtgatagccaactatgtcatgatcatgataagaactttagaataagactaagaaagtaaatctaatcattcatatggatagaaataacttatcagaattatgaaaataaaaaggaagtttttgctaggtttattcgtatgacataagtaaaaccatagtccttataaaatgttttacgatatctctaatcattacttaatcttaatgttaaaattaatgttatgttgatgacttagcctagaaggaatttataatttcagacttagataaaatgtcacaaaaagaggtccctaagcatcaatagtaagaggttaagtgtacacttgcgtacaaatttaactggactcctactgttgagtgggagccatctactatgtaatcatacgagggacattagaagaagatcaagaaagaatttatgaaagtgacctatatattatatgataaggttgtatactagaatctttatatctacaccaactcaaaatttgattagagatggtggttactctagaagtggaggaattattctagaaggatgtaaaaacccatctttaataatttagttccaccaatgaagctaaataacatagttgtttttgaaaaacactagaaagttattcaaactgaagagagttcctaactatttttattcctttttggatagaatgagagatgtgtcttctatatattcagatgcacttatcatacagtaaagaattcattatccctagagaattaatacatatagaaacatgatgtttcataatgttttatgaacacaaaggaagtagagaaacagttgcttaccataggcttacagtttctgtaatttgggcttagtcaaatacagtacacttgatctggatatgaacacaataggttgattgaaattcacttcttgttttatgttagtgcaagtgggaatttgttaggattttatgccctaaataaaactcattttaatataatctgatttgttatcaatagaagattagaaatcatttatgtttacatgtagtcttcatatttatggtttaatattcaatttgtgttaaatccagaacatatacttattcataattacagtgatgtcaacacagtggaaggtaattgtgattatatgcttcaaaagttaatgtccaaagattcatcagtgcataggatttacattgatgtgatagtcagcgataaannnnnnnnnnnccttggataagtgttatattctttccaatacattggcaaagtatgctagtattggacatgtaaagtatacatttaactaggactgatattgatcttggtaaagatattataatcttaccattgtatctttctaagtca

SEQ ID NO: 32216 - DNA, 1091 bp, Cannabis sativa
ttgaagcgagacgttacagtatagttcaaagacaggttagtggctaggggttttactcagatggaaggaattaactatactaaaatcttctcacctatggtaaagtacaagatgataagacttatgttgcctttggcagctcaaatggagtttgaagttgagaacaacttgatgttaagattactattttgaatggatccttagatgaagagatctacatgaagcaaccacttgggtttcaagtggaagggaaaggagttgagctagtttgcacactcaacaggtccttatatggtttgaaatagtttccaagacaatggaacaaaagatttgatactatatgcaacaaattgagttcaaacgatcagcatatgatcactcttatatttcaaaaatttggagcaatctacaattatgtttttattgctctatgtggatgatatgctcatcatgagcaaagatagatacgtgatcagaagtatgaaagccaagcttaaaagagaatttgagatgaatgagcttggactagtccaaagaatacttgctattaaaatttcaaagaactggaaggaaggtacaatcagcttaaaagcagtccgggtacattaaaaaattattcagaagttcaacaaagaagatgcaaagagtacatctgtcttgttcagcggacaatttgttttgtcgaaggattaatgtctgaacagtgcgaaggagaaagaggaaatgaagaatgtgccctatgaagtggttttaggatgtttaatgtatgtggtggtgagaacctgaccggacatagctcattctctaagcatcctaagtcggttcatgtccaatctggacattaaacattggaaggccctcaaatggttattaaggtacttaaagggcacttgggattatggtctgacctatgagaaaacaacaggagaacttgagttaaaagagttcatggatgttgactattcttcgaatagagatactagaaaattaaccacttcctatatttttttgacaaatcaaaactgtatatgctgaaatgcccagttacaatccgtgtttgccttttccaccacagaagtagaattcatggc

SEQ ID NO: 32217 - DNA, 1228 bp, Cannabis sativa
  modified_base (1183)..(1184): a, c, t, g, unknown or other
gacgatactcgatttatcactttattacttgttgacgattgtgtacacttgcgtaagtcattttcacaacaattatcattattttttcaattttgaaagtattttttgtttttaacaatccttttgaagataaattattattgtttaattaattttttcaatgctaaagatgggtatcattatcacataatcaattaaaaaatatcagaaaatttcttttattacaaatatagaactcttatcatttatttacacaaattatcccatattaggtgtttccctttaggcttaaaaagaaatccaaataggaatcggtatcccaatttcagagccatttcttctaaatgcagtctgttgaacccttcaaactcatagtgatcaaaatatacaattcgaccaccctcatacatcttatttccacaacaggtatactagaaactcccacggaataattttactgtgaaattatccaagttcaatcctgcaaagataatataaacagagttaatggtagatgtatactaggcaaaaccaaacaactttacccaattctttgacaaaatcccctaaacatttagcccccacatcctagatgcagacaaaaaaaaaaaacatgtgaaaatgttccttttgcagaagacaaaggcataagattccctaacagcctttgactacattttgacccaaaagtgtaatactttaatatttcatctacccacttgacctgtgtatggaccacaattcaacgaacctcactaactaactattattaactccactactagaattaaaaactactataaacccaacactcatacccaatatttgtcaaaaccctaaaaactactagaagaataaaatcacacttacggtagtctaaaggagcatcatccttattccgacaacgaaagaccatttcatcaacgaaacctggtttcttttgctttatcttcaacttctaatctgtgttttcgggtttcctttgattctacgaaaaatgggtttagggttcttacacttgtttggtttgcttactctttgatttccaaaccgtgtttctgggcttctttcgattttacaaaaatgggtttggggttcttacactggttaaaaaccgtgtttttgttaaatgtcagttatatataagaaaatataaaactgtaagcgtttgcagaagcagaanntaattctgctacagcaaaacaaaacaggcagaatataaaatatt

SEQ ID NO: 32218 - DNA, 1913 bp, Cannabis sativa
tctcaaaatcaaagtggttttgtgtaagggaggtacattggtcataatatcatgatctgtcaggatctcataagacattatgggaggaaaagtgggaagcctaattgcatgatcaagttaaacctgcaaaaagcatatgatacactggaatgagatttcattgaagaaatgttgagtgctttcaagtttccatcaagcttcatcaaacgcatcatggtttgtgtcaaaacaccaaggttttctttgatgttcaatggatcaatacatggattctttgaggcaaaaaggggactgagacaaggtgaccccatgtcacccttattatttgtcttgggtatcgaatacctgtccaggatcatgaaaaagataagctcaaagcaagatttcaagttccatgagaggtgcgaagatctgaagttaaaccatcttagttttgctgatgatgttctacttttctgtaatggagactacaaaagcatctcttatatgctgcaggggctgaatctattttctcaaacatcaggtctatttcctaatccttcaaagacttctgtttattgcaataacatgagtgacacagatattcaaagaatcctcgatgcttctggattcaagagacatgaaatgccctttaggtattggagtcaaataatggtgatgccaaagaaaattgttgctgagattgaggcaatttgcaggagtttcttgtggagtgacagccaccaactcaaaagggttgctgccgtagcttggaggacagtttgcaaggagaaatcagcagggggtttggggctcaaacacgtaactgaatggaatattggttctatgtttaaatatgtttgggccattgctaataaagaagataatttgtgggtgaaatgggttcattgtgtatacataaaagggcaaccttggtgggattataaagctaaaaacaatgatagttggtattggagaaagattgtggccataaaagagagagtgaaagagatttatgatttagaagaaagggatcacttgagtaacaagtatgtcatcactcaaggctatcaaaagctcatcttggccgaacctaaggaacattggccgaggattgtttggagtaggctaaactatccaaagcatagttttattatgtggatggccatgcttaacctactcaagacaaaggataggattgccaagtaccaacccgaaattgataaaatttgtctattgtgcagaagggaagaagaatcgatggaacacttgttttttgactaatcttttggacagacttgcttgaatcaaatacaggtttggctgaactggaacatgtgcaaaagaccgctgccaggagttataagatagcttggaaagaccaaaatcagcaagtttcaaagaggtgtaatggctgctgcacttgcagcttaggtatatacattgtggggctctcgaaattcaatattttgggaaaacaaagttgtaaaaaatgatgtaatcatagcacaagtaaagaatattacaaagtgttgaatctcttgtatttggccaaaaaaagtgaccaatagagatataatatggtttgaaagcttgtaaatagtagagataatttagattctcttgttggagaatcctatagtgttgtataaaatcttttggagtaatgaaattcattgattcatcaaaaaaaaaaaaacaagtcttttttttttttttagttttttagtgaacatgcatatttttcatgttatagatatacatatatcaaattctttcaaatataaattatactaaatataatttatagacaaatgctaaaagatactaagagcatctccaatggtaatattttggagaatgcttgatgagatggaaagcttatgtggcaaaatatagagatgatatactattagagataaaagaatactatt

SEQ ID NO: 32219 - DNA, 2675 bp, Cannabis sativa
  modified_base (2619)..(2635): a, c, t, g, unknown or other
acccatgatccctcaaagtcaagcacacatgcccgtagcatgtcttctacaatctgaacagtcctctcagatttcccatccgtctgaggatgaaatgttgtgctaaactttaattgagtacccatagctcgatgtagactctcctagaatcttgatgtattgatgtatattttagatctctaatctctatctgctatctgaaataatggactttgggacaccatgaagaccaacaatttctctgacatataactcaacatactgatcaatcgagatttttgtccgaacaggtaggaagtgcgctgactttgtaaaacattccactatgacccacacagagtcaaactgtcccgtggttgtaggcaaacctaccacgaagtccatagcaatatcttcccatttccacttaggtatgttcaatggctgcaggaaccctgcaagcctctgatgttcagcctttatttactgacaggtaggacacttagcatcatactcagcaatgtcattcttcatgcctggccaccagaagatggcctttagatcctgatacatcttcgttgaccctggtgaactgagtaaggagttgcatgagtctcatcaataatctctcttttaataccatcatccataggcacacaaacacaattcctgaatcgcaacattctcatttcatccactagaaaaatcactagccttcccagccaaaaccctatcttgggtttttaccaactctggatcttgcatttgtgcttctctgattcgctctaaaagagtagattgcagggtaatattagctaactgctatacaaccgactaaatcttagctcgggtcatctcatttgctaactattgggagatttatttcacggtatttttttgactttgaccctttctgctcaaggcatcaacaaccacgttggctttaccagggtgataaaggatctcacaattataatccttcaccaactctagccagcatctctgtctcatattcagatccctctgggtgaagaagtatttcacactttcatgatcagtgtatatctcacatttctcgccatataggtaatgccgccaaatctttagtgcaaaaaccacaacggtgagttctagatcgtgagaagggtacctctgctcatacttctttaactgccgagaagcatatgctattacctttccaacttgcgtaagcacatagtcgagaccttgtctcgaggcatcacagtaaaccacaaacttttccttatctaaaggaagagttagtactggagcggtaatcaggcactgctttaactcaagaaaacatttctcacaccgattagtccaaacaaactttaggttctttcaggtcagctccgttaagggtacatcaatctttgaaaaaccctcaatgaaccgacgataatacccagctaatcccagaaagcttctaacctcagtagctaattttggtgttggccaatcccgaatagcttcaactttggccgaatccaccatgatctcatctttatctactatgtgccctaggaaagagacacgagatatccaaaattcacactttttgaatttagcatatatcttatgatctcgtaatcgttgcaaaactgctctaagatgcaactcatgctcttctcgtgattcagaatataccaagatgacatcgataaacacgatcacacatctatccaggtaatctttgaatacttgattcattagatccatgaatgtcgtcggggcattggtgagtctaaaagacatcacaaggaattcataatgtccataccgagtacggaatgtatttttcgggatatcttcctctcaaattctttgctgacgatagcctcagcgaagatagatcttggaaaagagtgtctttcctttcagttgatcaaacagatcatcaattcaaggtaaatgatacttgttcttgatggtaagcttgttcaactcatggtaatcaatacacattcgtagagacccgtccttcttcttcacaaataatatcggagcactccaaggaaagtagctcggtctaatgaatcctagattcagtaactcttacagttgtatctttaattctttcaattctgctggagccatttgatacggtgcttttgatactggatctgctcccagaaccaactcaatttccaggtagatgacaatctcggtaaatcttctagaaagatgtcaaggaactcgcataccaatcttgtatattctcaggtccagatgtcacaggttgactggtattcactacagtgactatgaatcccagacaacctctgctcatcaggtccttaactttcaatagtgttatccttggtatgcgtgccccctgaactttacccataaacaccgctgggctagcactatcgggctcgaacaccaccattttccattggtagtcgatcgttgctccatacttagacagaaaatccattcccaggattatattaaaatcaaacatttgcaattctattagattggcggttaattcacaaccgttaatctagaaggacaaagaccgaatccacctattggatactataaggtctcccgagggtaactgggtaccaaacttcgaagcataaatatcacatggcttatggaaacttnnnnnnnnnnnnnnnnncacataagagtgagtagctcccgagtcaaataacacagta

SEQ ID NO: 32220 - DNA, 1901 bp, Cannabis sativa
  modified_base (59)..(61): a, c, t, g, unknown or other
  modified_base (90)..(91): a, c, t, g, unknown or other
tagattaggccatcctagtttttcttatttaaaacatttgtttccagcactatttaaannnttaaatcctttgtcttttcaatgtgaaanntatttattggccaaaagccaacgttatccttacatcaaatctttttatcatccttcaaaaccgttttatctgtttcatagtgatgtctggggaccttctaaggttaccacattctggaaaaaaattgtaatatcccaataaacttaataattaataattaaggtttatatttatattatgagttaaccaggtaataagtgggattataatcttactaatctagttcaacataaatttactataagtggacaaataagcataatttattaattacggagaattatatatcatatgtgaatgtaatatgagttatttgtgtaataaaaatattttttaggtttggcgacctcggagactcgatcgggggccaaaaatgtcgaacagatttagttaaaagttttcatgggaattattttggtgtaatataataaattagggtgaatttagttggcaaaattatatttgtggtatagttatattttcatgataattacttgagtattgtttattaagtggataaattggtaagccactaaggctagcttagtggtgagggagcgatgggaaaagggagaggtcatgggttcgaacccaagacctttaagctacaagctattaattaattgtaaaaataccattacgctacactcaaaaaaataaatgtggataaattggttaagttaatttggttttattcatgttatgtttagattgattaggattagctagttatgtgacacctagctatatttatcctttccatcaccctttgatttttctttaccattaagttaagttttattttaaaacaaaataaataaaagatatattgcctttgagtgacatcttgattccccagcgtcctcaccatcaccctatgaccattatctacaatttattttatttaattgaaattagaaacaaaaagaaagaaatcaaatacattatcatcctcttttatcctatcaatcaagtagatacatattataaaaccactgcctctctacttcttttctttgtagccgagaagcaccacatcatcatcatcatcaccatcttttagtttattttattcatttagtaactccataaaaagaaattgaggtgagcttagtctttatattattcgaagagacttgataactggagctagcttgaggaattgaaggtaattcattttctcagatttctagtttaatattcgttaataacaagttctttgggggtggtgatttgggtgaatttaaaattaatctctaatagtttataaatttctttagaattctattttaggcattataagaatttgagctttgttttgaaagaggaattttggagccccaaattatattatttaacatatgagattatatatatatattttgatagaagttgataatcattgtgttagtcactgttttgattttataatttttgaggatgaattctaagtagtttgaggttatataatcaggttttgggcatgaagtattagaagaagaaaaatagaagtcgattatgtacacctggtaatgttaggctacttttagtctatattttggatcgactttatgttcgctttttgttgttttaggacggaattatgcttgttttctatgttttcaggttcctaggagttacataggtctcgggatgcaaaagtgcagtaaaagacgagcgaagccaagaaaaaacgctatttttcaaatttacgcacttctggccgcagctagatcagtgtggtcgcagccataaagtccaggcagaaagcacactttttgaagcttcagtcgccgcggcgagatacacc

SEQ ID NO: 32221 - DNA, 4357 bp, Cannabis sativa
atgatttgaagaagaagaatggctcttaataatgcaatgatgcaagaagaacttaatcaatttgttcataaaaaggtttggattttgattcgaagacaaaaaggtatcaatgtgattggaacaaagtggagctttaaaaataaaagtgatgaatttggtacaattgtgaggaacaaggctttgattggtggcacaaggctacacacatgtagaaggattgactttgatgaaacattttctcatgtagcaagattatcatctattttactattgtgtttgcttgtgttcttgatatcaaatgtatcaaatggatgttaagttggcctttttgaatgggattttgagtgaggaagtttatgttgagcaaccaaaggggtttgaagatcctcaatttctagaccatgtatacaaaatagaaaaatatttgtatggtttgaaacaggcccctcattcttggtatgaaaggttaactcaatttttaatatctcatgattatcaaagaggtagtgtagacaaaactatgttcatcaaacacataaaatcaaattttatcattgctcaaatatatgttgatgattagtgtttggttctacatctaaccatgaagttcaagtgattgttagtcaaatgaaaaatgagtttgaaatgagaatggttggtgaacttacattcttttaggggcttcaagtcagaccaatggaaggaggaacattcgtgtctcaaagtaagtatgccaagaattttgtcaaaaagtttggccttgaatcgactaaacaagtaagtactccaatgagcacctctttgaaattgacaaaggattaacatggagtaaaggtagacactactctttagtgtagtacgaatggtagtttattctatttaactgctagtcgtcctatattaagttatagtgtgggagtctgtgcttgatatcaaattaaccctatggaatctcatgtttctacagtttaaaggattattcgatatgtaaatagtgctcttgactttggaatgtagtattctaaagacactaattcaagcttggcttgttttagtgatgcagattgggcaggtaatgtagatgatcataagagtactagcggaggttatttctttctcggaaacaatttggtttcttcgcatagtaacaaaaaaaacgatattttcttgtctactgctgaggctgagtacatagctgctggtagctgctgtactcaattgttatggttgaaataaatattgattgattatggatttgagttgggtattttaaaattttttttttgataatactagtgccataaatatttccaaaaattctgttcaacattctcgaacaaaacacattgatataagggatcattttcgtagtgaacttgttgaaaaccaaacattccaattagaatatgttgatactaaaaaacaattagctgatattttcaccaaggacctagactcaagtcgctttgactcccttagaaaattcttgggagtttgcattgtctaatttcttttgttctcgaatttgtacaaaattgtttagttcttttcttgcatctatccttgtttttttcttggttgacaaaatatttttatgcttttggatgagcattagtttaggatcttgtactctcatacttttgagggtagttaaaagattcatgttactttttttattgtgattgggattacaaaaagtacttatacagagttgagcgattcttgtttaagtttcttgtcaggccccttgctggaatagagttacccatactgacgtgtgaaagccatatttcgagtaagctgaaactttgtaattacgagttatgaagaggatgcactaccatagaaaagggctacctttagtatggtgtgatagcatcgaattgcgggatcaaattgaaaacggcaaaaaataaaaatcttgccaaagacaatgatcctattttaactacacacacttatgtctgaaaagtgtgtacaagtgtgtatttctcctttactaaaattaaaatatcctcgttcacattatttgtaacttgtcttttttctctcaacatctgataagtatagtttgtgttcgagatactaattacttatcatctttaaaaagcataacatgagtatttgtctctttttatgaaacttaattagttgcatgctctagaataacttaatttgtttgtataattctctctagttgctttgtttattcaaaaatttaaacaaaagagggttggctgacttaacttgtgggctaaggaaatttagtccttgttttttttttttttttttgtaagtatcaatatttgatctaattggtatattatgataagtttcatttcaaagtttgagatcttattcattgtattttgtttaattgttgatcttgaatgacttttcaaccttaattggtttgttttatggtattgtgaaagtatattgaatattgaattcgggaggacactttaaatggctttgaagtttatattgatggtatagttaatgaattttatgctaatttgactgatgatctacttgataaaaaatctgagtactttggtaaagtctatgttcgtggcaatttgttttcattcaataaaaatgatattgtcgaagccttgagactgcctaaaagagtaaaaaatgatgaagtgactatggatcgtgacctcattcttactgatctcaatggtgaacaagtcgaatagcctgctggccaaagtattcgcatcactcatctcacttatggccatgcctctcttatgcggtttgctcttagcaattggcttccaaattcaaacaagacaatggtgtctcaagacttggcttttcttctttttcgaattactttaggggcaaacatttacttggcttctctcatcatggaggaaattctttccttccgaagggataaaaaacatagccacaagcttgtttttcctaatttaatctataaagttctttcttctcagaagaatgtggcctattcgaataagactcttgcgtctaccctcactggaacaattttttaaccctcagggtattttgatggagctttccccaagcgttgtaaggcttctattagtgcacctccaaccgctcctgctgcaagttctagttctacttatgcaaatgtgtaagaagtcaagcaggaagtcatcttggtgaacaattgcttggctaccatggaggaggttcaacaagtgatatccaaacaactatccaccttgatcaagctttacgacgcatatgttttttcttattttcattattattgactatttgttagacttattttaatttctacttgactttggcccttagataaacaaaaagggagagtaatagttttttactcaactcaggaccctttttccagggagagtattggtatttgtgttaaactttggtttaaagttagcattctatttcggtttaatgatgtatttcttagggggagatttgtatggtgtgactaactttgttttgcaggtacatttctgttaaaaatattttgattatctaaagtgtcaaaggaggagattgtaaggagattgtaaattccttttttggcaatttaggtgtcaaaatattttttatttattgtgtgatttccttctgcaaataaactagtttcatttcttttttagctgtccatttttttgttttggaaacttcttgaaagataagaaattcttttatggaaagttgattttatttgaaaactttgaccttgctctttctccttaatgttttcgattgtgtcttgataagatcaaatcaagcacccaatttttggcaggtatatagtccatttacatgattgggcaccatttttgcaagtttcctttctggtctgagttgttgctgcaaaaactcaattttaatgccgcaaattagaatttttttaggaaagtttgtacggcagtggaatcgatcttgtggctgtctctaaggttgctatattctctaaatagaacctagatagcagtcaatcggttcagctcttctagttttcacttttgcatagtttcttatttgtgaggagagtgttctttatgtgagaacctacttgttaagctaggttttagtgtttttgttttttagtctcgtcttaggatcagtttgaacaacttgactggacaagagaaaggtctttaggagaagacttattcaagtcttacttatagacgaagtaagcgctcaaacatctaagaaaaagggaattcgctgtttgatggtgtttgagaaatcaaattcatgaagagaattacaaaggattgcggcaaagatttagaaggagtctaaacttgtttaagttgattatttttgcaattatttgagactttactaattg

SEQ ID NO: 32222 - DNA, 1691 bp, Cannabis sativa
cgggtccgggtacaggtccagatcggggtccgtgtccgggtctcgaggtcccggtctgggtctgggtcccgagtccgaatccaggtcccgggtccggatcccaggtttgggtcttggtccaagtccgggtccaagtctcgggtttgggtccaggtctgggtttggatcccgggtccgggtcctaggtttgggtctgggtccgggtcctggtctgggtccggggcaaggtccgggtccgcgtcccgagcgagttcaggtctggctcgggtctgggtctcgggttcgggtcccgggtctgggtctggggttcgagtatacatcgaccaacctctatgccaagtgttgcaaaagccagattcctgtaggcgattactcaagtgggcgatatagttaggatagtatgagataatttttccaacctcgtacaacagttaaagggtaggccttggtagactttgtagttgagtgcacaagcaaagaagaaaattaacataagggatgatctggggccaatacaagaatccctacatgaaaagaatgaagacaggcctaccttgaaattacatgtggacgaatcaaccacagaccaactttctggtgtaggaattgcccttatcacacataggggaaacacctacacagagcaatcaaatttgggttcaaagcctccaacaatgaagtagaatatgaagcactcatagctaggctaaaacttgctcgagaggcacgcacagaatatagtgaggggtaggcgaattcgtccaacagcttgtccaacactctggctgaagaaactgtatactggctggagacaggggattagatctttgagttggagccccattttttcatatggtgttttgaacaagatattttttgaggctccattatctatcataatccgggccattgttttattggctatctgtacttccacgactaatgggtcattgtgcgggaagtgaacattgacaggatcttcttcagtgaatgttatagtgggttcccctacccgtggcatttttggcttcctctcctctacggccagaaccacttctttttgttcgtgttgtaaggttcaagcatacatctcctgagctttgcccgattttctagctatatgtccccgatgatgacttgtagactggtggggtggtaacaggtcttggttattgtttgccttggtggccctttggttctggtcggccttgacatatttttgcacatgcgggttattttttcatatcaaaaattcaatttcccgcttttgattattgcattcattagtgtcatggccataatctccatgaaaactgaaaaatttggacatgtcccctttacttatgtcctttttcatgggagcaggtttcttgtacgggactacagactgagttgccatgtgttgttatccccatttttgtactactctcacgtggcatcacacgatggtgacatgtggaatcaactttatacgcctgctcgcaagagatatgccaaacagagcaccacacatattcgctcggtcgaagccttcttaacggtgcagtcagcaattcgaacagcacgccaacacttagcaatttcagcttactcatcatgagtcacagaagaaatccctataattttgggatcagatcacagagatatggcaagctgtccgaatctcttgattagtgtattctgtatttaat

SEQ ID NO: 32223 - DNA, 2087 bp, Cannabis sativa
  modified_base (27)..(28): a, c, t, g, unknown or other
actaatcagattgtaaagagttttatnnagggcataaaacccaacattcttccctcgacagctttctcggggatgataaagacagtgttatgattcgagacgttgctagggccgaattagagagtcatgcctttctcatgaatatcctaacatttagcttctttctttttggctacagtcgggcctatggaggatatcctggccactcttgctgaggcctacagtcccgatgcctctcagcctccggctccctcccagtcggtgacccccgggaggtcctcctccaatgccccttcaagcacgatcgtcttgatagacgaggaggatgaagtcgaggagggcgaggtggcagatgcgaccgcccttgatcataagcgaaagggcaagatggtggaggctgaaccttctaagcggacccaaatgggggacactccggtgccgagcaatgactctgggattccatccgaaggggaggaataccgcgtggccaagcacaactacgcccttgataagtacagtcgggggcatattgaggtggaggccttgaagaagattttgcgggaggagcagcagaacactctctacgaggacgccttccggaatccgtgggacctaaacatggatccgctaacggactggttcaaccgcttcgtcgggcccaccttggctccctttccctcggagatgaccagccagttcgtttcacacctgacacaattcccacctaaaagatatgttgcttgtgcctctttgaactctgtctaccaggtccaagacattagctctgctatggccgcggtgagtacttgtaatttattccttcctttgatattttttctaagacatctgatttcactcttgtctcttttttcagattactgccgagaccggttgcctttccaagaccttgatcgaccatggctttgtcatgtccgaattcaggggcatagacgaggctgtgaggatcctgcgggacttgtctgccgaaaggtgggcgttccaggaggaggctcaacgaagggaggcccttgcaaaggcgaagtttcgagaggaggccaagcagagggaggttgaggtggaggcgaggcaccaagaagcgctgaaggtggagggcgaggtcgcagccagggccagatgcgagcttcgggaggccaaggaagctatggacgagatggctgccaaggtgaagtccttagaggagttgcaccaggaacacttgtagtctacacccaacctgaccgtggaggtgaaggagctgagggatttcaaagatcaggccttgaaaaaggcaaaaagggacgagctcctgacccttgtctcctgcaagcattgcgtaaagcgctttgatgacggcgtctacatggcctagcagtcgaatggccagagtatgaagctggacttctatcccaagcctgaagaggctcttgctaagttttaggagaagaagaaaaggcttgatactttacttgaagagcgtcggggccctcgtcttcctccccgcattgattaggacacagagtccaaccaatttcatcattacaattatatctttcttttttatttacagtcttttttctttcctttaagacaatttaaattatcttttaaggggagacagttattgcggcccgtcctaggcccttggtatgttatatgtattatattttttctttggacctgccctttgggtcaggatattttaaatatatatgcttactttgatatatattctgtttgatcttgtttttacttttggcctgttttacatctgtctgcggtggtatgccttagtacccccttgagtggcatgaaaactttgtttttaaggcactcagttttatttgaaatttagaggttgcatacatctttacggtacaaattcttttaacaaggcctaagtacatatttggactattggtaatacttccggagatgatctgcattccaagcccttggcacgatggttccgtccaatatttttagcttataggttccggacacgatctcatcctcaatttcgtatggcccttcccaatttggcccaagcacccccactccgggttcttgagtggctgggaagactcttc

SEQ ID NO: 32224 - DNA, 1340 bp, Cannabis sativa
aatgaagggtggggtcccttcctttgggttcgtgtcaagacttttacaaacaagccattgttgcgaggacaaatgatccgactgcccaaggttagggatgagttttggattgattttcgctatgaaagattatcgaaattttgctttgagtgtagttgtcttggccacccttttgaaaagtgtattgcctttatggaaagaatggatagtggtaatgatgatgatttccaatatgggccatggatgaaaggggcaaaactccctaccaataattatgatcgttatcggactgactttgccaagggtaatgcatggccacttcttacaagattagcccgctccacccttacctcttcactgcatgctttaaacactcgagttcaaccccaaccaagtgttcattatgaaggagaatcctctatacatcccaggtaccatctaccttcacggccacttaattcatcaaccttacaaattaccacatccacccgtggccttccacaattgccaccaaacacagctggtctgtctcctcatgccactactattggtaccaaccccaatatcatcaataatacatctcctacagccttgactttcggtggtaatgctggtactcaacaactttctttatctgatactttttccagtaacccgaagtccccttctccccacaccagcaacactaattcccttgtcacatctttgccaacttctcccaacaccttcccaacatccctcgcatacaataatattccccaacatcctttttcttctggtttatacgttagccccctgaaccatattaactcccacactactggctccaatattaatcaaatccatagcaactcttcccccaaccacccgaaccatcccctgccacctttcaccagtcaccaaaaaaataaacaagtgattaatcactctcctgtggtgactccaccatcccctagcaacccaattgccaacacatccactatcactgacctctcccacatctatatgcccgacttgcaatataatacctttgctacttatccacctgtgctgaacccactttcccccaacaccactcttgcctccacaactataaaccaatcaataaaacacctcccaacctactccactgctgcgatgtctgttaccaaagagaatcaacccccaacaacaacttttaagcggcataatgactctttgtctacgaggaagttcttgaaaagatgccgtaatgctcaaggatcatcatcttctccattgtcaagggaggatgatattgagacgttggtttccgattttgaggattctagcttctccaatgactctagtgcggaggttgc

SEQ ID NO: 32225 - DNA, 2676 bp, Cannabis sativa
  modified_base (32)..(37): a, c, t, g, unknown or other
gacgtagttgtgtataagagccattattccgnnnnnntaagggcccaatggaggcttgaagaggggatgttacaccttgtacccaactagtgtatcgtttctccggccaaagttgtgcacctttatggcaaatttgtctacccctcacttttgggaaagctccgaggagcataactgtgatggggcaatttttaataattgatgttccattagcttttaacgtcatgttaggccgaccagccttatatgacctgaaagctatcacattaattttctattcatgcgttaagttcccaacaaagaatggggtagggtgcctcaaaggaaatcaacaaattgcacatgaatgctataaccttgctctgactaaggccaaaaaggaaaattccttcggccagagttcaggcaaagagaaaaacattacctaataggaagtcaccgaaggcatggacgaggatgtggatccctaacttggggaaccaaatacaaatctagggccagtggaagaattgaaagagatagaaatcaaccaaaatgtcccgaccaggaaactcaaaattggcaaaagtttgtttctcggagtaaaattagctttaataaaatttctaagagaaaacctagacatttttgcttggttgcacgagaacatggtcggtatcgatccttctgtaatattcatgccctaaacattgattcgaatttctgtcccgttcaacaaaaaagaagattattagacaaagaacatgcacaagcattaaaagaagaggtaaaaaagctacttaataacaagttcatcatcaaggctttctacccctacccgacctgggcctgggtagtagctaacaccccgtactggtacccaagcccaacaaaaaaaggcgagtatgtattgatttcattgatctcaacaaggcgtgccccaaagactattttccacttccaagaatagatcagctcgtggatgcaacagtcgggcatgagatcctaagctttatggatgcctattcagggtataaacaaatcataatgcatccaccagaccaagaacatacaagtttctgaatagatatgggtttgtactgttacaaactcatgtcgtttggtataaagaatgcttgtgctacctaccaaaggttggtgaatcaaatgtttaaagaccagatcggacgaaatatggaagtatatgtggatgacatgctcatcaaatctaggaaggctgggggcatatagatgacctggacgaatgcttcaaaatcctcagaaaaatgtaacattaaactcaatcccttaaagtgctccttcggagtcagctcgggtaagtttcatggttttattgttaatgcctgaggtatcgaagccaatcctgaaaaaattcaagccctcctcgccaacaaaaactaaagaagtctaaagcttaactagttggatagccgcactcagtagatttgtttcaaagtcaacagacaaatgtgatcctttcttcagcatccttcgaggtaacaaaaaattttaatggggggaggaatgcgagaatgcctttcaagaattaaaaaggcaacttgaaaaacctcttgtactctcaaaacccctggatagagaaaattaggaatatacttggctgttacagaatacgctgtgagtgctgtgctgatcatagaagaaaacaacgtccagcatctaatctattatatcaacaaaagacttgttaaagctgaaggacagttccattgataaagaagcttacttattgcctaatcgtagcaacaaggaagttaaaggcgtacttccagactcatcctattcgagtatacactgaccaaccattacactaagtattacaaaaactcgacgcttctggacggttactaaaatgcacagtagacttgggtcagtgcaaaataatctttcaaccccgaacagcagtcaaaggacaggccttggcacactttgtagttgagtgcataggcaaagaagaaagtagttcaaaggataacccggagcaagtacaagaatcccagctgaacaataatgaagatagacctacctagaaattacacgtggacaggtcagctacaaatcaactgtctggtgcagggattgcccttgtctcacctgggggcaacacctgcatgggacaatcaaatttggattcaaagcaacaatgaagcagagtacgaagccctcattcctatagattgaaacttcctcaggagcagcaccctgaacacatcgatatgtgtagtgactcaaagttggtagtgaatcatgtgtcaggagagtacgaggcccggggggagaaaattatagcatatttaagcaaaatacaggatctgctcgcataatttaacgctctcaggggaattccaagagaagaaaacacaattgttgatgccttagcccgacttatgagcagcaatataactgataaggctaatttagtcctaattcaattccttgaagaacccaacatcacttgtgcaaaaaaaattgagatgattgacagagctccaaactggatgacaccaatagcagcctacctcaatactggagaactttgaaatgacggaaacaaagcttggaagatgagaaggaaagctatacggtatatcatcgtagaaggagtcatgtatagaaggggattctccatgccactacttagatgtgttacaaaagaag

SEQ ID NO: 32226 - DNA, 1268 bp, Cannabis sativa
agcaagaacgttaagtagctagaccttcgaagttctatcatcactgttctcattgtcatccttcttctcaccatgtaagccattaagacgaagagatcttgttctcttcccagtcttagtagtaggccaagatagaaccaagggacgacctttacacaagtctgcttcacctagatgccaaatataagatatttattaagcttgatttgcatcagaatacatgccatacgttttcaagaaaaaagaaatatctaatattgcactaagaacatgtatacgttaacaacaaacaaaacgaaagacgaagcgcacccaatcgaaaacaaattattccataaactcttgacatatatatatatatatgtatgtatgtataatatacaaacacgtttagataaattatatcaagttgaacatatcgcacaagtaactgatcacacaatcgctttgacatttttgttaccaattcacaattactcattgaatacgtttactgactaaaccttagcattatggcattatccatatatgggggatgttcatcgttgaaaacacattaacccttccaataacttgatgattatttaaagcttcccacgctatctttaatatatataaatatatgtatataaagaaacatgtactaaaccaaacacacgtacaatattcaagaaaattaacgagtgaattcaattttattccatcaagaaggtactggtttctaataagagtgattagaagaatgttcaagaaaggtcaatgagtacaataacaagaaatgaattacacagcgaacaagaaaacctgaatatacattaaattaaggcatgaagaacttacagaaagagaagcgtggtctggggtcactgagtcggtgacaaacagcaaggtgcgaggttaaagcagtagtgtaagccattagaggaaagagaatgaaaacagaagagaaggctgttgaaaaaagaaaaccgaagaaagaaaatatcagacaggggagtaagaaagaagaacaaacaacctatagaaatagaaaaaggcagagctcccataatttggattttggaggcaattttcagttctattgggcctttgatcagatctctatcatttttttgggcttttcctgttgggctatattatggggtttaacaaaagggatttttacattagccgctgttttttggagggaaatttacaaaaatactggaatttaggttaaattttacaaaaatactgtcacgcggaaaagttttcaaaaatactgtatt

SEQ ID NO: 32227 - DNA, 967 bp, Cannabis sativa
  modified_base (27)..(40): a, c, t, g, unknown or other
  modified_base (186)..(189): a, c, t, g, unknown or other
aggatgttaatgaaacatacatggtannnnnnnnnnnnnntggtaaaatatttccaacatataccccctagactaacttggcatgtgagtgcatggtgattgttcattccgcttacgaaggtgttaatccattgtttttccttctcggagacgcccaccttactcaagctaggggtaagggtaacnnnntgactttcattctaacggtcagaccacccttcatgattaaaaatcatgactttacatatttttcattaatttagtctcggtatttttgtgccacgtgttgctactcttgacacgtcattgtcgttaaaatttgggtaaacagtggtaataatcaaaacccagaaggatggatcgaagaaaccaatactactacaggatatgtacccagaagtgaggatgcttatgatcccacaaggtatgtaccattagtggaattggaaaatcgataacttcgacaacgcttggccgagtctaaccaacgaagcagtgagttggaaagaatacacagaatcaacctgatcctggagtaagaaggccgcaaggtagacctcgaactaggatgcaggaagcaaatcaaggaaatctccaaaacatctaggaggagcaacttgaaggaactagggatgttctagtagatggacatcagaataaccaagaacatcgtcgagaagtggctcaaagatcccaagaatttacgaatcaggggaatgagcgtaatgatgcgccagaggcttctcgtaagaatgaaaacataaggcaacccaagactagggaacatgcaatccctcataataaggagagaaatcctgggactcaacctagaacaagtcggttaccaccgagacacctccagggtccttctcgatctgagaaggaggaggcatacacatacctaaacagagggcgtgtatctaaccttttcggaaagagaaggggaatttttacactaaatacctaa

SEQ ID NO: 32228 - DNA, 2283 bp, Cannabis sativa
  modified_base (401)..(406): a, c, t, g, unknown or other
aacacaactatatgttaatttaattggtattattaagatatttgttggtggtctagtgagtaggcttatccactacacatcaatattattatatataggaatttcttatgggctactcaaaattttataataggatcattttcatttttggtatctacaaaaattataacacaattttttttttatacaattatatgagttgttttaagtgtggcctacttacaattttttttcaaaacattaatacttaaaatatctaaaatacttgctataactacaatatacttagtccttcgtataaaagaaaaatttataatttttctatatatccaaaataataaatatataggtgccgtttcgtaacatttttgttttttaaattttttaatcacaaaatgaannnnnnatttttgtttttaaaaattttattgttgaaaaacaaaaatgtgttatgtaaccacttttgtttttcaattttaaaaacataaaacaaaaggtgtgttctgtaaatttcattttcatttttattttttgatttttttttaatcgggtctaggttcgggtcggattcgggttcgggtcagaaggtgggttcagcaccatggtcgtggggaggggatttgggttcgggtcgggaagaaatccaaaatattgattaagaaaaaaaaactaattaaaaaaatattgaaaataattttttttgcttttaaaattttgatttctaattaaaaaatttaaaagtgagaacagttttatagagcatgtttttgaaaaatattttcactttttcaattttaaaaacataaaactgattaaaaaagtgttatcaaacgccaccataattaattacgtcttgaaagttccgtaaaaactttcctacacatatttaaaaatataggaaaaattagcatcaccttgattctaagtttcttattagttgaatgagttagtagtatgctatcgtttagtatattattttttttatggtagacttttccataaatttgtttttgtaaaagtgaaaacccaaatctaatattcaaaggaaatggaactggatgagtggtttctttttctgatcttaaaaagtattaattttattttttcttgaaactatgacaagttaatatgcatcataaagaagagagttatgagatcttaaataacagaacaacgataattttttctcaggaattggtacattcagctttgttgttctaccatgttttcaaaaatctcattatggcattattacgaacatataatggccagtgacaaaaaataaaaacaacatttctattttttttttctcttttccaatattattcaaatgtaactttaatcatctaataataagagctacaattcataataattactgcaaaccataaaatgacttgccaaatcataataataagtgcatttagactagaaagatagaaaaatgagatcaaaagcagctactctttctcaatgtaactttaaacactaaatcaaccatttcatagtccatgatcacgaattcaccatcccgtctctaataaataaataaaaatttgaatgtgaagccacttacaagaatcgtcttcaccaagaccaatcgaaaccaatcaaaagctgcttaaatacatacttgttcttttcatcttaatgtacattaagtaaaaaccaatcgaaagctacttagtttttaaaatctctaatcttctagcttttcctaaatatagaaattttaaagtttcagatttatggtatgagggagattttcgtaacgtagtatactcttagtctcatctagaagcatgcacaactaaaaaacccaaaattcttgacggttttatacaatctggtaaagaattcttgacgatctataaaatcttcacctatatgagtattgcaaatacagaatagaataggcgacgatggaaaaattttaagaaaaaaaattctcgagagttgtgaaaactatcgtctatagtcgatactataggccatagtttaaaactgtcgactgtaatatagcagacggttttaaaccgtgacctatagtatagctcacggttttaaccgtcgctatagtgaattctcccaaaataaaagaatcattgtcttcatcctccacaaaaccaagatgggagcaacgaagaatcgagatttgggccacgattttgttaaaaccacagccctgaaatctccgacaatttgtgaaatacaaaaatctcaaaataaaaataataataaagaaggtacgagaaagagtgaacaagagagagagagagagag

SEQ ID NO: 32229 - DNA, 4825 bp, Cannabis sativa
  modified_base (124)..(133): a, c, t, g, unknown or other
ataaatgatcacatgaacaaaatatcacattaaataagtaatgataataaatctgtttctttattgattaatgaatataaaagattacattgaaatagagtttttatttagggcacaaagcccnnnnnnnnnncacttgcactaacataaaacaatcgttacattattaatcccagattcagtctgtgcttttcaaatgttgttacagtgaaaattttggtgaatggatcaactaagttgtctttagtatcaactttctccaccagtacatttcctcttgccacattttcattgatgatgtggtatttccactctatgtgtttgcttctcttgtggctttgaggctctttactattggcgattgcaccagtgttgtcacaaagtaaaagcagcgctttgtccattccaggaacaacaccatctcctgagaagaactttttaagctagactagttcctagagattctctaagatttcaacacccttaaccgaactcactaagaagaattagcaatttttgtggatagacaagtgtgaaataagctttcaagagctgaaatagagattaatcacggctcccgccttcgccctaccttctgataaggaaaagttcatagtgtactgtgacacatccagacaaggtctggggtgtgtactgatgcaggctaatcgagtcatcgcttatgcctatcgatagttgaaagaatattagcagcgatatccaactcatgacttagaactcgccacggtggtatttgctttgaagatttggcggcattatctctacggagagaaatgtgagatttatactaaccacaagagcctcaagtatttctttacctataaggatttgaatatgagatagaggcattggttggatctagttaaggattatgactgtgaaatcctttaccatcttgggaaggccaatattgtggctgatccctgagtaggaaggatcccgggcagataactaatatgattaatatttcacctcagctagcagaaaacatggttagatctagcatcgagtttgttgtaggcaaactttataatttgacactgcaatctgatctgttagaacaaattaaagctactctgcagatttggaattagtgaagattcgaaaagaggttttagctgatcaagccaaagattttatggtttcaaatagtggaatgctattatttaaaacaagggtttgcattctaagtagtgcgaaacatagaaatgagattcccgaggaagctcataccactccatattcgttacatccgggaactaccaagatgtatcaagatcttaaaccctactacttgaggtacagaatgaagaaagatgtggtagaatttgtatcccggtgcttaacttgtcaacagatcaaggttgaacatcagagactggcaagtttattgcaaccactgacacttcctgagtggaagtgggaggacatcaccatgtactttgtgattggattacctagaaccacaagaatgtacgactcaatttgggttgtggtagatcgattcacgaagtctacacattttctaccgataaaaataacctttaaagtggatcagtatgcagatttgtatgttaaagagatagtgaggttaaatggcgttccaaagtctattatatcggatagagaatcgaaatttaattcgaaattctggcagagtcttcagcgggctatgggtaccaaactaaaattcaatatagctttccatcctcatactaatggacagtccgaaagaacaatatattcagatactggaagacatgttatgagctagagtaatggatttcgaaggctcctggagcaagtacctgccactggtagaattctctctcaataatagttaccagagtataatagggatggctccctatgagtttttgaatggtaggaagtgtaggtctcctattcactgggatgaaacgggagaaaagagatacttaggtccagaatcagtgcaacggactaatgaggccatagaaaagattaaggctagaatgcttacctctcagagtaggtaaaagagttatgcagatccaaagcgcagaaatctggaatttcatgtaggagatattgtgttcctacgggtgtctcaaatgaaagggatcagacgttttgggaaaagatgcaagttatgccctaggtttataggaactttcgagattctcaaaaaagttggactagtggcatatcgtctagctttgcctccacctcttttagcagttcacaatgtattttatgcttccatgttactaaagtacatttcagatcctccccatgtgctgagttattagaatcttgaactggaaccaggcctatcatacgaagaacaaccagtcagatcttagacaaaaaagataaagttcttcggaataagatcatagctttggtcaaggtgcctctggagaaacagtaaggtggaggaaatccttttaacaaggggataaatgtaaagaccgcttaactttgttttggaaattagcatataattaggatttaaatatgaaattggaatattaattatgaattatcattttatggagatttatttgaattcagaatgtattatatctgtcatatatgaaattttatgttttattggaacgcggcctttggccattagaattacatttttgtatttttgtagttacggggaaacctagttagacattgggaatgtgaggagttatctgagatttagaattgatcaaattacccctaagtgacttagaagctttttagttttagtggggggaaaacggtctttttgacaaattagttctttttcctctagtgacctttaattaagctttattgatctaaatatgactttcgatgaatgagaaaaatcaattagatttattcatttatccaagaatagaaaaaacaagaaaatagcttctctttctctctctctcgagctccatagaagccacctagggcttgtgattcttcagcctaattttggaactttagaaaatttcttagtgatttaatctaaggtaaatatcctagcaccttttctttgtaaattccctaagtttcaagtaaggtttatgcatgattttagaattagggtagctatagtagtgttttgtttttattgaattgttctggagttattttgatgttagatgagctgctttgatgtttttttggggcttgttgtggttgttagacaaattttgagttttaaaactcaaatttttgtctttaattacaaattttgattgtggctttgttgtggtgttttattgccttgaatatgttcattgtggtttaaatagcagatttggaaggtttggtaagctttgggattgaattgtgggtgtagtaaaattttgaagttttcctgcactgaaccagtcgaccagtttaggaggacctgtaggaactggaattccggttgctccctagtaaaccccacagaaatggaattccggttgggggaaccggtcttccagttggggcattttgggaaccctagattttcctatttttgcaatatttagggtattacagtgttattcatcgatagagaaacttttagtttcaactttaagtccccaaaaagtgatttagcgtgacactcaccagttttacaaataatgtgatttaggggcatgtaattcgtcgagcagctgttccactcaggttagccagctgatattgggcttagcccaatcttgtcgtttacgactagctgatgggctttaattatttgtcttgtatccacgtgtctcttgccagaaacatggataacaaaaacttatgtacacatctaatatttttttaaataaatcctacatgattgtataactatattttatatctattctaaaataagaatgacgaagagttttaattatatcaattataattaaaaaatcacaaaatattcaattttattctattatatcaactctattaattattactgatttctctccaagagtatgattgaaataattgaatatttatgatactttttctttttaatataatttatttttggggatttttttttatattatttgtagaattttttatatcatttgtggatttatttattgtcaagaatattatttgtggacttgatatcaattatattaatattttaatttttttgacaaagaaatccatttattttaattaaaggatataatgaaaatggaatgtgattcatgatgaagattattattattatgtatgcatgtatatatatatatatgcataaaataaggggcttttttcaaaaatagatgtgatgatcatatagataatttttggaacaaataaaccaaataataatttctcaaaaattattaataaaagatactaaaatatttcataattatattttagaatcattcatgagttagaaagtgttaacgcaaattttcgttaactatatttgagcctaaatggtgataaatttccacagaaaactaaagctacaaagaaaaaaaaaaagaacacacaggtttttatgtggttttgcagttaaaattctacatagtccacgagtcaatcttattagattggtgatacaattctagggcttttttctcttatgaaatttttcgtccctttttcagtataaactaccccaatttataactacataggaaggcagttaattacagatttaactgatattttacagtaataatcccttgaaactgtgggatttgtttacatcccacataaaataaatgcggttaaatatttgaaatccacaccgctgttgtcacgacccgagccctaggctgtggcagatgtgtaatatccataacttgggtggtca

SEQ ID NO: 32230 - DNA, 2344 bp, Cannabis sativa
gcgttcaaccattgatcaagaattttaacagcaaatgcaaccacctcctcaacccttcactttctattttgccaaatacactcattgcgagctttccaaatagaccaacacaccatgaacactcgactcagcctcacgaatcaaaattcttcatccacgccaaccatcttccaacaaccccaagcaaaatcacaagagatcagacaatgggtatctgattctgctaacatctcacaaaccgggcaaacaacttgtaatggtacatgttggataacataaattccttgactttgggtgggatttcaagttgccataatgttttcgagaagccaaaatttgcatccgttgggtaggccccttttagaacttgtagatgttgatatgcactacagacaggataatgaccactcttgtcatggaaccaataccaagagtcttaagaagtagaagagctaagaggaatacccaatatagtttcagcttcaacaatagagaataaatccttcaccacctctagcccttttgccaacttcaaacaagctactaaccaaacatgagctcaccaaaggcagccacggatcatacataatccaaatagagtttcctcaccccactcttcagcgcatgccatctttcaggagctccgttgttgcaaaaatactcttccaaataaaacttggattaactcccagttcagatgaaaagaagtctccacgagcatagtatcgagcccaaaagacctttccaaccaacgaatgaagccttgttatcagccaccaccattttcccaacatggcaagattaaaatctcttaaacttcgaaaacccaacctacccacatgcttataaactacacttccaccaaaactttgccattaattgctcaatttgctcacaaatatccactggcaacaataaaaacactcatagcatatcattttttttttttataataaataatatcacactagtagtactgagcaacactaataccatataacaatctcttccatcaatccttttgtcaatgattgtcattcatttcatattttccaacttccaagccaaacatactatactacatatatataaagaaataaagaggaagagctagaaactactcaatagcactaagatgattaaagggaaaaaaaaagtaggactgttaacgttattgaggtaacttttttacatatgctacattgaataaagttgagcacttgaatttttattcattttactagcaatgaaatctctgtaccaaatagctgaaaatcttggtcttctagttagagtgccaaaatcaacatgatagagtccaaaacgtacactgtatccatctctccactcaaaattgtcaagcaaagaccatgcaaagtagcctcttacatcagctccttttctgtccaccccaataaaaaaaaaatgaagagaaaaattcagtcccttttctctcaaaaatctttcaaagcttcctttatgagattttcaagcatacctaattgtagaggctaaagcacttaagtaggatgccatgtactccactctttcaacatcatttaatgaatcttctacatttaaattgggtttgtccttgtaaccataaccttcatagataacaagaaaaaaacataagatatgaggtttttggggcttaggagagaaattaattatttaactattgctctaaagatatatggtacttttaaaaattactaaaaatttgtgtatttcttcattttattttctttataaaaaaaactatttttttgggtgcctgggctcggtgtagagacaacaatttttaagattgttgatcttaaatactcattactcaccgttttctgtgatgaacataggtatgttgttgtacctttcttttatgtacataataatattttccaatccttgaggataaacatatatccagtcaacttcagtctgcatcagcaagaaacttaagttagtattttttatacccccaaaaaagaagaaattagtttgatatgtcatatgattgatgaagaagtttttttacatacttcttgtccaataaaagaaccatacttttgaggagttcgtaatgcaaaaccttctgtctttgaatttcctggtcctgtttcacactcagaatatttacaatcttttatgtagaaactagtgtagtggtttacacctataaagtctattcctttcttaagcttctccatttcatattttgaaaaaacaggcaaatccaaccccagaatttctctcatctcttcaggatatttcccatgtaaaatggggtctaagaacctgcattgggcagtgacaaaatacctcagtttataaccttgttttt

SEQ ID NO: 32231 - DNA, 3012 bp, Cannabis sativa
  modified_base (2208)..(2229): a, c, t, g, unknown or other
catgaggagaagtctcaacgttgctcatcctttacatactaaaattattgatgaaattagaaaatatgtgaatatattctgtttagtaataattaaattaaaaaaattaaaaaaaatatattaaaaaatactgaaaaaatatttatttttttattaaaataaaataatttaatactttattaaatttaattcatatgccttatttaatttattaatttttttaaaaaaattctataaagatcgatatattatatattgttttaataaataaaatattttaaatgttatataaaaaaataaaatattaaaaaaataacagataactctaaaaaatttaggaagaaaattatcataaaatttttatttaaaaaagaaaaaaatcatgaaatatcttcaaatattataatgaagataagaaattgaagaatcttcatacataattaatatctaaaaaaaattacaaatgattttaaaacggttgtcttcaccgtattttacttgtagtcaccattacatttaaaatcgatgtcacacgaccttcccaataaatttgctctgtaaaataaatcaagattaatttttttataataatattaccatgtagatataattcattattgataagaatatttctatgtttttaaataattgttagtgtgagatatattagggttatttataattttttgttcttgaaatggtttaaattatagtttatagcatgtataatatatagttaaaaatattaggatttttttttttcatatattcatatgtttttaaagttttaatacattcaaatagtttattttgaagagtttcttttttttttttaaaaaaaaaaatactttgtttacaataatgttaaaagagaaatagagagataagtatgatttttaagcttttagattttttaaaaaataatacattttaaatatattttttttaaaaaaaaaaaataaactaatttcatcattttctacctaaatttgataaggtagaaaaatacaacaataatgatacatcttctaattattattctaatatatatatttaaagaaatatatagtaaacaaaatttcacagtattactgcttaatttttcttcattaaaaaataggagtgttatcattaacatgagtcaaatttggatttatgaattgagatctattgatcgtaatgttaattatttctccttctagtcttttcactgaaattgtaactaaaaataaaattttataatcatttaaaagtgatctatactcatttgtggttgccacaattttcaaattttacagacagtacgagctttcactcaatagctttttgaacttaattagaaattaattttttttctaattgttgtatgcattagattttctagtagaatatttattagacacattgagtatttaataattgataaattgataaaaaaaaaataatagaaaaaaatatgaataaaaataataattactttcttatcaataaaaaactatcaagacctatcaagtctccattcttcttatcaatatttaagtcgataaaaaaataacactctaaacaaaaaaacctaagttaaaaataaaaatatatatatatatatatagcttagtaagtgataaaaaatagtcattttttaaatatctttaaaaaaataaacaaagctaaaaagccaaaacatataatttaaatgtgaggaaattacacctatggaattttaaaagttgtttacttaaatatggtatttttaactaagtttgaccaatttatatgatatttttttttaggtatttttatggtatttgatatgccatatatatgtaaattaggttttcaaagtctgtatttaatgtttttattaatttttaggcaattttatttgtcactagtgctgaaaaagtcgctagagtttgctaccggcaccagaaaagtcaccgaagtaactgtcggtgtcgaaaaagttaccagagttactgctagcgccaaaaaagtcatcgaaattggtattgtcgtcggaaaaataccaagaaactggtttcttgatgaagaaaccgatttcttggtgaagaaaccaatttcttggtgatctttccggcaacaatgccaattctgaggaatttttcggcgccgacagaaactctggggacttttccgacaccgacagcaaactctaagaaagtcaccaaaaaaattaccaagaaactnnnnnnnnnnnnnnnnnnnnnntttcttcatcaagaaaccgatttcttcattaaggaatcggttacttggtgatttttctggtgatttttcagcgacaatgccaattctgacgaatttttcggcaccggtagcaactccaatgactttttcgacactgcaactactccagcgacttttccagcaccggcagcaaattccagtgactttatgaccccagtgacaactccgacgatcattgtagtatcacttgttttaattttttttaaaaaaaaaatatgaaaggaattttaatattttcttatagtaattgaaagtgtcatatcctatatatgttaagtttttactttaaatatcatattttttcctattaagtttccttaccatgtttatgtaaactagtaattttattttttctatatttatgtaaagagcattgctattaggcactaatggtgtttaacactttctcggcatgtcgcgttgcgattggctagcgatacttctaaaagttattatattaaattatatgggacccgatacttagttagactaataacgatattgacacataggagggtgctagacaccactggtgccctttagcatttctcttatgtaaatatttttttagccaaaaattttagagttatcatttttttgaaaaaaaatatattatttttaaatatcttaattaaaaaaaaaaatacacgactcttaatttcaaaaataaataaaacttgatggaaaaaaagccaaaaaaaccaaaaaaaaaaaaattaaaaaaatgagaaaattatggaaaaa

SEQ ID NO: 32232 - DNA, 1358 bp, Cannabis sativa
  modified_base (1059)..(1064): a, c, t, g, unknown or other
gtttgggttgatgagtttgctagaacagagatgcctacaacaaactaggagttttttccaatacaattgtggttaaaaagttgtttgttgtctcattggaaatttgatgttaaatctcaactgaacttgttctcctccagtgattgtggtatagcagagaagttatgctttaatgtgaacctttattgacaattaacccttttattttattgttttgaattataatgttaggctatactctctgcttgatttggaccattttattggtggcagtagacaccttttttgttatttgttattgtgcatctaaagttttggattgtaattattaatccaagtacacatttgttatttgaacgaaatgtacactgcagttttcagctctagcaagtgatcatattgtttttggtactaattgtgatagagtttctgttctcacacttgagtttattataatttgactctccaataaattatatttctttttctttgaatgattgttggtgactttgtattaacaagtagttgagaattgatatagcatgcaatatgcttattttaatgctaaagaaaaaaataaccaatcaatgcaaaatgttgtttaatttttggtgtaacaatgtgttataattatgtctgtattaatattttaattttacaggttaaataatactttagataacaatgtatatattataagtttatatatacaattatgttttacttaccaaatataatgatatacaatttacttttatagaacaaatcgttcatataattatacatttagttaccaacatctaaaaaacaaaaaacacaaaaactttatataaaactaatatttacgtgattcggcacgtaactttcatctagtatatatatataaaaccagttctcataacaattttcacattgccatttcaattcgataatcatgttctatataccaaactggtactcagttatagtattgcatctctcttatttatttatttatttatttattttttgaaccaagtagcatttagcttttgatattaagaatattaaattttaaannnnnntaaataaatgtaatgcatctgggtcctctaggtgtccatatttatgagttaataatggaagtagtagtaacggtgtaagagaattgtaacattgagtatttttgcctccaaaaataaagataaagtatttaaatgtataaaatctgaaacattagatatttatgtcgcaatgtatctttttttatcttttcaaattatacattaaaaatgatattttgtaaagtaagacaaaatataaagacattacaactatttattaacgatgctaacactgaggtgatattaaactatgtg

SEQ ID NO: 32233 - DNA, 1756 bp, Cannabis sativa
  modified_base (925)..(927): a, c, t, g, unknown or other
  modified_base (1088)..(1088): a, c, t, g, unknown or other
cgaatatgctcaaaatcaacctaaacttgagagtgagaagaccaacaaggtagacctcgtggctcacgaaccaagagataggaaaatatccaggaagaacaacctatggagaatgagattccccctaaaaatgagaatcatcagccagaaccctctcatagaaatgaggatgggaggcaactagaaattgatgaacaagaaattcctcatgaaaatgaggaagttcttaggactcaacctagagagcgaaggtcacctgtgagtaatcactagcgttcttcctgaacccatagagagagggctcgtacagaccctaatgggggaaatacgacaaaccacactcagggggaaagaacagagcgtgaagaagtaagtgtgacctcagggcggtcaaggacccacagtcgatcaacttggagaggagaaagtacccgacgagctaatgatcgagaaagcattggaaacagtaaatccatgagtcactcgaggacgaagtccatgagcaagacaaggtccgtgagtaggatgctatctttgagtaaaacgaggtctgccaacaattactcccaaccggttctaagagagcacttgaatcggaagaaacttgatctttgccaacaactcagtccaaagcaagaggatcctatccaattgcgaatagacgagttggaagacaagtttaggagatatcaagtgggggaattagggagacaatctatatacgactcagatgaggagctttagccgtaccacccagatatcatgaatacccgtttttctttaggatttaaaaacctgcatgtctcatcgtatgacggaaacaccgatccggtcttgtatttgaacaacttcaatacaataatgcgagcaagtaatgtgacaaataatttacgttgtatcttgttccccacctcgcttgttggannngcaagcagctggtttaacaagtttactcaccattcaataacttcttgggaaaaattgtccagggatttcaagaaaccattccaggctgcaagggatagcaacctgaagcggcctcgctaaccaatataaagcaacagcctgacgagacacttaaggcatanttaagtcgttttagcacggctgctgctagggatagaaatttggatgacaatacacaacttatagtccttcaggtgggaatctctactgatccctcaaccggtgggggcgagctgtgtgatgacttacagggtctagtaagaaacatcactgagttcaacgaaagggctcagctgttcgttcaaaaagaggaagctcgaaaagaattgaatttcttgaaaataggctcgggaggtaatcccagtaatgttttgacaagtactatcttaacgagagttgataactcgggggcttctagctcgaagagaaaggacgattctaaggaactgttaaaggataaaaagaagcagaagaagcaccataagtatgtgctagtgtatactaattataccgagcttaatgaaactcgggggaatatttaccttgcacatgagcaaaaggttgccttcggcaagcccgagcccatgaggcatgcaaggaacaaaagagagagatagatcctaacaaacattgattgtaaataaattccataaggatattgggcacatgaccgacgaatgtcgccaattgaaggatgagatggaaagtctcatcgctcgaggccactttaaacagtacgtgaagagacagggaaatggacacaaccagtgttggatattattttaccagg

SEQ ID NO: 32234 - DNA, 1255 bp, Cannabis sativa
ccgataaagcaaacgataagtaagaaacctaactgcggtttcaacgagtaattactcataatagtaatgactgtttccaaccctccccacttgttatgcacaagctatgtatgtcactattgttgcttgatatagcgaacgataagtaagaaacctaaccacagtttctggagtaatcactcataacggtaatgaccatttccaaccctcggtcataaccgaggcataacaaacacataaacaagatctcaatcataatcaagactataacaatcataatcgttcatcatttaatcataagtggtgcttaatacttttcttacctcagtccaatagttaggtgtgtgggccaacctgagtggaactacgctcgataatcctgggtcctatgttacgaaaataaagctcgataaacaacttactcaaaactccagaatgaccctaactttgtaaccggacatatctaactccccactggttcaaaataacttaaacatcactaaaataccctaacctaggccctgaaaaacaccctgaacaaaattggttttaaggcttaaaactagagtttttcccctgctggcgaaaccagttgatcggtttcacagcacttgtaaaaccggttaatcggtttccctgcttgcggaatcgggaactctggtttttcacaccaaaaacaaccaaatctcctccaaacttgttcaaacttcccagaatagttcaaaaccataaatacaatgtattccaagcaccaatttacaataattcatccatttactcaaaatggcacactcaaatgaaatcaaactcaataatcttcacctaaaccaattcaaatcaaacagtcactatttctaaccaattaaagcttaaacaaattttaaatcaagcctaaaaacacattcttaactcaccttcacatctaagccctaaaatcttggaaccctaccccaaaactcaacctatatcataagaaattcaatgagaagggaaataaatcttaactccaagcctgcacagcttctaaacctcactacttcaaccaaattttgcttgaaatggagttaaaatttcttgttatgcttgctctctagggctgttgagagaagggaacgagaagaagaggttttctttgatttttggttcattattcttatttatctctatcttgataaacttaataaaagaaaataaaaaaaaaacttaattaacttaacctaaagttcagcctaaaaaaacactaaaggacaaaatt

SEQ ID NO: 32235 - DNA, 1412 bp, Cannabis sativa
  modified_base (50)..(53): a, c, t, g, unknown or other
tttacaaaaaaaaattattagcaaaataaccttgtatggtcgcaataacnnnnatgaattacacggtgcgaccataaacgactattttggtcgcaaaacaactatagatttatattgtgcaaccatgaatgtcgcatagagcaaaataagtgaggttattttgtaaattttagtatttcactttgataaattttactaacataattattatttgagaaaattataaattttatggatttttatactttttgtatgaaaatatgactttttttttttttaataaaaagattattttatgggaaaattgaagaaaacttggaaaaataaaagaaagtgtcccaagtatccttatagtaaccagttactataataagattttttttaattttttttctaatttttttccataaaataacttttcttgagaaaatatttttataaatttatactttaaaaactataaaaatcaaaattctctttttttttttttttctaacttttgggtatctttgttgcctaaagaaagattgggaccaggggactccgagagtttttggaccttagtaaaaaaataattattgagtttttttttttttaaagcacatgtggtattttaagaaaattactaaatctttttgtgtgttttaaaaaggaaaaatacttaagtagtactaatatatgaattttgacatttatgctctaaataaataaatatttttattattaatttttactaatttaaaaaggttattataaagtgaattatagtaataaaaatagtgtgacatgtgacaatctagcttgacaaaagcttttcacacaccttatttttagtaaacattggacattacttaatttgtgagaatgcccaaaaacaaccccaaatatctttagtcaaaaattgatgacaaataatatttgagatttgtgatattaaatacaacataggaataggaatagggtataattgagaaacacatattaaaatggtagggaacactacttttaaggtaagtggtttggcttttgtcgtggtgtatagtgacattatttagcattttgaatatgactatttatatatttaattatttatatgtttgatgttggaaaaccaattaattattaatttaatcaactaactacaataacacttctcttctttaaataaatctttattgatagtgaagtgattacttttgcatttatttttatttttattttattaagcatcatgaataatatatctacatgtatctagctttttcaaaagtaaatctaaccaaaatgcatattacaatcttccaagatcacatagctgtcctccctttataatactaaaataaaatctataaaaatacaataagaaacaattattattttgtggattaaattaaaataaattattttaaaga

SEQ ID NO: 32236 - DNA, 3298 bp, Cannabis sativa
ggagaatattgatagcaataaagtggaagaattagtcaaccttggtgagaaggatatgactattatgttggaaaataaaaaaagaagaatggatatggtaagtctgagggatcacgtggctatgggcaacatggacaaatcattgttgggaaaagaaagtattgttgggtctgagccaaaaaacatgttacaggtgggtcttggttcccaagcccaccaagcattatgagtctattattttggaattgccatgggcttgggaacccatgggcctatcaattcattaaggaccttgtgggtcaaaagaaacccaactttgttttcttatgtgaaactctttcaaaaaaggatactgtggagaagcttagagtatcacttggtttcgatggggcgttttctgcggatgttcaaggtagaagtggaggagtggctatgttatggagacatgaggaggaagtccaactgcttggttatggtccaaactacattgatgtattaatagaagctagggagagtgggagatggagattaactggtttatacggggagccaaatagagcttaccgtaagaagacttgggatcttatcagcggtctaaaagctaagtatgatttaccttggtgcattgtgggtgatcttaataatgttacatcgcaacaagataaacgtggtggaaatccatatccgaactggttaattgaaggcttttgtgggatgctagatgagtgtggactccatgatctagacttgagtggttacccgtacacatgggaacgtgggcgtggcacgaatgagtggattgaagtgcgtatagaccgagctctggtttgtcaaaggtggttgagtttgtttcctacggtcaagctatacaacttggaagtttcaacctcggaccattgtcttttacacttgttacccgctaacttgagttatacggcttctactaacaaagtttttcgttttgaaaattgttggctgaaagagccattatgttataaggtggttgaggatacttggagtcaatatgaaggaagttcgattatggaaaagattaagggttgtggagaggttcttgttgaatggggaaaggacttctcgggtaattttaaagcaagaatcaaggaatgtaaagatgaaattcgtcgttggaagaatgggagagactcggtggcaattagtagttataaagcagcccaacttaagcttaataatgtgttactgcagagggagattttttggaaacaaaggagcaagcagctgtggcttagggaaggtgatcaaaactcgaagttcttccatgccaaagctactgctaggcggcgtaacaatgctatccagaaactaagagatgatgtggggaattgggttggttgggaggatgaacttcctactgttgtatctacctatttctctaagctttttgaagctgaagccgtggactttggggctgtacttgcttgtatacagccccgtataacagcagttcagaatgatcagttggttagtgatgttacaagcgaggagattaaaaaagccttgtttcaaatgcacccagaaaaatctcctggaccggacggaatgaccccgggattttatcagaaattttggcacattgttggtgaagatattattactatggtacgaaactttttctctactggagttattcctagtgatttaaataagacaaatattgttttaatccctaagaaaaaactccctgaacatatgagtgatcttagaccaatttccttgtgtaatgtcttatataagattatctctaaagttcttgctaatagattgaaagaagctctacctgatgttatttctaatacacaaagtgctttcttgccgggtcgtttgatttcggataatattatggtttcctttgggatcatgcattatttgaaaaggaaaagaatgggaaaagaaggctttatggctcttaaacttgacatgagtaaggcctatgatagagttgggtggacttttttagaagccatgctaatccgaatgggttttggttttcattttgttgctctaattatgtcttgtgtcactactgtgtcctacaatgtcacacatggggggagagtaatgggccctataatcccaggcagaggaattcgacagggtgatccactttcaccttatctttttctggtgtgtgctgaggggttatcttcacttttgaaacattatgaacacaatcgttggttaactggttgtcaagttgcaaggggtgcgcctcgtgtttctcacatgcttttcgctgatgatagctatgtctattgcaaggctaataatgaggaggctgcaagagtgctgcaacttttcaatgtgtattaaagagcctcgggtcaacaggttaatcaagccaagtcctctatttttttcagtaaaaatgttaatgaaggtactcgggcaggattgtgtattactctgggtatgaatgaagccatggaaaatagtatgtatttgggattacattgtacaatgggtcgaaacaagaatgcaatacttggtttccttaaagataaaatgcagaagaaaatatactcttgggagagtagatttttatctaaagcaggcaaagaagttcttttaaagtctgtcgcccaagcattgccttgttatgctatgagtgtcttcttactcactaaggaaatctgctctaatcttgaaggaatgatgtccaaattctggtggaaatctcagtctaattcttctagtaagggagtgagttggatgaattggaagaaactttgtcgccacaagtatgagggtggtattggctttcgggaccttcgtaattataatctttcgtttctaggaaaacagggatggagattattgaccaatgagaattctttggtaagcatgatttacaaagctcgatactatcctacgggtacatacctcacggctgagatgggtccaaatcccagttttatttggcgaagcattttagaagccaaggacctggtttgtgctggtgcaagaagatcgattggaggtggaacatctgttagtatactgcgtgatccgtggcttccccacaaccaaaatcccttcatcgtttccagccaccctgctctggtagataaaatggtctctaatttgttttcggtctggcagaaaaactgggatatagaggtgttgaatgatttatttgaagagagggataaagagctaattatggcaattcaactcagcgactctgtggaagaagatctctggttttggaaccagtcttcatctggtttgtatacaattaagagtgcttactcttatttgc

SEQ ID NO: 32237 - DNA, 4907 bp, Cannabis sativa
ttgtgttgtattgtgttgtgttgtattgtatagtattatgttggattgtatattgtttttgtaaggtactgtataatattattttaatatcatactataattggtattaacttgtaacaataagttgttctttaccataaacttgataaccccgactacaccctgtccaaaccttggactcgaacctgagctccacccttggattccaaccctagctcaggactcggacccagactctggcctcagacctaactccagacccaaatcttggaccctgatctgtgacctcggtttcgaacttggaccccgatctcgcacacttaatacttaacagttaggtacttatagaagttacaaaatatcacttaagtattattaccgtaaaaaattactttagtatttatttgtaaccaaaaattaaatttaaatatttatactgcaaattattttataaattaatacatacaatttcttattcattaaattgtattatattaatatatatgattgcaataattaataaatacaaaagctatgcaatactctaacatgtccttaattttgagtaattcaattttaagtttgaatttaagatatcacttcattgtaatattgatgctaattacttattattgtatatatagcgagatacatataatttatttttatatataataattagaattattaataaatttatgatgcagatatttacaattgctcgatctaatataactcatcatctaatataaagagagataaatatttatattctcattaattgtataatgttttttttagagcattaattatatagactgatgagaattatggaatttcatttcaaaattaattggtgatgagtagagtagtccatgttcttatatatggttcaatatttttatatttaattcatataggacaatattctttaatacggttcattaataacttatatatatagagagagcacaccgaaccaagagacaactcatgcataacatgtcagacattagagcatgaatatatacaaaacgagagagaatccaagtttgattattaactttttataggcacgctttcagagacatgttatgtaactatatattcttgtttttacacttacaaaatatgcaatatgcaacatccaatatatcaaaaacaacagcaaaaataataatagaaatgagtaataaataagtggattaataattaattcttgtatataggtagcgatggattacacattagtaggttttgatgatgatgatgagtttgtgggctgaataaagaacaagattcgactatctgttgtgcagaggattagccccactcggcacacctcgcttgtcatccaccgccggagcattaccattattcttattattacaagatgaagaaggacccactatgtaatttgacataatcttcccaccacgaccaactacccctgtactactccctccatttcccaacaatatcatcaacacagctactacaaaagccacatgatgatgtgattgtgaacccatagtatatataatatgtaattacactatagaacaatcgatcgagctacgacatatatagatggtagagaacagttcgaaatagttattacataaactgatcatgatcacatatgaattcttgtactaaactacaaaacaacctgtgtaaattggatatatatatatatatactaagctaggtgtgactactagatctgtagacatacatatattatataatatataaagcacgtgtatatgttagaaggagcatctatagtagcgtcatattttagtaaatgacaagtaaatatttttgaataaaatattctattattgtattaattattacgaccataaattttaatacaatgtgaattgtaattatttgatacataacaattatctgtattagcttgtattattttacaaagggtttggagttggggaccctgacttagatttggacccaaatcctgaatcccgaacctcggactcggatccagtcccagttccaaactcgggcccattctcggtctcgaatcccagactcggacctagacccgaccctagaccttagccccggatcctaacccacacccaaaccctagactcggacggggttagagttgggatcgaatttatagtaaagataatataattttacataagctattaatactagttaatactaaaatagtattatattaaataatattaataaaatacaatctaccacaatactatagaacacaacacaacgtaaaaaaccagtttttaagggctcgtttggtaggcagtattgtattatattgtattatattaatattatttaatacaatactatgttaagtattgacttatagattgtgtagggtttatattttcaaaaactcaaccccaacactgactacaggttgggtccgggtccgagtccaagtccagggtctgggtctcagtctcggtcttggttcgggtcagggttcgagtctaggtttgggtcccggtctgggttctgagtcaggtctcggatcttgggtccgggttcgggtctgggatcgggtcccaagtttgggtccgcatccgagtcccaggtcctaggtctaggtctgggtcttgggttcaggttgaattggagttgactctagatcctttgtaaatattataatacaagctaatacgaatcaattgttatgtaataaataatacaacttatattttattaaaaaaatttgtcgtaataattaatataatacatttattttatctgaacataatgttatttattatttaatcatgaaatacgtacgactcttattcaccgtaccaaacgagccctaaaatattaatttggtacacccccattgttattagttagaaaaagtggtacgtagagtatagtgtgggctgtgttgcatatatgttactgtgacctatttggattgtttttttgttttttgttttttaaataaaacactgctttttattttaagaagggcagaactttcagaaaccaagaacaaggcaaagagagaagaggccaacgtaagagatcttttgagttttgtgtaattgtgtcatttataattataggtgggtgtgaacaaatggggtaataataattataaatataaaatctatgggataaaaataaaaatataaaaagatataaatagaatattaatttataggagcaaaaaagtgaaaataagtgtggaatgggacaaatgacctccataagcccccttctctctaacttagtatttttaacaaattggtgtcgcatatgatatatttatatttatacatacatcatgacatactgcaagtgattgtgtatacaatagtactattatttttgagattaattactagttagacaatgtataagaatattaagttaaaatactaataataatcaaacatgcaacaaatgttgatcatcgaccaaacttatatcaacacttttttaagtaagagaaacgttactactcaataaagaacgaaattacacaagtttggctagccacaagaaggcacaatctaaccaatcaccccttatacaaccaatctcaaccaatctttatctgcttaactaattcctaaaggtaaaactgtaattatattaaatacatcatatctataattatctttagagtatactctatagtcaaaccatctcttcccaaaaaaactaagttcctcaccttccatatgtggtacaccatggccaccaaagccatatcatacactcctcttcgaaagttactagctttgcttctcgaaatccacctcagcatactaaaaatgatggtttttggaactctcattcctaaccaaagtttaatacatccaaacatatatattgacaaacaagaatgagtgttgatgatttttatcatgagagccacagattaaacactttttcccaatacgcaaccaagttatgcaagcaaaaatgttgtgtaggagacctcattcgtttgatcagtgaagatgtcaataatcttcctttggactaagctcattccataggaaattttccaagatcacttaacaactcctattccacatattaaaatgatggcggaaccatccgaaattttcttagaaaagtgatcaacatccacaatagtctattcaacaactgcaataattgtttcaacgatgtcctctaaaattttactagccaaggttcaggctaaaacaaccacaacaacttgtacaatagaagtaacaacaacaaattccatgagacaacctgaagctcaatttagtgttcttaataattcatgattgagaattggtcatccattagaaacttaaaaaataagattgagaaaatagccactctcatgaccaacagggctcaagcaaatatacctaacatcactgaagtcaatcctaaatatatagcaataccagactatcattttgagaagtggaaaccagtatgagaggcccaaaacatatcagataattaaagaccagggcaaggatcaataggtacagggcgcagtggaatgaaagcaaggtgaagagagggttactaaaatcgaccagaaaaaaaagtaatgcctacagtaatcccaaagttatcaaggtgggaatgaatctatctcgagtggtaaaagaggaaatcgtgtacacagtaaagaaaaatcaagatatattggcgtggagccattcaaatatgattgggatcaatccgaactccatctgtcatgccctaaatattgacaaaaatacaacaccagttcgctaaaagaggatcactagatcctgttagggcgaaagcagtgaaggctgaagtcgacaaattgacttctattaagtttcttcgataggcattttattctatgtgcttggccaatctgatactagtcccgaagccca

SEQ ID NO: 32238 - DNA, 1043 bp, Cannabis sativa
ttttgtcaaaataaaatttaatagagatattatgacaaaactggttacattttctgtacctgttcgtgtcagaaattgtcttaaaattggttatattaaaaaataaattttgtgaaaattgagctcaaggttctatttttactattttggaaaatacaaggttcattttatcaactaacaaaacagatggtccaattgataacttttacaaaacacgaggtctaaaatggtatttacccttaaattttcttcgatattcatgacctagtttttaactcattgaagtgcatgtcaaggttcaaatatcactaacactaaaaaccaataaaagttcaatcacaacctttttgtaaaatgtaatttattagaggttattttgtttttggttattgagtttttgagagtggttattactaattctttaagttttttcttttcatctgtataagggatattggaaccctttttataaacttttttcttttgatttaacagttataccacacgttttttctctcatgcatcaaagaattatatctattagattctgcattttattattttatagattatcaaggaatccactattggaattgtgatataggaagttatgggtcataataatcttttaaatgttcagaggggataatactttttctctgttattcttaatctcagagagtgggtgatccatccatctttttgatatgtatgccttttttccttcttataaattcaagtgaagtgctgatttatcccataacactcttctaatgaatacattatcatgacacatttacttatccatataaatatatatatatatataatgcatactatatggtgattgtcttaattaattaattaaaaataattgtcatttggtcattgtcttaacttattatgttcaatttaattagtaatatgaaacctttatagcttcgctatatatttctctatatacatgttggttgtaatttgcttaattgctacaacaagtataataacatgtgaaaggagcttaaacatgtggaagcaaattt

SEQ ID NO: 32239 - DNA, 3339 bp, Cannabis sativa
acccatgataggataacctgcaagtaaacccatacaagcagccaacaaatatatcatgctagtgctatgttcacacaagcagcagaaaacctatcctataagtactattctcacacaaacagtcaaaagcccttatcactatcacatacttacaatactaacacaataaaaatatataaaatctcataagcacatgaacatcaaacccataataaagtcgtatgtttcaacatacaccctgtgcacagatgtccactcttcttaccttagttgttcagaatacatttttgctacttcaagcacctaattgaatttctttgctgagaacaagatcctcagatctgcccagattgtggtcgtcggagttacgaaagcgtagtcatcttctccggcggcaagctccaaactctgtccacagtccgttttgatgcgtctttttgattgggaaatattcccaaggatcccagaatctcaaagaagccaaataccactgatattttgtctcgaaatggtcggtttgagatcgtcttctccaaacacggtacaccgccaaaaatggagccaacactgtgattttcgttttagagctccaaaccagtttcttgatgaagaaaccactttcttggtgattttttctagcaataatgctaatttcgacgacttttctgaagtttgttgtcggtgccagaaaaatcaccgaagtagttgtcggtgtcagaaaagtcaccagaaaaatcaccaagaaaatccagcaacaatcccgattctgataacctttctggcagcgacagtaacttcggtacttttccaacaccggcagctactcttgtaactttttcgataccgacagtaaactccaacgattttttcggcaccagtgacaactccgacgatcattgtagtttcatttgttttattttttaaaggctgtaagatcggataatgccaagaaattaaatctcacttcattctatgcatccaaaggtatgatacattatcactaatgtgttgagagaccccaacaaaactcattggttgaaaggaaataccaacacattttaaatgtggctcaggcattgagtttccaatcacatctcccactggtttattggccatatctcattgcaataaccacatatttatcaatcgtacttcctttgcattactgaaagacagtatttcttttgaattgttacacaataaatcccccaactatgaccaccttagatctcttggatgcttggcatatggttccaccttggactctaaacgacacaaattctccccaaggagttgtgtctctatctttattgattacccctcaggaatgaaagtttatacccttcttgatattgagtccaaataaatctacacatctcgtgatgtcatattccatgaaaatatttttccttatcattccaccacatcaacatccgagattgaccattgcttgtcacaaattattcttccaagtcagcaacatgttgcaccagcaaccaccaatcataaaccagcctccacatatttgattacccccaatcatccaatccataaacctcagaccactaaaacaggtcgacaagtcaccaaaccagtccatttataagactatgttatgtggcctccactgaacaccccatagaacaattcatgtcatatatcaaactccacccacaatttaaagttgatgttcttgcaacatacactcacattgaacctcaaaactatgttgaggcttcataattcaaacattggcttcaagccatggacaatgaaacacaagctttagaaaaaaaaacttggactatcaccaagttacctccaggccacaaagcaattgactgtggataggtgtataaagtcaagtataactaagctggagaagttgatctattcaaagctcgtcttgtggctaaaggatataaccaaaaataaggtattaatttctctcaaacctatgcagctgttgcaaaattcaacacttaaaaaatttctttgccttagatgccattaacaattggataatacaccaaatagatatcaacaatgcattcttccatggggatcttcatgaggaagtttacatgaaaattcctcctagttacaatgttcccccaaatacagtttgcaaattaaaaaaaaacatacacgggctcaaacaagcttcgaggtaatggtatgccaaattaagctcaacactgttggaagatggattcactcaatccttgttcgataattctttgtttattaaaaggacaccagccactttcatggatattctcatctatgttgatgacatgattatagctagcaataatgagttagccacctccaacttcacacaaaatcttgatgctaagtttaaactaaaagatttaggcaaacttcgattctttctcggccttgaaattggcagaactccacaaggcatattcatttcccaaaggtcatttactttgcaattgctcaaagacacatgctacctaggtgccaaacctacctccacacctatagaaatcaatctcaaactcagtaaagataaaggaaaccccctcccaaatcctactgtctatcgaagtttgattggtaaactcatttacctcactatcactagacccaatataacatatgttgtaaatcatctcagccaattcttatcatgccctcgggttccacacatgcaagccaccaacagaatacttcaatatctcaaacaaacccctgtccaaggtctttttttctcatctgatgcagcccccaacctgtatgcttttgcagaaaccaacttgtctagggacaatgtttaggtttctttctttactgatgcagactggggcagctgtcaagacactcgtcgctcgatctcaggctactgcatattccttagcaagtcacttgtctcctagaaatccaagaaatagcaagtggtttctcgatcctcaattgaagctgagatcgtgcaatggctaatgctacctttgaattaacttggcttcttgctcttctcaacgattttggtgtctcccacaatagaccagctaacctctactgtgataacaccggtgctattcacatcagtgaaaatcctgtatatcatgaacggacaaagcatgtggcaatcgactgccactttattcgagagaaaattcagcaatgttccattcaactcctacatgtctcttcacagcagaacttagcagacatcttcaccaaacccctactaccaactcctttttccaacattgtatccaagttgggtgtcatatatatttacactccaacttgaggggggctattagaaattagaattagtgttgtttattttctgttttatttttt

SEQ ID NO: 32240 - DNA, 5326 bp, Cannabis sativa
tactatctttggtgttcaaaaatactcttcttaagaccatctttcccacaaagaatttctaagctttcacttgtttgttaaaatatcgagctactttttgctgatgggctatcagttttaagttttctgcggtctgcttttctttaacttcatcaagtgattctgcaaggagtacatgattgacctctttgctatatgttaatcttctgtgggacgacagttcgagttctacgggcagcatagcttcatatctatatgtcatggcaaatagagtctgtttggttgctgttttctcagttgtgcgatatgaccatagaacttcaggaagttcttccggccaatttccgttatcatcttcaagtttcttctttagggtgtccttcaatgtcttgttgactgcttcaacttgaccatttgcttggggatgccccactgtggagaaactttttatgattccatggttcgcacagaaatcagtgaaggattgactgtcaaattatttgccattgtccgagatatcttgtatggtaatccaaaccgacaaattatgtttttcacaatgaattcttgcacttttttgacgtgatggttgccaatggctcggcctcaatccacttggtaaagtaatcaactgcaatcactacgtactgcactccgcctttgtctttgggcaacggtctgatcaggtcgatttcccaaatggcgaaaggccagggactttgcatctgactcagttcattgggcagtgcccgaggtatctttaaaaatctctagcatttatcacatttcttaacgtaggccttggagtcttcaatcattgtcagccagaaataatcttgccttataattttcttagctaaactctgcccgactgcgtggttaccacagaatctgtcatgtacttctgataaaagtcatgcagcttcttcttgtgttatacacctaagtaatggcatgcaaaatcctcttctatacataactccctctaccatgatgtaccgtgtagcctttctcctcattttctgagcttcatttctattgtttgggagttttccaacgctgaggtagggtgctattggcgtcatctagtttggggatgatcaatcatttcaacctcttttgtgcctgtgatactaggtttttcgagacactggataggaatcagatttgctttatcatttgcattactgcttgcaagtcgagctaatgcatcagtagtcgtattttcttcccttggaaattcttttagagcctagcttttaaactatgcaagcatatcgtgtattttgcttaggtaggctatcatctttttccctcgagcctcgtactctacggatacatgatttaccaccaactgtgaatcgttgcagatctcaatgtgttcgaccttcatctcccaggctagttttaggccggcgatcagagcttcatattcagcttcattatttgatgccttaaatccaaatttgactgcagtgtgcaggtgttgccccccaggtgtgacaagggcgattcctgcaccggatagttgatctatagctgacccgtctacatgtagcttccaagtcagcttgtcttcactattactcggctgaggtatttgtactggctctgggttgttttctgaaatgctctcttctttacccgtacattcaaccacaaaatttgccaaggcctgacctttaatcgctgtttggggttgaaagataatctcatactggcccaactccactgcccatttgagcaaccgtcaagaggtatccaatttttgcgatacttggtgtaatgattggtcagggtatactcgaacaagatgagcctgaaagtagggccttagctttctcgttgctaggattaggcaataagtgagcttttctatcaatggataccgacttttagcttcaatgagtcttttattgatgtagtagactgggtgttgaatatttttttcttctctgatcagtacgacatttacagcatgttccgtgatagccaggtatattcctaattcttctccgtccagaggttttgagagcacaggagattttgcgagttgcatttttagctcctgaaaagctttttcgcattcctccgtccattcaaattgcttatttcctcgtagaatgttgaagaatgagacacacttgtctgttgactttgaaacaaatctgctgagtgcggcaatccaaccaatcaaattttgaacttccttgggttttgttggcgatttcatatccaggagggtttctagattggcttcaattcctcgggcattaacgataaagcccagaaacttacccgagctaactccaaaggagcattttaggggattgagtttcatgttgtatttcctgaggactttgaagcactcgtccaagtcatctatatgccccccagccttcctagatttgacgagcatgtcatccacatacatttccatatttcatccgatctggtctttgaacaacttgtttaccaatctttggtatgtagctttgacatttttgagaccaaatggaatgaccttattacaatacagaccaatatctactcagaaacttgcatgttcttggtccggtggatgcatcttgatttgattgtaccctgaataggcgtccatgaagcttaatatctcatgccctgctgttgcatccacaagttgatctattcttagaagtggaaagcagtcttttgggcacgccttattgaggtcggtgaaatcaatacatactcaccatttcggttttggcttgggtaccagtacgggattagcaacccaggccgggtagaaagctttaattgtgaaattattgttgcgcaacttttctacctcttcttttagtgctagggctcactccttgtccaacaatcttcttttttgttgaacaggccaaaaattagggtcaatattcaggacatgtgaaattatagaaggattgatttcgactatttcctcatgtgaccatgcaaaaatgtccaggtttgctctcagaaattttatcaatgctaattttattttgagcaccaaaccttttgcaattttgaccttcctggtcggaacatttgggttgatttcgatttcttctaattcttccactggaccaacactggtatttgcttccccaagtcggggatccacatcttaatgttcgccttgggcagttccctatttggcaatgttttttcccttgtctgaactctgactagagaatacttcatttttagccttggttaaggcaaggttataacattcccgtgcaacttgtggatttcctctcaggcacccaaccccattcttcgttggaaaattaaggcatgattgaaatatcgacgtaacagcctttaggtcatataaaactggtcggcctaacatgacatcaaaggctgatggaacgtccaatatcaaaaattgtgccattacagttatgctcttcaaagcttgcccaacagtgaggggtaggcaaattttccctagaggtgcaacactctagacggagataccatacactggctgaagacagggggttaagtctttgagttggagccccattttttcatatggtgttttgaagaaaatatttgtagaggctccattatctatcatagttcaggccaccattttgttggctatctggacttctacgaccaacgaaacgttgtgtgggaaattaatcttgacagcatcttcatcattaaatgttatggtgggttcccctgctcgtggtattttttgcttcatttctttgacggtcagaaccacctcttcttgctcgtgctgtaatgttcgagcatacctttcccgagctttgctcgaattttcagctatgtgcgagcctccaataatgacttgtaaatgtccatctactagtggtggtagtaaatcttaattattatctgtcagagcggtcctttgattttgatcgggcttgacatgcatgtgcaggttattcaatttcccacttcaaattgttgcattcgttggtgtcatggccataatctccatgaaaacggcaaaacttagtcatgtctctcttacttacgtcctttttcattggagcgtgtttcttgtacggcgttaatgactgagtaaccatgtagatattctctaaatcttctgtcaggacagagaaagtagtaaacttggcaggattttccccaggggcctgttcggttttgccagaaaactttccctttttaccattgccttgtttgttatttttgttaaactttttaacgcccgagcttgaattgcttgggtactgagggagctggagggatgttccagcagagggagcttttggctggccaggtttaagatcgacttatgcttgctgaatggcctcttcgagctagatgaagccatctgcacgatcaaggaagtcactcatagaatctactggtccgtctcttttgatatccttgcaaagctctctgagaactttgatgccccctgtattgcggtcaattttccttcttcggttaaccgtgcaacctttgttgcctccatcatgaatctgttgatgtaagctcagagagtttctcctggcctttgcttcaattcgaccaggtcttctaaatgcaatgggagttggcgagaagaagagaattgtgcatggaattccgaggacaaaaccttccaagagtttaaccttccgggtgtcatcttgaaataccattgctgggcgacttctgagagcgtggcaggaaaaactctgcaacatacatctccttgtactccttgtaggtccatttgcatttcaaaatacttaagatgtgataagggatcttccttcccagtatacatcttccacgtcgacatcttgaacttgtgaggcaactctaggacattgatctctggggagaaaggggttcacttgctcggtccaactcgaggtcattgttcttctgaccggccagaccttggaacatattttttagttcgtccaactgtgcttgcacagatggattaacttgttcagtctcttgaccgaccagagtcacgttaggatctctttgagcgggattttgaacacgagcccggggctgaatgactggtgcgacatactcctcgtctagccctctccttctgttcagatcatccctaagatcatgagctattcccagtatattaaatatagatacaccaggctgtctcagtgacttgttggtttgaccgatcacttggccgaaatcgttaacctgggcagagttattaggtatgacttcttttgacaaattactagataaggtctgtctacctactgcttgacccacaggcggaacctgtgactagggattgagtggctgaccgttcagagtttgagaa

SEQ ID NO: 32241 - DNA, 1235 bp, Cannabis sativa
agaataggaatcggaccaggtcaaggactagaacgcagacctgggaagtagcaggacccaaacctaaacaaaaactcagactagaacccatactgagacttggtcccggatcgggacctaaacaaagaccgggacctggacccagaccgggacccagagccagacccagacccagacccaaaaactggggctggacccaggacctaagaaccagactcggaccagggatctgaaactcagacccacactaggagtgggacccaaacgcaaaccaagacctagactcaaaccaggactcaagacccgaacacgaatcgaaacacaaacttggacccggatcaacacttaggacctggacatagatgcgggacccaaaccccaaaattgggaccccaaacttggaccaaaacttgggcctcgaaacttggatcaagatccgggacccgcccgagacccaaatcatgacctaggacccacctcgggacttgggatccgggactcgatgcttggacctgacacatagtcatttttttgatttgggaatcagaccagaacccgaaccctaactcgaactcaaaccaagacctggacacatacccagacccagacccacattcgggaaccaaaatgaaaacttgaactagaactggactaggatcttagaaagagactgggccttccacccggatcggcagccaaacccggacccaacctcaaaccctaaccgaccgaaacacggacctaaacctctcccctaacccaaatcaagactagaacccaaacagagacccataatcgacccgaactcgtaacccgtgacttgaactacaaccgaaaccaaaaggagatcgggaccaagaaacaagagtagtactaggacctgaacccatacagaaaactgcaaccagaccaggacccggactcggacacagaccctccctatgattgggtcccaaacttgaatccaaacccaaactgggacttgggacccaaacccagacctgaactcaaacccaagcatggaacaggacttgggaaccacaattaggatcgagacccaaaactgcacccaagtctcggtctcagacctagaccaagacccagatcgggacctgggacatgaactgaaaccagactggaacccgtgaatgggatcccgatcttgtcccgggatctgggaaccggggcttggacaatacccatagtcggtgtcttgatcggggactcaaagaagg

SEQ ID NO: 32242 - DNA, 2643 bp, Cannabis sativa
agaattgagccatatataagaacatgagctactccgctcattgccaattgattttgagatggaaccatataattctcaacagttttattgaaattttagcaaatgaaaagaaatttttttagcgaatccataagaaggaagactatacgggatgtatctgaatgtcctcaaagggtacttttggatggacagttcaagaggcgacttgaagctaagactggcgtggcactcctctcatgacaccaaatctcacaatttcaagaccttatatatcctttgcgccatacatgagaatgtgtagaccacccaaggagacatgccatttgtccaaccgctactctactgatgtttatgtacaccaaggcggtgcacacatgtcacctgtcactatcatgtggtctcatatatggacgactgttgcttcacgggctcggcctcatcaaatcaacccaatgtcaatatatattatttacatttaccttatttgtgggccatgcttatatgctaaccctagtccgggtataatcatactcgactttagcctataaatataaccataaccctctaaagggtttgagattcatccttggagagcaaaggctaagagttagggttcataaaatagacaagaacacttatgtaatatttgaaggcttttcaagttaaataatgttgattcgtggactagaatttgttaatactcgaaccgcgtaaaaattctcgtctcaacccttacatctaatctattttctttagttttttaatcggtttccaaaaatttagataaacaatttttaatactaattaagtaataatatataaccaatattatctcaagatcaaatgaacaaaaactaaaaacatacttagatatacatatatatacataatgaccaacaaaaaaaattattctgaattaagatcatttttgtcaactttgaaatgtccatgatactatataatttgggaattaatgtttttggtatcactctagacataacattattggtacattctttttgttttacacctaaatatagttataattctaattatttacctaatgatttacattgtaattttaatatatatttcatatttttccttaaaattcaaatataggtataaaaaacaaacacgtaaattatttttctaaaattatatatattatgtaggtataattattggttacatctatacacatatagatataaaggtgtggtgagggaagttcccaacaaactagtatggcttgaaatcaggggaatcatctatctgatccacttcatcaaccatccaattaatatttacaaaactcatatatatatacataaagataattgctaaaaagtattaatagtgtctatgtgtcaagtacattttttggaatcatatcgctattggtgtaattaagtatctggtccccatataatttaagaaaatagtttttagcaatattgtcaaccaatcgtggggcaaaaggtgctggaaactactggtgtccaatagcaatactcataaataaatgatatatatatttagagccagggacggacctactcttaacaatgagggggttatagctcccactaacaaaaatattgtcttttaaaaaattaaatgtattttttttaatttgataattataaactaaaataataaaaaacccccacaaaattaaataaatctagtaagagtgattataatataagtataaatattttttaatgataaataagcccccacaaagtaaaaattttgggttctgtttagagcattgctattaggcactagtggtgtccaaaacctttctataggtgtcaccctatgattggttagcaatattccctaaaatttattttcttaagttatatgagacctgctatttaattacaccaataataatatgacactaaaaaaaaatactacccaaacaccaataataccatttaacaattctctctatattatacatgaatcaagctgaacaatcatttatgaggttttaaattcatgatgaaccaatcaacaatatatataaatattttaaaatattctataagattctacatatataggtccttatatcattattattttataaaaaaaatatagatcattagattcattacatataaattttatatataaagaatagattttatctgtattttgttaagtggtaataaattttgtttcattgtattaatttcgatttcgaatgatttcaaatccaatgagtaatctttcttgaatgaaatttactacatatattattatcaattttgaatgtgaacatatatataaaacagaaaaagaaaacttattaaatatttggtagttgcaataataaattgttattataggatcgaggtgtcattacaaagtggatcgagtctagtgatattatatattattaataataatttgtgaaatagaattaatgaaaaaacagatgtatacatttatattctattaattgttttgtgattaattattgttaatttatttattgtgatttgttacttgtatatggtacttaattactttcggctctgctgtcctatgttatatgttcaaggaaaactagagattaaagaagaaattaaacacttcactctacagatttattaaactggtact

SEQ ID NO: 32243 - DNA, 1716 bp, Cannabis sativa
ggaggggttcgtcaccataaggcggcttctgaagttgtagggtttgattgatagcagttgtgcttggggaaatgaattgaagtgcttgcttagttctaatcagattagcagtgagtttataaatatcattctccttctcatcaagaagtttgttgaggtttttaaccgtgtcctctaactttcctttttcagtctccacttactctgaggagctctttagacctctcatctgtttagtcatgtactcccattaggcaaacatttcgtcataggcattttgtctatctacgctgtcagcttctgatgtagtggagactgcatcatattcagactcaactgagtgacagctttgggccatgaaagctaatgcttgcttatcgtcatccgtgctttcactggtagtggagttcttttcttcttcactatcactccatgtcgctgcaagggccttcttctttatgagagtgtttgcacactcggcctggatgtggccatatccatcacactctctacacttgattcctcgattcttttgatcaacagatggttgtccttgtttgaagtttccacctttgttcttcatgagagcattttctttatcagtaggaaaatttgtcttgtagttctttttcaagaacttggcatagtttctcgttaacagggcaaaagtctcgtcagtaattccattcaattcttctagtgttgattttttgttttcttaatgaatgagagctatactcacatcagatttatccttgactgcatccttctgtttctttattttcttccatctggacagtgatagctcataattctgcaaggacccaatgagctcatcaagatcaagttcctcaatgtttctcatttcttcaattgaggtcactttacacataaatcttcttgggaggactccaagaacttttcaaaccagttttgactttgagtaggtttttcctagggcataggactcattggagatatcacacaagtttgcatgaaattcagctattgactcatcttcctccatggtcagattctcaaaagccttggccaaagcacgcagccttgatttctttgcggcatctgttgcctcattttttattttcagcttctcccatgcttcctttgcaatttcacagttagcaatgacctttaattggttcgtggagacagcattaaacagtgcatgcctttgagttgaatagagccctttccatttcgtcagaggtccatcggctcatgggtttaggtgtaaagaccgcttagattcaatttagaaattagcagataattatggatttattatgaaaattatttattaccattgaattaattatttatgatgatttatttgaattcagaatgcatttttatgtcacatatagaaatttcacaattttgcatattttgtgcccgacaacattggaacgcggtgtatggcttttgaatcacatcttagtatttttagtatagcaggacaatagtttagacattgggaatttcgggaatagtcaggatgttagagtttcccaaaataccccttagtgccattttatgatttttagtatgggaggggcaaaatggtcattttgccccataagcttttgtcctcttgtggatttaattaaataagtataatcaggtttttaatatttttttggctgagattgatttagtaaaaccaatcttttatttcatttattcaaaaaaatagaa

SEQ ID NO: 32244 - DNA, 3544 bp, Cannabis sativa
tctagcattaataaagattcaaagcctttggggctgttctggccgaggagtaggcaattgatcaactgatcatttgttcgaacctcgtaaatctattgtgtttgatttctcttctctaatttctttactgttaaattgattgtccattgttgtcatattcaagttcttgttattattttctctgcaactagtttactggtttactggttttattgtcactgttgcattgttattttcagttgcttgttatgttcttaatcttgttctttgcattgtgttatttgcgaggtgtttgatcatgcattgatcacatcatatatatataaaaatatatatatatgcatatataacactttaatagtattgcattaatgaaaaggatcgggtgcatgcgtaactttaatagtggataattttaatttctagtttgtaaaaagatatataatctattagcacaacaaccatttcactggttttgtttatataaagggttttgcataactttattattacaggtcaaaaagaaatatgtgaacaagatacaaagctctctcacccaattttatattgccaacggaaaggaaaacccatgaccaaatcaaagaaaaagagagggatcaaaacaaaagcttgatttgacttgaaagattaaagacttaatttgtatacacttttaattaattgcattctccaatcatatttcatatatgttctataatataaattatatatctataaatttgtcggattaattatagtactgcgaattccgtgtacgtttgtaaaactaaattttttcttttggatccaattaattctttatataaattgatatgaatttctctccaaaaaaaaaaaattgatatgaacatttatatctcgtggaaattaactccacctcatcacgtcacttggtaagcacgagctttagaacactttttctcgatcgcgatagaaatttctttgtatttttactcgaaaaaaggtgattataatatatgaaacaatgaaccttttttaatttaatttatatgcatgtctatcatcaaaccaataatttatatatgtatcaatggttgatttaaaaagtgcatcagatatcatcgaaattctggataagatattacgtacgtacgtctcttagggttaactaaaaagtcaaattttactttaatattcacagtcttatatattggtgaaaaacgaaagaaaaagaagccgtagctccattacatgaagtgatcgatcgattggcttaaaagctttttaattaatctagcttgatattatattggcgacgactaagtttttaaaccgtaaatatatatgtaagaggtacgtgaattacataaagtaaatttgagtattgtttttcagagaaaaaaaaaagtaaattgttttatgacagatgtacaaatttgtagttttttaatttatttattttttaaatgtaaaattataaagttttctcgacatattcacgtgagtttgcattaattaaagaggactattattgaaaagaagaaaaaaaaaacagagaaagagagaaaagagttattattgttatgatgagtttgactttctatccatattcatgcattcatataataaacaaaataaaagggagaaagtgaaagttaaaccgaatctaaataagaattaataaagattaataatgttatgctgaggcaactcatcacaatctgatgatatatatatatatatatatatcacatattattgtagcttctttattagaaaagaagtagtgaacatgagaatgcttttaattaatcaaaatcgttttcttttgccgtaacatgcataccatacatatatatatataaaaaaatgtaaataagtataatatacgtccaaaactttcttggttttcaagacaatctagctgatcatattctctctttttctttttaataattggggtcaaaaaaattaagatcgcaaattagtttctctcactttcttatattagtaaacgaagaatcctactggaccaatacagatcaagatcaagatattatttgcacttttatatttgaagctagaaaaaaaaaataatagtggaaaataaaaataaataaataagttgaggtaagagaaagaaagacaaaagtcgacattaatatcatcaaattgaattgtcagaaaagcaatatttgtaaacgttaagcatcatcgattgaaaatagggcaggtggaaagaaaatattgctgtagctctttggacacttggcgaaaacaagggccatgcatgcaaagatatataacatatcaactatttatatgatataagcgaatcaaaattactgtgaaaaaaacattttaaaaggactatactaaaaaggaacttctatggatttatatttttcaaaaagcgaatcaaatttactgtatataatagtaaaatttttaaaaagtaggggatagaaagaaacttcgtttggataattccatatatgtagaatctaaagagctagggtttgtacaggaaacaacaggaggttgcccttattgttcgtgtttattacaaacaaaaaaggaacgaaaaaagaagagaaaaagtatgcttggctatgctagctggtcatgattatactattattaattaattatcttgatcatgatcagcttatcttagctacataacagtaataataataataataataataataataatgtattaatcaagaacttgaaaccaagaatcacctctatttataattataaaattgcaaaaaggaatgtggatgttactgctatattcaattcaagtaatttaattttttgtattgttcaatcaatgaaaagttatatgtatttatatttatttatttatatatatatacatcatagaataatcgaatatataagttcaaataattcacaattccatgtagacacacgtattaattaaatggaataattcgaccccagtaactcaaacttttattaaattatagtccacaaatagttgtagctagacaaccgcatatataaacataaataataaatattaatttgtatactataattagaacaagtgtactacttatatatatacctaatgattaagtatttaacattaggcagtgtatagtagtgatgcttttaaaatagttagccatattttattgaattattattttaagttatgtacgaggctatattatgagactttaggatgtgacttgtagcatttttcattttcaaatattggtagtataagcttttaatcagtaattaggatacatacatacggaaccagagagcattaatataagaacgaggtagcttaatttgtttgattattcctttccccccaaaaaataaagtaataaactttcaaagatagtgacgctgccaccttgaatccaaacccttttttgggatagacgatacaatctcagccactaactctgcccttgaataggcatttgacacctaaaaagcttattagctaaccagcattctctctcttattcttttcttcctcattttttccttttatatctatatatat

SEQ ID NO: 32245 - DNA, 1421 bp, Cannabis sativa
  modified_base (319)..(321): a, c, t, g, unknown or other
acagtatttttgaaaaaatttccgtgtgacagtatttttgtaaaagttaactcaaattccagtatttttgtaagtttccctttttttaatgactaaatgtaacttttagccataataaaatattacttgtgactaaaatataatatttagttacaaaattagcactaatttaattttagccgcaataaatattgtgactaaaaatacatttaatcataacaaattgtaatttttgtgactaatacttttaaccacgaactttttagtcacaacatagaaatcatatttataattaatcacaatttttttacttttagtnnnaaattttgttgtgactaaaaaatagattttttgtagtgatttttggaaaaatcccaatcgatttttggtgtggggcgagcaataccatcacagcctcgtctgaaaagagtattaaaataatatatgagcttatatatttcatttatttgtttctactgaaaatataaaccattagtactttaatttttgataaacaatattagtaaaaatgttgggtgcgtcctataatttggctgggcccaaaaatcgtagttaagatgtggaaagtgaaggtgtcgatataattgcctataaagaaacaaaatgttgtttgtaacatcaaaattcaaaggtgatgatgtaagttagatatatatgttttgacattaggtatgaattgtaatgaaagcacaacaaagtcgtaatgtaatactaatacgaatagctcactatagattaaggtaaattaccataataggtatggatgtatgggaacgaagcaagcatcctacggcgttgacttataatagttcagttcaagtttggcaaagttagctcaaaaactatttcaaattcaactccatcatataatgacaaaaatgtggataggtgtaccaataaaataataatgtaatcatatttcaagatgagttatataaaaaaagtaagcactatttatttttagcgacataagtatttaatgtttgtaaaactgtaatttttctctaattttagcactgttattgtctttaacaaagcttgatcattgggtctagatagaaatatgtagtatcagttactttcaaatgttcttttaataaatttaaaacgagtctgtactgacgaaattggaagaaattacagttttacaaatattgggtacttatgctgttaaaaataaacattgagtttatgcagcttacaaacataaaacttttaagttcttataccgttatttatcctaaaatcaatattatttaagtaatcacaccccattttatttatctcaatatgtataacctttactaatctagaagatatgtacttgtttatctcaaaaaaaaaaagaaaaaaaaaaagaaaatatgtacttgtagaataccaagaacaccctctctctc

SEQ ID NO: 32246 - DNA, 1087 bp, Cannabis sativa
ccatgctgaacaacaatgggtactttctcttttatgggtccctacatggtgaatcgttagaggaactatttgacatgttggatagtgagagtacttaccaagatgttccctattgaagcgtttgggtagaagtttaaactccaagttctcgttgtactcgcgagtcttgtatgcacctttattgttatcttgtaacatggtgtggacttctcagtttggtctgaacatgcttactgcgggatctctgctgtcaaggaatattctgtaggagattcccttacgaagaatttctttcatcgatctgtttgttgaagggccaggtaactctttgtgggcaaccatgctgctttgagttggcttggtctcttcttctttcccttttgtcaagggatcctgctagcaagatgttgtttaccttttgatcactatagacaaaaagtatgaatgcaaactattggtggatcaggctgtccggggcaagaccaggtggccagccacattagagcattgcttggcaagttggagaggctatggttggccaagtcattgattatatggtcgaccaacttgtggaggtggtggccagccaggttgatgactctatggccggccaacctactgaggccacggtcggacagccttttggaggctaggtcgatgttgtagtttcattgcatctacactcggtttgctttgcccctcgccatgattgtcgtagagagtgcaggatgttggagctatcacccaaatccctgctttctagcaaggtttttgtttggaggtatgttgttgtaggtgtatcccatgttggttgtgcaacatgtcttttcctttgaaacagagatgcttagttctttgaggaactgattgtgtaccaagtttgccttggttatcaaggcacagttgagtagtcaagcgagtgcatcgcttgtcgtgccatctttaggagcttgcattttagtacagcctttcaactgacttaacggctcaggtaggccatcatcttcttacattgagctgtatattcacctaggacataacctacgactagttgagagttggggtgtatgtttaggtggtcatcccg

SEQ ID NO: 32247 - DNA, 3102 bp, Cannabis sativa
  modified_base (817)..(837): a, c, t, g, unknown or other
  modified_base (1099)..(1104): a, c, t, g, unknown or other
aaatccaacaattttaatagttcatgggggcatttttaacgaacttaaaagttcaggagagataatttagtacatgtcaaaatttagggacaaaaagcccaattagctttattaatatacaagtaattgtgctttaacttttttatgcaatgctaggtgagttagaacgtgcgatgcacgtgcctagctctttttgttccattttaattttatttttgtttgcttaaattttattttataaataattgtaacaaaaaatataaaatttaattttaacatcttaattgttgtgcaaattacaaattaaaatagatatattaatattatacaagagtaagaacaaatttttaaattgtgtattttagttatatacaagtatagtcatatataagatggtcattatgttgatatattttacacattatttatataatttgtacataatttttatgttggcttatctaaaaaaaaagcaaaaaaatcataaaattgttacatgtattagacttatttatttttatatagtaagcatccttattagagaaaataagaaagttaaattaatataattttcaattaaaatggatttaattaaatttattgagcttagtagtaataataataaaataaaataagaaagttattttttttttggaaaataaccccatatactgtttttttataattttttttttcaaatttacggtttgggtttttaaagtggttgcagcactagttgcaatagggttttctatacgattttttttgcaatttaggttgcatcgctgattgcaatagggatttctatgtaaaattnnnnnnnnnnnnnnnnnnnnnaaaaaaaaaaaattgttttgaagtttaaaagtgaaattaatttattttatattttaaaatttaatattcttaatatcaaaaactaaatactacttgtttaaaaataataagagagatgcaatactaaattaccatacctgagtgaccagtgcaacatgattatcgaattgaagtgtcaatatcatgtgaaaattgttatgagaactgattttattttttaaacaagtagcatttagtttctgatattaagaatattaagttnnnnnntaaaataaaaataaatgtaatgcatctgaaccctctacgggtccatatttataagttaacgaaagtggtagtaaccgtgtaagagaattgtaacattaggtatatttatctccaaaaataaacattagatatttaagtgtgtaaaatctaaaatattaggtatttatgtcgcaatttacctttattttttattataattaagtgttctaaaaagtaaatgagatagtaaaagataaaatattaaactttgcttctctactatcattaccacaccattaccacacttttataatacagtatgatatttagtgtacaaactgaatatgcatgagttagatataattcactttacttaaggttgtcacacttattattttaacatgttgtggtttgtagaatagacaaaaactcattttaaaaaaaatatacaatcatgtgaggagaatagacaaaaactcatttttaaaaaaaaatatacaatcatgtgaggatatgagatttgactatgtatcacattattttatactttacacttttattaatattaatgtaattataaatttttgtgaggggtaaaaatggtatggtaacatcacaccaatgcaattataaatttttgtgaggggcaaaagtggtatggtaaaaatatacaatcatgtgaggatatgagatttgactaatactttaccctttattaatattaatgtaattataaatttttgtgagggataaaaatggtatggtaacatcacaccaatgtaattataaatttttgtgaggagcaaaagtggtatggtaatatcacattattatcatacttttattcatacttttattttttttttttttgaaaataagcgtaatcgtaccattaataagcaaagttagacatcgcggtcattacataaaaggttctcctgaaccgaagaaacctgaataatcccatacaacttgttaataaaagcccacttagccacattatgggctgcaaaattacaagttctactaacatacataaaattacaacaattaaaggagggcgatgacttagcacaaaatgagatataattgtcaatcgcccaatgagactccgtcccattgagagcattgataacaaatctcgagtcactctcgatcaaaacaaacttaaaaccttcctctagagccaacgaaacagttgcacaacaagtcgttgcttctccacacaatgcatccaagaagtccaaacgatccgtgtgtattcgaaccaccgaacctagatggttcctagctaccaccgctaagcacatactttttgatcccacccttacatcacaattcaattttatccagtcctgaggtggcggcctccaggtccccctcaaagatggtgtagggcaaggtaagaaagtagcatgaagctctgcataagaatttttaccctggtcgatacatttcaaaacatacagatcgtttcgacaataatcgaagcatacaggaaaacttcttccactcggatccccctagaattaagattccataaaaatttgacccaatcccaaattcgaatcccagtattgcagataggatagatgccccatggtgacgatcgccataaatgcatcgccacatcgcaagacaagaaaaggtgttccatggactcctcccccaagccacataaagggcaacaggtatcctcgatatggaatcgcctcccaatcacagatctaatagggagctcattggagaggatgcaccactacatgatcttatgcctttctaatattctactgttccacaacttgttccagagtgccagagctacctcacaatgacgagctctatccatagcttgagacagataagcagatttgctcgtaaactggccacttttatccagagtccacacccatctatcattcccttggccagagggttttccccctttagcgattgctgacaccgtttctttatcaaatagaccatttagctttgggatgttgttggaaattattttac

SEQ ID NO: 32248 - DNA, 2589 bp, Cannabis sativa
ttaattatactaaattattatattttatataataataaattataaaatttaatcaaatcaatacaacaaatgagttgtcaaccttcatttatcccgaacaaaaatgtgtttttctttaatttggtatatataatttaaattttaaaaaaaatataaaaaatatcctaatataatttaatttggtatgcttttcacgtccaattgtgggtcctaatattaagtctagcattaacgtttttctagtctaattatgttagacttaaacaccctttttatgttcctcgatactatgtccaacaataaaatggactagaaagatttatctagtccaactttgatagacttataaaagggagtttttgtagtagtgcaagcaccttcttctgtacttctattcttgtgtaactttatttatttatttaatattttgtgaaattatttttcgtaaatcatgtctatgggtatatatgtatttgtatgtattgtgcgtgtgtatatacatataaatttgggtatatgtatggtgtgtgtatttggttaactagaggcgataggaaattatagtcgttatagtactgctaaaattttagtagaattaggtatgctttctttaacctacttttataaggattaacaaatacattttaaataattattctaatacctgctacataagaattctattaatttattttaaataatataataaattaaaatattacacattatttattattcaaaatactaattattataagaccataacttaaagaattataaaaatgatactaatatactaaaaaaatacaaatccatattataaattttaaatgtataaaaattaaaatattacatattacttataatttaatatagtaattattatactaacaataacttaaaaaattataaataatactaaaataaaaatacaaacacatattataaaatataaaattttaataagaagatagcatatatacaaacacttaggtagcgtttggttagaggtaatgaaatggaatggaatggaaagaaccattcttttgattggttgcatttaaaaccattggaataccattctaatggaatgagctttccatcattttggtggagtgattattctattttgaaatggaaggaaagaccattccattgcaagatttgaaaaaatttaataatttttttaatcaattttttatgcattttaaattttattccattctattttaattcccattcccattcttattcatatatttttattcttccaaccaaacgccaccttagagtaatgtaaatgtgtatttattcaattttttaatttattttcatttaaacttattatatataatttattatacttaatttaattatattatattatatgaaaaaaataaaattatattttaataaaaaaaaaatgttaaaacacaaaattttaaagctgaaaaaaatcataggaagcccctatggagtcacttaattatttcaaaatacccaattccatatggtcccatggcctcggttatttcataataatagactccatagggaccctatggagtcggttatttcataataatcgacgtcatagggtccctatgtcattgaatgcttttaacccctacagcatcacctagaacaacatcagtagcgaattttgccaaaattatattaacactgaaaggccttaaaaattgcctctaaagcccacttttgtagtagtggtgtggtccctctgtccctatccttgcatatttcccataaattataaaatataaaatattattaaaaaatatcaataataaactgttaaatgataaaacttcacatttatttttgtctagtatcttgaattataccagattaacgttataataataaaatgttttaaaaaagagtaatttgcggtataaatacttaagtttaattttcagttgcaaataaatacttaaatttaatttttggcagtattaatacttaagttatatttttagaactctgtagttacataatcgttaaatgttaagtcattatattcacgtgtcatttttttattggtatatttgaagtaatttttttttaagtaataaaaatttaatgacttggaccaatcaggaattggcacgtaataatttacttaaccaggtacctatagaagttttaaaattataacttaagtattattatggtcaaaaaataaacttaggtatttatttacaattaaaaattaaactatattacaaattattttattaaaaaaataagtaaaatgtaactaagaatatttgtaattatatttttatagttcacgaaaaattttcaccaaaacaaaatttagatacaactttataaaatcatagttgggagaacaaatcatattgattaattatatattatatatgaactattattatatttataatatgaaaatgaaaagggtccacagtggtggaagctttctgttttcccggggactggtttttttgttcactgacttaatgctttcatatgctaataatatatatatagggcaagactatggtaggacctaacaaaagttccctaccggtagggtattttttt

SEQ ID NO: 32249 - DNA, 2195 bp, Cannabis sativa
  modified_base (643)..(647): a, c, t, g, unknown or other
  modified_base (1467)..(1470): a, c, t, g, unknown or other
  modified_base (1839)..(1841): a, c, t, g, unknown or other
gtaaaataatttccaacatatcattgcctgatgaagtaaacgacaagtaagaaacctatccatagtttcaggagtaattgctcgtaatggtaataaacgttcccaaccctaagtcataatttaggctcaacaaacatttaatcagaatcttgataataatcaaagctataatcattcaaccgctaacatctagccacatatggtgcttaccacttttcttaccttagttcagaactcaagcgtacgggtcaacctgagtgggaaaacaagctaggtgatcctagtcctatgtcacgacaacaaaactctatgaataccttagattgaaattccggaatgaaaccctaatttgaaaccgaataagaacctagcccccaataaccccaaaataggttagacaacccacaaacaacctaaaatagatactacgcaactcccgtgaccaaaaattgaacctgaagaaaacccaggaattctccctgcagggcaaccggtcgaccggttctgctgcactagaaccaaccggtcgactggttctggcagaccagaattccttgggttctctccttcaatttcaacccaaaactcctccaaacctaaccaaactttccagaatagtataataactataatacaacatatnnnnngcttcaaaacacaacaattcaatcatttaatcaaaatcacacattaaagtgaagaaaacttaactttggcttcatcaaaccaaattcaattcaagcagccatagaaaccacttaaaaccattcccaatatactcataaacctaccctaaacatactccaatcctagtttaattcatacagccacagaaacgcaaaaaccttacctcaaaatctagagtcttcaatccaaaaaggttgaacttacctcaaagctcttctaggttgacttagggcaagaaccagctttgaaatgaaggaagaaggctgaagaaaatcctcaaggcgaactggtttggcttgcacgaaggagaagcttttggttttcttgcttcctaagttatctcatatataggttttctttcttttctttattctttttaaaaaaaaaatacaatcagcccacaaaaactaaagtcaaaatacatattaacaaaaatgactaatttacccttcaagtaaaaaaaaaaatcaaactttaaaataacctaggggcattatggtaattttactaatccatcacatcgacattctaaaattctacactagtctggaatatcctcaaaataatttatccattaatgtcgtgacatttctgaccacattcctaagtttccacagtcgtcgagcccaaaaatatttttatttcaaatatggtatcctcgatacccacacatctcaatataatcttcgtaattaataaattacgctttatataatcatttaataaatcctcactgattaccataatatgatcttacttcattaccaaaataattacatnnnnaataaaatatgtccaattaaatactatataaatttttgagatattacaacaacaatctaatgtaagaatcaaagcatgttcaaagcaaagaatagcgttcatgcatctacggcaaaatcaatcaaatcaagtaaaatagcgggaataaaaagcttacccactacaagattttgttgaagaagaaggcgggaagcttggatcgtcaaaacggcacaaaaatctcaggaagaatgatgcttgtgggttcaaccacttagaaagaaggaagagctttttctaaagcaaatttctagtgacaaaaagtgaaaaataaaaagtgagaagtgaaaaaaggtttttctcccaaaagtcacttatgtaatacatgtnnnccccttttcttcacttacctcacctacacatcataaagacaactaagcagttatttctctattgtaatgagatcaggcagtctagacaaagtgtatcaacttttattcagcaaaggctacaacagtcccaaacacatcaatatagctggtaaagtccttattcgtacagacgtccgcacagagacttgggggcaaatgttatcagaatttttgtcatcttgatgtggcatgcttacatggacaaaatcagtgcagcgtgacaatacaactcaccaataggaaggccaagtcagcacttgagcaaacggagaccccagcactcaaacgggcaccaagtgacagaccagctccctc

SEQ ID NO: 32250 - DNA, 1748 bp, Cannabis sativa
cgattgaaagtccacgggcttccattgataactcgtttgatatcgatttcatgatagaattgaaaaagataaaggtttggccccaattccttgacaaacagccctttacgcggcttccaaagtcctgccggagtgtgtctcatggcgtcaatgtccactgttctagcgttcaaaaaccttcctaccaaacaaaaccgatcgtcaaaaactacctcctcctccgagtcgagagcgtcaatctccacaccctcctattctccttcgatatcgatgcaagcatatttctcctccatttcctccatggatctgttgctggaagccataattcagtccaacctttactcaacgtgttacatgttcaaattatatcaccaaaagaataacccagaaaaagacaaataaaaacttttagagagaaaaaaaccaatacacatgccaaaaggcaagacacctcaaatatagacttaatcttcttttttctttaaattaaaaaaaattttattgagctcaacaacaacacttgcaagaagttatctagcatagatgttgtaacgctctaatgctaaggcacattacaatgatttttcaattgcattgcaatctttgctaatcaaaaaagtttcttgaaaatcgtgttaaattaaaacttttaggattaactatgaaactttataaactttataaaaatatttataagtgtcaggattccgttgataaactttttacaaaatattcagaatacaaaagtcaggtcacacaacgactacaaaatgataaccccagatgtcccgagatcgaacactccaggtcgcgccgccatgacatgtacaatcttcatccaagctcggtgctcacccatgttcatctttcgtctctcgtttacctacacatgaaggttgcatctgtgagtcaatagactcagtaagaaaagcatacaacaaatcatataatcacgacttatgtttaggtgctcatacacctaaccacaaggcttaccaaatgacttaagaacgctcttaacagttggtactattgaccatgatatcacccactaccagcactatgatcgcactacgggaccggcattatgttcgcaccattatgatagcatcaatagtacctgaaagtataattggccatgatatcactattagtcagtacgatacataaactgctgaatcgacacaatgattgtgtcgctatgatagagccaattaatactttctgaggtgaatatcactcttaaccagtacgatgattgtacagccgaaccgacacaatgattgtgtcgctataatatcacccagaacatatacaatcacaagcacaatatgtatatatcacacatacatgcattcacatatataatatgttctatactattcttaccttgttttcgaattcaaatgagttggtcgacctgaatggaataccttgtgctggatggatgccccgagcagttcggtaatagcttaattctctcgacttgtattgacttaagaacaaggaaaatagtccattttcttagagctcttacaacagtatctctgaatataaattcttagataagtttttcctcccttttgcccaatgagtatgaatcactatttatagggctacaagcttgggagagaagaattttccttcttattataactgatataagtagaaagattgcatattaaatacagaatacactaatcaagggattcggacagcttgccatatctctgtgatttgatcccaaa

SEQ ID NO: 32251 - DNA, 1427 bp, Cannabis sativa
aaaaaataaacatacatgatctaaaataaaattatatattatacaatgaaatttatatatcatataacaaacaatatataccttataatagaaatgtatgcaataacaacaaataaaaatagaaatatataagatgctaataaaactatatatcacatcaacaaaaatacaataaaaaatataacttaaatattatttaaaaaaaaagtaatataccgtataataaaaaatatatataccattcaccaaaatatatgaactactactactaataataataataatatattacttatatatatacatactatactaactaaattatgtaacacagttaaaatatataggactcttctattgtgggaatttaaaaaaataccctatctttagggatttaaaaataaatgagtcttattgctttttgtggatataaatgggggttcatggacactaaaaaatatggtgaattgtaggagattagaattgactaaaaaaagctaagagtcaattgaagcaaagacagaccactattcgcacccactgggataataatgcgattgatttaaaagttgatctggacaaccacttcgtaatcgtagaaagaactcataaaccgaaggtatcatgttccattgaggaaattcatgaagatcacgatgttgcacccaaccaggttttttcagtttggggctatggggacttgcccggaaaagtccccagaatcccaatgaaggccatggcttggaactgtcgcggactcgggaatgtagcgacagttcgacaactgaaggatttaatccggaagtcggatcccgaaattgtaattttatcaaaagttaaattatctcgggacaaattcaaacgactaatgtctaggcttcacttcaaggaattgttttatgtccctctgatgggatcggcaaggggccttgctctatgttggaagattggtgtgctgtgttctgttgagcaagcaaataaaaacaaaattgttgcacagattaactcagaccccccgatcgaccgtggctccttattggtacctatgggccgcctacagctttagaaaaggaagaattctaggatgaattgggcgatttcatctgccaatgcaaactgcctctgatcgttatgggagatctcaatggaacgctgaaagataatgaatgcttaaactactccagatctaacaacatcgcgagatactccttcgaccttcggagaatggtccttcgttcgggtctcattgatttggggttcataggcacgagattcacatggtttagaaggaactctagttccacggctagaacctccttaaagagaggcaggctagatagagttaagggatcagctgattggagagtaaattggcccaatgccattgttcagcatctacatgcggcggtgtcagatcataacccaat

SEQ ID NO: 32252 - DNA, 2207 bp, Cannabis sativa
ctaatcacaaatacaatggtggtacaaactcgtagaggcatggttgattctacaaatccacaggcggtggatcctgcattgcagaacctagggaacacaagggttccaacaaccacaaatcctgaacaaccctcgaccgtaggtcatggtgtgacaacttctgtgagtggaatcgcgccaccagcaagagactgggaataacagttcagcagttaatcagggcattcccaacactgtccttccccccgtaacaaatggtcgaacaaccattggagatgacaccaaaatccaaaacttccgtgttgctcttggagtcatacaaggtcatactaataccttgtatcacgatcaggaggaactccgtgctgcggtaaatcttgcgtttgaagagcatatgcgcatgttcgctgaatggaggaacaaagagatggaaatgttgggggctcagtaagcaaccattgacgacctgaccagacaggccaccgtgttgatacgaaaagcctatcaggctactagacaacaacctacaaccgtcattcccctgggcgagacagatgaagatccagcagtgaacacctctcaaactataaatggtcagccgtccaatccccggtcacaggtcccacctgtgggccaagtggtaggcggccataccttgtctagcaattcatcaagagaagtcatacctaataattccaaccaagttaatggtgttggccagctagttggccaaaccaaccagtcattgagacagccgggtgtttctaaattcaattgattagaaacggttcatgatctcagagacgatatgaacaggaggagaggattggacaagcaacatgacgcgccaatcgtacagttcggggttcgtgctcaaaatcctgctcaaagagacgctgacgtgactctggtcggccaagaggctaaacaagtcaatccagccgtgcaggcactgttggatgaactaaaaaatatgttccaaggcctggtcaatcagaagaacaatgacctcgagttagaccgagcacgtggatcccctttctccctagagattaatgtcttagaattgcctcacaagtttaagatgccaacctgaaagatgtacactgggaaggaagatcccttatcccacctcaagtatttcgaaatgcaaatggacctgcaaggagcacgaggagatgtatgttgcagagtttttcctgccaccctctcaaaggccgcccagcaatggtatttcaagttggtgtctggaaggttcaactcatggaaggctttctcctcgaaattccatgcaaaattctcctcttcttgccaacttccgttgcacttaggagatctggtcgaagtgaagtaaagaccaggagaacctctccgagcttacattagtagattaatgacggaggcaactaagattgcacgggtgaccgaagacggaaagttatccgcgatactggggggcattgaagttcttagagaactttagaaggacttcaggaagaacggactaatagttctatgagtgacttccttgatcgcacgtaaggttttattaagcttgaagaaagccattcagcgggtagaggttgagcgaaaacctagccagccaaaagctccctctgctgggatatccgtccagctcccccagtacccaagcaattcaagctcaggtggtaaacgatccaacaacaacaataggcaaggaaatgggaaaaagggaaagtttgctggtaaaatcgaacaagctcctagggagaatcctaccaagtttactgcattttttgtcttaacagaagatatagaaagcgtgtacatggctactaagtcattagccctatacaagaagcccgcacccatgaaaaacggtaagcaagagagacatgaccaagttttgccattttcatggagattatggccatgacaccaatgaatgcaacaatctgaatcgggaaattgaatttttgatctgaaaaaataatccgcatgtacaaaaatatgtcaaggtcgatcaaaatcaaaggggcgataacaaccaatatttactaccaccaccaatagatggacatcttcaagtcattattggaggtccgcacatagcaggagatttcggcaaagcccaggaaaggtatgccagaacagtacagcatgagcaagaagaagtagttctgttcgtcgaagaaaggaaaccaaaaataccacgggcaggggag

SEQ ID NO: 32253 - DNA, 1349 bp, Cannabis sativa
aaaaaagtaaaatttttctttttcctatttgggggtaacactaacaagagcccttaataagaaaaagaaaagaaagtaatattaccataatgccataagcaagaccttgaattccaacactggcaatggaggcaccagcaagctctaatgcacccaaatggccagtaaacatgagcgtgacaaagctgagcatgtagttaaaaatagagacaattatagaagccccagagaggagccagaggagccttgactcccagcacacgaggcgcggccaccatctacacgccaccggcctctgctccaaaaactcttccacagcaactgatgacaagtctggaatcctcgaatgtgactccagacccagcaataatggttggtactgctgctcatcatctcccataattttatgcaccactctcttatttctttcttcaatgattaatttccactattaactcaattatactataattaatttatcaactctattccttatattttttttattagatgttgcaaaaattaatgacttttcgtcatatagatataggtgtacgattatatatatgacattgtttgtcaccaaatcatatatggttggtgttttagtaaacacaggaacatcttgaatgaatgaaaatggtttaactaacaaccagtcttagtaggtgtataccgaacggttgtatcacgtgctcaccaataggggaccagtagccacttctaacccaatgaccggggcgggggccgtttatttattgagatttttttaataatatttttaaaaaaattacttttgattttttttaacattattttatatgaaattcaataattattttattatgtttttcatatttatgtaaaagttatatataattatttttattttttattaataaaatttatataattttttttgacttaatatttaaaatatatattttatgtgtatattttttaagaatataggaagaaaaaattaagaaaaattaatataaaataaatatatgattctttagctataataaaatttataaaataaggtgcttttataaagttttagagcgtaatttttctattataaataattagaaaatattttacaagaataaccttaagcatttaattaggaaacttgacatactgcagatcaactttcattagtagaaacacgaattggaaacaaatgcaaacacagaaacaattcaaccaaaatccccaaacgattgaaccaaaactagaatcgagttaataaccttgctataaaacccaagccattttctataagctaccactgcatcactcgaaaactccatttgaacaaaagccaaacctaatactgagac

SEQ ID NO: 32254 - DNA, 1117 bp, Cannabis sativa
  modified_base (26)..(51): a, c, t, g, unknown or other
aagttcttatttaggatgttaataannnnnnnnnnnnnnnnnnnnnnnnnnctcgtaaaataatttccaacaggtgtccacttcggatcattgtcctcttcattcggtccctgtagccgaaacaatgcaagtgtcaaagagaacttttaggttcgaaaattcttggttgaaggagccactatgtttcaaagttgttgaagatagctgggatttgtctaatggtcttcctattactgagaaaattcgtgattgtggtaatgctttgcttgattggggaagagtctatactggcaactttggcaaaagaataaaagattgcaaagccgagataaagaattggaagaaaggaagggactctaattctgtagcttgttacaaagctgctgagttgaagttaaataatctctatttgcaaagaggagtcttttggaagcagagaagcaagcagttgtggctgcgagagggtgatcacaattccaagtactttcatgccaaagcaacatctcgaagacgatcaaacttaatccagaagctgaagaattctaatggcgactgggttggctgggaagatggacttcctacggtggtggtggactattttcagcatttgttcacacatgccattggtgatttttctacagtcatcaattgtgtttcccaatcggtcactgatgaccaaaatgctgtgttgcttgaggaggtgactcgtaaggagattaagacggctttgttccaaatgcatccagataagtctccaggacctgacggaatgacaccaggattttatcaaaaattttggaacttggtaggtgacgatgtggtgcggctgggtcaggctttcttcattactggtgagttcccttcagttttgaatgagactaatattgttcttatccctaagaagaagagtcctgaacaaatgggtgatcttcggcctatatcgctatgtaatgtcctttataaggttgtttccaaggtgattgcaaataggcttaaagttgtattgccaagcgtcaaatctacaaaccagagtgcttttttgctaggacggttgatttctgacaatattatgatctcttatgaggtgatgcattatatgaaacgaaagaggaagggt

SEQ ID NO: 32255 - DNA, 952 bp, Cannabis sativa
tcaatctttttaggactcaaatttgctctttttcatatttattatttaagttctttcaacattgaacactgtgttgattgattccaaatttttcttctttaacattgttctaacaatttagttcatatatagcagtacaatcttgatacttcacatgaaaataatttgactctaaaaaattcttattttatgagtaatgatatgatagttcaatcttttaggactcaaatttactcattttcatgtttaagttgtttcaacattgaacacttttatcatattgtgttaattccagggacaaataaataaaagatttggtgtcgaaaattcgaagaatctttttcgtagttgagcttaatatcagaagtaggaaatggttaacaggtttgttcattcattgtgctctttcattactttgaaggtagtatcgatcgaattcaagacatttatgaatttctcacacatgttttatcggtttctttgaacagatatggagtgttttgatttagagaaaatatcatgttgcagtgcatagatgggtttaagcatttatttgcttccctattgcgatgctttgatctcgacttgtataaccaatcgagagggctagacgaccccgctgttcttgcaggggagactgtgtgtatgattctgaattctcaaccaaaatagattagtgaaaattttcatatattatattgcttttgctgaataattcaatctaattgtcaaattatcataatttaaagtaggaatcatttaaaacccaagaagggtagctcaaatgttcaatcttgtgtggtttgctccaacaagttttgaggtttgactatttttttaagtacctaaataatgtttggataggtgaggagcctctttttcttttttgttgaaaaaaagtaggaatcattgcaaattgtttgcctttttccacagtgagaatctaaagtaa

SEQ ID NO: 32256 - DNA, 2179 bp, Cannabis sativa
  modified_base (52)..(53): a, c, t, g, unknown or other
aattagacaaaagtttttaaatttaataatctcaatagttcagggggaattnntaacggccaaaaaagtttaggggcacgatttattacatgtgaaagttcatgggaaaaaattactaattagcctactcctaaattagacaaaaaagggatatcatcacttgccttctttcatttgccaacaactactttcaatattctaataggtgaagaacaaaggtaagcagcagaaggtggcggagatgaacatagagaagatgttatcactgggaacctttggtatgggattcggagacttagcagccacggctgctaataaggtgatggaagaaccaaaggcagaagtaactgatgtgctggtgaagacggctgggaaatgctgcagcagagttattgacaagatttgttgtatgtgtttcattcagacttgttcgtacgtcaacaatcggagcgcaattctattgacgcaaatatgcactgcccttgcttgctttgagtgcatcaattgctgttacgagctatgcgcttgattaattaatgtcattatactcttaaaaatcatacaaataacatgtatagtatcttgccaggagaacctatttgtattgtgttttgtgcatactacataataacatagcaacacattatcgtcatattggaccattgatgcatttttgtagcttctgttgtgtgctatacatataaaaacaacaacaacgtatgaccactgggccctggcattcagcaaaaaagaaaacgtatggccactgccacaagatacattcttcctaaatactatattggatattatttgaatagggcatttaagaaaattataattttgcataatcgattagaaaattaaccattatagtttaaaaaaattaaatatttataattaggagaattactttataaattatttttttaatttacagttttggttatttcgataaattctatgtgagttgttatatgaatttcgattgcactttaagttattctatgattgctatgtaggtttctatgtgaatttttgtaaaaatattaaaagaaaaaaaaaatgatttgaaatgtaaaaattaaaaaaaaaaatccctttgaattatgagctaacattttttttctattttttaagattttttttttattatttttacacttcaaacttattattatttagtatttttaacaaaaattcatataacaaccaaagaagcaactcaaaattataatttttttttatatatggatttactttttttttaatgctattagagttttattcctacttctgtaaatgagagcgatatatcacgtaatagaatcaacgtctcctttgcctcgaaattttttatttttctctaaaagtaaaagttacacttttataagctttggtttatagagtttaaatttagtcgttttagatcacttttttaggggagagttaataaaactcttcctaactataaaattagtgtatgcctgcaatataaaagatttttatttagttacttattaaaaaagtggttaaaatagactattttcagctgaaaaagaaaaacaagacagacaactctgttcagtttgcagctgtttaacttcaaagagcgttgttttcgctcccttaacgttgttgttgttgttgttgttgttccttccttctcttcctttaccgcccatccttactggtaaaatatgtttggtcatccacaaaacctgttacaaactactcaattctactttctaaaaaaagacccattcatttccctgattacccaaaattattattcagatttctactgcttcacttttttcttttttcccccacttttagtttttgtcatcggatttcaattaaagagattcagtttactgatttttgcagtttttgtattcagatgccgatttgcgaagtttcctacttttcaaagttcctacctttattccttatgctctccttttgtatttcttacaggtaagagcacatatgaacctatgccaatgtttcgttttatttgtgtaagatctataaataaacttccagtgcttacattgtttcagctaataattggtattttgtgtattgactttcctgaaacctttacattaacttattgggtactatgttctaatgcttagagtgtgaattttgtaagatacttgtgtgtgtatgtata

SEQ ID NO: 32257 - DNA, 1021 bp, Cannabis sativa
tagttaataatatctttaaaattctttttaaaaaaaataatatcttcaaaattattatttatataaaatttgatacttaattacactaataataatatgacactgaaaagaatactaaatactacattaccttttaatatttattcatattattaatagatgtccaaattattaaattaattatcaacatgattacttgagtttcctattcgtttagttttatttttgtataaataaaaattcaactcattaaaataaatgagtttttataatatgttatcaacacgagtttttgtctcagataaatatttttttttggttaaagttcataaattattttgaggccacgatgtactacatatatacatactcatcccactgaaataatttcaagaataatttttctttctcttctttgttacctatacattatatattgttagagagtcccacattgctaatgtgtggaaagattatagaatatataagcggaacaggctactcctcccattgacaattagttttgagatagaacaccattcaccttattccaaattctaactatatatatatggtcttattctcacttatctatataaaattgttttatattttcaagattctttagaataatacaattaattgtatgtgtttacttacacaataattaatgtgtgccattaaaagccatcactatgtatggttaaaacaatatccttatattatagaatagagcattgctattaggtactactagtgtctagcacctttgtgacatgttgcattgcgattgactagcgatattccttaaaaactattatattaaattatatgggacccaatacttagttggaccaatagcaatattgacacataggagggtgctaagcaccacgggtgcccttcaacatttctctatagaataatacaattaattgtagagaaacgctaaagggcaccactggtgcctaacaccctcctacgtgtcaatatcgctattagtgcaattaagtatcgggtc

SEQ ID NO: 32258 - DNA, 1635 bp, Cannabis sativa
cacagccaacttgactggaagatcttcattactcttgagattgtcagcaataaaggcagtttgaatagcacccttggtaatttttttgtaaccttttaaccaatgtttaaccaatgtattatcatctttcttgaactgataaaaatcagaatcaatctgacaatctaacccagtaattagcgaaaactcctcaatactaaacctaagatatttgccttgcacacatacccaaaactccaattcattaggctgttgaacctccctaaacagcaaaccatgaagaagttggtaatggataatgtactctggaattcggagaaaatatccaaacacagtttttgaaaaaaagttctagttgggtttagtcagaacttgtttgatatctccaattacagagtaataaccagatgtcactactctagatggtagtattgagatcgggtgtacttggattcccaatcctaaaacaaaacaacaaaaacattgctaaaacaagcataaaacaacacgaaaaacaacaataaaaacaaaaatcaaggaaaaaaaagaacagaatgcataacatcacacacctctacagtcctattgccaataatttcctcagccagacctgttgatggcaaaatcttgacaggggatttaccctttccctaaaattgaacgaaacaacaccaaaaaaacaacaataaatatcaagaaataaacataaagaaaaaaaaacaagaaataaaaaaaaatagcaataaaagagaaaaccccaactattacccagatatataaacagataaaataaaattaaaaaaaactcaaaaacaatagtagataaatacgaaaataccttcacagacataggcgacttcacaaactcagttttccacaacagttcgaggccgttttcctcgagggttcttcgaagttccagcagcttgttttcttttaggagcaataggagaagtagggctaggtgggttatctttgagatttttcttacccatttttggtttgggtttcgttttttggggttgttttggagttttttttagctttagcagaagacggagatgaccgtgtaactgccattacaatgtaggatgaaggtatttatagagaagaaccagaaaaatgggggggggataagagggaagcttgagaaagtgggatgataactgaaattttttgaaatggaaataaccacccactactcgaaacggcctaagaaaccaaaagaaggagaagatgaacagtatgagggcgagtgggatagaaaaaagattttaaaccttttttctattcgaaaaaaataaataaaaaataaaaaaatagaaaagtacaaactgctaccaaaaggggagaaaaccgtcaaatcaaaactttttaaaatgatttacttttttaaaaaaaaacgtggcacaaccccaaaaggacacttgtaagccacaaaaccaacatatacaaaactaaacaaaggcagtatactgccaaaattaataaaaaaaaatagtataaacgttaatatgaccgtgacacaatataaatgaaataaaaatgaaaaagttagtaaagggtgtaaatttccctattttatttagcaacctagttcatcttaattaaaaaattaaatgaataacctatatg

SEQ ID NO: 32259 - DNA, 1702 bp, Cannabis sativa
  modified_base (155)..(166): a, c, t, g, unknown or other
  modified_base (215)..(220): a, c, t, g, unknown or other
  modified_base (278)..(278): a, c, t, g, unknown or other
  modified_base (317)..(318): a, c, t, g, unknown or other
  modified_base (712)..(713): a, c, t, g, unknown or other
  modified_base (1593)..(1605): a, c, t, g, unknown or other
attccaaatctatagtgacacaaggaggaattaataagttaggaaatttactcggtaaattttgaatctacttattgttagcttgattacatagggccacagtccccacactagttgagataatactgcttgtagactcaattaattagttttannnnnnnnnnnntaattctaaaattagactatgtcgtatttatgaatttttactaagcaannnnnnaattgtgaagaaaataggttttagggtttatttgttaattgagagactttgtaaggtntaattaataaataagttaaatgataattttatttgatanntaattataattattaaataaatagctttgacatttataggattgaaatttgaaaatatagcattattgaaagaaaatatgaatcatgaaataaaatgaaaaaattgtaactagtgaggcccgctactatggccgactacttaagcttgatttttgcctattattttatcttttttaatccatataattaaatcctaaaccctagaagaaatactataaaaggaataggatgctctcattctcatccaacttataacctagttttctaactctatcagacaactagaaattgagagcctccttctatagtgattttaaattctttcttagtgttcttcattgatttcgttcgtttagtgatacagtaccatgcccactcatatcaagtcaagtanncaatcatagtgtggaagatcgtggttaaccaaattgaaggagagaagatctaggtttagatcttgataatgctttgctacaaaaaggaatcaagggctagagatctaaacataatgagtcattattattctgctgccatcaatttaaggttttctaaactttatatgtttttattttatcgttttaggaaaatcatatttagggtgttagattatagttaataaccaaatatacatgttagtaaatccagattttggtaaaataatttcaaacacccaccccacacgctacaatctagagtgggcattgatggctggcttcatcttcaacctccagccgggttagtggcgagttgcgcgatccaattcggtgccagtcgagtctggatgattttcggccaaaaatgcgatgcatataatagaagttcgaggggttttattcggaattggatttataatagattttggtatcaatttcggttataaatggctaaaacaaggtaaatctgattgatccaacccaaaaatatgaagaacaaaaaaacattggaatcaatcagtataaacaaatttaattcaaaattttatgttgtatgatatcttaaaataattgagaagttttatacacaatcaattaaaaattattaacagcaacattgaaaaaccaaaaaattaatttcaaaattcaatcacataaaccctaaatctttaaacttaaaattttctcaatttactcaatgatttcatacatataataaatcaacaaaaaaagaatttaatgaggattaaaacccttttaagattaaataatgaaaaattcaacataaaataataacaaaattaatatataattaggggtaattaatatatatatatatatnnnnnnnnnnnnntaatgggtattacccatgtatgggtattttattcttgaccattggatcaaatatctaatggttgatatttataatcattaattaaatattaaaaaat

SEQ ID NO: 32260 - DNA, 2713 bp, Cannabis sativa
  modified_base (210)..(222): a, c, t, g, unknown or other
aaagatatttatttcaaaattcaaattgagtcaaaattattaacatgttgctaatttaccatccagtgcatacaaaaggtttcgtcgaacccaaaaccccaaacaggtaaaaaagtatacttctaagaaacaagtgaccaagagtcataagtctgctcggtcacttggggggcacttatacctgtacaaagcatttggtaaagataatannnnnnnnnnnnnacgatgattataaatagagaatgatatccattaaagataacaaaagcacgtaataccggggttaaaagctgcccggtcagcccgttgtttgtaaaatgaaaactaattccaagtttaaagaccacttggtcggtcatgatgtcttaaaaaatgacttatggccgaataagatatataaaaaaaggaaggataaaagaagaagtatttgaacagctggagtcccaggctctcggtttggatcttctgggccggtaggagctggaggatctattgtatgaacgggaggtacatcagtattttggccggaggtagaagcaactgcctcagtttcaccataaccacttgggaagcgcagaactctaaatacatatctttggcttcacccaagtaatcaaagtttgcctgaaggttagcctttcagaagtcataaaagagctcgagaccggctgtctctaaggcattgactttctctcccagcctcgtcacctcagccgtaagctcctcctcgttagacttcttctcctcttccagccgacgaaggaccgctcgaagggatgtcctttcatcttgaacactgttcacttctgcaaataaggtctcgattgtctcttcaagtcggtcagaagcctcaagatccttagtgaactcggttattttcttttgagtagtaaaagcttcttgttgacttcacccagctccatccgaacagctccaagttctaccctagcgtcatcaacgtctttcctggccaagtccacctccgccctcatggtgttggatagagccgcgttcttggaagcagcagacttagctcaggagtatgtgtaagccatctccagaccagccaaggcagagaaaaaactttagaatctgagccaaataaagaggatcaaaggaaactgtcaagaaaaacttacccttgtgaattccttcaagactcctcccatcagcagctccaaagaagagtcgttgtcaacaccgggcagttgctcactaacctcaggaaccaaccggttcatgtagtggccgagcatctccttgcctttcttggcctctgggagcactagcagaggaggagtacgagcctgcatctactcagatccgcccttgcttagctcggatccaccttttggttgctcaggcctgtctgaacttcctcctcgagaatccttggacttagaaacttttggagctgaggggtttgcaacagttagttcctcgaaaaggtcaataacctccctagcaggggccttttccttggaaggggtcccctcgccgcctctggatttcttagccggaggagatgcactcgagctttcaccaactctcttcttcagagcatcaagcatcttctgagacatgtttccatggaaaaaaaataacatggttagagaaaatagacatcagaagcataaagcataatagtcaagaagcttaaaaacaagacggagtagtctgtaaaacgattgcccgagcaagactcgaaagtccatcatcacctgacaagcctcttatctcagacataacagctttcccttttccgagcacgggagaaggtagccgagcaggcgaactgggctccctaatgtgaattgcatgttcaataggcctgggcttggccgaaactttcttcctccttttgagcggagtcacctgctcttcctcagcctcatcttcacgattcaagggctcttgagcatattgtttagcccttgcaccttccttcaacttagcctcgcacttcagttgaatcagctcatcctcttgatgagctcgctcagcccgtctagcaccagatttcctttttctccccttcactggcttaggaatgaaaccctttggataaagcccgtacttcacaaggttgtcctcggaggtcaactggatgatattccagtcatcccccgacaactgagcaagctcttgagctctatccctaagagtaagagtttggggaaggcggtaatatgttggaatctgctcgaaccgagtgtgggtggtgcccatgccatccaccatgaagtactcatcaacaaaacgcctaattttgctgatggtcgaatcctctgtgtccgtcaaccacttgaagtctagttgagagaaatagaagtaccccgacctgccttgcatatgggtggacttcaaattaaaaaaccagctaacctcgtggggagaaggcatatcccacttctgggaggcataaaggaagaagagggcagacagatacttaatgcccaggggagtgaactgggtcagagagaggcggaataagtctgccacattcttaaagtacgggtgcaaaggcaacaatgccccttgctgggcatgatcacatgaccaagcgcacatcccctttttagggtttgtggctcggttattgtgggcgagaatgtaacagtccaattcatccaggtagccaccctagttgagagcccgcaggcgcgcctcagtaaccttggaccatactgctataggcccatggtccccatac

SEQ ID NO: 32261 - DNA, 1325 bp, Cannabis sativa
tcccaccataagcgcccatgaaattcttttttcatccgactgaacaaacttcccaatatagtttgcgacatccttatcaaccgtagcagttttaaaccccgatctaagatcatgcaattgcacccacatatcaacttcattcaaggtaattaatcttggatcctccccccgctgcaaccttttgaagattaacaagaacctattaaaagttcaagggctttgattcatcatactttggatatcaatctcatgataaaattgaaagagatagcgattagtatccaactccttgacaaacatccccttccccagctgccacaatgaagccatcatatgttgcatggcctcaaaatcaatttgtctttcagtcaaaaaccttccaacgatacaccacctatcatcatagtcattaccatccgtagcactagcatcataagacaagatagcctcctcctcctcctcaataggaacatgcacccctgtactgtcttccataaccgtaccacaaccagcagaatcccgaaagcaaaaaaaagaaaacaagaacgaacaagaattgaaccagaaaaaactaaaggttaagactaaagaatcatgtcaaaagacaaaactaatggagaaacttaattaatttcaacacataaacacgatcacaacatataaaatcaattaaggaatgtactccttataattctaactccataaaaacactaaattaaattaaactaataaaagggaattaataaatgaaacaaaaactaaaaaagaggagactcgtacgcaacaagttctgtgggttgatgacagaaacgaactaatctcagacaatggctgtcgttgatcggtgtcgtcggccgacgtaaaacaaacggaagttctcgactcgcctgtgggttgtcgtcgttggtcgcagaagcttctcaactggcctgtgggttatcacagaaggttcttcgacgtactggagagagaacaatcacactaggagagagagaaaaatataggacgaaaacgaagaaaataagagaaaattatttttttttatgcaatttttttaataattttaatttggtttttttaagatacgtgtttataaataaaatataataaaaatattattttttttagataatttaagttttttaaataattcaatatttttaataatttttattaatgttttcagaattgataaatattataatttttaaaattatttttttttaataaaaagagacaaaattttatattagtcaaaattcaagaaataaaaatactaatttttaatagttaaaaaaaatagaacctaacaattatgtaggcaa

SEQ ID NO: 32262 - DNA, 1971 bp, Cannabis sativa
atatctataaacattaattacccaaacatctcgttccactgtccacataaccaagtgctatgatttccaaaatgcatctctcattatgctttctttcttccctttttttttttttatgctttctttcagttggaaattcagtatttttttggcgcaacttttgttttcataactctctatggcttcttttctttaatttgtttatgatgatgccaaatctcatttctctctctctctctttttttttttttttggtactgaattaaaaaataatgaaccaaagaaattgaaaggagaataatatataaaaagggaagaccacaataattaataaaaactttaagcgacccctctgagctaccttagttttattgttgtaatagtatttctttccatcacttgtgctgaccaatacccaatcagttccaggtaagttaatcctgtaatttacagaaattgaacattcaaagataggatagaaaattgcagtcctcaacaaacagtagtgacataatatgattagcaattctgctttttttttccctttgaacagcaaagctagagcaccaatgacaatcactagccaactaatcgacttcaacagcctatactaatcattttgttctgaattcagtaaatataataatcccaacacattaaaatagagctgatttactaaggatattattgttttatctttttctgaattactacgagtttggaatctcttgatgtaatttaagagcatttatcttctgtagctggaaataataactttctcaacttctgtaacttttcttctactcccattaatactactgtcgtttcttctaaacaagaaatttagaagaaaatatatatacatatatatgtattatgaaattaaaatagagcttacatagatacaggaactggctgcatagaaattttctcatcctgcatcaacatcaaaaccacaagaaaataagaaagtaattagaattgagaagcaatggaaaaagcaatagagtgattgaattacaacacggaactatttagaaaacatggacataatctggttgcttatgtatgggtttctttctttatttcttatcacagaaataaccaaaacatacttttgcaaacttgagttcataaccatgccctaaaaatatacccagatatttgggaaacaggcaagaaactaaagcaagtggctggccaattcaataattaaacaccggacctcatgggagtaaaccaggagcttgaactctcagactactcatgggcgatttaggaattatgattcgacataaaaataaaatttacaaatgctaatttatgaaacaagctaactcaacaaacaaagccaagcatacatgttatccataggcccacttcaagttatataatgtttaattagtgacttagaaatcaaaaagaagagatattgataggacactttcaatcacttccaatatgaaccaaaagtaagtactgtagtaagcaacaatgaggattactgtagtgagcaatacacggaatcacctttgaaccaatgaaagatcataataataatagatgtttctcccctagctaatttccaaaaaaaaaaattgttttctaagtttctcactactcatacaaagatcattacccagaaaggtaatcttcgtttcatgaagctataaattatgatttcatctaacctagtatgaacattaaaaagaaatcatctaatcttgctgggtgatttgaactctattactaaagtcaagaaattacacacattttaaaaactagtaaaagaatgacaaattaaatacctctcctttaaaatcaggaggtttatcataagttgaaactccagtcaaagcattatagtagtatacaactccagtctcagtcttgtgggcagtccaaggatccgactgttctgtaccttggttgccaccatcacctacaaatgcatcaaaaagaaaaaaaaaa

SEQ ID NO: 32263 - DNA, 3665 bp, Cannabis sativa
  modified_base (27)..(47): a, c, t, g, unknown or other
accctaatcaagtgtttagctacacannnnnnnnnnnnnnnnnnnnnacatattaactttaagaaagagaagaagatagagaataaaataatactgaaaaccctctattgaatgcctccagtattgactttggtctctgaaagtcgtactccttttttccctctaaattgcttgactgaaatactcaaaaatcattgtaagagctttcgagagagatattaccatcatcacggggccgaacatctataacaatcttgatgttctctttgctttatctttatcattattatcattattgtgatttaattatttctaataactttaattgactcattgtcgttggctaaaagtgagattaatattttggtactttcattgagagtagagagacacaatctttctttgagtcttttcagaacacacgaaaatggttgtaactacgacgagaggaaatcaaaacgatacgactgatttgatggtcacagatgctaatgtgcaaactcctgtatattaaagagatacagtcaggacggattccgaccctactatcccacgacctccaacaggtcctcaatcaatagggctaggagtaacaacccctctggcttggttcactccaggcgtgtaagaaactgggaacaccaatactcatgccgagcaaactgctcctagtattgaaaatccatctattggaaatcacaaaggacatttggtgatgacaccaaactgtagaatttgcgagtcactctagagaaaatgcaagagcataccaacactcttcaccacgattagcaagatcgaacagttgtaaatttggctttcgaggagcagaaatgctaattccaagaatggatggatcaatagatggaaattatgagagcccagcaagagacaattgacaaacattccaggcatgctatcgtactgattaggagaacctatcaaataaccaagaagcaatcagtgacaaatactctgattacacaagatccgagccaaaggataaacgtctacatccccactagatcacagtatgggccagaagaacatccagctgaaaacactcagcaaacttaaggaaacaagtagtataatccaaggtcacagagtcaaactatgggccacacggtagacgagaaagttttgccaattcattacttgggatggaatgatcagtttaacatctgtcctcaatcagatatactaaaccaaccaattgttgataacaactagacaagaaggcccccaagtgaatcagtctttaatcgatttggtctcgtacatgatttaagggatgaccttaatcgcagaaggggagcaacgaacaatacatccctcccaatgttcaaccgaccaatttaaacaattatgtgcccgataatgttctaagtgacacaagtcagtccactggtaggtcaagttgatacattgctgcaagcctaaatagatcaactcaagaaccttgtacaaagcctgactgacccaaaactcgcgaacttagaacttgacgggacaaggggatcacctttttcaccaaaaatcaatgctcttgatctaccacccaagttcaaaatgctaacatggaaatgtacacgggcaaaaaagatcctctatctcacatcaaatactttgagatgcaaatggacttacaagcggtaaaaggtgatgtccggtgcagaattttcccaactaccttggcggaggccgcccaatggtggtaccttaagttagctccgagaaaattcagctcatggaattctttcatggtagagtttcacgcacagtgctcctcctttaggaaattcccatctcatttggaagacctggtttaggtaaaacaagtgccaggagagcctttaaggccttacaataataggtttatgacctaggccacaaaggtgaaaggactaaatgaagaagggagattggctgccatcctcaaaggaatcgaacctttgggagaattatggaaagacattaaacaactcactgtagggtcaatagcaaaattcttagaccgagctgatggatttataaagcttgaagaagcagttcgacgtgtggataaagttggtcagaagaaaagccatacgtaaatcgttgccgccaatacgtccatcccacaaaatcaaacctcacaaaatcacagtagttcgagtcaaattggtaaaaggtcgaacaatggtaaccagcaaggtaataggaagaaaagcaggttcaataataacatcgaacaacatcctcgagagaattcctcaaagtttactactttcactcttcttaccaaagatatagaaactattttcacaacgacccagtccatggtgccatacaaaacctcctcccatgaagtaagacatgagcaaaagggataccaccaaattctattattttcatgcgaactacagtcatgacactagcaagtgcaataatctgaaatgagaaattgaatatctcatcaggaaaaataactcgcacttgtaaaagtatgtcaagaacgatcaagatcagagggccgcccaaccaacaatcacaattgattaatgcctacacctgtggacagacacttacgagtgattattggaggccctcacgtcgttagagacttgaacgaagctagagagaggtatgcttggaccctacaacatgaataaaaagataaagtgatagttgtggaagaaagaaagcctaaacaactgcgcatatcagagccagtcatatcctttagtgaggaagaatctgaccatgttatctgtccacacaatgatcctttggttgttgattttcaaatttcataaggtgagattcaatggcctagacgggcaattcctcttatgatgtgtcgtccaaggtgatttatcactagtaagtaatcaatctacagaaggagctaagaatgcctaggcagagtatgctacaccatccgaccagcatccattgtgcagtcagctcgcatacatttgaccagagaatgcgagttaaatatcttcacagatatgtttcatgaatcctcaaacttgcaagccacgattatatccctaattttggggaatagattcacattgacaagaaataagagtaaacattgtctggtttcccatttaattttatttatttaaggaaagtacacaagtttcttattttaattcttattatttttggaaaattaattcgatgtaattcttccctataaatagttgaaccatttcactatttagagacacaaaattagaaagagagaaatactcagaattcattgtaagagctttccagagagattaagaacttcttgaatctcttctcacaagtcaatacaagtaaaaaaaaagagtagactattaccattatcacggggtcgaacctctataacaaccttggtgttctctttgctttatctttattattattattatttaattatttttaatagctttaattgacttattgtcgttggctaaaaatggagttaataatttctatcacttttgttcaaaaaaaaaaaaaaaagaaattactatttgtttatataatattaattttaataattattagtgaagataattgagtaatttagatagatacttttgttcacttttatattttatccacttttaggtattaattttggtgggtgggtctcattcctatttctcttctacccattt

SEQ ID NO: 32264 - DNA, 1874 bp, Cannabis sativa
gagattgaatttgtaattgagttagttccgggagtagaaccagtatcaaaagcaccgtatcgaatggctccagcagaattgaaagaattaaatatacaacttcaagagttattgaatctgggattcatcagaccgagctactctccttggggtgctccaatactatttgtaaagaagaaagacgggtcactacgaatgtgtattgattatcgagagttgaacaatcttaccatcaagaacaaatatcatttacctcgaattgatgatctttttgataacctgaagggaaagacggtcttctctaagatcgatcttcgctcaggctatcatcagctaaaaattcgagagaaagatatcctaaaaactgcgttccgtactcggtatggacattatgaatctctagtgatgtctttaggactcaccaatgccccgacaccattcatggatcttatgaatctagtattcaaggattacctagatagatgtgtgatcgtgtttattgatgacatcttagtttcttctgaatcaaaagaggaccatgagttgcatcttagatcagtactgcaacggttacgagatcacaagttgtacgctaagtccaaaaagtgtgaattctagttatctcgcgtctctttcttagggcacatagtggataaagataggatcatggttgattcagccaagaccgaagctgttcgaaattggccaacactaaaattgcctactgaagttataagctttttgggtttagctgggtattatcgtcggttcgttaaatgtttctcaaagattgttgtacccttaacggagctgacccaaaagaacttgaagtttgtttagactaatcggtgtgagaaaagttttctggagataaagcaacgtttaattaccgctccagtgttaactcttccttcagataaggaaaagtttattgtttattgtgatgccttgagacaaggtctgggctgtgttcttatgcaagttggaaagttaatagcctatgcttctcgacagtgaaaggagtacgagcagaggtaccctactcacgacttagaactcacagtagtagtatttgcgctaatgatttggcggcattacttatatggcgagaaatgtgatatatacactgatcataaatgtctgaaatacttcttcacccaaagagacctaaacatgagacagagacactagctagagtttatgaaagattatgattgtgagatcctttatcaacctagaaaggccaacgttgttgccgatgccctgagtagaaaaggccagagtcagataaatacagtgaagcagatctcccaacagttagcaaatgaaatgacccgagctaaaatttagttggttgtggggaaattaggtaatattaccctgtaatctactcttttggagcgaatcaaagaagaataattgcaagatccagagttagtgaaatcccgatatagggtttcagctgagaagactggtgactttacagtggatgatacgggtctgctacgatttataaatcgtgtttgtgtgcctatggatgatgatattaaaagaggaattatgaatgaatcactcctcttactcagttcatccagggacaataaagatgtatcaagacctcaaagttatgttttggtggccaggcatgaagaatgatattgttgaatatgttgctaagtgtcttacttgtcagcaagtgaagaaggcttaacaccagaggcctgcagggttgttgcagccactgaatattctggagtggaaatgggaagatattggacagtacgactctgtgtgggtcatagttgacaggtttactaagtcagtgcactttttacctgttccgacgaacttctccattgatcagtatgctgagt

SEQ ID NO: 32265 - DNA, 1628 bp, Cannabis sativa
tttcaacctccagaccttctggaatagccatataaatttcttcatctaacatgccatgcaaaaatgcaattttgacatccatttgatccacctcatagtcgaattttgcagccagagccatcataattctgattgatgtttgtttgaaaacaaaggagtagatatcactgtaatctataccttctttttgactgaattccttagctacaagccttgccttgtatctgaccttgccaattccattgtcactttccttttctctaaatatccatttgcagcctataactctttgccctttaggttttttcaccacaatccatgttttatttttgatcagagaatccatttcttcattgatagccattagccatttctctcttgctttgccttgaattgcttctgtatagctgatgggttctgcattgtcaatctcttctgcagcagcaaaggcaaaggcagtgcattctgatgcagagtagtctgcatagccaagtctttcaggagcctttgtttgcctcctttctctatcccttgcaagttggtaacttctcaaattttcttgattggcatgtgtttcatcatcagattcgatttgtgcttctcctgtttctggtagaggtgcttcttgagtatgtgtgtcttgccttgtttcatttggatccacctgaacttgtacccttccattcacaattgaattctgtccaggtttcattgccatttcattctccttgaatactacatctctgctaataatgcacttcttgtaaccatcctctaagcaccaaagcttatagcctttcacaccatcaggatattcaaggaacaagcatttcagggccctaggttctaatttgtcttgtctaacatgagcataggcaagacaaccaaaaacctttaagtgatcatagttaggtttgtttccaatccatatctcttgaggtgttttgaaatttaatgcaacagagggaaatttgttgattaaatagcatgttgtcttcacagcttcaccccaaaaatgtttctgcaatcctgcacccttcagcatacatctaactctttctagaatagttccgttcattctctcagccaacccattctgttgaggtgtcttgaccacagatttgtgtcttttgatcccagtcttagcacaatagtccttgaattcatctgagcagtattcctaatccattatctgtccttaataccttcagttttctgcctgtttggttttccatgagctttctccaattgctgaatgtttccgaagcttgattcttgtttctcaacatgaaaacccaaaccttcctacttaaatcatcaatgatactcatgaagtaattaacacctccaagagtttgtgtcctggaaggaccccacaaatctgaatgcacatagttgagtggttctttagtgacatgcacaccagtagaaaactttaccctacagctcttgcctagtacacattcttcacaaaactctaattttccattcaacttgttccttaacaggccgtgtttgtcaagttcaattaggtctctttcactcacatgccctaacctcaaatgccacattgtagtttgatcaccagtactgtcatttacagcagcatttgctgttcccaacactgc

SEQ ID NO: 32266 - DNA, 1363 bp, Cannabis sativa
atgtcctttgattacacagagattgaattcattatcaatccatttgtacattgaattataacgattaaatcaacaaaaatgtaaacacaataaatgaagaacaatttcggcccaattcactaaatacaacaacatatacgacttctatagtgcaagttgtctgttcatattcttgtataagctcggcggctcaagatgcatacaagagtaatcgagcatgggatgtatgcgtcctgtctagtcgcttgtacggagatcttataataggtcgataacttaagacacacgagtccttatcgggttatcaaggttactgggtcatccggaccagctcactgagttcagaagcaatctatatattttcgcaagaagacctttatcgtcctcacatatatcttggtattttcaagtcttaacttgatctttggtccttctttgtgcgagctactcgaatacgactagacactatcaatgtcacatcatctccctgattctggttcaggcgaggtttgcactcaagtggtctctcattgacatctcagccctcctcgaggagagtgagtccacgtatcatttttacaggagcctggtctcgagtttctaggtgagaaattctcactataacatatgcccctagtttcgcgagtgatagcttgtgtcatgagggaaactataagtgagaggcaggcgaaaggatgtcacaagatggtgacctttggttgtctaattgagggtttcaaaaagatggctataatcattacgtttaacccatgtggggtgccacgtcatcgaaactctttggtgtccgtgtaggcgtggttatggataaccgttggattgtgagaccttaggcattctcttgccacgtgtcttcatcccaattaatgagggataatggtatttaaacctcttgatacgaaatgatccttcacttttttccttctcatttttacttctctcgtttttctctctgatttttgaaacttcaaaaacccctttcatacttcctcttttctctcccagaaaaggctaaaaagtttctgaatccttgaagagtatcgacattctcaaggttagtagaaaattgtttgtaactattttcccctttattttgagaatcaatccatattctgcgttttaggaggtagaaaatgcatgagatattaggaagtatatatatgtgactttattttctgataaaactaggtatttatttggcaaatatgggcctgaaatttaagtaatcacgggttttaggaagaacactttgaatattcgtatctttcttgttgagtattctgaacactcgtgagtattaggaagaaaatcttgaatacttgtatatatatatacctgaataatt

SEQ ID NO: 32267 - DNA, 859 bp, Cannabis sativa
gaaccttcaaaattagctcacaacctataatataattagatacaacaaaattaaaattttaattatttgactacttactagttatatcacttatgagtaactagttagtaataaaaatatatgaaattgaataaaaaaaaaagaaagtaattagttactatttagtaaattatatacataaattttaaaaaatttacatatacatacatatataataaattatatctcaccctaacaaaattttaaaaacttcatttctaactaattaaacctccttttctcattcctattcacaatatatatacacacaatacaaaatatacatacacacatactcaacaaaacataaaatacatacatatatactatatattaaggtttaaatttttactttataagtgcaatctggcgactaattcctataaaaatccggccactatatacatacacaacaacataatgttgataaaatggaaaaatcccaaaaacaattataaaaactaaaataaagcaatgtgcattactaaaatgaataaaaatcataattataccttaattgacgttaagattcaatattttctctactagaatatgtggcaagagttaaaaccaccattttttttcaatagcttcgatttacagtgaaataggcaaaaaaaacaaaactttttgggtatatagatttagatataaaaaaaaaattgaagatttaaaaaaagggataaaatggtgtaaaaatggtatagatattgagttttagggttgtggtttgcgagggttttcgtggtggtttctgggctggtggttgctgtgtgtatcgtgctgaagaagacgaagtgaggctgttaggctaaagggg

SEQ ID NO: 32268 - DNA, 1480 bp, Cannabis sativa
atattttagttatgagaaatgttaaaaggcaatcttccttagtaattaagtagcagagattccatataattttttaaaaaataagatttaggaaatattactaaccaatcataggatactacctatgaaaggtgctaggcaccactggtgcccaatagcaatgctctttaattataattatgtgatacttgacattaaagttatcattttaaaaaaaacataaagtaggcttttattacaaattagttaatattttttaattaaaaatttaaatttggtaaaaagcaattaaaatattatttaaagtatcacgtacaactgattctttttattattattattatattattattattatatcttaatttttaaaaaaaaaaaaaaccaaaaacgtacacattggaattattatttttatattattattattatcaatttttttgaaaaaaaaaaaaagccaaaaataagttaaggtgtatacattgattgatattttatgtatgtatattaacgaaatttacaattaattatatttgatttaagttttagtatttttttttttttggaatttattttttattttaaatattttaaatatacttttatagaaaaattattaaaataatagtaaaatatcagtttgtaatttatctttttttttatataaaaaaaattattaaaatatcaatttgtagatttatgctatataataaatattaaaattaagagattcaatttgtagatttatatttttttatagaaaaattattaaaataatagtaaactatcaatttgtagatttatgctttaataaaatatttaaattgagagaaatttatgagagaagagaaaaataattttggagtaattttagaatgtcatctcaccgccttatacttttcatttatatatatactaggaaacaaactgcgctttgtgtgcggttaataaatattttcaattattcaaaaagtatgttagtaacattcctatcttaatttacaataataaaaataaaatactcaattgattttataaatatgctcccaactataataattgtactattgttaaattatttatgaatcgtgtctcttaatctgatcatatagactttttttagtacaatgagcatagactcttaatgtgtaaaataataataattataatataatgacaaaaataataaaaaaaatatgtaacaattagaataataaatagaatcttttttgctaaattatgtttttctgaattttttcttttttgaatttttttttcaaactctaactatatatatttcaaacaaatgcttgctatctttatttatttttgttcattttcttaaataattgaaatttttacatcaaaaatataaaatgcaatctttattacactaatatcactacacggctatctcaacttttttactcctcttctttattttattaatattttaccacatgcacactcattcaaagca

SEQ ID NO: 32269 - DNA, 2403 bp, Cannabis sativa
tatgtcccaatcatgcaaacattgatcaatagccttaccaagagtttctcctttagtgtccaaaacaatacaaaaatggagaattctcttatgtaagttccatgattcatcaataaaatgggcagtcaaacacatataatgcaaattttgacacgaaattcatgtatcaatggtgagggaaacacgttggccagacttagttgacaaatctttcaatcttttcttctcagttaaatagagattaaaacaatctctagtaaatgtggatcaggaaggaactttaaatctatgctcaaccaaattcatcaaatacctaaatccctcataccccacatgactaaatggaagctcatccataattatcatcctagcaatggcttttctaattttttctacattatatatttgtgcagtgagttctacaccccgacccacttctcttttttcacaaaaattcagtgtcttctgcttcttatccatgttagaaggaaagaatttgcaaacacttatgtgtgctaacaaatttgatgtcccattttttttctatgactacatgcataatctttcttgcagtaattactgatagctttaatattattttatccttcacatcttttgtgaaatgatcccaagcaggagatggatgtttaacaggtttgcgtttacttggtagattagagtcattatttgtagatgttggcgatggtaattcatcacttgatggttccataggacaattattagagctcatcattatgtttgcacctttacttttgttaatttgagaactatttgcttgaggctgacttttattgatggagtcaattggagatggaattccaatctgttttgatacttctacacaatcatctctctccatctccatctacatacataaaaaaaccaatatacatatatgtcaatatacaaactaataaacaataaaatgcaaatatgaagaacacaaaacttaaactctaaattaaataaacactgaaaaaaattaagaaatagacaatgaaagttatatcttaatactgttattacgaatcaaacataaaaagtttcaaaatgtcgtatagcataatgccaacttatgtccatatattctgcaacaattatttttcttttttcaattgatcagttcttccatctatcacaaattgtggtgaattggattcacctcattcaagaacacatcagctagaaactcaattaatcacagtaatgttaaatgcaagatcaacaaaatgattaaaacagaaaactcaagagcagaagaagaaaagtaatacaaaatacatacacagtaaagatcaatatcaatgttacactgtactaggaacttagtcctaaaacaatagagaagccacacttatatagtaactaacctaacagaatgacataatcaaaaatgccattgcactctgaaatctacacaaatcaacaaatataaatgcaaccatctttgtgtttcatgataaatataaacaaaatgaaaaaataattcataaacaatttttttttttgtctaaacaacagttaaataagtgattttggcatttctctcattctttttccttccactcttttcatattttcaaaaattcctggctaacataaagtatccaaaatattattacaataacaacgcattgtattatttattgttagtataataaaatatcaaaatcaactcaactatttttatttaataatgtaataaagattgacatgatcgaagtaaatgtaataatgctttccaagaagaacttcatgttgaaaccaacattaataaatagtatcagtattttgataaactgtgtttgaatagatggtagtatgaagcaccaaaagcaacaatcaacacttacattgaaaaatttcaaacccacatgctcaccttccaagctagctccgagttatttgaattgaaccattatcatatttcaaacaacaaaatctaaaagtgaaaggaaagaaagacatcaccaagttaaacatggtaaacctttcactacttaagcaacaaggaacgataaatttgaaatcacgttaattcagacacgactgtttgctgatgaaacaataataagcaacctcttgcagtgtgcctaatcagagcttctaaacgcgatagggatagttacttacatcaaaagtatttcattatttatattatctaataaaaataaaaaagatggacagtagatatatcatttcttttacatcaaaagcataaataaatatattttgcacataatagaatatttctttcaataaatagagaacaatgggttaacacttgaaataagagcattaggaaattaggaaaacagagaaaacacaagcttggactacggttcatcagaaaaaatgtcaacaatgactaaaatatgtgtg

SEQ ID NO: 32270 - DNA, 3387 bp, Cannabis sativa
ttagtgggcgtgttcttcatttgccgtcccgttcaattactcaaggcaatttggttcgtttggcaaatttagctggggaggttatcgatgttcaggttgcggatatccctcgaattgtgaccagagatttctttacctttaaagtttggtgcgacatcaccaagccgttattcccaggccttttatttccttcggatggaggaaagaaatggctcccattcaggtatgaccgcctcccatttatgtgtttaaattgtggtttttaagggcatgatactcgggtttgtgcagaacctcccaagatgtttgatgatggtcttggaaataggaagccgagttatggaccatggctcaaagttgatgacataagagaagccaagagttattcaaagtcggatgatcatgtcctccctatgaagaaggttaactgccctgcacaagttgaggaagaatcctcctcttctgctatgaagatttctggtttggggattggagatcaatatgcttccaaatcgcttcctgggaattcgatggaattgaatatgggcttgggtcttcttggctcgaaaggaacaatccttgataataaagaagcacaggtcagcagcaaggtaaagatgatggaaaagattgaggctagtcatataaattgtaagagaaatggctcttggagggaagataatggatctataagaggctcagcagctatggatacagatagtgtttttaattctctatgtttggggaagggcagctctggttctgaaataaattctattaatttagtggatgttcccataggttatgttgatagcttggataggctaagtaaggcagaaggtccattaaagaggagaagggtgactcctaaaagaacaaagaacaaagggaaagcgggtcaggcagagatcaatcaatcggagatgtctaaggaagtaggggtaattcttcaaggggattttctaatgaattggatttgatccttgacgctacaatggaagcgacgaacctagttgatctaggtcgccgagagccatgatggccatgttttggaatgtccaaggtcttgggaacccttggacattgaataccctgaagtcccatgtcaatgattatcatcccgggatgatatttttgtctgaaactcagttaaatagcagtggtatggagttggttcgggtgaaattgggttttgctggctgttttacggtggatgctagaggtaaaagcgggggtttggcgcttatgtggtctaatgattttatggttcaaatcaaatcctttatggtctctcacattgacgctttggttgagaacgatatggggtttgtttggcgttttactggcttctatggaagcccggatccaggtgggagattggagagttggaagttattatataggctaaagacaatgttcaacaatgcttggttttgtggaggcgatttcaatgaaatattaagtacgaaggaaaagaacggaggaggttcgaaacccgaatatcttatgaaaatttttagacaagccattttggattgtcatttacgggaaattgcctcaaatgggaatgcattcacttggcgcaatgggagaacatctaatttgatttatgagaagcttgaccatgtgttatgtaactcggtttggctggaaaaatttaaatcaaacaagatcactctcctcaaatggtggaattcggatcataggccgattttattggaagctcaacaaggtgttaaagggagtccgtttagaagaaaatggggatctcaattccactatgagcatgcttgggcggataatgaagattgcctcaaaattattagtgaagtttggggggttaaagagaaaaggaggcctattgatactcttactcatctaatctccaactgtggaaggagattacatgagtggaatatcaatcaaaagaatgccatctttgctagatccaaggagttaaaaggaaagattgattggctttccaagtcgtcaaatgtgacagattggatagcccgtcaaaaattggaaaaggatcttaatggtgtggaagaaaaaagggagatgtattggagacaaagaagtcgtgctctttggttaaaacatggcgatcgaaatactaaatttttccacttcaaagcttcttctagatggaaaaagaatacaatttcggggctgtttgatgatcgtgggaagtggtgcacctctgatgatgatctagctgttgttgcaattaattagtttcaaactttattctcgaaatcaaatggttgtattgatgtcaaagctgctcttcgaggaagaattccttgccggattagtgctactgaaaactgtgcattactgagccatttacatgtgaagaaattaagtccactttattccaagttcaccctctaacggccccgggaaaggatgggttaccgggtctttttttccacaaaaattgggacttaattgagtctgaattcactgctgcctgccttgatattttgaaccacaattcggattgcaggaaaataaatgagactcttatttgcctcattccaaaggtgaagcaacctactaagatgtcggagttccgtcctattagcctttgtaatgtggtttataaggtggtatctaaatgcctcgccaatcgtatgaaactaagtatgaattcagcaatctcagaaaaccaaagtgcctttattggtggaaggatcattcaagataatgccattcttggatttgaaagtcttcattgcatgaggaaaggtcgttttggaaatgggagcaagatggctttaaaacttgatacgtctaaggcgtatgattgagtagaatgggatttcttggaagcgatgatggagtgtctgggttaggaggatgaatggattaagaaagttatgaactgtgtaagatcggtctccttctcagttatattaaatgggtcgataaaaggtctctttcaaccgggtagaggcttaagacaaggagaccccctttctcctttcttatttctcctttattctgaaggcctttcatgtcttattcaagaagcggaaagggctgggaaaatacatggtttacgctttggaagcttggatcacaggctttcccacctattctttacagatgatagccttgtctttctcgatgctactatggaggagtgtaaggcgatcaaagaagttctggagaggtatgagaccttatctggccaatgtatcaattttgagaaatctgaaatgtgtgtgggctgcaagattgaaacaagcatggcagagaatctaggtgcttacttgggtgtctctttggtcaaaaatcatactaaatatctgggtatgccttcctttgtgggaaggaataaaaagcaagtttttggtaaaattagagataaggtggaag

SEQ ID NO: 32271 - DNA, 7644 bp, Cannabis sativa
  modified_base (987)..(988): a, c, t, g, unknown or other
aaaaaaaagtatagtttttttatagtgtaaatttttggtataataataaaattttttaattatttaagcatataaattcagatttcccatttaaaaccgataacaaaagagagcattttgtagtaataatatataactgtattgacttttacatatatatatgtatgaaactatattaattattcacaaagtgatctattacctttcaccagagatacttaacacaacaaacaacaaaaaaacagtaacaaattttagaaaattatattaggcaaattatgtaaaacctcatctacattttgagggattacataccacacaaaatcttagacgttggattccaaaaaaataaacttttgctaagatctaagggatatgtgatgttaagtaaaaagtaagggcaatataacaattagaaattggtaacctattctcctttgtgccattatactttatttttatttgtaaactcatgatctttttgttttcaataaatacattttccaattggacacattttttactctacctgtatgtatgcagaattttaatctaatgttaaagtaattttggaaaatttattgacatcaacaatttatccttggaaaattaaattacttactttgaacatcattgatataattttactaagtttcaaatcaactatgaaaaattatgataaaatttcttaaaaagtttactttaatgcagataaattttcaatttcaaaagttcaagctcaagaatcttataagttcgttggttctcattttaacagatttattagttgctccaaaaatgccacgtaaataattttaggggtgttcatctaatgtaatctgtactattttgctcatagtacatctgattcaccttaagtgcagatttcatatttttgatcaaatccaatccaatctacaaaaatgtagattgaatcggttcttttaggttggttacttttcaatattaaattattaatatttattnntgaataatttatatataaatataagaaagttccttattcatatatgaagttgtgacttgcagctgtatagagaactaagaccacttaggtatgaataaaataatcggcaacatattaaagtttgggattttgtaatggtagacacctatatcaatgaaaactgtagtaaaattcagtatatataattctataattattaagagttcaattccatatttatagtggagtaatcatggaattaataaataaagattatttggttgatgagactcaatagataatctagtttattagagcttagaattatgtgttcatagtccctgaatcgccaccttgaaacactgtcaagggtatggataaagagtagtataatgtcaaaaatctattttgaattggtgaaatagtaattatttatttttataataaaaaattttcaaattaattaaatatgaaaaagacaaattattaagacaaaatttgttagacaaaagttgtcaggataaaagacactattcttgtcctaaacaagaaaagggtagacacctatatctttgtgttaattaattatttaattaattcaatcaaataaatatttgaatttgaaaatggttaaagatatttcaaagtagttgagatattctcatcataatatcagtaattgaattagaagcctaatttgagaaatccgatgatgattttgtaagctaattttcaaaattacctagagaaaaagaaaataattttttctctcgattgttcttgctcatgtgttgagaaatcaacaagaacaacactatatactttatcctaatagcccacactattccttgtgtgtggtagattaatttggaagatattgatgtgagtctaattttattatcctcatcatctgaattaagggatacaactcacgagaagtttcgaagataccctgatagtattcaaaagatatgtattctaaacttgttattttatgttttgatttaatgtacacacatctggagatccattagactatgatacaatgataatcagtaatacgaaattcttccgcaaggtatatgatttagtaccataaaaaccaacagttaattgcaccgacaaaagttaaatatattttttttttttttaaaaaaaagaaaatttgtttgcctgcaaaattagttgtgtcgtataacttttgcgggaatcgaaataaagggcgcgaaagttttaccagcgagtttctacgccagcaaaatagagcgaaaaagccctcagccaacaagtggatgtcgatggtaagatttacgttggtgattgaactcaccgggaaaaaaagtttcgatgatgaaggtattaaatttgtcgataaaatgcatttctccgaccatctactatcgacaacttttgtcggcgagctttttcgctggcaaaaggtttcaccgacaaaaagttgccgacgagttttaggtaccttttactggcacaaaaacttgccaataaaagtgggaattcttgtagggacaagcacaaaataaaccacaaattataatactaaactagaaaaaaaaaaaaaaaaaagtaacataaactactaactcaatattagtctaagaagaaggtgtgaaaaataaggatcatatacataatttaaatttactccctaaataaaataaaattaaaattaaggcaaaaaattaaaattaaaagataaaaaaatagttaagaaacaaatttatttatataccctcaaacaaaattgaagctataaacctaaaatatatctaattgaaattaataaatattgaaacccttaaataaataataattattatagaaactaatttaattatgtggtttatctttttaaaaatactgcaacaaacctataattaaaattctaatagtttgtcttaaaaaaaaaattcaaaaactaatatatactgaaaacaaacaatctaaaataataataacagtaaattattttgtaatacatatccactaaaaaaaatccaaattgacaatatactcttatttaaaacgcattaaaaatagtactacacattctatttgaaatacatatccttttattgaaaatacatatcaccaaaaaaagtaaattacaaaagtatcccttaaacttacattatatttcaagaagagaaaaaaccaattaaaatattatttttctgatatcaatttgagtactaataggtaacaaaaccggttataggaaatcaaataggttggattgaaaatgtattttggtttgtctcatttgagggatctcaaacctcaaattgaggtgagggacttcataagatccctttttttatttgcaattttttggaaaaataatgttacatgttgcgaaaacatagtttttttttttttgaaacagaattcattcaatcaaatagcattacaatggattaggcgagtcatgcttcacagcttgactcacaagggggaacaaccccaactcacatggcactagctttgttgaacaaagcttcattggctaatacatgagcaacctgatttgcttccctataaacaaataaaatccctctaacccttacattctgcagaagacttttaatatgggcaatgatcccataaacatctctacaccctccctcgtctttctgcactaaagtaacaacttgtaagcagtcagactcaactgtaaaggctggtaaattgcactgtaactcggcttgaagacctgctgcaatcgcctgcaattcagcttgcaaaggagtcaattccttcagtagcaccgtggcaacagtagagtgtacatggccaacatgattacgcacaaccgagcttacactagccattcctgcccccactttcactccagcatccacattgattttaaagaaatctgttgttggtggattctagcctgccacctctctactttgtcgatctctcttagatgcattattctcacgaaaatcactaaggaacttgctgcaccactccaatatagcacaagcttggggcctttgaccccccatgattgacagaattacagacatactagaggttccatgagagaaccagaaaaaaattcaaattcctccttagtaaaagtggctgagatgcgcataagaaaggctagcacatcttctcttccttgtctttgaatttttccatagaatccagtggatttccagacctcacggttcactctacaaccccataaagcatgaaaaacattctcatacgcaccattagagcatcggttacaataaggctcaacttgaatgttacggtgagcaagagctgcatttgttggaatccaagagtgagccattttccaagaaaaatgctttacctttggagggattttgagcttctaaagatgtttccaccatttctcagtaacctcagtattcgactgtacatcccgcacttgtaaggcagccgccattcgataaccactacggacagaatactccccatctttgctatagtgccataagattttatcttctatttcccagtccgacgtagccatttttagaattaaatctgcatctgttggattgaagacaactctaacaaactccctcatcccattctccattagccttcttcaaatcaatgacataaagttggtccggtaaatgcggtttgtcatagattttaaagtgacaggccgaggtagccaagggtcttcaagaacccgaactgagtttccattgccaattctccaacgatacccctttaaaaataatcctctttccccacaccaaacttcgccaaacaaatgaagcatgattcccacatttcgcctccaacaccccaccatgaggatagtaactggctttcaaaactttgatacacaaagaatttggaaaccttatacatctccaaatttgtttagcaagaagagcttgattgaaaagacccaaatcccagaatcctaaaccaccttgctccttatgtttgcacagtatggaccatttacaccaatgaatcttagcatccttttccgacgatccccacaaaaaccttgcagccatgctatgtatactattaatagttttctttggtagacgaaagcaactcattgtatatgtagggataacttaaacaatggccttgataaggacttctttcccagcagcagaaaaaaatgaacctttccaaccctttaatttattccacaccttgttctgaataaactcaaaatgttgttttttcgtcctcccaacaaaagaaggcagcacaaggtattttccataattatccaccacttttacccccatcaaagtggctaattgagtcttgatgggagaggagacatttcgcccaaagcacatgtctgatttatggaagttaaccagctgtcccgaagcaatggagtatttttccagcaactccttgaaccacctacactcatttttcagttgcttcaaggaacacaagactatcatccgcaaagaaaaggtgtgacactgtcactccctgcctgccaaacatactcccatgtactcgcccccttaattcaacatgctgaatgagacaagagaaagcttcaacacacaatagaaaaagaaatggagagaggggatcgccttgtcggagaccccattgtggaataactcacccctgaatttctccattaattaggaaggagaactgcatcgaggaaagacaactcataatcttatttacccaaactgagtcatatcccaacttcaacatcatagcttccaaaaacctccattccacatgatcatacgccttagccatatccaacttcaaagcaactttcgatccattccgaaatctatttttcctcatcacatgcaaactctcataccccacaatagcattatcatgtatgagccgacccttaacaaaagcactttgagaatcagaaactacatgtagagtgaaatgtatcctattagccaagcattttgaaacgatcttgtagatcatattgcataaactaataggtcaaaaatcctctattctttgcagtttatcaactttcggaatcaaggcaaccaccgtatcattaagaaacttcaaattagccccatgattaagcacattcaaacacacagcaataacatcttccttaagtttagaccagaatttttggtagaaaagtgtcgggagtccgtccgcaccaggtgccttagtgggatttatctctttcactgcttgaacaatatcttcctccataaagtcagccaataaatgttcattcatagccaatgtcacctttggttgtatcacctcaatgaactcctgtactacaacttcgttaacatctgatcccgtaaataatcttgcataataatcatccactatcttacacactaactccttatcatcttgccaaatacccatttgatcttgaagtcctttaatttcattctttttatgacgggaggatgctttgtgatgaaaatattttgtgtttctatccccccattgcaaccacaaagcccgactcatttgtctccaatattgttcatccttctcaagcagcccatttaatttatcctccattttttgaatcatctcccacacacctggttgctgctgcatagttagctcatgaagagctttcttagtcttctcaatctcagtaatttaatctaagtttcttcttcttattccaaccatgtaatgcctttccacatttattcactttgcacctaaaggaagaaggccaacccctgccacttctgtctttccacattcggtcaacaatttcagcgcactcttcttcctggtaccacgcttcttcaaagtgaaagcgacttttacgtttagatttaccacactttgctccatccactctcactgacatgtcaaccaccaacgcacgatgatccgactcccaccaatcaagtagcgaaatgtcagccccttcaaattggtttaaccactcctctgtacacaaccctcagtccagccgctccattatcctagagttactatgttcattacaccaagtcagttcatgcttgacgaaactgaaatcaataaatcggcaatcgtctatgacttctttaaatccatccatagcccctgtcagtcgatctcggccaccaactttttcagataaactcaaaatttcattaagattcccaatacaaagccacgacccctatacttattttcttaaatcccgtaaaagttgccacgagaacctccgttggtttgcttcaggattaccataaaacccaataaaataccacggtgagaatccacttccagccacagttgcaaggatatgcccaggagaactagacagaacttgcaatttgatatcatctttccacattaataacagtcacccactcaaccccactctatctaccgtccataaatttccataatttaaaacacaacaaacacgttcagcttgatcccgagataatttacttttagctaagaaaattatatccgcaccaatatcacgcacatgggattgtaaagctcgtaatgtctaagcgttccaatcccttgaacattccagcttaagagtttcattgtgatcggcagccttgattgtcaaggctcgccgcttcaatttcagaacaagaaatcaatacaactagaaactgttggaaattagtttaccaggatcttagatctactcacaagtatgctgattaacaccctaaatatga

SEQ ID NO: 32272 - DNA, 5365 bp, Cannabis sativa
  modified_base (2769)..(2775): a, c, t, g, unknown or other
tttttttttttttaacttttattttgatgatatcatctgtggcatttgcattccctcattggtcaagttttcattcccatgctttgtgttttttggtatttttggtagaaactggttattgaggattattttattctgtacatgatttcattgctgaaggtgatattattccataatgttctttttctacttaagaggctgttgagcataggaatattatatttattaaggccttgaaaagaaaaaaaaaattatcaaagaaatataagcgttttactatttaataaatttccattgcttgtaggtgtttcaaagaagacatgatacagttttacttattttttaaagcttaagtacacgtacatataaacaatatttgatcttaaaaaaacaaaggactcaccaataatccatgcaggaacaggagccatgagtaaaatgatggaacctagcacgatctctcatgatgatgtccacattaaaggcactggaaatcaatttgaatacattgtggcaatcgttgcatactctaaggttcttaaatatgcgtataggaatgcctggtttcgagtttagaagcccgaaagcaagggcaattctttcactatgcaagtctagagagtgctctttcgtatcgccctcttcattaaccaaaggcgcctgtgaataatctggtgaatatcccattaactggagtcgctctttaataacattcagaaacttatatatttcctcacattcaggatgagatgaatccccagcaaaaaattcatgagtgattccatcaacctcaattatactacagcccggctctttcgatataccttcttttgtcatcaatttccttaacaatccaacatcatcccaacggctagcagatgcatagacacttgacataaggacgtaaaccccacttgaagcagcatcctcagactctaggatttgtctggctacttcttcactaagctcaacacttgccctttgcttgccacaagcattgagtagactcctccagattacagcatctggtttcattggcatatttctgaccaaattcagagcttcatcaatgaaaccagcacgagcaaaaagatcaactaggcaaccgtaatgctctagttggggttgaatcttgtactttttcaccatcagttcgaaatacttacgcccctcactaactatgcctgtgtgattacatgcactcaaaacaccaacaaaggtgattgaatcgggcttaaaaacctctgtttcgatcaaacgagcaaaacattccaaagctgccttagcctgcccatgcatagcaaatcctaaaatcattgaattccatgtagttatatcacggttggacattctatcaaagacttgctgagcaatttctaaggatccacatttgcaatacatatttatcaactcagaggcaaccaacacatcactagctatagctggattaggcatccttaataaataagaatgaatccacattcctaaagacaaggcaccaattccagcacaagcatttataatgctttgcattgtatacccatcaggctcaaacatgttctgcatctccctaaataatttcaacgcattttcaaactcacctgattgaacaaatgcatcaatcattgcgttccacgataccaaacttctaacgtgcattttctcaaacactttgtgagctaattctaaatgtccgcaagaggcatagaagtgaatcaaactgttgcttatataaacgtccgaacctaacccaaatttcacaacatgggcatgtaattgttccccttgggaaagggcaaacaagtaagcacaagctttaagaacaaagggataagtatatttatcagggttaacaactcctccttctaacatcttacaatatagttgtatggcctgatttttgtgattatcgctacgggcacatcccctaatgagagtgttccacatgaatgaatttgggttctcaatctgaccgaagacccgaaaggcataggcagtgtcagccatggacgagaaatggaggattcgactacatatgaaaagtgtatgggaattattagtggtggaggtggtacgcaaagtgtgagcgtgtatttgttttaactgagacatgtctgtacagtcttgtaagagtcggagaatacgggtttggtgggagcatgaaggccctccaatgttgtcaatggccattgtacaagtttgtgagattgccagagccatattgccgtgtttgaattgggaaaatgaaagcagaaaagtaatagagatatagaaagtgaagttgtgttatattctcatatatggaaagaggttcacacaaaggctattggctttagtgagagtaaaaggaaagatgaaatttcttgggaaaagaggatagtgagtaaaccgttagagagagagagaactgaaaggaggagggttggcattgtgtttttttttttttttggtaatgcgaggagagcaaagaaaaaatgtaaatggaaaaaagtttgagaaaagaaaagaagttggtgtgtgttgggggttgtatgtggagagaaaggggtgggttggtccgagtagtgcaagagagagacagtgtcagtatagttgagtgagttagttagttgttctaactaactttgtaacggttttcttagtctgttaattcttgtttttatttctgttgctttcttacacttgtatataaatacagtcagtaataacaagagaactcaagttctgggtttactcattttgatacactctgttttctctctctctctnnnnnnntctctctctctctctctcgttttgttactttgttctgtaaagtttcatactctgaaactctacatggtatcagtcgccctcgactagcgtcatcaatggagtctacctcctccgatcctgttccggccaccagaacttctgcttctgcaatgtcaaaccagttgcattccaactggaatcccttttctcattccttaacctctgttttgactgtcaaacttaatcgtactaattttctctcttggaaatctcaggtgatccctaccgtaatcggacacgaactggatgagatcttgttggctggcaatcctcctctacaacatcttcttaccggagagccaaaccctgaatataatcagtggaaaagaaaagatcaacttcttctgtcatggctccgatcgtccatgtcagagggtgttcttgcattagtcgcgagtttttcctcctctcacgcagtctggcatgcccttgaacaaaaattttcgagtcaatctaaagcaagactgcttcagctcaagaatcagttctctacgattcaaaaaggaggtcaaaccatctcggactatgttgataaagtccaggccattgccgattctcttgcggtggctggctctccaattcttgatcaagatctcatcctgcaactactcaatggtcttggaccagagtacgatcccgtcgtcttagggatcaccgcctgtagtgactcactcacattcgaagaagtacaggccttattactctctcatgagagtcgcctggatcatcacagctcccttacagatcagtccatgaaacttcaagccaatatagcatttactggttcaagaactaatacctatcgcccaccacagttctccaaaactggcgccaaaccaaactacagaagccataatcccccaaatcgacctctgtgtcagctgtgtcttcgttatggccatacagcaccagtatgtcactaccggttcgataagaactgggtcacccctaaacctggatcatcttccacttctcagactcaacctcctcgagcattgatcactgaacatgaattcgagtacgatcctcaagcctttgcagcttcctttgttcctgactttggggatgactcaggctggtttgtcgacacgggggctacaaatcatgtcacgaatgacattggcaatcttgactcagcaatagcctatccaggacccgaaggacttgcggttggagacggtaagaaactcctaatctccaatattggtcttgcctctctatctgcatctaatgctaagtctctaaaattacaatctgtacttcatgtccctgcaattaccaagaacttggtcagtgtatcacaattaactaatgacaattttgtgtttcttgaatttcataaatcatgttgctttgtcaaggacaagcaaacagggaaggtgttgctcaaggggactcttaaagatggtctttatgtgctagaagaatgctccaagaattcggctaaagaaggttatcaaggtggtgtgtctagtggtaattgtcctgcagcaatgagttgtaccggttctttccagtttcccaatgtaaacacaaacattatgtgtaactcaactcttatcaataaagaaaatgattttgaatctacttcctatcatcccactgctttacaaactactaccactaatgacataactgtttggcatcaaaaacttggccacccatctcaccatatacttaacaagattcttaccaatattcaccacaaaggcaacactcaacatctttctttttgccatgcatgccaacttggaaaaagccacaaacaaccattctctagcacagattccaaagccgttcaaccccttgagctcatacacacagatgtatggggaccatcccacatcaaatccaaagatggatacctctactatattcatttcatagatgattatagtagatatacctggatctatccaatgtcacaaaaatctcaagccttagaaacatttgtcaagttcaaagcaatggttgaaaaacagttcaaccttcctatcaagaaagtacaggcagactggggaggagaatacagacctttctcacgattcttaagtgaccaaggaatacattttcaacacccctgtccaaaaaccagtgagcaaaatgggcgtgctgagcgtaaacacaggcatattacagaaatggggttaactatccttgctcaatcaagcttagagtttcactaccggtggcatgcatttcacacggctgtgtttctcatcaacaggttgccaacacctgttcttaactacagcactccaatggagactctacttggacagaaacctgattattccttccttaagccatttggatgtgcatgttatccacatcttaggccatacaacagatataaaatggagtatcgaactcaacaatgtatttttcttggctactcttcctcacacaagggatatctctgtgaaaattcagagggaagactgtttattgcaagacatgttgtcttcaaaatgaaaaggctttttcctgcatccacaaaacaacagtctgaacaggtaacttcacagcccatctttccatttgctcagtt

SEQ ID NO: 32273 - DNA, 1568 bp, Cannabis sativa
  modified_base (584)..(587): a, c, t, g, unknown or other
gcttgctgaggcggttcctcacaagaggcagggtgccttgggtgccaggtgggtaagtcccccgtccaagatttcggaggcacaccttcgaactctttacccggacgggtacctgagctagctggactgctatattctagcccacgacaatcgtgccacaaatcctgataagggaatgtgcgcctggtcgggggctcacgacaagcaaggggtgctgatgcccttgcacaagtacttcagggatgtggcagacttcgttggtctctgtccagcccaaattactccaaagggcattaagtatttgtccactctcttcgtcctctacgcttcccaaggataggatgctccttgcccccacgaggttgcctggttcttcgacctgaagtctacccccaagaaaggcaggtcggggtacttctacttctctcagcaaggcttcaagtggttgagcagcacggatgaaggccatcagcaaaatagggcgttttgttgatgagtacttcatggtcgaggatctgagcatcacccgaactcggtttcagccgattccaacatctcaccgtcctcccctcactcttgctctnnnngatagagctcaaaaacttgcccaagacccaaaactagaataatttccataccaggaccaaaacccagactcggacccgggacccaaaatcgaaacaagaatcggaatcaggtacttggaataggaattggacctgtacccagaaccaaatctagacgcagaaccgtacacggacacagacccagactgggatcgatacccggacccagccttgcgccaggacctgcgacccagaacctggagcctaagacccatgacccgtgacctgcactagaatccatacccgtactagaattcagactcaaacactgacccagacccagacctagaccaagacctggacccatacccggatcgaaacccaaacccagacccagaccgaaacctaaagctagacacttactagaactcagacacgaacccaagactcagactcaaacttaggactcggattcgactgagatcaggactgggacccaaacccggacaaggaccgagcgttgaacctggactgggagtagaactcggatttggactgggatccgagactcggatcgggacccgggacctgagactcggaccaaggacctgaaaactgaaccgtgacctagatgggggacctagtccccaaacccgaacctggacgcaaacatggacaaaggatccagacctagatgggggacttggacccaaaactgggacccaaaaccgggaccgagaaccaaaactcgaccccaaactcgagactcatgactgaccttcaacccagaacctaggacctgactatagggacacaaccccgaaccctgacccaaacccaaaattaggactcagcccgagacccaggacccaaactagaataagatcgggatccaagattgagatccgaatctagacctgaggttttgacctgacccgtagttagtttgagcttgaatttgttgatattttgctcaagttttgagcctatattgtatattgt

SEQ ID NO: 32274 - DNA, 1780 bp, Cannabis sativa
aatctaacatccaatatataattggtcggatctggataggcctaaaaacattagatgtgatctaatgaacacccctagttgtaggaactatgggggtcgactatggcttcttatagcaagtctgttcgtgatctagatgaggaatctataactcaagctcagaaactcatagacaaaattgaatgaataatatctctttattgtaataaagtgtagtagttacaataagggattaacaatgttgttcaatgcctatttataggcttggtgcttctgttggaataacagaataaacggtcagtcaagctgaccgtccttaggcaactaacactaactaactcggtcacatgaccaagcacctagactagcaattaactaacagaattaatcctaggtaaggtgatattgtctttacgaactttgataaacgccctcgaattaagattctcgtcgaacctgccattcgagagagggagcttcttcttccaacatgtttcgtctctaaagatagcaacagcacacaaacaatctttcaagcaagaatctttgcaatcctctccattaaaaggctttaacatgacataatccgataagggccaatctgcattgtgcaactcctcaacatcatagagatcttttatgttgggagtaagctcgtcttcagcgcaaccttgtatgaaatcgggtttgcagcttccatattcgtcgttgggatcaataaaagagtactttttcgggcattggcatgttggtcttgaatcttcattgagagtacaaatgctgttgtatccacaaactccaataccggcagagacaagagagcgttggcatatgttttcgggtatggaccaaagaacagtccatttcccatccccattggatctcttgggatgataatatttagtgaaaagaccatcaaaatcaagagtagctcttatatagttgtcttttgctgagaccatgttttcactagctagacttaatctttcattatttactctcaagagatatagattgcctgaccatgaatcatgtgtaaacaatatgttagtatttgtaattttcattgagtacttttgctttatcatttgatcatgttaaaatttacctttcaattttataactatacaacaaaaaaactaacacactaaaaatttaagatcttatgtttagagatgtgagttcaaacatttaagtaaaaaaatgattttttgttattaaacacaaatacataaacaacagaaaatcactaacaactcgtaagacaatagttacccttttcacaagattatttctattggacactaatagtatgtaacactttttataagtagcgccttctgattagttagtaatgttttctaaaaactattttcttaagatacatgagacttgacagagaaaagtgctaaacaccagtcatatctttatgaattttttttttatacaaaaaagtctcaagttcaaaaaatatacatatatttatatatacatatacaagttattgtcgcctttcttgatggttacagtcatagatcaactagtgtgcttaattggtataaataatttgtattttatagcttaaatgtataatatttttaacattgtgtgtcttctatcttaaaattaggaaaaataaacaatacatataaatacattattacctgtctcattgaacactaaccgatttccagcattggaagagttattactcccttcataagtatcactagcataataaggctcattagcatgctcagtaggcaaattcacagaaacc

SEQ ID NO: 32275 - DNA, 1603 bp, Cannabis sativa
  modified_base (1550)..(1555): a, c, t, g, unknown or other
tcatagggaaggagctcgcacaaatctcgatatggggaatgaaacgaaccatacccaagggagaagaatgaggcatgaagaggcgagtgtcgctacgaagcatacaataacccacagtcgatcaatgcgaggaggagagaatcctcatcgcaacaatgatcaagaaggcagaatacgacctatgagtggaatgagatccgctagccgtcatagccactcagacctatgagaacacttgaaccagaaaaaacctaatcttcaccaacaactagctccgaagcaaagggattcaatccatttacaaatagacgagttggaggataagctcaagaggcatcaagtcggagagcaaggaaaacaattgggatttgatttcgctgaagaattcgagttggtagcgtctgggtcaaagaggaaagacgactctaagcggtcgcccgaagataataagcaaaagaaacacgacaaatatgtacacgtctatgctatttataccgagcttaatgaaactcgggagagaatctacctcgcgcatgaacacaaggtcactttcagcaaaccaaagcccatgaggcacgcgagacacaaaagggacccaaccaggcgctgtgaataccatggagatattgggcatacaatagaagagtgtcatcagttgaaagatgagatagaaggcttcattgtgcgaggacacttcgaacaatatgtaaaggggcaggacaatgtccataaccagcccgatctacccaatgaccgaagcgaccaggaaccacaacctccccctgttggaggaagggatacttcggttgtcatgggaggttaacatattgcaagaaaagaacggtgacacccaaaagggggatactaaagaaggttgcccagcattaattaaactagaggcaattagttcggtcaagaaattacgtagaactagtgcaaagtaattagatgccagctcgcgatggatgtcgtgtagagctgcgacacagaaaagtcagtcgtcaaccaatggcagttcgagcagaaggacaaacaaccaggatcagttcacctggagccgtggggatatggcagggattgaccatgaatatcaaaacccctgtgggaatatgttagggattgaccctgaatattaaaacttttaaaaactagactggaagattgataaaataagcgattgaattgggagggttctcatgagattaaatcgatagtaaattaatgattgtaaaccacatcactgatgtaatattttgcacttcagtcgtgaataaagttaatcatttctttcgacaagtaattataaagcacggcccttaaaaattacttgaggggcatatgtgtatgattaactaaaatttatctggaaatatatggtatattgcaaacccaccactttaaaaaaaaattaaagttctcgaccaaacctttttgacgagaaaggggtcgaactgttataacttcctgatcaaacatttttgacgagaaaaggatcaaaatttatatttttgattaaaaacctatatgacgagaaaggaaaatcaaaagtnnnnnntgagatataactcataactcacgttcgaagttgaatactaacggttcg

SEQ ID NO: 32276 - DNA, 1419 bp, Cannabis sativa
agaatttagctcctcgtgttaaagtggagaaaagagaaagttattaccagcagcttgttacaaccttacaaaggaagaaaaacatcaagtttgtgagtcgttggccaatgtgaaagtcccatatggttattcatcaaatattcgcaacttggtttcaatgaaagatttaagacttattgggcttaaatcgcgattgtcatgctttaatgcaacaattactccctattgctattcgaggaatttctcaaactcatgttaaatctgcaatcatcaggctttgtatgttttttaatgcaatttgttcaaaaactattgatgtatcgtctctaaagccattgcagaaagaaattgagttaacactgtgtttgcttgaacaattttttcctccatcattttttgatgtaatggttcacttaactgttcatttagttagggaagttgagttaggtgggcctgtgtatatgaggtggatgtatggatttgaaagatacatgaagatattaaagggatatgttcgaaatcgaagtaaacctgaaggttgtattgttgaatgctacattgcagaagaagctatagagttttgctctgaatatgttggtaatgttgagccaattggtatcccaaaatcactatttgatataaacaatgtatctagtgaaggagttggtgctggaattgctacatttacaaccaacgaagaaataagtttggctcacataaatgtgttggagaacacatcagtggtgcaaccttatatcaagtgagtactatattactagtacttaaattttgaatatcttttatcgttaaataactgaagataataattattttaacatttgatcgacagtgaacatcttgaacacttgagaagtgtaaacacatcaagacgggataagtggatacaagatgaacatcataaaacttttgggcattggttaaagcagaaagtagaaggagagctatcatgcggaacagtgtcagaagaattaaaatggatcgctagagggccgaaaaatatgccaataaagtatgagggctatgtggttaatgggcgtcgttttaacactaagactcgagatgatgttcgagttaatcagaatagtggagtgtctattgttgcacaaacaatgatggtttctagttctaaagacaaaagacccatttacggagatatgtctttttatggaacaatcaatgaaatttgggagcttgattacactagatttcgagtggcagtttttaagtgtgattgggttgacagcaacaacggattcaaagaagacaaaatgggttttaaacttgtgaatttgaagaaaataggccataaagaagatcctttcattttagcatctcaagcaaaacaagtgttttacataaatgaccccatagacgctagttggtctgttgtagtctctg

SEQ ID NO: 32277 - DNA, 1954 bp, Cannabis sativa
tcacagccgcacatcaaagcttctctctctctctctctcagtcgcaggcgacaatggaggagacgaggatgggctttgcacagcggacggtggaggagacggcgacgggcttatcacagggggtggtggaggagatggcgatgggctttgcgcagtgagggtcggatcggacagtcatctccggcaacaaaatccatggatttcaatggatccagttgaatcgtcgtctccgtgaatgtattccttacttcggttggtctattttgtgttagtataattcgaaaaaactttgagatttgatttgtgaaagcccaaaatgtgatataagaaaggccatgagccgggaagagagtcgtaaccatatgccctagccaaatgtggtagttgatgctcccctctgacatcaacccaaacaccgttagtctcgacgattcactcgccactgggaagaacagaaacggctggcagatgttcccaatcaactttaatctcagtcctgaaatctcaagcttcgatttccatctgccattaattaataccaatatatatttttattgtgctgagttttttattgcgaagaagaccatcactgtgaagaagatcatcattgtgctgagattggagacatctttttatttagaaattaagttcaatattttttttggctgaagaactgtaatattgacattattaaatattttttatttagagattatttttattattattagaaattaagttgtaatattgatgtttattatttatttttaattgtattttttgttctgaataatattgtatctattgtgaattattaaaatatatgaatttttttattttagttaataatattatgttttaatgaaaataagtattcttatatatatgtaaattttaaaaatttatattaaaaaagtaatttaaattaatttgccaactgttgtaaactgttatttaaaataatttttctcaatagttgtaaatcgtcatttaaagtgactttttccaacagttataaaccatcatttaaagttttgtatttttatgacacccacatagccaacggttttaggaactgatgggaaatattataaaagacagttataaaccgttgggaaaagccgattttgtagtagtgtctagatgatagtacctaacttacagcccattaggcggagatttctactgatccatcaacgaccgggggcgaactgtgggacgacctacagggtcgtccagtaaagaacatcactgagttcaacgaaagggctcaggttttcgtccaaaaagaggaagcttgaaaagaaatgaatttgttgaaaatgggcttgggaggcaaacccagcaatgttttaacaagtattgtctcaataagagttgataactcaggggcctctggctcaaagagaaaggacgattctaaggaatcatcaaaggataaaaagaaacagaagaagcacaagaagtacgtgccaatgtatataaaactcgggaaaatatctacctcgcacatgagcaaaaggtttccttcgccaagctcgagccatgacgcatgaaaggagcaagagagatcctaccaggtattgcaaataccatacggacattgggcacacaaccaatgaatgtcgctaattgaaagatgagatagaaagtctcatcgctcgcggccacttttaatagtatgtgaagagacagggcaatggacacaaccagcccaatctgcccaacaacccaaacaaccaggggttacaacttcttcctgttgaaggagaggacatcctagttatttcaggagggtcgcatatcgtaggggagagcaataacgcccaaaagagatacgtgaaagaaataaagaatgagcagccggtatttaccccgaaaccttccaagaaggtaaaaactgaagaacctccaatcatattctcgaacaaagatgagaagaatgtgagatatc

SEQ ID NO: 32278 - DNA, 1574 bp, Cannabis sativa
aagattgtttaggtttaatatctgtaggttataaataatattcttacaacgttattttcctttgtctatttttttttatgggtgattgatgaacttaatcttacccaataagttacaatttttttaaagtgaatgcaaaatacatttttgtatttttcaatctttttcaagtttaaaatgattataaaaaaattaatttaattattttttatattaaaaattattttcttataatcaatatatcaatatatataaaaaggatagcaaaaaaagaatttaggtgacaacttattttttttttcttcctattttttatattttatgatacattctcttattttctttgaaaaaaatactacaacatacaaacaaaaagtcccacatcatttaaaaatggtttagatgttatccatgtaggttataagtagtagttttattattttactttcttttatctaaaaaatatcattttttatgggtgattgattaatgtcttacctaataattttttttatgtatatttgtataagtagttatttattttataataattaactttgtagtaataatttttagttttatatatatttatgaaatgaattttagtttaagaattttattttactattctagatttttatattgttaagtgtttgagttaaaaataattttttataactaaaatattttctcttaaatattgataaaggaaaacatatttttttgttccttcctattttattttattttatgacacattcttttatttttttttttgaaaaatacactacacatacaaactaaaagtcccacatcatttaaaaatcgtttagatgttatccatgtaggttataagtagtaatttttttattttactttcttttatctaaaaaatattattttttttattggtgattgattaatgtcttacccaataaatttttttatatatttgtttttgtatacgtagttatttattttctaataattagctacttaaaatatgaattttaaaataaaaaatattcataaattaaaatttatttttcaaggattataacgatcgcgataggcacaagatatttataacgatcgcgtgattgcacaaccaattttataaagtgcttatcattttaattatcgcaagataataagacaaataaatattttattgtggaaataattagtcatatgtatcatgatctccctctttatcactacgatttaaggtataaatttcacattcacaaaatttatttaaatcaatcctctaatctaaacatttcgtatgaaaaatctctatcactaataggtaaaaataaataatgttatgacggctccttttgtagctgtcatattacattcacctttgtggaaaaaatattataacaacaccacaaaacaaaatataaaaactttaataaaaaatagttaaactatttatttttattaagcaaaaaaagtttagatatatagttttttaaaaataactacatcatcagatacaatatcagtttattaaatttagaaatggttaactttttcatttattttattataaaagtacatgtaat

SEQ ID NO: 32279 - DNA, 1356 bp, Cannabis sativa
atatatatatatatatattctgtcgatacaccagaccaccataacaccatacctaccaccaccacaataccaccattcttgccaccacccaccaccattaccacgagaactatgtttactctattattcaaaattaaacgataataaaaaggagaattattttacttttttttaagaccaaaattaacaaataaaattaagaaaataaatgaaatgtgatactatgatattcaagaaatagttaaaagttaatctccaccctcaacaatcatccttatttactaataacgaatgtgatttcaattttccaatcaaattattaattccgcagataatattaaagcaaacaattatcccaaccaccctattacaagtaattaaggtgaagtgctcaatcaataattgactcactctttcttttaactaactaagtaagtaataaataaatctactatgatgaagaagcatataatttatttaacttagataaaactttaaattcattggagatagattaatctaggcaataaattaatgaagcatataattcatttaacctaggttctattattcatcacaattaaatatacttttgacaatatcaaaattacaatttatcgcaaacacgtagaatcctagactattaggtgaataataatcctaagatgataatagattaaaacaaaacttaattcagtgatcatctaaagattaaaataataatcatggaattgaaaataaaagaatagaaacaattcaatataatggaaactaagaaaataacattcatcataaaaattaagaattcatgtcttgggctttgaaataacccttaactaaaaagaaactactccaaactagtcattataatgaaattaattcataataaaaagtaaaagattaagaagaagaaaagaaactatggtgatgaacaattgatgatgcaatctccttcttcttctctttcttgctctgagtttctctctcaaaaacacagcctcaaagtccctaaaaacgaaccctaaaagtcctataaatactccctaaaaatcctttgatataaaaaagataaaattttaaaaagaaatctataattgtgtcctcgtcgcgccgaagggaagtgttcgtcgcgaccacaccttcctctccacggcaagcattctccttcgtcgcgacaacatcgccttgtaacaattttactcatttgttgctgcggtgaatctctaaccttcgctacaatgtcaaatctcagattttgggactttatgaattttcaaaactctagaaaaatatcgttttggtgagtctttttatcctccaaacattacctagtcataaaaacatcaaatcaattaa

SEQ ID NO: 32280 - DNA, 1397 bp, Cannabis sativa
gctcatcaattggagaagatcgtgacggttgctgggattaagccgtccgcgtctgggggtttttcatcgcttacctcgggacgaatagacgcccaacaacaactatgggggtttcagagcttggagccagactcatcttatgtccggagccatgcttcctgttcaggattatttcattaattttcttgtttttgtcggcctaccaacttattccccaagcttaccgcctgtctcaggcttatttattttttatgtaccagaggctgggcttcacctagcccggttaaaattttatatttttatgaactcgtgtctgtccccaaaaagggggacaagtttaaggacagttttttcattctccgggctcatcctactaatgagggcccgatcccttttaattttcaaaagaacgttaaggagtgtcgccaccgcttcttcttctcttccagcttcaaagccgtggatcgcccggagctcctcacggcgtgggtcaggatccctcctctgctttgcactactcctacccagctgttcctcctgtatgccaaggttttctccacctacgacagaaatggtcttaacgtgggggacttggtcacaatggagaactgccggaaggccaagctcatctcagtgagtcaattagtggacgacttcaacctctccaaggtcctctgtctaaacattcgtaccccgaacgatgaaaaggtgctcccggcagacattatagcctcggcggaggaccggtatcagaagtatctcttcaagagggaacaagagttagcctatattaaggcttaggtcgctgctgggaggaccctttgactggaggcgagcaaagaacggacgccttctcgacctaagttgctggtcccagttcccaatactggtgctcctggtgccagcacatctggatctggtaagtctcccttaacggtctatcacgttccttctgcccaagattattctcggtgtaggcctataggatttgacgatcgtctccttacatttaggatgccccccactcagtggggtgatcatgccaaggccttttatttttccaacttaggtcattttttaggccgatcccggatggtttcggacctcctgcacctattcccctggatcattcagcttatctgtcttccagctggtttctcccctcggacagctttcttggggatgatgaagccagtattgtagtgcaagactttactagggttgagttagatagtcagggtaggactagttttaccgctttgttttcatgtgcatactttcttatggccattctgacacttagtttgtttgtatttttgaagtagccaagccaatggacgaccttttggcgactcttgcccagacctacagccctgactctgctcttcctccggtgc

SEQ ID NO: 32281 - DNA, 2939 bp, Cannabis sativa
aacaagaacataaatgtgaaaagggtttggatgaatttatgaatcaaatagacatgtaattaataatatgaaccaaaaaatacacaaatgaatgaaaaatacttttgtttatttattgaaattgaataatacggattacattgaaatagagttttatttagggtataaaacccaacactttgaataattaaaaaaaggtaattcaataaaaaaaaaaaaacactactgcaaaagttagaattcgcgactgtcctaaaaatgctttttttttggagacagtcgctatgaaaattaagtaactatttaaaaccgtcgggaaaaattagcattcccgacgatttatagtagtaattatagaaataagcgacgattttaaactgtcgcctataagggcccaataaaattttacctacttctcgccacatttttcacgtgcccacctacttcctttctattttcaacatgtccacctatttcttctccattcccataccctaaaatgaaaatcttaactctccaaaaccccacccacgcctccgcaccatcgtcctcctctctcgtcgtcttcctccctctctcgatctccttttcttctcgtctctcatatcgatctccacccaccctcccccgtcggtctcgctctcctctctgtcacatacgtcggaccaccaccaccacctcctgtcggtatccctctcatctccatctcatacgtcagaccaccaccacctcccgtccgtatccttctccgaggtcggtataaacacatttatttatttatatacttttttatttattatctatatttattttgttattgttataaatttaatgtgttttaaattttgtttttattgcaataaaattaattagttattttattttaatttaggtaaaagtataaaactaatgcaggaaaaaaataggagaaaatacagatttttctgccattaaaaatctgtattttttctctcttttttttttaacattctcgatggtttaaaaccgtcgcctataacacagttaaaaccgtcgcctataccctgttatgacgacggttttaaactgttgggaagtccacattagcgacggttgttaactgtcactacgttctgcaacggtcgtataggcgacggttatagaaaccgacgggaatactttaaacgactgtttaaaaatatcagaaaaaatcatttttgtaatagtgaaaaagagtattttgctattatgttttaaacttaggctatagtgcaaattactcacttatagcagatttaaaatttatgttgaactaaattagtaggatcataatgtcacttattacttgattaactcaaaatattaatataaaccccaattatttaccattaagcttatcaggatataccattagtagtgttaaatttttaaaatacaccaattaagtgtaaaacttttttttttatttaacccttatatcattttattttaaaaaataatcttacattttagtcttaaaatgataatttatcacagaaataataattgatttaaaacactaacatatttaaaaatataaaataaaaaaatactaatgttaaaaatagcataatactaaattataaaattaaaataaataaataaataatataaataaaaataaacattaagtaaaataataatttaatagtcatattgatcattttagccttgaagaatatcaaaatattgactatatggctaagtcttttgagaatcttaatattattgaaatgcttgatatcgttgtttaactcttttttgcataattttattttacttatcttaaaaaaaacttttttcatttatacatttattattagtttttttatgcatttatacggtcataataaatttaaggggctttttcatttctacacttcaaaacagtttttctttttgtatttctacgaaattctacatagaaactcctattgtaactagtggagcaatctaaatcgtaatcgaaaatcgtatagcaacccacacagggccggccctgggcataggcgggctaggcctgtgcctagggcccgcctagtccaggagcccaaaaaaattttccccttttaaaattacataattttttttgctgattttgaaaaataccattttttttcgtaaataagggctcaaaaataattttttttttctatagcccactaaatttcagggccggccctgaattcacatagaaactactagagaaactattttaaaaacccaaaccataaatttaaaaaaaaaatgaaataaatagtatataacataattcccctaaatttaattaatatacaaatgcactattttttagcaattatacatctactttttctcctccatgaaaaatagagttcttctcttttcctttttctcttgttttctttctcaccattttcagttacctttctcttagtctttcacaacaacttttaccattttcaccatttagattattgacagagattaaatttagcaatagaacgtataaatgaaataaaaaaagttaataaagtaatatttatatgtaaataaaattttatagaattgaaaattataaaaagaaaaaagtaaaaacagtatagaattaacaaagttacatatataatggtaaatacccttttaaaaatagttatgaatattagtatgaacaatagaatttaaatccttgaataattatttgaaaaatatatgttaaattgatttaatacatattttattttattaaattatttttaaaattttaaattatttgttagtagtataatatagttatatgataaattagttattaattttattaatgtaaataatataaatgtagaatattttaagtaaaatatatttatttagtaaaatatttagtttgaattattaaaattatttcaccaaaattaaaatattctattggtcttaagcat

SEQ ID NO: 32282 - DNA, 2069 bp, Cannabis sativa
ggtaaaataattcccaacagatataggggcgaaaatccctgccacattggtacggtacccgaccgcatattctcacccatgggagtatgtggccaggccgcacactatgggtttgcatgcctagctgtctctacctaacacacatcaacacttgacacgcatcaaattctaacatgggttcactttaggatctatgtgtggagcgaggtcacctatcccatggggatgaagactaggccccatactttcaccccatggagtatgtggcctagccacatactatagggattgcccatggggtcgtgttgcttgatacatgataagcaagcacacgacattctgctccgctcaaagctcaaaagtagttgaagacctgtaaaaataacaggatatcaccaaaacaatcagacctaaaccaattatgagaaaaaaaatgaaacggttgagatatttgctcagatggttcgggttcagcagacccttaggtcgtgtctcttgaagagagacacaccaatcccttctttatataaagggtcaaacttgactttgggaagggatttgaaattcatttttactagcagaaactctgtcattttacttcttgcactcaaaagtttgttcttgttttgcaacccaaattcataaaacacaataggagtagactattaccaacactcagagttgaacctctttaaattctggtgtcatttatatatatttattatttatttttagtttaaatcttatttattacgactctgcgtcagttggctaaaaaatcagtcaacaccaacacgacacatatttttacatagagtaggatggacatttatgtttaaaacaagccttttgaaataaatgagtctattcgggttggttggcacatatgtatagctttgttctacacatcaataatggtgcactagctaattgttgtgtcaatttcgaataacgatggaattttttttaaaaatggtgacttttggagtcggtgtgcatagagttctcatttgaatctggttggccttgatttgtaaccactcgagtggcgatagattaagtggatcatattgaacaccacaatacgtaaaaacataattacttttttactacaaaagtaactataccaagacttgaacactttacttgatcatcacttaagaattccaaagttacctagaggaatcttaggatgggtgacctcctacaaagtttttctaagaaacgcgcgagtgaagataaaacacgctaaaaagactcatgttggtttgtaggacaatttgtcattctaagaagtagccaaagcgacgcacatgtgtatattgtgtaggtatggaactacacagtggaagtgggggcattacaaatggcatcaaagcttcgacctagctggaaatgtggtcgatgagaacatcagactccataagggggtgatagttacagtcaaagtcctgtgatcaataaaggagaagaccgagtaagctgtgcagtcctacatcccattgggaatgtcaagtgtgatgattcgtaggtaacagactatataattgaagaggacttaaattgattgacagtactacctatgctaacaagatgcatctttatttcgatagtccatcacttaagaactccaaaattaagtgtacttgacctagagcaatcttaggatgggtgagctcttgggaaattttcccaggaagtgtgtgaatgaggacaaagtacactggaaagactcatgttagtttgcatggtcagtcatcattccagaacatagccaaagtgacgtattagtgcatactgtgtaacagaactacacaattaaagcagtcgtgttacaagcacatagggtctctgtttagacctcaaattgaggaagacccttcaacatagacttcttcatcatcattttgagtttatgataactaacatgtcataatcttgcatgctacaaatatattttcgttatttcgagtcttctccacataagctaaatttgtttacattacattaatatttatagttaaatttatggagaattactccatttattattttttttaacttttttt

SEQ ID NO: 32283 - DNA, 2584 bp, Cannabis sativa
ctctctctctctccctctctctttattttctattgctcttcagccaaaaaccccacctcaaaaacaccaccacaaagccgttggagccacaacaaaaataacaccaagaatgtcagaggtccaccacgacgtctgtaacgtcctaatttataggaacgccacgtgcataattttataaactagtttaatactaatagaataattaattattaaaaaacgtgataacataaaaaactttataggaacgccacgtgtctgttagaaaaagttttgctaaagaaatatacacgacaaccatttaaacacaaaatcaaaatacacagcagatacagccagctcaaaattactcctggcaactcggcatgcaggccggtgaggtcaatatgtacattgatggagaagactctcatatcatggttaatttatcttttctttgcctttacctgtaccacatagtacctgtgagtcacaagaactcagcaagaaaagtaataataacaatcatatagtttatttttcgaaaattatcatttgtatacaataagaatcaaaccatcacacattgttcataagatgaaatccaaatcactactggcatctaccacgaataaacatcagtatacagatatttggtaacataaaactattacaccaataatagaattcatattcatttaataatataaataacatatatatgttacttgataatgtaacagtgttcataacatcacgatgcctaatcaagcaagtcgatgccttaatttgataatcttgtattgcattgccaaatcagttaagcccgtgccatagtctaggacccatatatcgcataggtgcatcacctaatcaggtgaccatgtaccaaaaacttgcacccatatatcatataattacatcacctaatcaggtgagctcgtacctacgctcgatactcctcatatattattgatgcctgtactgacgcgcaatacgttaccaaaaaaattgcatcacctaatcaagtgagctcgtacctattctcggtactcatcatatatcattgatgcccgtatttacgcccagtacatcgcaagaaaaatcgcatcacctaatcaagtgaggttgtagctatgctcggtactcatcatatatcactgacacccgtacttatacccagtacgtcgccacgaaaattgcatcacttaatcaggtaagaccatatattacatgcataatataatcaaattatcgatactcaaccaatcaatcttttaattatataataatgttaactatatctcaatatttatcaaatcatatattacaatactaaatgtattacaaacgacgtactatgcagtacaatatatttttcttaccttcaatctaggttcatacatgttggccaacttaagtggagaactatccccgacgatctcgacccatatatcataacagcggtaaacaattaattgtttatcccaaaacactacttaatattcacatacgataatctagggttttctattaaaccccacggtataaatacactaaaataaaaattatattttggctctaaaatatgtaccatattgtagagcctgttgcatgcatcaaaacagtacatagaacgtccaaaatggatacccgagtcaaaaattatgacaagaatacgatttctgatctcctaagaatttctaaaaagtacgaaacatgaaaatctcaattttcgcactcaccgaaacactaccaaaacttattcaaatcactcgtaacttgacaaggcacatagtacccataaatattaccatgcttacatagcaaatcaaatattaaaatcgagcccttaaataaaaaatatcattaacgttcatactaagttttaaaaagctccaaacgcaatttctaacccaaaatcacctcagcttcagtaagaaaatatcgaaactagtcccatcaatactcgagaacaatcctataaggttagaaccttcataactattctaattcacaaaaccctatacaaaactaattatttttaaacttaaaatgaaattaaacaatacattaagatttccctcttcaaagatttgatatcctgctactactaaagcttagatcacttggaatgaggttcaaaattgaagaaaaataaatgtagggggagaaggttttgacgaaaggggaagaacgagaatttgtttgttcgttttcgtttatgtttactgtaacttatataatatatatataaatttactataattgtttatatatataaaataatattataataataatataatatgaataaaaaaattattattaatagttatcttattatttcttagctactaagaaatttatatttctaaagtatttggtcgactccaagtaccccaaaatactccggtatttctaaaattaatttatcctaataatctcatcaatatttctaactaaaactattgtcacatttttggcctccaatcgggtcttctgggtcgccgaacctgaaaatatttttattttacaaataactatattattagggctgagcattggtcggtttggtcggttttttttttattaaaaaatccaaatt

SEQ ID NO: 32284 - DNA, 1214 bp, Cannabis sativa
gccaatgtctggtgcacctgcaggatgcatgctggctggccttatgatgtccaaaacctggctgacctatgctggtcatatcgctagccaacctccttgaggtggctagttcgtcattcgtcatcccgtttgagtgcttggactccctattggttgaagtgctaagcagatgacatggctttctttttggcaagttgtactgccatgtggcactaatattggccacgtagacatgccatgtcatgtgggtaagaatcaggataacaattaatttattcaaaatataaatatttatttaaatttgaatttaaaaagtagttacatatatttatagtggttgagatattccctcaaagtagttgagagatttctccaggtggttgagagattccttcaatcgattatagaaaatatataactataacagatttagttattatttattaaaataattaaatataattattttaattattttgaattcaaataaaagatttattagttttttttgtttttttttgaatattgtatattatctaacaaaagaattacactaagttaggcaagtccgccattaaaccggcagacgcacaatagggatattctctcaaccacaactttttacaatttgcaaacaaagcctctttggccaacaagtgagtagccctatttttctttcttcctatatgcttgaccgccacacactttgaaaaatttggggactcccttatgtcgtcaagcagtgcgctccaatctgttttggcatgataatctccgttcagatagatggctgcccgaagacagtcggtttggatgatgaacgggtaggccttcactttatttgcaagctgaatgcccaaacgaatagccaaaacttccgccaactcaaccgagtaacaacctctttgctgtttgatttcagcagccaacacagccccttcgtggttcctgatcacagctcccagcccaatttttgtttctgtaccttgaacacttgcatcggtattgatgcaaaaagtcccggggtgaggaggatcccacccaccagcaggtgtggtaatcggcttcaatggctgatccattttggagtggttgtgcatcataaaatccatgtctaattgagcccacctgcaccataaattgttaggaagagaatgaagtttgagtctttttttgttcctcctattccaaatgagccaagagagaataatgaa

SEQ ID NO: 32285 - DNA, 1642 bp, Cannabis sativa
tattatttgtattgggctacttataaaatgggcttgattagaatgaagataggctcataaatcattatttagatattgagtgagggcttttataaataaggctttaatgaattgagtaaagtgaattaatatatgtatatatctacatgtgaaaaatttgatatatatatttgagtgagggcttaagtctacatataggctaaagtccctccgtccctggagatatgcatgttaagatcacatttatatataatttccatgctacacattcataattgatctatgacatttagttatattgatatacgtgaccattgatgggtttagctatgctaaatatggaaaaagccgctttgttgatcctatattattagtacaataatcaatggacgagattattttaaaatagctataattacgatagcaaagttaagtgcttaattataaggttacacactataagaaaatatatgtagctcaagtgggagattgttggataaaatcctcaatatgggctcatagatattgatgtattgttatttgaagtttgacctaaataagtgatattttagtaattgtgggtcattgagtattaaagtgggctaaatgtgtagataccttaagtgatatttctaatttattaaaggactaaattagaaatacctaaaattaataacctaactatgagattatatattggtagtggtcctcaagaacaagagcaactctattctcatcttaccccatcaagagaaaatattagagaaatcctaaatcttgtattcttggaagatcattgcccaaaatcaccacaaagatcatcttcattagatgaattaagatcatcactatttatggattaaagtacgctttcgctatttaaattatttttttcgaattaataaaagttttctatagacatagatttctttgtcttgatacacttatataaacatatgtgttcatagatctgaatatttacagttgtatgagtgttgaagaattttaacagtaattacttataaattcctaatatcttatttgacaaaatagttagtaacaaccgattcttatgttctcatggggtataaaaattagagagtgtaattgaggtctctaattagctctaattatataattatgtggtcaaacaaacatataaaactatgtaattacttttaattacacccaattctaattccatcttacttttaaattatacataacattcaggccgacccaagcatataacactttaaactattacacaaagccttccatattaaaagacctcctatttttatcattcatttttatatataatataataaatgttttttttttataatgtataatgtatataataaatatttataaaagcaaatatgtacatcaaaaaagaaataaaaaaaacctaataaaactttgtgtttcaatagatatgattttaaaatttttgactattttaaaatttatgtttattttttaaaaaaaataattaaatttataaaatattgattaataattttttttctcatcaaagaaaaaatttggaacttcaacaataaaaagaataaaaacagctactaccacttctagactttatcactaccaaccattcaagaggacaaatacttgtata

SEQ ID NO: 32286 - DNA, 2424 bp, Cannabis sativa
  modified_base (443)..(445): a, c, t, g, unknown or other
aggtgtaaacttcgtgggattagaaggaggagatgcgaaagacaaagttgtggtgattggggatggcgttgatgcaattgacttggccaagaccttgaagaagaagttgggggaagcccacatcattagtgtagcagctataaataaataataaatcgatagcagataatagtcgatcacagatacatatacatatattctatataaaaagctcctatcccatcattcttagtgtaaagtgtacactaatgagtacttagtacggtatcacgtacgtctttctcttttttggcttgtggatatacgtagagatacatttaggcttcgttttgtacgcagtattgtaatatattgtattggattgtgttggattgtgttgtattgtgttgtgttgtattgtattagtattatttaataaaatacaatgtttggtattgacttgnnnaattaattgtgtaaagttataatatatttttaatacactcgatctcaacactaactacgggttcgggtccggatttggggtccgagtcggagattagtgttactccaaattttttataaatattataatacaagctaatacgaaccatttattatgtatgaaataatataacatacattgtattaaaatatttggtcgtaataattaatacattacattgttttatccaaaaacatagtgtgttatttattatttaatataataggactcttatatggcataacaaacgagttctacagcttttattatgtaatttttttgaggcactttttcatttatgtctttcggttggtcttgcaatagttttcatttactattctccaaaccactcggaatgctctaataattaataaagagtacttaatttggttattgttattattatcttgaaaattaatggggaaacttcatgcaacaatgaatatttttataaagaataagaccacttttagtgaaagaaattacaatagatagcttttttaacttgatgtctttaatttttattctttcttttaaaaaattttatgtttatttttttttttttcaattattctaccaattttagtcctatacttcactatagtttttattcttctataatcaaaattttgtccaaacttacacattcatctacaacaaatatattatgtttgaaattatgtcttagttatgtgagtgtgtgaggatatataatttgagtacaatactcaaaaaaaagaggtatatttgaattaaattttatttaaagataaatttgattaatgtataaaaaaagaaagtattcttcaaattctcccaaggaatatacaaaaattgtcttatatttagcacaaattacagaatttgatacaaactttaatatttttattaaaagtataaaaaaaagtaataactttatcattaattaatattattatttttttattatgtaaaataaaaaaaaaaatgctaaaaggcaccattggtacttagcacccttcttcacgacatacatttattggtgtaattaaatagcatgttccatataagttaagaaaataacttttatggaatattgctatttaatcatcgggtgttacttatagaaggtgctagacactattagtgcccaatagcaatgcttatgaaaaagaatatagatagttcaatgttatatgatatctaaatatactaataaaataataaaagtgacataaaaatcaataataaagttgtgcacttatgatgataatgttatgccaaattttccatcatttactatgtgtcaaatttgtattattttttggcacactataatttgagtatattttttcctaagaatatctctaatggagtgctaaaaaaatagtgtagtgttatattttagcacacttatgaaaaactactcctgcaatgatgttctaaaaagtgtgataaatttgacacatgctaaaagtttagtcaaattctgcacaagatatagtgctatgctaaatttagctcacaataaatatatattttttttatttactataataccactaattattatgttttataaaattttactaaattttacattatttatttactatattactattatttaaataataaaagaataaaaaataataatttttgtatattctcaataaaatattaaatgacaattaatataattttttttttttattattttacaacttgcattggagcatcattataaataataaaccaaatataacacaaatttattttttgaaccaaatttgacacaaattttttattatctaagtaaattatattttaatttggaaatgctgtaaggcaaatcaaatgcacaactagggacagtgacccaattcaagagcaaataaattaaggtgttaaaagcaaaattggcactggactaggagatgataataaaacaagaagctgac

SEQ ID NO: 32287 - DNA, 2793 bp, Cannabis sativa
tagggtaacttgtatttagtagtttcctattttgtatttagtagtttcccatttagtctcctagttttgtatataaatatatactattttattctattcgccattctatggccaacaccacttgtgaggttgtgtggcttctctcttttttaaaagagcttcacaattccacacttgacacctgctctccttcattgtgataatcagattgccgaacacattgttgctaatctaatttttacgagcataccacgcatatcaaaattgatcatcacttggttagagagaagcttcaagctggtattatgaagacactgcacgttctagctgctgatcaatttgttgatctttttaccaaggccttgtaccctactcaatttcagtatataaaattcaagatgggatttttgaacatttatctcccatcttaagggggagtattaacaataaagagtttgttactattagttttagctacacttaggctgagttgtattcttcttgtataagtataaataccctgtaattactctttttccaattgatgaattcattctgattcattcttctgtttctgttgctctatcagctaataaataccacagtgaattgccattagtaagatgatatatactgatggaaattacggaataaccagagatgaactttagttcataatgctttaacacgatgaatgttggctgtcgatcaattacaaaaaccatccaataggctaactgtttttggcttttaaccaaaaatagaggtggcttatatttgaaagtttagttagaaatataagaaatgaaatgtctaggaataggccgccattcgtcaagggatacttggaagatgtcaaacacatcaaacatatgagtgaaaaacaaatgaaagagaaggaaaaagaacagagaaaatactctgtatttgtcttttattattcctgaacttaataaatacaattacaagagagggacccttttatagtgagcggagttagttgggaataactaactcagctgaatataacagaaaataccaagaattggttaacagaaaaggaaatgagggtagtctcgtaatagcccccctcaagctgtagtgtagatgttccaaatgtacagcttggagacaatgttgtcaaaaaggtgttggtagcagagccttggtaaaaaatgtcagccaggttgtgttgggattgaacatgaagtaacttgaggatgccttgttgaactttttctcgaatgaagtggcagtcaatctcaacatgtttagtgcgctcatggtagacgaggttttcactgatgtgaatggcagccgtgttgtcgcaataaagagaagtaggtttgttcagtgagatgccaaagtctttgagtaaggctaggatccatgttacttcagaggtggcatttgccatggctctacattcggcttcggcggaagagcgagaaacaacctgttgcttttttgatttccaagatactaaggcttgtccaagaaagacacaatatcccgaaatggaacgtcttgtgtcttgacaagcgccccaatctgcatcggcaaagaaggacaattgaacattcgttgaggatagacttgtctcagcgaatgcagagagttggggagtagaagtggcagggaagaagatgccctgtccaggagttcttttcaaatattgaaggatcctatgagtagcttgaagatgtggcactcgaggacatgttagaaactggcttagatgattcacggaataggtgatatcaggccttgtgattgttagataaatcaatttgcctataaggcttctatagacagtaggatcgggcaatggtttgcctttatctttgctaagcttgaggttaggttccatgggagtagaagaaggcttagcgccaagataccccgtgtcagtaagtagttgaagagtgaatggtcgttgagatatggaaattccattcttggttcgaccaatctcaagtccaagaaagaatcttagtgttcctatgtctttgagtttgaattttttatctaagaaaagtttgaaatgtgtgattgccatgtcattgttgctagctacgattatttcatcgacatagatgaggctagctaggaagaatttttttgtgtttttgatgaagagggagttgtctgattgagaccgaatgaagcctgcattagtgagggtgtggtactaagtttttcataccattgtcaagaggcttgttttagtccatatatgttcttattgagcttgcataccgaatcggttggtgcattatatcctggaggtaatttcatatacacttcttcatggagatcaccatgtagaaatgcattattgatgtcaagttggtgaacattccagttatgcatagctgcaagagataaaattttttttagcatattgaacttggccacaggtgcatatgtttgaaggtaatcaatgccgtgtttttgattgaaccctttggctacaagatgagctttgaatcgttcaacctcacctaactcattgtatttaactttgtatacccatttgcatccaatggctttatggctgaggggtaattttgtgacagtccatgtgtggtttttttagagcctcagtttcagtatccatagcgagtagccaatgcttgaaatgagaagcttcactataggatgtgggctcaatgtgggtatgctgctaaaacagccgctcggaagtgaggactgagtttggcataggagataaactcctcaatgggataggcagtggagtgagtgtgacaaacgtaatccttaaaatgggat

SEQ ID NO: 32288 - DNA, 2121 bp, Cannabis sativa
  modified_base (28)..(29): a, c, t, g, unknown or other
  modified_base (819)..(823): a, c, t, g, unknown or other
ttcttcacaatcttccacactatgattnngtacttgacttgatatgagtggacatgtactcttaactagggattcaaaaataatgaagaataagaagaggatgaatttgaaattctatagaaggaggttctcaatttctagttgtttgaaaaagaatgaaaactaggttataagagttgttctgagaatgagggtcatcttattctttttttagtatttcaactagggtttacaatttaaattatatggaataaaaaagataaaataatagcaaaataagggttaagtggccgaccatagttagtggacccgactagttacaattttaccattttattcaacaatttatcttttctttcactaatgtaatattttctaattttaatcctataaatgtcaaaaatatttatttattaattataattaattatcaaataaaatttccatttaatttatttatttattataccttacaaaatctcttaattaacaaataaatcccaaaacctcttttttttcacaattaagctcttgcttagtgaaaattcataaacaagatatagtctaatttagaatttttattaattaattaaaactaattaactaagtctccaagccagtattatcttaactagtgcgaggaccatgggcctatataatcaagcttccaataagtggttctagaatttaccaagtaaaccctctaacttattaattcctcgtgattctactatagatttagaatttcactattaattatatagaatgctctatatgttcctagatatagatacgctattaattatcctttgttataannnnnataatcaatggtcctctatagatgatctacatcgagtagtgttaacgcagatttttattaactaaaaataataagcctttacgtaataaatatatcatagaaatactaatgaactattaaataactccagggattttacatggttttacagttaattctgcatactccacgagtctattttattatgatatttttctgtataattgatataagatacaattgatgatctttttctctctcgatctccgtccctttttttgtggaatctgcccctatttatagggatataggttggcagttatttacacttaggatcaatctaagatataaccgttcatgaaacgtggacgattctcacgtttcatttaaatgcatgtgggataatacagaataactgcttaactactttttattcttatccttatagatggttaatgttgatttggataattgtatttcgcttccctctgagtttttatccatgtctattataatgtggaaaaacgctaagtgtttgcagatggctcaccttgtcaagtttctttagaatagcgaggtggttgtctcgctatttgtaacctgaggttgctttgcataaatgtattcactcctttgaataaatgaattatcttctggggctgtgtaatctgaggcaggtgtgtgtctcgtcaatataattttcaatagctttttatccttatctcgcttaaaactatgtagtcatcgagttatgaatgtgttctattaatcctttattaacaagttattcttttttttttacattaaataatataatttttattatatcaggtggtttatattccactgcaagatacgtgtcactttctgaactgtagctaaattttggggtataacaatttccccttaaaaagttcttttataataaaaagagcttttaaattatcacaagggtatttttgtcttaatctcagtttgaaaaatagcatgctttgagttttggcggttcatgattttgaggcacatcattagcattaaatgcccatattttccaattcttccttgttcccatccgttagatctttattcttttaatctaacggtgatcatttcccaggaataaaattcgagaacagatactcatttcgccgtttttgccttccagacaaaactttgttagaccagagtgcatcgtgatgccatgcccaagaagtagaatgattcggagtctaagctctctcgagtaaagcaggaaggtgaggagcaaggctatccaggcttaggctaatagaaagcttgagaaggccaaggttgacacg

SEQ ID NO: 32289 - DNA, 1993 bp, Cannabis sativa
ctaaccctgcatatataaatggtacgtatgagatatttataataataatgttgtgattattaatacaaactaatgagaaacatatacaatcatatatggtatatatataaatattatgtaattttttttagaataattagcaattttgcttcttgaatttattgtattaacttggtcattccatcatattatatttaatttttttgtaaaataagtaatacacatgatagtagtttttactttgttataataattaataatttttatttttagttttttaattattaaggtataaaagttgaaaagtacttgcatctatttatcaactactattaattgtgctactcatttcacaaaaaaaattaaatagaatgtgatgaaaaagactatgttaatataaaattacatttcaaaagatattaaaaacaagccctaaaaatagcttacaaaaactaattattagaagcacaacttaatagtataaaaaattcacggagcaaaaatattaattatttatttaattttttttttaattagcaaccctaaaaatagcttacaaaaactaagttaaactatacaaatttgtgtcaatcaaatatatactatgtataaaattgtgttagacactcactactcttatctcttagcaatgttcaaatatattttagagtactaatagaaaatatatatatattgtgcattaataatagagcatttataagtagtaccgtatgcattgccgagttgtacaccagttttgaagcctaaagtaacagcaacacaagccagcatgagaagataattaacttctggaatataaacttgtcctttatgagtagctgaagtatgaacaatcttcacacgtggaaaacatcccatagaaagtgattgttgtactatagaaaatgttccagaaatcaatgattgactagctatgattgctgctaatatagctgttacaaacattggccagtacataggacctaaaaaaacatatcattattaataaaattagaatattatatatgtacaacacaattttaattattaattgttcagtattaaaattaagaaagaaaaaaaacctgggattgacttgaaaaagatatctgaaacaagatctggattctttcgaagaaaagcagattgtccagcataggctaaaattatagctgggtaagttataaaacaagtgcttaatcgaatggacctcactgtgaaatgtcccacatcggcaaataaagcttcagctcctgcatttatatatggtaaaatattgtattaaatgattctaatgttaaaactattaacaataattttttagttaattttttcgcgttaaaaaacacattgtagaatatatttttttcaatttttttcttcatatcctccctctaaatttttaaaaaattctaagtagtttaaagtaatgaaaacaaagttcttaatattctagtttaccataccatttcaaaaaactttaaatttattttcgacacttttaaaagactgtttggttattgtgtttttagtttttagtttttagaattgtgttttcaaaagtaagaacagaaaactattttttattattttaaaaatttaatggtgtttgactcaggctttttaaaactattttcagatattttcaaaaaatcaatattctacaccataccatgatatgaacccatccaaccccggacctagacccgaacccaaaccccgacttgaacccagacccgaactcgaaccctgtactctaggtcctgggccagggtttaggtccgatttcggggtccaagtagagggttgaggttcggcgtccgcaacctagtctcagtcgggccgagaggtccggtcggagtctgggtcgggtaataaaaattgactaaaaaattataataggaagttggcaataacaatctattttattttataattttttttgataattattataatttttaatatgtgtacctgtaatggatagtactgt

SEQ ID NO: 32290 - DNA, 1489 bp, Cannabis sativa
tcccattcctcatcatctaacttagacggcttctcactacctttaataggtttgtacaaatctttacaatagagcaaatcttccatcaattccttccaagcagctagaatagtttgataagttcaatttcatcattctatccgacttatccaattttcaacacacaagaattcaacaccaatcaactttggctctgatatcacttgttgggaaaacctattgcaattaaccacaatattttccctctttgtatgtcaaaaatgggatacttattaaacacaacaataagcaattatcaaaaccaaagcaccacaaataatataaaacacacaaatcaagcataaaagtgagacaccaagatttttacgtggaaacccaatgcgagaaaaaactacgggaccgtagtccgctcaaatcatccactatcaccaaagtttaataatgggattacgaagttcttctctagtaaaactagagactcacaataatatcaagattaaacaatcttggatcaccagtacaatcaccatcatcatctcaaaagatggatacgcaaatagaaaagtttgggtttgaccaagtgggtattgtagaagagaaccttcaagaggtcaatcaccaaatcggaactggtagatttgaagagcaccttgcaaggattcaccacccataatttgagataaaatggatgagaatcaaccacttgatcttcaatgcaaaatagcaaaacctctttctctctctagctttctttctcttctttccctctctttttctttctctcttggctgctggtagaacttgttgtccacgacacaacaatcagcctttttcatttttttttctttttgtttccttttaattataaatgggctttagcccttatttggtccaagcccaaaaacaaggggcggacccaacaaaatttaacattattgaactactggaaaaataatttttcaatttcgttgaatagaactcattttttgtagatttttagttttcaagaaaatcgaaaagcttaccgaaaagttaggatttttgatatttttctaattttcttgtttgagcatatttttttaatcatatatcaactgttagaaaagattttgcatgaaaattttacataaaattaatatttggtaagtaagttgcttaaaatgaccttctatggccaaaatgagtaaaccttgctaaaatatcttctttttgaagctttttctattttttcagcttttacacttcatattaatcatgattaagccgatgcaaaaataatttttcaaaaaagatgcataaaacttagttttggtacatatgctgtttttgcttaaatttttgaaaaacttaccagaaagtctcaattcttgtcatttaatcaatttaagtgcatgaacacatttgttttatcatacttgaggtatgagaaaaggtttaaaatcataactatatcattctttacgtgtctctcttactttcaaggattttg

SEQ ID NO: 32291 - DNA, 7130 bp, Cannabis sativa
ttttgcattgtgttttttcattatattgttgatgaaactggttttattttttgttcaattttagcatcatttttagattatatttttttttttcattatctagttgatgacactattttttaatgcttttttttaatgaaattattagtttattttaatgttgatgaaactggtttttaaaatttgtatcattttataattttttgcattgctttatttttcaatatgatattgacaaaactttttttttctgctgctttaaatgaattaattaaattcttttaatattaatgaaactagttttgaaaattagtatcgtttttacattatatttttgtgcattgtaattttttttaatatgttggtaataaaactagtttttattctatctcttttaatgaaaaatttagtttagttaaatattgattctagttttaaaagtttgtattatttttaagttataactttttgcattgtatttttttattgtgatgttgatgaaacgagttttattttttgttcaattttagtatcatttttagattatatttttttcatcatcatgttgatgaaactgttttttcttcttcttttaattaaattattagtttcttttaatgttgatgaaactagttttttaaagtttatatcatttttcgattataatattttgtattgtatttttttcagtatgatgttgatgaaactgggtttttttctgctacttttaatcaaacaattatttttttaatatgggtaaaattggtttttaaaattggtatcgtttttacattatatttttgtgaactatatttttttcattatgttgttaatgaaattagtttatatcttgtctcttttaatgaaatatttagtttatttaaatgttgacactagttttaaaagtttatattatatttaggttataattttttgcattgtgtttttttcattatgttgttgatgaaactgattttattttttgttcaaattttattatttaagagcctacaaatttgttttattttttcaaatttattaattatgtttgttatcatggatgctatattatttggcttttattttaattttgtatttatttttaacagatggaaacagtctccgattctaatcagctagagcttggcaagaaagttgatactgctaagaaaatgaagatatgaaagaaaggagcatgtcgaaagaaagtatgtactatgttattattaaaattggtttcaatcctttaatttctgttcgatttttggtaatggtttctcttgaatctgttgtcttgaaactggattctagatgcatatttatatttaatatattttattgttcaattataatttactatttgattacctgcatattatttcagagtaataataattcgaaaggtaagaagaaatctacaaaagaagattttagttatttagataattagtttatataagttaatttttaatttaattgttttatgtaatcagtttttctatatcaatttttgttaagttgtttgatgtaacaagtttttcttatttagtttataagtaattgttaaattttttttttttttttgatatgtatgtttcttcatttttttaatttactagtttttgtaattgatgtatcttttcattagtttaggcattatatgtttgttcactttttagttgaatgtcatacaaaatttgtttacgtatttgttgaccgagattttcggcaactaaaacataaatgtaataaggatgatttgaagagagttaacacaaacatttttacgtggttggggcattaatgagccttagtccacgagtctctgatattaatatataggtatttttaacagaaaatgttccaccttcctttttttctaacattaattatgttggggttaattatagcagctgttcaagagaagaaatttcccaattgtcttaagtgtctaccttggctgtgcaccagttcccaaacctatgatgtagggtatgcactccctacgtagtagaatacgtagggtttaggtgagataatctcttaacccgtccttgattgatgtgattgctcattatggagtcgtcacttacatccttcattaccgtgtaattgtcgaaggataagtttaatgtgtttgacatgtcctttcatatacgtttatagaatcttcctccatgctgcattaaatgttagttgatacttcatctctgctaccctggatttgaaggaatgggatgctatccaactcttagaggtgaacaaaagttggatccttccagacccagtcgtggctcttggagtagctattgatttgtcccaaaggtattctgcctatgttatgactctcctttaattatctccgagtcctcgagcttaatctgccacgtgtcacataatgggcttggcacgtacattggaataaaaccatggcaatatttacccccaagtcttgattaatactttataaatgacacttgtatatttcttttgtcctcaaggagtgacgtggcacgtacctcgtgcacatgtgggccattttaatattcataatcatttcgccttgtgttttggtaggcaacgattcgaatcccgcctgttgacagacaccttcattaatgtcgatgtcagaaaggtacttaaacatttcaactgcccttttctcttcatctcgtgctcttgccctagtcgttggatcagtgcgatttgaatcgttgtgaacccccaccgctagatggtacttaaatgatgttggttcatatcttgaggggcctataaaacctcttgtgactaacttacttacacactacatttcaactttcaggcttacaaaccctctcgccaaaattccagacttctccgatttccttctactcttcctctgccgttgccaggtgaattactacaatcgtgtggcggcctctttatctgctatgcatttatcatgtaagttcttctttctattttacttttccatatagtagagcaaaatgtgacagataatgagtcattcttttttaaggaaatcatatgcctgttattccttggtaacgaccatggcggttatccgtggaataccctttttcgggtgtccgatcatgtttttgtattcccttcttttttttcttttttcctattttctttgatgggagcaaagggttagagaccctccattccatgtttcctctgtatgttttttgtaagttaaatcgtccctgcacattcctattcttttcccttgatttctctatattgcttggatgtctttcacccgatgtttgccactgtgaatcgttagattcctttcgacatttatccagagggggcctcttcctagctgttaggggacccccattccccttttttacatagggtttgatgtgggggctaactgttgggtttcttatctttcaaatgaatgaaattcttcaggaccttcataaacacgctttcttttggtttggcaaagaaattcttcagttccatcacgccaactccatgtcaactcctaacgtgtctagctccaaatcctccaagatggggccaaggaagcttgccaccctggaagaggtcatgcatggtccagttgcttacaagaaatattcttgtcgttgcaacggttgggaggccaatgaactccattccacttgacttgtgcccatcagttggagaggatagtggctataaatgggatcaaaccgtccgactcttgggtttatcatcgtcttcctagagacgaagagacaccaaacaataattataatgattttagagcctggagccagacccatcttatgtccagagccatgttacctctgcaggactacttcattgatttccttgtgtttgttggacttgcgccctaccaactgattcctcaagcctaccacctgttatcagaactttttattttttatgctgtcaggggttgggccgctcccagtctcgctgaaattttgtatttttatgaacttctttctgtccccaagaagggtgaaaaatttaaagatggtttttacaagatacaagctcattaggccaataaaaccccggtacccttcatttttcaaaagaacgttaaggtataccgtcaatggtttttcttttcttctaggttcaaagcctttgagcgcccaaacatgttgacaaactgggtcaggatccctccaatgcaccgcattgctccccactcaacttttcttgaaccatgcccacgtgtttgctggttacaagagagaagacttgaatgtgggggatttggtgatgattgccaactagcagagggctaaacagattttggagagtcaatcgattgaggattttaagttgtccaaggtaatttgtcccaatgcccgtaatcctaggagcaaaaaggcgcttaagaccgacattatttcaaccgctgaggacaaatataacaagtatagatacaggaaggagtatgagctcgaacatgctcaccttttgagtgcttctgagaggcctatccaggagaaggcaggaaaagaatagacgccagctaggcctaagttccctttccccgttttgaactcccaaacccctgatgcgagcacctctggagctcgtaagtcccctttaaaccttcactttgttcctaccatcaaagattattctaacttaaggctagtgggttttgacatgaggctatataagtttcggatgccccatagtcactgggggtaatattgtaaaaggtttttatttttcaaatttgagccatttcttgagtcggtctcaaatgggctctggtcctcctgttcctatacttttggatcattcctcctacatgacctcgagttggtttcttccctcagatagctttcaagggaatgacgacagtagctcttgaatttatgaatttgctagggcaaaataagatcatcacaaaaaaggattagccttcctttctgtgttatacttgcatttgtaattctttagtgtctctttttcttttttaactctatttattttgaacacaaaaatccatggaaaacttgttagccatgttagccaccatccacagccttgagctagaggtgcctaatcctcctcaggtgatggtgagtcctgtgggcccgactgaagaggtacgttagaaccaggaggtggtactaatcgaggaagagtaggaagaggttcccccacttgaccggaaatggaaaggtgtggttttccttccggagccttcgaaaaagcctagacggtcagccatccccggtcctagctcttactctgggatcccggctgaagctgaagactttccagccccacgaaccattctcctaaccccagcccatcctgacaaagagcgggtctagctccggattgccaaacacaattatcaagtggacgagttgtccaaaggcgatgctgaggccgaggctctgaaaaaatgggtaacaaaggttcatgatgggccctttcaagtgagtatactagggagttctgggactcaaatcttgatcccatgaccgactggttcaagcgctacctgggccaaaccttggcaccctttacctcttagatggtaagtcattttgatgttgacctaatccaactcccaactaaaaggtatgcagtctacgcctcctccaaccatgtgtatcacatttaggacatgagtgtggctctcacctccgtaagtatttacttttcaggcttctttttcttattattaccttttgaagacctgacctaacttttactgattgctatcagattactacggaggccggtcatctttctacgacattaattgaccaggggtttaatattttggagctgggaagaatggatggagttctgaggaagctcagggagttcgaggaccggacggagactctttgcaacgatgctctagcagagaaggctctcaaggagcgagatcaggaggcgctaaaggccaaagatgacaccattacttcaaaccagaaggacctcctaaatgcccgagaggagattcagggactcacaatgaaactcaagactcttgaagagctacataagaccaacttagagactaccgcaactatgttggtgaagctcaaagagttgtgtaagtttcggtaacagacacagaaggaggctgcaaaggctgtgagggaagctttactaactttggtgatctgtaagcattgtatgaagcgcttcgaggattgagtttttatgtgctggaaattgaacaagtttgaaccttgcctccacttcatgcctgatcctaaggataacatggtccgcttctaagaaaagaacaagaagctagagtaggccttgattaagcagatgggtcctcgtcttcctcccagagttgattaattaaacctttctttctcatttcctttcactcctctcccccttaagacaatactttaatttttagtttttattatcttttctttttattaggggagaaatttttatggcctttccctaggcctattttttttagacaacttatactttaacgaagtacttgtatttatctatttgtcgcctctttttgtttttgagtttttgattttttcctatctatgcgtatgtttatgccttagtacccccctaagtgacttaaaaaggaatttcgggggcacttagcttagatttactagtgataatgcatatatctttgttcactacaggttaacttacaaagtgcgaagatgaaattaaatactgaattcctaactatgatagtatttttggagataatcagcattctaggctctgggcactatggatccgtccattcactttaatttataagtcccaaagcctatttcatcttcgactttgtacgggccctcctagattggtctgagtacccccactcttgattcttgggaggctgggaagacccttcttaggaccgatcaccaatggcaaatttcctgctcttgactttggagttaaaatattttgccactttcttttggtatgctaccatgcgtatttgtgactcttcccgaagttcatctactaagtccagtgccccttgtaacaaggcttggtttgttcctggatcgtaagtagttctcctataagaggggattatagcttctattgggaccatgactgtaacaccctatctaacataggcgtattacgtgatt

SEQ ID NO: 32292 - DNA, 1566 bp, Cannabis sativa
gtctggagttgttgtatgagtggtgagtggttcagaaagcagaaagcagaatctgccagcgccagtgtttgagggtggtgctgatccactcaaagcgaagcagtggatgattaagataacagccatttttgattttatgcgggtcgaggacaatgatcgggtcagatgtgttatttatatgctgcgagaagatgcccgtatctggtgggagatcgtgtctcagggtcatgacctgaacatgacctgagatgctttctagaccttgttttatgagaagtattataatgagtctatccgagcaacaaaggcagaagagttcatatgattgattcagggcctatgacaataattgaatatgccactaagttcgatcgactgtcaaaattcacttcaaatgaagtggctactgaagctgctagaaaactaaaatttattcgaggattggatgaacacattgtacgagatgtgatagttactgctaaacaacctggggttgtttcggacttatgcacagatagttgattggccctagctgctgagggtgcagaagaccagacacgaaagaaaaatattgcgagaagagattcttggaagcagacatctagtgatagttctggtaggggtaatgaccctggtgatctcaagaaaaggcctaatgaacaatcagttgcatgcccaaataagagattcctaggtaaccaaagtgtccgtcgtggtgggaacaaaaattggcagacttttcctgaatgtctgagatgtaagaggcgccaccaaagcaagtgtcaggccagggcctgttttcactatggagtagtgggtcacatgaagaggaattgcccacagctgctatgaccagaacaaaagaaggatgatacacctgctcctgctcgggtgtttgccctgactcgggccgaggctactgccggcccttccaccgtgacaggtcagctttctattgctggtaccttattgactgttttgatttattctggtgcaactaaatattctttgagtaattattttagcttggaccatcattactaatctaactctaagtttagattaccttaattaagcatatacaagtaggagattttttaagatcgaagatttatatcatttcaggatagaatatctagaatatagtcatctgtgccattcaatttcatagaagaaaatagaatgacatcataagtatatgatttataatccttctgtccaatgacatactgtttaagcagtttcataatgaaaaagctaagagaaaaaaataaaggataattttgattaaaataagaatccatcgatgtcaagtttaggcgagagtcaaagttattcttattttataaaattcttcattgtatcatattgtaaacactagtctaagttttcatctttggatgcagaactagatgttgcaatacaaatacttatctatcaagatctaacaatgttatgtttgtctaacatatgataatcctttgggatttgtcccattaaaaacaacaaactaagttagaccaacaatgaagattcaaaattatactacaacattaataacagaaa

SEQ ID NO: 32293 - DNA, 1983 bp, Cannabis sativa
ttgaaactcccttgttgagatatcgttgactcacaccatgaagcttgcaaaaaagatcatggagcttctaattacggttctcattgaaagcgctaccacagacaatttcatttctaggggaatagtggaattgtcaggactacctatcctataaacaacggggtatggaatattgttaggcactaatgattggtcaaagttgaaggtgttttctctcaagtgtctctagaattaggagagatatgtgtggtgactaattttttgctgttggagttaggaggggctgaagtgataatgggagtcaaatggataaagaccttgggaaatatgcaggacaattggagaaaattggtaatgaaattagaatgaggaggcacttgggtagccttgctaggtgaccctagcctctgtaagtcaactattaaagccatgatccatattgttgaacaagatggatatggttattgagttcaatttggggcaattcagaagacatcagggaagaggagtgataaattttggttgtgctggaggaattcctcaacaaatatgacttagttttccacatggctctgggtctcccacaaaaaatgtctcgtgaaaattgtatagtgttaaaagaaggagtggggaaaatctaagtgcacccctatcgttatgctaaaattcagaagaatgagattaagaagatggttcaagatatacttcaaataggaattgtgattctaggactagcccttttactagacctgtgttattagtcaaaaagaaagacaaaagttggcgagtttgtatggactatcatgctttgaatagagagattgtagtagaaaaattcctaattcctgttattgatgaacttttggatgagctctatagaggaagggtgttctcaatacttgaccttgaattggggtaccatcaaatacgagtggtagccaatgattgggctaaaacgatatttggaacacatgaaggacactatgagttcttggtaatgccatttgggttgacaaatgctcctgccactttctaggccctcatgaatgaaatcttttgagatcttctttgagaaattgtgcttgtattttttgatgatattcttgtttgagctcaatgttggaggaccatgttagccatttggaagaggtgttgaaaggcctacaacaataccagttgtatgccaaccacaagaagtgtttatttaggcggtcaagcttagagtatttgggacacataatctagggttaaggggttttattttatcctcacaaggttcctaccttggttaaatggttagttctaaagactcttaaggagctatagggcttcccttgtctaatggggtactactgaaagtttatcaaaaactatggtaccattactaccatttctcgacctttaacgaatcaactaaagaaatacccttttggatggacactagaggctctacaagcttttgaacacccaaaagaagccatgtgtactgttctaatcctcgctcttcctgatttttacaagccattttagtagaagcagatgtcttggggtttgatttggtgttgttctaatgcaagatcaacgactgatcatatactacaatcaggttttacctaacaaatcttgttccaaatctatttgcgagagagagttgatggccatcatgcttgctatccaaaagttgcatccttatttattagggcacaaactccttgtccgaactgatcaagaaagtttgaagtacttgttggaataaggattagtggctgttgagcaccaaaaatggcttactaagatttttggctataatttcaaaatacaatacagacctgggttggaaaataaggctatcgatgctctccctcttgtctaaacagaccccacttgtggtacattatcagtcccaaatctactggctattatggatcttcatgaccaagtaggctgaccctattttgtctaaagttctcactaatctcaaac

SEQ ID NO: 32294 - DNA, 2802 bp, Cannabis sativa
atctaagatcctagtaaaataaaattccagcatttacagcggcttcgagagcataagttgtacaccaaattcaagaaatgcaagttttggctatcttaggtgtcctttctcgaacacattgtcagcaaagatggaattaaagtggatccaggaaagatagaatctattagggattggtcgagaccaaaaacgattaccaaggttagaagtttcttaggtctggctggttattatcgtcggtttgtagaagggttctctaaaatttcaacacccttaaccaagatcactaaaaagagttagcgctttgtgtggacggataggtgtgaagcaagtttttaggagctgaaatagagattaatcacagctccagtgctagccctacctactgattaggaaaagttcgtggtttattgtgatgcatccagacagggtctgaggtgtgtactgatgcaggccaatcgggttattgcctatgcctctcgtcagttgaaagaatatgaaaagtggtacccgactcatgacctagaactttttgcggtagtgtttgctttaaagatttggcggcattatctctatggagagagttgtgaaatttatacttgctataagagcctccaatatttcttacttagaaagacatgaatatgacatagaggcgttggttagagttgattaaatattatgactgtgagatcctataccatcctgggaaggccaatgtagtggctaatgccctgagttggaagggtctcgagcaggtaactagtatgatttggatttcaccttagttagttgaggacatggtcagatcaagcattgagtttgttataggcaaatttcatagcttggcgctgtagtctgatatattagaacgaattaaagctgctcagttaactgatccataattagtggagattagggaaggggtttcagctggtcaagccatagattttatagtgtcagatagtgggatgttgttatttaagaccagggtttatgttccaagtagtatggaacttagaaatgaaattcttgaagaggttcataccactccatactccttgcatcttggcaccaccaagatgtatcaagatcttaaaccctatttccagtggaacaagatgaagaagaatgtggtagaattcgtatcttaatgcctagcatatcaacaaatcaaggctgaacctcaaaaaccggctggttaattacaacatttgacacatcctgactggaagtgggaggatatcaccatggactttgtggttggattacctaaaaccacaggtttgtttgattcaatttgggttgtggtagatcgattcaaaaagtctgcgcattctctaccagttaaaataacttttacagtggatcagtatgcagatttgtatgtcaagagatagtaagattacaaggtgtaccaaagtctatagtttcggatagggaaccgaagtttacctctaaactctggtagagtcttcagcgggctatgggtactaaactaaaattcagcacaactttccatcctcatactaatggacagtccgaaaggacacttcagatattggaagatatgttacgagtctgtgttatggatttcgagggctcctggagtaagtatctaccactgatagagttctcgtataataacagttatcaaagtacaataggcatggctccctatgagttgttagaaagtgtagatctcccattcactgggatgaaaaaggggagaagaaatacttgagtccagaatcagtgcaacggacgaatgaagcaatagagaagattaaagccagaatgcttgcctcttagagtaagcaaaaaagttatgcagataaacgcaggaatgtagagtttcaactaggagattatgtgtttctacaggtgtatccaataaaagggatcaaacattttaagaaaagaggcaagttatgccctaggtttacaggatcttttgagattctcgagagattgggattagtggcatatcgtctagctttgcctccatctctatcagcagttcacaatgtatttcgtgtttccatattacaaaagtacatttcagatcctactcatatactgagttatgagaatcttgagctacaatccgacttatcttacgaagaacaaccagtttagatcctagacagaaaagataaggttctttggaacaagaccatagctttggtcaatgtagtctagaaaaatagcagggtggaggaaaccacctgggagttagagtccaacatgagggcttagtatcctgaattattcagataagattttgaggatgaaatccttttaaggggggaaaattataaagaccgcttaactttaatttggaaattagcagataaatagggtttaattatgaaacttgcatattagttatgaattattattttacgaagatttatttgaattcagaatgcattatatatgtcatatatagaatttcatatttttgcatgttttgtgcccgacaacattagaatgcggtgtttggccattagaatcatattttagtatttttagtgtagcgggataatatagttatacattggaaaagtcggaaattattcgatgtagtacatgtccaaaatacccctagatgactttggactttgaagcataaatgagggttgaatggtcttttgaccttcgttgtcctttagtggactttagttagatattttattttgatttttatcctttaatttattagataagtattgaatttattttattttaaccaaaaattagaaaaaaaataataaattcaacttctctctctctctctct

SEQ ID NO: 32295 - DNA, 2575 bp, Cannabis sativa
  modified_base (75)..(75): a, c, t, g, unknown or other
aagtccttaaatctaacaatttcaatagctcatgggggatttttaacggtcaaaaaagtttaggggcatgatttngtacatgtcaaaattcgggggggaaaattactaattagccaaataaataaacaaacaaagaaagaatttatgaaatttagttagaaatattttttattaattgaaatttaataaaaaaattgaatatttaaaactaagattgttatgttatgtaccctcaaatcaatatatatattgttgttgaatctgaattagaatattagtggacttttggaatttaataatatggtaattaataaaaaaattgtaactaaattattataaaaataagtacaataggctgttcaaacaaatcatcctaatttaatatgaaataaatagacttaatattatacacactattgttttagagtgaggaatctatacgtaagttggttatttctcccttagttgtaatcaatattacgaaacttcatttctaatgacacatataaatgtagtaaaattaactgcagctattagataaggtagggtcaattattatctctaataaaataactataaataaatagactaatttgtatgtaagaccatttgatactgaaagcaaacatttttattttttataaatcatgacgaagaaacacaaattaatttattgtatagatactgaagaaacaatcgtacgtataaatattacaatacagcattaattaatagcaaattataacatttatatatatatatatatatatgcatttagagaaatcgtggagataaaggtggaatgctctgttcgttcctaaagaaattagtcgggtcaaccttggttttcacttgaactaatttcttaaaatttttattgaagtactttttcccccaaatgcttgcttgttcataacttataggacctttttcattatttgttcccaaatctaggtctctataattaatatatgaagctcttggatttttggacacgtatggagtcatgtaattataaacacttcgaacccaattcatatgcctttcactttcttcttctttttcccactgagaccaatataaaattttgtacataactccagctctatgtgggaatggaattgcagattcaggaatctcgctcattttaccaccataagggtacatttgaatatatgccaatcctacatcttcttcatataacttttccaaaagtttgaccataacaatttctgaaattggcttcctaacgtagtctagtttccccttaaaaaaaccctttactacatttgttggatcgagcaaaacgtccaatttatcttcacttgagaattcattgaagaaaaagatcatttcaatccaactcgtttcaaaacaatcttttcttactacacccaactcaggaaagttagtttgcatcaaggaaagaaacttatccactctaccaagaaaaatagaaaagaatgtagcttgtattgttgtcatattcttcccatgctcatcagtagaattcacagttaagaacctaactaccattaacaaatcttggtcaaacttgtgagcaatattttgccacttattataaattttcacagtttcatttattggcaagttcttactaaccgataatatagtaaccttcgatggcacaggaaccaatctaattttccaagcaagaacaattccaaagcttgctccaccaccaccacgtatggcccaaaacaaatcttctcccatagattttcggtcaacgaattctccatcagcgttgactaagtgagcatcaatgacattatcagctgcaaggccatattttcgcatcaatgctccatagcctcctccactgaaatgcccacctaccccaacactatggcaatagccaccaggaaaactaagattctcatttttctcagcaatcctataataaagttctcccaaggtagctccagattcaacccatgcagttttgttatctacgtctataatgattgaacgtagatttctcatatctaatatcacaaatgggactttagacacataggagacaccctcaaagtcatggccgccgcttcgagttcgaatctgtaagccatatttcttggaacataaaacacaggcttggacatgagatgtatttgaaggtgtgatgataactagtggttttggtgttggagaagtgaatctaaggttttgtatggttgaatttagaagggagatatatgaaaagtcatttggagtgtgtatgagtttggcaagtgatgtattgttgttggagatatgtttggagaagcattgaagaaagttgttgtgaggattagcttgagaagtttggatagagaatgaaagaagataaactaatatttggcaaagaaaccaagacactgatgagtacttcattttcttaagccttatatgttttgcattagcatgaattgagatctttcttatatacaacttcatgcaaggaaaagtatacaaatcattttttcttatatatataaaaaattaaaaatcaggaagcagcttacacctttcattcgtgaatgatttctcttatttattttatttttaaaac

SEQ ID NO: 32296 - DNA, 922 bp, Cannabis sativa
cccacataaatcagctatcttcttcctcatcttctattcgaacattcgcatactgctcttcaatggtaggctcagattgattaccaggctccatgacaaataaggacaaagtataccccacgtataagaccaaacatgaacttttagagagaatatcgtaccatgtcaaaagacaagacttttttacttccccatcttcatcctcgttaagggagaatttttttataaaaaaaataaagtttataataaaaatttaatgtataaaaatattaaactatgtaaaaattaaaatgtatacattaattattattcaaaatataatttaaaaatcataaaaaaatattaatatactaaaaaaaatgtaaaattaaattataaattataaaatactaatcaataaaactgctctttgcacggtttctagacgtatgtatataggaattgtttattagcactaaaaccttatgaatatcaaaaaataacttacaactcgaaaaaaaagagtgtaattatatgtaatggacaccaacaatatgaaatgttttcattattattattattaataaaatttaaaaaatatttatgtataagtaaacttaaacattgatattattattagggaaatttaaaattctatacacaataaaccctaatattatttctctaagcctaaatgtttcaccatagtccatatatgactacatttcctttattcccataatacttctcacatttgaaccaaaccaatctaaagcttctctctctcgcccaaacgcacggcctctctctctctctctctctcgcccaaacgcatgtcgcctcaaccaaagaccacggcttcacctccacgacctccgacgaccagcgagaaccacccaccacctccgacgaaggacccagcccccctcaccaccgtccacaa

SEQ ID NO: 32297 - DNA, 2029 bp, Cannabis sativa
tacaattcaagatacatgtgaaagcaggtgtacaaatatgtgtataaatatctacaattttaaatgctaattacaatcttttagttaatttttacttttaaaattacgtggaagaatatttttcttttaattttttttcataacgatatttgttatagttacaataatatttgaataatttataatactaaaaatagagtttttgatattctaatctagcacgatttgaattttttaaaaaatttataaaaataacattgtaactgctataattttttttttaaaaaaaaaaatatagtattcaatgtatatttttgaacatataaattaactaaaaaaattatattatgatatatattgtcctttttcattattgtatagaactatatataatatattattagtagtagtacttattattgtatcattataatttcagttgcaataatcgaaatcgaaattattgggaacatgcaacctatctagctaactttttgttcatgcagcatattacatataataataatcaataattatttccacataatacataataatatattaatatttatatgtgcgttgcacgtgtatagttcttccatgtgaacgaaacaaattgccactaataagacaaatggtaagagtattataatttaacatcatactactattagtataattaagtatctaatatcatataatttaagaatattatttggaataagttgaaaaatacttcttttttgtatccattaattaaaaataccctcatattatttttttattaaaatatacccactttttttagtagattgcctaatatactctcactctctacttaagtttagtatataatttacataacttaaggggtctaacggggacatcatacataaaagtaggtatatctaaaaaaatatgaaaatagaggtaaaaattaaaataagtaaaataaattaggtatacaatgtaattccatattattaactaattgtaaagtgctacccagatccggtcttgggaataggcgagctaggccaagtccacttagtccatgagcccaatatttgtctcattttaaaattacacattttttttactaatttttaaaatatcatattttctctaaaaaatacctaaaaatattattttttatgactcattaaattttaagattagccctaatatcactcatagaagatattgagcaccaataataccgaacatcaacactctttcaataataataagattcatttcgaattttttttttttatatgtcatattgcctactgggttacatataagagatataacttcatccaaaatctagctaatatataaatatgtatataaatcacagtacatattaaataataattttgttttgagttttttaatggttcaataattccttcgttagtttccaagttctttcctgaaatcccaatttcccaagtttaaaaagtataattaaataaagctataaataaatttatagcattgtttggtattatataagatcatcatcatcattgtaatatatgctatagttccaaaaaattatattaattaaaattttatatattttaatttttttaagaattttatatattttaatgttgcataataactaataatactacctaataacaaatgttcaataatataataatattaaacttgtaatatttatacactttcaaatatatattttgtcctctattttcatttaattattttttaccataatgtttttaataaaagagagaagatctacttggttataatttatttattaaaagaagagaaatgatatatatgtatgataaataggtgaaggttttttatatgctaaaatgataaatactattttcactcaatcatatttataattaaaaataagatttatataatattaaaataaatatattgcattattgtatatatcattattaattttaatatgggtatcaagtggtgttagaacatatacgataattgatgtcttgggctgtataggatgttc

SEQ ID NO: 32298 - DNA, 1712 bp, Cannabis sativa
  modified_base (1285)..(1286): a, c, t, g, unknown or other
taactttactcgtgcccgccgacctccatcgaaaatacctcaaaccatcacatatgcatgatagaccttttaaaatcttcatagagtgatgtctcaccctttgtgctttccctacttatccaacactttgcttgcgggcgatcatgagaccggtctccaaaatgtttggacaagtctccgggaattgtaaacgttgattcttagagttaacactgggttaaccgttgacaaatatcgaaagttagctttgctaattttaagagttcacactttcccagtctacaagaattcttcactaagttgaatttctggcttcgtcaatcgtcactgattgcatcaattggggtttttaaaaaataagaatttcatcaattgaaatggcatgtagaaaaactacttggctgagatagtagaactcatatttcatcataattggctttttaggaccagcatacatactaggataaaattctaggaatattaattgcttcgtctatactagaactactcgttgtggatcactagggaaataagaataatactagatatttttgttcatcaaattatcaaattctcttttttgttcttagtttcttcttttcttccttaactaagttattttaagtagattatagaattgcaaaataaaacatgaaaaaaaaattgcagaggtaaaacttttattctaaatgtaaaaagtaaaacaaattaaatccaacctgaactcattctttaaaaaaataaaaattccaactggaattcaaaacaatcaaaagactaagagtaacaaatggttaaatactgaaactagactttttgaatataaggtcgaaaatatcagtaaaaatttcatcaattgaaatagcatgtagaagaactacatggctgagatagtagaactcatatttcatcataattggccttttgtgactagcatacatactaggataaaattctaggaatattgcttggtccatactgaaactattcattgtgatcactaggaaaataagaataataccagatatttttattcatcaaattatcaaattcttttttgtgttcttagttgctgttttttttttcttaactaatgttaaagtgtggaacacgtagttaaagtgtggagcacgtgttgatgttttaaattaatgagtcatgtagtttgtttaatttttttgttgattcaatattttgtcctactctttaggtcttattctttaggtggcgttttaagaatagaatagaataaaatttaaaatgcataaaaaattgataaaaaaanntattaaattttttcaaatcttgcattggaatgacatttcctttcatttcaaaatgaaatagtcattccaccaaaatgatagaaaggtcattccatcataatggtattctaataattttaaatgcaaccaaacaaaagaatacaatgaaaattgtttattttccatttcattacctctaaccaaacgtcatctaggtgttgatgatgttaatgggtagtgggttaatgagtaaaaaacgtgatgtcatgtagtcatttcaatgttttaacttttgtctggaatgccttgtatatatagaccaatcaagtatcaatagtagccgaatatatatttattgtatcaactaagttattttattgcaaaataaaacatgaaaaaaaaaattacagaggtaaaacttttatttaaaagtaaaaaaaaaaaaaa

SEQ ID NO: 32299 - DNA, 3960 bp, Cannabis sativa
ctatggtttaaagcaagcacctaggcaatggaatttaagatttgatgaatacatgaagaaaatagggtatgtgaaaagcaactatgatccatgcatctatcacaatgatttaatttacctattgctatatgttgatgatatttagatatttagtaaagaaaaatcagagagaacaagcttaaattacagctcagtcaagagtttgaaatgaaagatctagaaaatgctaagaaaatacttaaaattaacattcaaagacccatatcaaatgttataattctgtctcaaaagagctacctgcagaaagtgttaaataagtttggaatggacagctccaaaatagtttcaactcctcctgctcaacattttaaattatctagttcccaagcaccaactacagatgcagagcaagagaaaatgagtaaaatcccctatgctagctgtgtagggagtttgatgtactcaatggtttgtacaaggcctgatttggctcatgccatgagcatgacaagttggtttgttgctaatccaggaaatgctcactggactgctttgaaatgggtgatgaggtatataaaatgaacattgaacactagtttaacctatgatggcactagcaaattcaaggagttggtgactggtcatgttgattcggattatgcatggtgtttagacactagaaagtcattaacatggtttgttttcactgtctatgggggttgtgttagttgaaaatctaacctacaaaaggttgttgcactgtctctacagaagctgaatatttggctacaacagaggccattaaagaagcaatttggctcaagggattgacatgtgagctcaaaattaactcagaagatgtaacagtgcactgtgaaaatcaaagtgcactacatctcatgaaaaatcccatgtttcatgagagaactaaacacattgacatcaatatgcattttattagagatgtgattcaatccaaaattgtctttgtaaggaatattaatactcatgaaaaccttgctgatgcttttacaaagagtttgactagagacaagtttagctttgtcttgacttgctcaacatcaactcaaactagagtctcaaattgagattcacattcattggacattggattgagttctattggttacttttatggcttggattaccatgttgttaaaatgtactaaacctggtggaaattatggggtttagaacacttaaacaactaactaattgccttgacagttggcagttattttagttagtgtgacatgaacaatctaactcagggatttcaatacaaaaactacctgagtcacatctagctatcaaagaagaagcttacaggccttatcccaataaaagttagggaaggaaggacgataatccaaccatttttgctcaagcgagaacttatgaaaaaaagtgccatttattggtgtcatacgccttccgaatgtccaatttcaaccctctagctttcagctgcaacgaattaacaagctccgatgccaatcctatgttattttgtctggcgctaaagcccttaacttaataaaggcaccctgatactcagaaacaagtttagatagaaggctcagcggggctaatttctcgtacttgctcattgcgctctccttttgtcgagtgccccacccggttcactgggctgttggcctattaagtacttgcccgtagctcctgatgcccgaaaagcgggctctgcgctcgttatccttattgttctctctgttggggtcccctcccattgctctagccataagctatggttgctccagctcgcaaccacaagggcccaccctgcgaggccagagtgggctccgcagtcaagttagcccccatttgaattacgttagggggtctttcactttcttttgttagatctagagagatactacgagtcatccgtcctagattccatcatcgctgtcctaactaacctactactataaatagaaattctacaactaacagaaaagagagagagagagatcaagttggggtgagggtgatacacaaagaagaatgagagcttaatagagatgaatctcttcaagattgaggtgttacaaggctattcatgttcgagattttgaatgcctttagtgagctcatttcagttactggtgtgaagcaccatttgtgtagtttgtgttcttgattctccattggtataagttgttataatgtttgccattcattaataaaatcaatacaaccaatggagttgtttctactcggggattaggtccaagttttatccaaaacttgtgactgaacctcgttatttcttgctgtcaatttactattctggtttatagtttttggtttaatattttaagcctatttctttcttgccttgtgttcttgtttgtgcttgagtacacaataagatttcttcttggcaaagcagtgtagatgttattgtttacttaacttgttcgctattttcttgttgtgtttttttttttggtcagtttgacttgatctttacttgagggtgacaaaagtggtcagtttgcttagagtctagttttaagtttatttttaatattttttattttttattgttcgggtttacgcttgttttttcttttatattaatttcaggtttgagatgaagagagcttcattttttggtaaaaatatggtttttttttctagtttcttggtaataaaatgatccttttgcaaaaaggatcttcgggattgaatttcttgacttggtgcattctgaaagatttaaaaaatcaggttttcaaaagtcggcatcaaaggttgcaacctttcactgaagatcgcgactctccaaaaactacaaaaagtaatttttggaaaaatccaagagccacaaccttcggaaggtcgaggccctcggaaaagttgaaaaattacgtctctataaaaaaaatccaagagccaaaactctctatcaaaagttgtaactcttggctatttttggcaactttgttgattcgacctaaaaacgagtggaggctaggtttttatcatatattcaattattttgaacattggaggctagaggaggacgactataagcataggacaccgttgtaggattccaattagtgttctttctcatctatctttatttttttatataaatgtattttcaattgaatctttagatgcttaagatgatttttatgagctaatttacttttgggattattatgtgaaccacttgaatttcttttatggattaaagtagatatttatcttcttctattattttaattacatgcaatctgatttaattgtgcaattattaattgatcacctttaattgttatccatgatttcgaatcaaaattttaaaaagtgagatttgaatatgttttgactgttatggatgcaaattgatttagaagaaaagtacatactgtatgatttttatgagttgatttgtttaatgctttctctgtgattaaacttgtcataggaatataagaagtttttacatagattgaatttgtaagtcttcaccaaattataaactatttaattcaacttgtcaactgaatatgaagaaaataaattggataattactttaagaagtaaaagaaaagctagtagaggattataataattcatatttttctcattgatctgtctcttaattttaattgtttattttattttcttcacatatctctaatatttttatttaatcaaatagaaacattgattatttggtaaattgatgataatcaatccttgtagtaggacgatatttggtcttctaattaagattattacaaattgtgactgtatacacttgcatagcattatgttttgcaacaattcctattctcatttttatgtacattctaactaaacgctaataaaatttattattttacatctttgccgttaataaaattctttataaagcaaagcattaagttgagatt

SEQ ID NO: 32300 - DNA, 2405 bp, Cannabis sativa
  modified_base (2222)..(2223): a, c, t, g, unknown or other
gccaaaaattaaaatttcccttttctaattattttattattttttaaaaaaatcttctactaccacacaaaagtttattttctaattattttattatttctttcaaaaaaaatttactacaaaactctaaaaaaatataaataataattatctatatatacattaatattaaattatgcataaatcgcatcatttttcctattatatatatatatatatatatatattcatccttctcatttttattctctcattggattacaatatacaatatggttcatataagatggtaattttattattatattcatctctttagtgtttctttattatttgaaccatacatatatctatgttagtttaattttattgacttggatacacacctttaaggttttattagtagataatttttttatttatagacttaattactagggaaattaccgcatatactgtttctttaattttttttttttcaaatttacagtttaggtttctaaagttgctagttgcagtttttttttgttgcgatttaagttgcagtgctagcaataggggtttatacatagaatttcgtaaaaatacaaaaaataaattaagtgtaaaaataaaaaaagccctaaaaaaataatatttttaaaaattcctctaatcactattagttttatattaccttaatgaattaagaaagataattttgacttttgtgatatgctcttttttatttttgtttattatggtttttaataagtgtgcattatgataggagcagaagtctatagaaaaaggctattgctcttgatctagggtcaatgactttagatatgtaaatctctaatgaacttttcttttaactctagtaaattatttggataatcacttttattattttagaaaatttatgtattgctatgatgacaaatcaccttctgtacttgtatttgttctcatatacatgaatttagatttttcacttatgtactttattattaaaaacaaataaaaaaaattaacaaattagagggatcatatttttaatgaaataatcacaaattgaaatattaaatttttgtaatatttatctttaaatttaaatttaagttaaattattgttattttaattatataacaaataatttcacaaaataaattatataacaaataaacaaaattataaaacaaatcatctatatataaatgagagatatgaagcgataatgtgacgctctaaaatgacattatttcactttatttttttctcaatttttcacattttttaagtaatattaaatactattaattaatatttttcataaatttaaaatctatcaacctatctatatatctatatatataaaggagagatgtgaggcggtgacgtggcaccctaaaatctctctaattagcattatttgttctctaagtaattttctcaatttttttaattttttattaattttataaatgttaaataatgtaaaatatatatatttttattttttttctccatacttctcttatttttttattttattttttcaaaaaataataactcttttttttttgggccttttgctttttctcttcatcacattttatttttatctatttaaattaagattgatgtatttttttttttttgtgtgtgcttttggctttttttaaacaaaattgaaaacaaaaaaaaataagatatttaaaaatgacattttaaaaaaaaaattgataattccaaaatctttggctataacatttttatccttttggttttttttttaaaaaaaattaagatatttaaaaataatatattttaaaaaattgataactctaaaatctatcatcatgttttgactttttacctttgtttatttttttaggatatttaaaaattgattatacaattctcatttagtacgcaggattggactggattggactgaaagggattggactagactagattatgctgaaagtaatcttgtgtttggtttaagaatagactggactactttatttgtttccttttagaaaataaaaacttaaattaaaataaaacatataagaataaacaaataaaaaataaatgattcacagcaaaaaaaattaaaaaaaaataattaaattataaaattaaataaaaaataatatatcctatataatcaaatatatatcataaatatataataaaatagtttagcatatttttttatttaataaannattaaaatagtaaaataaaaatatttgaataacataaaattatttatgttaaacactaatttaattactaacttaatgtaaatatttgttttttaaaatatttttataaattttctagtcatttaaaataatatataattttattgtcatattgtttcttattgtttaattaacaatatttt

SEQ ID NO: 32301 - DNA, 1896 bp, Cannabis sativa
tgtagaacctatggaggatgttgatgaagtatcggtgtgtgacctcgaccccaccaaggtcctccggctaggaaaaagtctagagccggaggaaagagaaaaaataatcaagacgctaagggctgccacggatgttctcgcgtggtgccaaggggacatgaccggcataagcccccacgtcataacccatgtccttaatgtcaacccagacatgccattggttcagcagaaacgacgccccctcgattccgtaaaggcagaagccctggagaaagaggtggacaaattactaaccagtggcatgatccgagatgtgtattacccagaatggctggccaatctagtgctccgaaaccaaatggtacatggcgggtttgtatagattttaccgatataaacaaagcctgcccaaaagactattttcccttaccgagaatcgaccaaatggtggatgccacctctggattcaagctgttgcccttcatggacgcatacgccggctataaccaaatcaagatgcacattgcagatcaagaatgcactagcttcaagaccgataagggggtatacttttacctggtcatgcctttcgggttaaagaatgctggggcaacttatcaacgaatggtaaaccggatgtttaaaggccttctggggcggaacatggaagtatacgtggacgacatgttggtcaagtcgaaggcatacggaagccatgcggatgacctagaagaatgcttcgaagtggttcagagatatgggatgaaacttaacccaaagaagtgcactttttgggtcaaatcgggaaagtttctgggcttcattgtcaaccagcgggggatagagagaaacccagagaaaatccaagctctcctaagcatgccttcccccaagaaacacaaagatgtacagagcttaaccggaaaggttgttgccctgagccggtttatctcccgatccacagacaagtgcattcccttcttcaacatcctgaagatatgccaaaaatttgaatggtccgacgagtgcgaggaggcattcaaaaaactaggagcacatggctaaacccccctatcctatcaaaacccattctcgaagaggacttgttcctatacttggctgtcttcgagaatgcggttagcgcggccttaggacaggaagaggaaaaaactcagcaccatgtgtactatgtcagcaagcgcatgataggggcggagacacgatacccggtgattgagaaactagttttttgcctcctaatggcctcgagaaagctgagaccttactttcaagctcacccaatcaaagtattaaccaaccacccgctccgacaagtcctacaaaaaccggaggcattcgggagacttctcaaatgggctatggagctaagccaatttgatctacactacattcctcacacctccataaaaggacaagcgttagcagacttcattactgagtgtcacgaggcagaagctaacgtgagcatgcctacaacgcaagtcccggcgttgaaagtatttgtggatggcgcctccaacgagaatggatccggagcaggggtatcgatgatatccctgaacggacttcgactccaggcagccttgcggtttgaattcacaacttctaacaatgaggctgaatatgaagccctgattgcaggactgagattagcaaaagtcgtgggggccaaaagagtggaagtctacagcaattcacaactggtagtaaaccaagtgtcgggagaatatcagacgcacggagaaaatatggctgcatacgtagcaatagtccgggagctgctccacgagtctgcggactacaaagtagaaaggatccccagagaaaagaacgtgcacgcagactgtctggctaagttagcttcagacagtgaaa

SEQ ID NO: 32302 - DNA, 2700 bp, Cannabis sativa
  modified_base (30)..(74): a, c, t, g, unknown or other
  modified_base (1328)..(1330): a, c, t, g, unknown or other
gtgtttattattgttttagaaagttcatannnnnnnnnnnnnnnnnnnnnnnnnnnnnnnnnnnnnnnnnnnnngtaaaataaattccaacatttagacaccaagcatgtctacactacactattaactctaaacaccaaatatatatgtctaagttactctttctttgaagacaccaaacatgtcttaaatatacacattttagttttaggcactaaatatgtcaatattttcacatatgcacatagtcaaacttatttacaatttttattcaaaatcaaataaattaatcaataatgtctcaatacactttgattaaatttgtggctcactcccacatttctaccatgaagagaaattttaaatttactttaaaatgaattctctccatttcttttaatcttaatataaattattatctcaacataccatttttgtgtacttttttctttcttttaattaaaataacttttttaggtcactttgaaaaataccatttgacatttttagttttcttaagaaaattaaaacatcaaactcacattactacttacaaaataatgtgattatttttagccataattttaatattatctcttcattgagattagcccaaaattatataaaagttgacaaaattctcattgatttcgttcactactttgattatttaagattcaaatttgtgtctccaatcttgtaatcatttcacaatttttgaatccaccttgattcactttatttgagtctacaattgctctttcaatttataactcatttcacaagtttggatccacttttgatctatttgttcttactatgacaagacaaatctcataaatgtaactcatatagttcacttttcttatctcataaaatgagataattatcacttataattctcaaagaatgtaacttctcacaagtactcacaatttcttttctcaaaatcactattagaaaatgaattctaaattctcttttgttcacaatatagatgacaataatctccacatcaatagtaataaataatattatattactattgacattattatcatactatataactcatcatatattaatataagattaatatacaactcccatacataaaattataactctcaataataatcttacgctaattaatatagtatccagggccggccctgaaacaaagtgggtcataggggaaaaaaaaaatttgggcccttatgttagaaaaaatgtggtatttttcaaaatcgataaaaaaaaatatataattttaaaagaggaaaaaaaaattttgggcccctgagctgggtgggccctaggcacaggcnnngcccgcctatgcccagggtcgggcctgatagtatctcatgtgttatgtaatatattaattattatacaactatatatgttatataatctcacacatacataacatatatataaattttaatatccatgcatgatatatattatatacacataatatatattatatatgcatgtctcatataaatacattgaaataattacatatttaatctgactaatatatattatatcacatgctatacatatatataatatgtattattcatatatacattctatatattatatatctcacatatatataataacatgatataaatacatgatcatacatatggcacatatatatacataactcacatatatatatcataaatatatatatatattactatcatataaaatagtaaatcacataatatatcctactatgctcactgatgaatagttttcacacaaaatatcttattcttgtattctcaaaatcttgatttatctcctcttctattgaaaagggataagcttttcattgttagatattttcttacaatagaagaaaatcaagatgcattacaactctattgtaaaataatacaagggctaaaataagggattgattaaatatatgttacaatacacatatatacacaatatatataacatatatatatttatatgaaaggtaaaagaagagaagatcacaacacatgtaatataatatatatatatacactcactcacaaccttgagtgtagactagtggagatcaccatgacttgaacaatgtattacacctttgttcaaaaggttatttccgactatctcttagcactaagggaactcacatggaaataattttgggaattatcaaactttagattttctagttatgtgttttttgatagaaaacttctcatctcaatatgagcaccttataccttattatatagtatttaagatatcaccatttcaaattcaaactcataaccccgatagacgttatggactcaaattatgtaactcatgcacacactataacttctatagcattaagaattttaaactaaaatgtgtaacatctttttacacacataatattgttgataatagtacccatagtaacaagtaactcctctaaatattacaaaagcataacaactaatatacattaattatcatatattacatattattaatttattacacatatttaatttatattttatattactataaagaatataacacttatcagataagccaaagattgatagtagatcactataatttttagaaataaaaagaaaaggaagagagaccacaaaattatatttaattaattcttttcataaaaagaagaagtcttttttt

SEQ ID NO: 32303 - DNA, 2455 bp, Cannabis sativa
taaattaaagtttaacatagtattgtataaaaatatgatatataatctaatttaatacaatacaatacgacctaatacggcgtttcaaacgagcccttaatatataaaaatatgcatgtaaaatagactatttgaataggaaaatttgacttagtatgcttaatgtaaacatgttgttttaatataccactcaattacaattgtatatatataattttaatatcttttcctttcaaaaatatttttacatttcaaaaaaaaaaaacttctctctctaactcactcactctccagcgttaacctcgacccagaatccctaccgcgaacacacagacccagaaccccagtcgcaaggcctcgccatcgtcttctctcacagcctctctcattttttacatttctttcttctggtttaccagttttttgcgatattttgcaatattaaacgatatatttgcaatgatagaacaaacctgacgttagggatgaagtttagcaatgatttgcgatatttggtaatgttttgcgtatttagcgatgtttcgcaatgatattaacaatgtatttgtgatatgagactaaaaaatgcacagtacatcgctaatcatcgtgaaaacttgagtatgattttgtgacatttagcgatattttatgatttcgcgacatttagcgttatttcgcgacatcgttaaaaaccagaaaaaaaaaggaaaaaaaaacaagcgagttgagaaatttaatgatgggtagggattttgggggtttcgaggtggttgagctcatagattttggggctttgggtttcacgatttctctttgtggttttgcgatatcctcctcgatttcctcctacgtttcatctttggagtgggtttcgctggaggtagtgcggtggtcgtgggtttggtatgggtctggtttggtctggttctgtggtcgtgggtatcggttgggtttggtgagagttagagagagtgagagagacaaagagagagggtcgagagaaagagggaaggtatgaggagggtatttcggaatttaattaattttagagtattaaattcctatgcattttaatgtggcatactaaaagacatggacaatttttaagcatgaattgtcaaatttttctttgaatattgctttctatattgtaaattattctggatttctcaaaattttgtaggatatcttaagtagaggagtgctaccatcaacattttattacaacctcttagtcaatctctgtgcccgaaaatacatactgaaatattttttttcaaaaaaatttcacggcagtgttcattatagtatagcatcatccctgtaaatttttgaaaaaaaatcgaatagtttacaatgccaaaaataggtttgaagatttttgaacatgcatggtagactagaatatcagaaactctatttttggcactgtacactatttacaatttttcaaaaattttcatgaatgatattgtaactataacgattaccgctatgaaaaaaaaattgaagaaaaatattctggcatgtgatttcaggcgtagagattgactaagaggttgtaataagagattgtaattagtatttctctcttaaataactataatatatacgaatataaaatatatatatatatattcttctggatgtcaaaatagatagaaggtgtattaatacatttttttttttggtgcaatataaaagcacctaaaaagctattttgtcacattttcttttttttatattgaaactacacatagataggaataattctattttcaataaaaatatttaatattactataaaacttgaattggataaatacttttgttttttttatttaatttataaaattttgattaaaaaattagaaaaaaaaatatttacaaaatttaaatttagataagtacttttgttttttttttgtttggatattatttttaaattaatacaaataatttcttatgaaataaataaattaataataatattaatgacatatattaatatatgttgttaaaaaatactgaatagtttataagttttacgagtttttttaattaacatttgttagactttttatttacatagtgattagaattactcatgaatttacgatgtaaacattcacaaatagcgcaggaatcttctagaagttggatagctcatcgtctaactgaagggcatagtttatcaaatcatgaactactaaagtcaacgaacaaatatgggataaaactgccctaatttaaacaataaaactataacactctcaaacagcacacccaaagagctagacttttataaatttagttagtgatatttttggttagtggatacagtggaggagccagcccattattttagttgggcaaaaaaaattgaagcattaatgaaaaatataatttttattgaaaaaaaagacagattttgtgagaataaaagtgaaaa

SEQ ID NO: 32304 - DNA, 1587 bp, Cannabis sativa
ggtaaaataaattccaacacctaattcaaacaagtggaacaatgccatggattaagaaatggattccatgcagactgacaaagtctaaaaatatgaaactctacgtgaagatattatacccatagggtgtaagtggattttcaagaagaaaataaatgttgaagggaaggtagagacctcttaagctgggcttgtagccaaaggctacacagaacgagaatgggttgattatgacgaaaccttctctcatgtggcaatgcttaaatacattcgcattcttctttccatagcttccacttataattattagatatggtaaatgaacatcaataccgcttttctaaatggcgatcttaatgaaattatttatatggaacaacaagaagggtatgtgttactaagggaagatcaaaaggtgtgcaagttgcttaaatctatttatggattgaagcaagcctctagatcttggaatatcacctataataagactattaaagagtatgacttcaaaaaaataaggacaaagtctttgtttacaaatacattaaaggtaatgtagtggtattcctagttctttatattgatgacattctacttattagaaataatgtagaaatgttatcagatgtaaagaagtggttggttgataaattccaaatcaaagatttggaaaaagcaagctatgttctcgggatcaaaatttatagagatagaaaactgagaacattagcattttctcaagcaacttatatcaataaggtgctcaaaggattttaattggagaattccaagaaaggatagttaccgtccacagacatagaattactctatgtaaagactcctcaagaggaagaggacatgagaaagtacccttatgcatcagtagttgagagcttgatgtatgaaatgttatgtacaagacctgacatatgctatgttgtagggattgttagttgttctcaatctaatccatgtttggaataatggatagttgtaaagcacattctcaagtatcttcgaagaatgagagatctcatgcttgtatattctggtggagagttaaatcctactggatatactgattctaattttcaatcagacaaagacaatcaaaagttgacatttggatcagtatttactctttgtggaggagctgtagtatggggaagcatcaagcaaaccagcattgcagattcaattttagaagtaaaatatataacagcttgcgaagtagctaaggaaacaatttggttgaagaaattctacactgatctggaagtagttctagaattagaaaaactactagttctctactgtgacaatagtggattagtgaccaactccaaggaaccaaggagccacaagagaagcaagaacattgagaggaagtactatcttataagaaatatagtagagagaggtgatgtgacggtcttgaagattgcgtcggaacataacctggtaaatcaattcacaaagacgctaccagcaaaatcttttatggatcatgtaactaataaatgattaagggagatgcccaatttcttttcgggcaagtggaagattgttagggtttatgtcctgaaa

SEQ ID NO: 32305 - DNA, 3144 bp, Cannabis sativa
  modified_base (1279)..(1279): a, c, t, g, unknown or other
acaagtttcgatcttatcttgtgggaacgaaggttattgtctacaccgaccattcagccatcaaatatctaattgccaagaaagatgcgaagccaagactcattcattgggtgttacttcttcaatagtttgatttagaaattcgagatagaaaagggacggagaacaaagtggctggccacttatctcggttggaaacaggtggtggaaaggaagccgaaattcaaattcaagaaactttttcggatgagcagctacttgttgtagctcaagcaaacactccatggtatgctgattttctaaattacttagtgagtggattgtagcctcctaatttgaataggcagcaactaaaaaaattctttcatgatgtaagattctactattggatgagcctttcttgtacagtagggccatttccaccatcttatggcaatctatacatcttgttggcggtggattatgtctccaaatgggttgatgcagtagcaagtcccactaatgactcaaaagtggtgatgaagttcctccaaaaaaaagttttcactcgctttcgaacaccacgggcattaataagcgatgaaggtactcattttgtgaataaaactcttgctaccttgttagctaaatacaatgtcaaacacaagattgctactgcctatcatcctcaaaccaacgagccacctgaactttctaactgagagatcaaggatgtacttgaaaagttgttaatcttaatcgcaaggattggtctcaaaggctagatgactctctttgggcttactgggcatcatataaaacacctttgggtatgtccccatatcgattggtatatgggaaggcatgtcacttgccggtagagttggaacacaaagcctattgggctataaagaagctgaatttaaatctccaagctactggagaggctcgaatgttgcaattaaatgagcttgaagagatgatgttttcctcctatgaaaatgccaagttgtacaaggagaaaagcgagagatggcatgacaagaggattcaacacaaggtatttgaagaaggtcagcaagttctgttattcaattcaagtctgaagttgtttcttggaaagttaaagtctcgttggtcgagaccattcaccattgccaaagtgtatcctttcggagctgtggatgtcaaggacgaacagtctagaagggtatttaaggtgaatgggcaattgaaggggaggttgatcgagcaaagacctccatcacattgaaagaggcttgaggaagaatgacttcgngttgccatggctttagtgaatcacatttgggcaacctgagagtggaggaacaagattatatctagttatgtatatgttatgtattaagtttggggtgtgccaccccttgttagagaaaaaaaaagaaaaataataataaataaataatatatatacttatatagtcgcatatatataattttcaattttctacaattactaatggttttgcaatggtgtggtgattttcattacaggtgcaaggcagaaaatggagctgttttaatatggtgaaaagcaggatttattgtctgaagcagcaggtcccaggagttatagcattggctcagcattttaaaacagggatgcataagagaatgaattgctgaagcaatgctgtaacaactggaagtagtgggttctaaaaaaaatactgggagtatgaaagggagagagatatgtgagtaaggtgtgcgctacagagcaacttgcacaaagttgtcccgggatatccagattttccaaatcagattcttgcgccttgacatccgattgatggtgaagagtctgactcttgagggagttttcttatttcattaatcaatttaatttagcgtaaatgtatgtgctagttctatttgtttagctgaaatgactttagttatatgtgttgttgttatatgtgtatactcgttttattagtttatttttttttttgttgttgtccttagttgtttgtgtagtaaatattgtatggtcagttgtgtgttagtcatgttacttagtaatttttgttctgttttgtgtagcttgtaactgagaagtatttttcatttgctttagtttggttaagtgtaccgctcgatgaagaaaaaaacttatcatccatttccaaccatttgtgccttgatgttgtgtgttgaatgtcaagtttaaatgctagtttgtctaaatgctagtttaggagaaattctttcaagtaggtgtacttgtgctatcccattatgctttgagtttttagaatgattaacaccttgagagagtttaagcttctagaattggttagtgtaccccttgagatgaaatcctagctagttttacaacttggaaatgatttaggccatctttggacgattgaacctttcaagctaacctaaaaaaatagtcactctatttgatctaatagcctaatttttcttaacacccatcaaagttaatagacccacacacacacataaatttcatccttcacaacccgaacctaatagctaaaatttatcaaggacaaatcaaatattatttgggagagggaagtgaggatacaattttacaaagtgtggtgaaataatttatattggagatgatgatgaggtgtgagttcggggtggtgagagttttgattcacatagcactaaagtccttcttttgctatatatatatagtatgtaagataaaaaaaaaacaacaaaaaatagagaagaaaataaaaaaagtatatatttatatatataacaaaagtaataaataaaatagagagaaaaaggaaagtttaaggctaagtttggggtgtaccacccctaatcaaagaaaaatgttgtttatctagttggtttgaaaaaatatatatatatattgtacatatagcaagagagttgaaattggattgagtgatcattgtgggttgataatgaaattttgggtgagtgtttgagaggaaaagaagagtccttgataaattaaggtaattaggttatgagcctaagaaatgtcatcttttaccaaaccaaaccctaaacctcacattacaagcctagtaaagttcttttgatctaggatgtaaagctaagctacattagtggagagggttgcactaattcaacttatgg

SEQ ID NO: 32306 - DNA, 1910 bp, Cannabis sativa
atgtgttggatagtaatgtggagaggggtaggcgtgcccccgtgagataagttgtttctctctcgccaaatactttcgaagataatggcagcccctccaagaaaagaatgtaaatcgagtccaatgggccggttagcatcgatagcaaaccattgtaaccaatcttcccaatgactcatacaagttgagtccgttcttatctgccacatacacccaaaccacacggccctcgcaaagttgcagtgccaaagtagatggatagaggattcagttccatccgcgcatagaaaacacttcgtgtctgctataggaaacagagaatttagtttctcctttgtgagaagacaattggccataaccttccaccatgtcatctttagtctttcatgaattttagatccccaaagaactctccacttgttgtcacaatcggccatagaatccatgttttttatcaccttgtaggctgatttaaccgagaactgactgttgctttcaggcagccacaaccatgagtcctcccgaggcgtactaggcagtgagatgttcagaatacgcttggcatcttcctctagaaaccacgtccgtatgagcggttcattccagccaccttgagaaataaagttgcaaaccatactcatgtccgcggaggcatctaacttgggtttgggttgaagcgtgccccccggaacccaaggatcaaaccaaatggaagtcgagtttccatcaccaattctgcgacattacccctttcccaacttgtctcggctctttagaatggctttccaaagaggtgagtctgagcttttaatctcaatatcaagaaagctttggttctttaagtatttagcctccatgaagtgacgccaaaggctttctttgtctgttattattttccatgcccacttcattaagaacgccttgtttatggcgtcgcttgatttgaagccaagccctccattaactttaggacgacaaagagtctcccaggctatcggatgtacctttctctgttgggcagtatcaccccaccagaaatccctaaggagtttgtcaatttggtatgtcgttgaggatggaaccacatctgaggaagcaacataattggccaaggaggatcctaccgttttgataagacacgctttacccgcgtaggagagaagcttggatttccaaccttgcaccctagccaacactctgtccacaatatatttagtatcctcagtacgcttaagggacctgaataaaggtatgcccaagtatgatgccttttttgacattttcttcatacccaacagctgagtaattgattgaaccgttcgcggggggacctttttggagaagaagaccgatgatttctccacgtttacagtctgtccggagtacttgcaatattcgttgaggctatccatgaactgactcgcttcccggagagtggcctaaccaaataaaatgatatcatccgcgaacagaaggtggctcacggccaggccttccttccccattttgaagcctttgatcaatcccctctccactttatcaacaattattttggataatacatccgctccaaggataaacagtgccggggagagcggatcgccttgtcgtaagccccgttgtggttggaattttcctgtgactgacccattaagaagcagcttaatctcttccaccataatacatttttttatccactgaatgaatctatttgggaagcctaatctgcatagaaccgtatcaatgaaatcccattccattttatcgtacgccttttccatatcgagcttgatcatcatgaaacctctctttcctttctttctattcattgagtggactatctctcgagcaatcatagagttctccgctatgtgtcttcctttaacaaaggccgcttggttgggagagat

SEQ ID NO: 32307 - DNA, 3907 bp, Cannabis sativa
  modified_base (1966)..(1970): a, c, t, g, unknown or other
aacgtgaaactaatcttcatattcacatcttagtagtacaaattttttgtgactagtggagaaaaatattccgagatgggtctaagccacatttcacaaaggggtaccactattagaaatgaattttttttactattttgattaaaatgattgttaatgtttaaaaactacttgttcactcaatgtgtccaatagaaaagtaatgcacaacagtcttagatatgtccttatgaaatttcacgattttttgagatgtgtagggtgacattttaaaagaacactaatgagttaagagtaaggaaaaaacttgttaaaatttaccctaaacagaagaacattttaaatgcttgaattatggggtcattttaaccaaatttaacgttaaaccaattttcgtattcacgtctatatagtataaatttcttgtgactagtggagaaaaatattctaagatgggtgcgagacacatgtcacaaagggtgagattgttagtgcttgaaaattactttttctctcaatgtgtccgatgggaaagtgatgcacaacattcttggctttgtacctattaaatttcatgattttttgagatatgtagggtgagattttaagagaacactaaagactataagagtacagaaaaacttgtttaaatttaccctggacagaagaatattttcaatttctgaattagggggccattttaacaaaatttaacgcgaaatcaatcttcatattcacgtcttagtagtacgaattcatcgtgactagtggaaaaaaatattctgagatggatctagtccacatttcacaaagaagtaacactatcagaaatgcgagatttttactattttaattaaaatgattgttagtgcttgaaaaatatttttttctctcaatgtgtccaatagaaaagtgatgcgcaagggtcttggcttcatccttttgaaatttcacaattttttgagatttgtagggtgagattttaagggaacactaccgagtgtaagagtaagaaaaaaaacctattaaaatttaccatgaacagaagaacattttcaattcttgaattatggggtcattttaaccaaatataatgtgaaaccaattttcatattcacatctttatagtacgaattcattgtgactagtggagaaaaatattttgagatgggcctgggccacatttcacaaaggggtaccactgtcagaaatgtgatatttttactattttgattaaaatgattgtcggtgattaaaaattacttttttcaatgtgtccaataaaaatgttatgcacaacgatcttggatttgttcttgtgaaatttcatgatttttcaagatgagtagggtgagattttaagagaacactaacgagtctaagagtaatgaaaaaacttgttaaaatttaccctacacagaagaacattttcaatttttaaattaaggggtcattttaaccaaatctaatgagaaaccaatcttaatattcatgtcgtagtcgtacgaattcaatttgactagtggaaaaatatattctgagatgggtttgggccacatttcacaaaaggggtaccactcaaaaatgtgaaattttttactatttcgattaaaatgatttttagtgcttgaaaactactttttatctcaacgtgtccaatagaaaagtgatgcataagggtcttggcttaatccctgagaaatttcatcatttttcaagatttgtagggtgagattttaagagaatactaacgagtgtaagagtaagaaaaaaacttgttaaaatttcccttgaaaaagaagaatattttcaatttctgaattacattttgttttaaccaaatttaacacaaaactaatcttcacattcacgtcttagtattataaattcaatgtgattagtggggaaacatatatcgaaatgggtccaggccacatttaacaaggggtacaactatcagaaatgnnnnnttttcactattttgataaaaatgatttttagtgtttgaaaattactttttctgttaatctgtcaaataagaaagtaatgcacaacgttcttgacttcgtccaaatgaagtttcaaaaattctctccagagcaaggtttaagacaaggagacccgctctccccatctttgttcatacttgcagcggaaaccttatcaaggctgctactctcaaaagaggaggctgggttgctaaaagggttcaaacttacgagaagaggttcggccatcactcatctcatgttcgcggacgacattatccttttcggacaagcctccataaaagaagctaaatcatttagcgactgcctaagctcttactgcgattggtcaggacaagcagtaaatggtctcaagtcgtccattttcttctccaaaggtgttagcccaagaaaagctcaagctatttcccaactgttgggcatgaaaagaatgaacaacaaagctacatatctcggcctacccctcttccgatcaatcaaaaaaactgaggatacgaaccacttagtggaaagggtcctcaaatgtgttcaaggatggaaggcgaagcttctttctagcactggtaagacatgcttaatcaaatccgtaggttcaacgttagcaaattacgtgacttcctcggacgttatccctgtgtcaatggccaacaaaattgatagagtccttagggacttttggtggggagatacggatgataagcgaacgctacacacggtatcttggacaaaactatgcacacctaaagtggctggaggtcttggattccgatcaaccattgctacgaacaaagcgtttctacagaaatgggcatggaaaattcttatggatgaaaacagtctgtgggggaaactaatgaaggaaagatacttacagaaccagagttttttggacttggaaatcaaaagccaagattcagatgatgtggaaggcaattctcagggagagatcatcactcacaaaaggcctctgtaaaaggattggagacggtagaaacacttccatatggttcgacccatgggtaccagggggatgtctccaaccagcccctcgactggatgccacaggttgtatcagcatggtaagcaccttcatccacaataatgaatgggatcatgccttagttagaaagtggtttaatgaagatgactccagaaggatactcaacatatcgcttccaaacaaccagaccaaagattcctggctttggttaccagaaccgagtggtaatttttctattaagtcagcctatagactgtccctgaatattgacacaagcaggcctgactatgctaaatggaaaactctttggggtgcacggatccacaaccgactcaagatgctctggtggaaaattttatctaacagtcttctcactagagtcagactgggtatggtatttaacatggactcggttctatgccccctctgtaacttggatgatgagaattcgattcatttactttggagctgtgcattcgcgagagcaatttggttcggctgtttgtggcaagtacggactgattctctaacgacttcaagctgggacgagtggttagcatggttctatcccacatataatccaactatacaatacaatccaacatataataataataataaagatgatcacactttgattttattaagcaaaggtgcatgcatgtacatgtacatccataaacacgtagagagctattatgcccaacgaaacacacaacaaaataaataagcaaatacaaattaataagaaataaaataatataaattatttcttattaacattttatttagtaattaataaagttgaaatgcaagaaatgcattccaattgttcgggatgattttaataagttgcggttggaacatgatgatcatcttcgtgatcattgctaatttc

SEQ ID NO: 32308 - DNA, 2664 bp, Cannabis sativa
  modified_base (1193)..(1202): a, c, t, g, unknown or other
  modified_base (1474)..(1479): a, c, t, g, unknown or other
ctgctggtttcttcttagacaccctaccccattctttgttggtaacttcaggcacgagtggaaaatcaatgtgacagcctttaagtcatacaaggtcgtccggcctagcgttacgttaaaagctgaaggaatatctaatactatgaactatgccatgatagtcatgcttgtcggagcttgtccaacagtgaggggtagagaaatttgtcctagacgtgcgactccttgactggagaaaccatagacaggcaggagacatggggttaggtccttgagctggagtcccatcttttcaaaagcagttttgaacaagatattggaagaggctccattatcaatcatggttctggacaccattttattggctatctggacttccacgaccagcgggttgttatgcagaaatctaattttgacagcatcttcatcgttgaaggttatggtaggccctcttgctcgtggaattttgggcttcctttcttctacagcgaggataagttcctcttactcgtgctgcactatttgggcatacctctcccgagctttgcccgaatctgtagcaatatgcgggcctccaacgatgacttgcagatgtccatctaccggtggaggtagtaaatcttggttattgtcatttctctgaccctgatcggtcttgacatacttcagcaggtgtgggttgtttttccttatcagaaattcaatttcccgcttcatgttgttcaatttgttactgtcgtggctgtagtctcagtggaatcgacaaaactttgtcatgtctctcttgctaacatctttcttcatgggcccaggcttcttatatggggccagggactgagttgccatgtaaacactttctatgtcttcagtaaagatggtgaatcgacaaaactttcccttcttcccattcccttgcatgttgttgttgttggaacgtttaccacttgagttttaattatttgggtaatgggggagttgggcggacgttccagtagaaggagctttcgacttgccaggcttttgctcaccttttgctcgttgaatggcttctttgagcttgatgaatccttcggcatggtcaagaaaatcactcaatgagtcttctggcccgtttttccttatatccttccaaagttcaacgaggacttcaatgccccccattatcgcgaacaactttccatcttcagttaccnnnnnnnnnntggtcgcctccgtcatgaatctgctgatgtatgcttggagaggttcacctggtctttgcttggcttcgaccaagtctcccagaagcaacgaaagttggcaagatgaggagaattgtgcatggaattgggaagagaaggctttccatgagttgaactttctaggggctaacttgaaatacaattgctgggcggcttgcgaaagggtaacaggaaaaattctgcaacacacatcccctcgtatcccttgtaaatccatttgcatctcgaaatannnnnngtgggagagaggatcttctcttcctgtgtacattttccatgttggcattttaaacttgtggggcgacactagaagattgatctcaagagagaaaggagttccacgtgctcggtccagctcgagatcattgtttctctatccattcatgccttggaacatatttttcagtttgtctagctgtgcctgtacggctgggctaacctgctcggcattctagtcgatttgaaacacatcactatctttctgagcaggaatttgagcacgggctccgagttgtacgatcgtcgtgacaatctgatcatctactcctctccttctgttcagatcactccttaggtcatgagtggtcctcaacctatcgaattttgaagagcctggctgtcttagcgattggttaatttgctgggttgacaggtggaatggcaccgttaacctggttggaactatcaggtatgacctctcctgatgaattactagacaaggtctgcccgcctaccgctaggcccacaagtggaactcgtgaccggggatttggcggctgaccatttgcagtctgggaagtattcatcgttggatcttcctccatctcgcccacggggatgacacttggaggttgctgacctatagtttggtaggcttttcgtatcagcaccgtaggttgccgactacgattttcaatttctgtatgatgagcccttaatgcttccatctctttgtctctccactcggtaaacatacgcctttgttcctcgaacgcgaggtttaacgctgcgcggagatcttcctgatcatgatgtagggtactggtatgacccttcacgagtccaagagcagcacagagattgtgtaactcagtatcatctccaatggtcatttaaagcgttggtaataggcaactatgttatgaatgccctggttgggtgctgaactgttattcccagtctcttgcacaccaggcgcaatttcatctatagaagttgttacatcgtgacccacgtttgccggctgttcgggattaacagctggcagaacccttgcgtttcttgggttctgcaatgcaggatccaccatctgtgcattggctagatcaacaggcccctacgagtctgcaccaccatcgtacatgtggttagattttgaatgaagagcgattcttgattccatctctcaatgaaagcaccaaaa

SEQ ID NO: 32309 - DNA, 1256 bp, Cannabis sativa
attgggttagatcacaaaataaggtccaagtcttggatttttcaaatgctagcatttcaagttccatacctaattggttttgggaaactttctctaatattttcttgttaaatatttctttcaatcaattaaaaggccagctacccaatccattaaaaatagctccatattttgttgatttgagctcaaaccagtttgaaggacctattcctcttctaaatgctgagatacaatatcttgatctatccaacaataaattttctggtcctattccaaaaaacattggtgattctctaccatacttgcaatttctatctctttctaccaaccggatagatggactaatcccaaattctattggcaacatccaatatctcaatgtccttgatctctcaagtaataacataataggaaaaataccccttagctttggaaaattgtcaagccttaatgcattggacctcagcaagaataatttgtctggcactattcctaaatcgtttggtcaactaagtgctcttcaaacattgcaccttggtgacaacaagctttcaggaaacatcccatcatcttttcagaatttgttaagtttggagacacttgatcttggtaacaacagattagcaggaaacataccacattggcttgggaaaagttggaagaatttgagaattctaaaattgagatccaatgcttttctgggagagcttccatcagtactgtcaaatttaagctcattacaagtattggaccttgctgataatggactaaatggaagtatccctgctagttttggatatttcagaggcatgattcacgtcgaaagggaaaagtttcttatatcctatggtatcgataatgggaccagaaaattttatgaagaaaacatggatttgattgtgagtggcagggaactaaagtacaccaagattctttcccttgttgtcaccttagacctttcttccaataatttgagtggagtacttccttcaaagttgacaaatttgttgggtttagtgaatttgaatttgtctaataatcatatcaacggctcagttcaagaggatatttcaaagttgtcgcaattgctatctcttgatctctcaaacaataggctatcaggtactattcctaatagcttgtcttcactctcattcctaggacgtctcaatttgtcaaacaatgacttctctggtaagattccttacaatggccacatgacaacctttgaagcttcctcttttgttggtaatcaa

SEQ ID NO: 32310 - DNA, 1644 bp, Cannabis sativa
  modified_base (704)..(705): a, c, t, g, unknown or other
caggtacacatacctaattattatatattactattgtgttctatgttatatacaaatggatcttggtatattattaattttctaacattcaatacacatttaatacatagaattatgatcctcaataaataaaaatagcgaattagaatttttgccctccgaactttgacatgtaccaaattatgctccctaaatttttgttgttgttaaaaattcttcctgaactattgagattgttggatttaaggacttttgtccaattttaataaggaaagtttaaactggatgaaagttcaggaggcatgatttagcatatgtcaaagtacaaggggcatgatttggttgatattaaaatccgagtagcatgatttagtacataaacaattacttaattagtaaaattgaatgaaattggacaaaagtccttaaattcgataatctcaatagttcatggggaatttttaaaggtcaaaaaatttcagggagtatgatttggtacatgtcaaagtttagggagcaaaaatcctaattagcctaaataaattctaacattctctacatccgtcaatcccaagatagacatctcagctctcaacgtccgaaaattttgtacttattaattatcattatttagcaccttagagcatctccaatggtagcatcctttaaggatgttaaaaatttacacatcatctaaaaatatnntattttattttatctctcttacacatcatttttagcacttttctaaaaacactccaatgtatagcactctttaaaatggttataattatgatctcacacattattattttatatataatagaacctctatctaagaatactctattaaaaaataacctctaatttgttataaaaaaatcaagtcctaatttaggccagttataaataagaataacctctaaattgtaattagttatacattttttgagtcccgtattaacaaaatatacctctatataagaataattacattttaataaaaatatatacatatattttgtaaatgtatttatgtaaaattaaaatttttattttaaattgtaatacatatataaatattatatttgctctaaaagaattttattatgatatagtattaatgattgtttatcgttattattgttacattgatattttttgatattttaaatttttttctagtgtaattctatctagttataatctctcaattagaatataatttgcttagtctcaagtgtatttttaaatagaggttctaccatataacttaatttttaattacaataacttttagcttcaattttttattaaaaaaaatgaatagcatcaatgccacaacatagtatccatgtaaatttctacaataacatcattttctctccaatggtatagcatctcaatattttaccacataatatgtccacctcaccaaacattctttaaaattttaccattagaaatgctcttaaaaaagctactctaatctaaatttatataacaatataataaaatttttataataaaaccatgaaaaaaattctatattattacgtaacaatagaagatctttattgagtgaatatatagtagggctatttacaaaaatatggaaaaataaagataagttttgatatatat

SEQ ID NO: 32311 - DNA, 2363 bp, Cannabis sativa
tatggatgacatgcttgtcaagtccaaaaaggctgggggcatgtggaggacctagacgaatgcttcaaaatccttcgtagctacaacatgaagctaactccctcaaatgttcttttggagtaggctttggaaaattccttggcttcataatcaacaccaggggaatagaggcaaacccagacaagatccaaactcttttggacatgaagtcgcccacaatcgtcaagcaaatataaagccaaacaagacacattactgcactaagcagatttgtgtccaagtctacagacttatgtgtacccttcttcaacattctcagagacaacgaaaaatttaagtggacaaaggaatgtgaaattgcattctaggagctaaagaaacaattggctcaccacctatgttgcctaaatccctagacaatgaagagctaggcgtgtacctagcagtaacaaaagctgctatgagtgttatcctcacaagagaagaaggcagtgtacaacaccctgtatactacatcagtaggagactaattgacactgaaagtcagtacccactcatggagaagctgacctacatcttgctcttgacttcaagaatctaaggtcatacttccaggtacaccccataaaggtgtacaccgatcaaccgttgcggcgggctttacagaaacttgaagcatcaggctgaccattcaagtgaaccactaagactcggccaatataaggcggcttgtcaaccaagcatgaccagtaaaggccaagctctcaccagcttcatggataatcataaaagcagatctccccaaatctctccaagttcaggagaaaagcagtagccagagaagaagcaagagcaggagcaaaataactaaacccaagaggtgcattgaccacctgcccgatccaggcatggcttccagggcacctggcgcaatggatgcacgaggaaacaatgtcagtttcaaagcttctaaacacgaggctgaacatgaagctctaaatgctggtctcaggctagcgcacaaagtgcaggctaaccacctagacatacaccacgactcttaactagtcgtaggttatgtcataggtgaatatacaactcaatatgagaagatgatggcctacttgagctatcaagtcagctcaaaggttgtactaaaaggcaagtcctcaaagacgacaaatagccgactcactcgctcgaatagctagctgtgccttgataaccaaggcaaacttaatacctgctcagttcttcaaagaactaagcctccctatttcaaaagaaatagacatgttggacaaccaacatggataaacctacagtaacatacctccaaacaaaaaccttgccaaaaagtagggattagggggatggctgcaggatgtccaattctgaacagcataacacacagacgtggtatcccaacaacacctctaaggagcgttaccaagaaagaggttgaatagttattggcaagagtgcacaaaggctctacggcaatcatgccggggggcaaatccaaccgagtgtagatgagatcaaactacaacatcagtcgggcctctgaaatactggccgaccttggctttaacaagctggccgaccatagaatcatcaacctgaatgaccaccacctccacaagttggctggccatagagttaacaacttggccagccatatcctcctctaaatggccaggcaatgcttcaacgtggctggccacctggtctgtaccatggctagcccaatccaccaacaatctgctctcatacttctggtctacagtaaccaagaggtaaaaccccatcttgctagcaggatcccttgacgaaagggaaagaagaagagaccaagacaactcaaaataatatgtctgcccacaaagagttaccatgtccttcaacaaacagatcgaggaaagagattcttcgtaagaggcttgatccctgaagaatatctcttgacaacaaagatcctacagcaagcatgttcagactaaactgaaaaggtctacaccatgttacaacgtaacaatgaaggtgcatacaagtctggcgagtacaacgagaacttagagttggtacttctacccaaacattgaaataggaaacatctcggtaagtactctctctagccaacttgtcaattggttcctctaacgtttcaccgtgcaaggacctgtaaaagatctagtatccattgcttttcagcatggcctcccatcactcttcagtgatggtcgttgcgcagtaagccgtgcagggatagccactacgtgatttcaaaagtggacactaagctgtaagcttttgttacacgtaagactaactgtgtctaaaccacttgctaacaaagataa

SEQ ID NO: 32312 - DNA, 4809 bp, Cannabis sativa
taaagaaagtttaatttcatatcgacccttgccatatataatttctattcaatacaacacattcacttaaatgccatactacatcagtaatttgaattgagattgtttgcactagcaactattgattaaagattctataattttaatatactgctaactgttttattaatagctaaatggtcttaattattaatatttaatattaataatttaataacattcaaacatatataaatgttttactcttattaataaatagagatatttttacatgcttctcaaggcatagattctaacaattaaatgggggctagcttgttatcagtttggtttaattgaggttgatccaattccaactgatattatttctaatgacctctaggttttcttttcgttttaatcaaaatacattttttctcaaaaaggagttgtggtgattaagtgataggaacctcctagacatggttgtttttgtgttaatttaattgtgatgttagtatatctagctagggagacttttgtgggctgggccaggtgattgcagctgaggtcaagcaagctgagtgctttcagaggtattcttcttttaagcatactaatagaagttgtaacaagtaagctcatttttttcttttcaaaaatataatagtaatcaaattcggttgggagtatttcttacttatgtatagtgttgtaaatacagactgagctttttaatacggcacgagcacgaagaaaaaacaaattaaaattttgtacttaaaaaacaaattgaaatgtcgtttcttgaagaatgcgtcgttaagttaggcggtaaaggtgaaggtttaaccaaatttgaacaattaattatgaaaaaaagaaggatataaactaaaattccccaacatataaggataccctaaaaaaagagattagcagtcttgttactgaaaattttatcattacgaccgtggaattgataaaaacaccaggggtattttggtaacttcaggggcaaaattaggcaactatctcggccataacggttgtcaatcaaatccaaatcagcccattgtctcccttaaacaccaatccaacggtagaaactcaaacaattatttaaaaatttcaatccaacggccccacaaaactagccgttacacgcagagcgtacagacctcaacgtcttctttctcatttcttctcatcctttgcaccatttcattcattcattcatttgtgcagttctaactaaaataaagaaaaaaaactgagcgattcaccaaaaacccacgaaaccctaatcgtttccggcgaagtgtctcctttcgcgactcagattcccgatggatttgatcggcaagaacgccggtgcggtgactcctgtaaaagattcacatggttctcgatcaaagaacccagaaattttgagatgttcggagaatctgaaccctaatgtttcccctggtcctaaaacgacgaactcgccagtgatcaaatcggccaagtctcagaaatcggtttcgaaaaatccgaaccagaatccggttgctttctcgccgcggaataagatccgggaaagaaagttcgtagtggcgaagaagaagaactctaagaaagagaacgtggctccgaaagttgcttgcaagtgtaaagagaaggtcgttggtggtaatcctaagaagtgtctttgtgtcgcttatgagaatctccgggcttcgcaagaggagtttttcaagagtcgtgattccgttagtggggaagtatcggaatctaacaattctaaagctattgatagagctgagagtgaactggaagaggaaatagctaagggtttgatgattcaagaccttcacgtcgacgatgggtatcaggggcaggcaggagatattaatgattccaataatggcgaatctggtgaggttgattcgcctaatcaattaggttgctcgacagtgaagagaaggcgggaaaagttgttggaagaagcaaggaacagtgcgcctgaatgtggaaaagtgatgcatttggttcatgcttttgagaaacttctttccataccaaagtctaaggagtctaatgatcagaagactgatcaggaacaggaattagtagagaccaaaaagccaatgatgtgggctttacctggattacctcctcctaaagttcctgaaatgcaattttcatcttcatcgttttgtccatccgagttgtttttgacatctgaaaatcttggtttggatccaaaagcttcggtttcgtcttcttgggatggcagtcaaggaaggttggaatcccaatttatgatttctttttcaataagtattatatctgatatgtttagaatttgctcattttgagtttctgatttggtttatttgctgttttgcacctattgtagtgtttcaagcaggaattcctctaatggtgggcgaaggagtcgaagaaatgtaagactttttttttactgttttgagattgttaaggaaatcgtatatgttttacaaagtgatgggctcattttattcgcgttttaatctcagagcttagaatcgattagcacaattggtggtagtagatggaaaaagaagaagcttaaagccacttctcagaaaccattcaagctaagaacagaggtaaatgccaacattactagcattgaaaatgtttataactttctgagtaatgcctgcgtgtgtctgagtgtgaatgattgtgtttcactgtatatatgtatgtatgtaactgtgtgtgagtgataataggtgagtgcgggtgtgtgtgtgtttgtgattaagtttgttcacggaatacaaacattactagcattgaaattgaatataacttttggagaattctcattgcagcaaaggggaagaatgaaggaagaggaattcgttaagaaattgcaggagataatagtagaagaagagaagcagcggataccagttgctcagggtcttccatggactacagatgaaccagaggtgagcttgacaatctcttgtttctattatagtctattgcttctcaattcaatatagaatcctttggctgagtttcctaatatggtcatttcagtgtcttgtaaaacctccagtgaaagagagaacaaagcctgtggatctgaagcttcacagtgatgttcgagcagtagagcgagctgagtttgataatcaggtgctcttttatcatgctgaatcttccttccttcccccttatctctatgatccttactatgcaaagaaaagaagatactttttatgcagtcatgaaatggtatcatttagcttactatgtgaaagtggtgtgtgtgaatcatgaatgaacctgcttatactgtgcactcagcttactatgtcatgaaaagaagtaaagtttatggtgcagtgacgaaacggtatcatttagcttactaagcatggagaagaagaaaaatttatagagcagtgatgaattgatataatttatttagcttactatgttatgaaaagaagtaaagtttatggtgcagtgatgaaatggtatcatttagtttactatgtctatgtgaagtggtgtgtgagtcatcatgaatgaacctgccttaactgggcactcagctttgtaacataagtaattattatatgttatggaagtttgatgtgtatacttacattatacaccttttttcacaaccaggtagcagagaaaatgaccctgatagagctatataagatggaaagagagagacaacaaagggtaataataatttttagctgatacacatacacacagcctggtacttttcaatgagtttttattaatgttgctttgtttcttctttcctttatcttactaaagatggcagaagaggaagaagttagaagactgagaaaggaactcgttccaaaagcccagcccatgccttattttgatagacctttcatcccaagaaggtaaacaaaaagtcagtttcctttaactattgatgatagtatttagtgtgttctgagatttcggttttgttggataggtcgatgaagaatccaacaattccaaaagaacccagatttcatattccccaacagaaaaagatcaagtgctgcctgtcctggaatgatgccagctccttcacattccaacaacattgacaatagcttgaagaagagctttttatagatatttccctcccccaattctcttctgttattcaatcaattgttatgatgtgagattttttatagtaataaaaagtctaagaaagaagaatggagctacctgccaatatagctcattcattgtccaattgctttgtttttttttttccctttgtggtttataatgctgctcccttctcagtgttttgccacaccagtggcattattatgtgtataatattttgttctagtagagagatggggttcagaagatgatccaaaattcaatttaaaattattaatttttacagtaattattatatcttttttttttttttaaataaagcgttatatagataggaaaaattagacctcatggtcattacaaaggatagaaacagatattaatgaaggttccacaaaacctgtaatgttccgatcgaaagtccatctagccacattatgggcagcaaaatgacaacaccgcgaaacaaacaaaaaattacacgataaaaagattttagggagttgattacaaaaaagagacattattattacacgataaaaaaagacattataaaaagttccgcgaaacagtaattattatatcaatgtagttttaaaatggatacaaaatttaatttaaaagggaaatttaattttctatacttaaaaaacttaaaaaaaa

SEQ ID NO: 32313 - DNA, 2559 bp, Cannabis sativa
aattatttacgtggaccaataaaattgtgtcacgtgtatattgtgtctacgtggacaagccaaccttgcatttaacagctaaatttggaggaaagggtaaattgctaacagaatagtggtttgagggatttacccacagaaatttgggttgtggaggtttaatgaaaccaaaacgaaaatattaggggttttaccaccctttaatctttttttatttacataatttggcatcttttgtgtcatggggcgttgaaatttttgcatccctctatattgcatcatcaacctcttaattttggccatttggagaacatataaatttatatgagattaatatattacttaaagacttgttgttttgttttcaaactcttaaaacttccttgtccttgaactttgaaaatagtttattacataatgttcttacttcttagacttttagtttgaacacattaaaaacctaaagagacactttatatgttcttaattgttttgattatttttttttttcataataccatcggtcaatctcttttgtttagcatccgtaatttccttttttctttttgataatgagcttccgtatttttttaaagcctaatatgagaaagctaaaagttacacatagtgtctagtaaccttttatgtgtcaatattgttatgggtctcgggtttcatataatttaatgtaataatttttaaagaatatcgctagccaatcacaaacgacatattaaagagtgctaagtccactagtacccaataacaatgcttgcctaatttccatttctttcaaatttcaatttatattaccatcatttcatttgagttgcttatttctacaaaaataaataaatataaaaataaaaaatgcctataaatagcgattaattattaaaaattggaccaagtctacttaatttaaaacacgcaatgccttgtgtcttattaattttaatattatatattgctaagtttagaatcacaaaatcccttacccttctgaagagaaaataagtcaatcttattaatattattatttttttttacgtgttaattaatattattatttattaattttgaataatgaaatcgtttgcttacataaacaaaatcatatattcaagttcaacaaacaaatattataaacatctcaatacataattctttttttttttaataatcaaggactttttcagcatgtacaaaacaatttttttttttgtacatttttataaaaatcaacataacgacctcataataatccatatatcaatccatatagaatttacagtagccctttataaaatatgtatatatatgattgaaaaaaaaaaaaaacagcatgattacgccatcaaaaatatacttggataaatttctcaaagccaatattatctcttcacttttaaaaataataaaaataaaacacacacatgtaatgtactatgaataccaccaatcgaaactctataagctaaaattattttatctacacacacattgaaagctctttagcctctttggcaagatatccttcgccctaagaaatttcttcctttacaatcttacccttacattccgaggattttgacggcgatgatgtgaatgatttcttcatttgcatccaacgtggaattaagaaaagccatgtggaagtaaataaaatagcacaaattctaccccaaaagaccagcacgaatagaattagaagcatcaaaaccaaaccacaatcactacttttgtaacctttgccgtattcatcatcatcatcactgaccaatttctttgactttgactcatcaaacggcgtcgtttgggtgatcaaagatgatgaacatgaagaacaaagtgtaggattagtattacaagtattattactaatactattagcaatggttaaagcagatgaagatgtagccaaagccgatgcacttctagataaaattctttgtccaaaatcaaaaccatcattattagtcgatactcgataattaaatcttgcactttcacttattaactttgaagatgcctttttatctaatttccctttattgctcttcttattagcctgccaatataaaattaatacacaataaaaagttaaaaaacactattacttttttattttaattcaaaatacaaacaacaacccattatttatataatagatcataatgcacttataattagttctcatacaaaataaaaactggctttaatttagactagcagcaaattaatataaaccatcaaataataatttttatttctttattaacaaagtaatgtaccaagcaaaaaaattaccgtggatacttcgaacaaattaacagctttccaagcactggaaaatctacggctaccaactttcttcattcccctgccattttcaccggcttctttctcatcggccgccggcaaaacaacgtgactacttcccttctttctcatagcgatgtacgccacaaccggttcaacccgacccgaccgatccgagtcaacctcccccggtctaaaacacatgagcagattactacccttcttcgacgatgactt

SEQ ID NO: 32314 - DNA, 1410 bp, Cannabis sativa
tctttcaattttctcataaaataagtccaagaattatggttttcactatcaactacagcgaaagctatcaaaaaaatatggctgcctgcatccagtaccagtgcacacaacattttcccaccatacctagtcttcaagaaagacccatcaacgcatacaacaggtcgaaaaaacctaaacccacagacacaaggacctagagagaagaaacaacacttgaagcgaccatcctctacaagaaaatccatgatggtacctagatttcttaactttagcatgtgcaagtacacaggtaattttgagtatgaatcttcaggtgtaccccgaactaggtgtagtgccttctctctgcacctccaagcctttttcataactaactcatttggatggatctcgtaatccttgtgcatatctttccttgtatcagaggccaaatgatccaagccgtcagttgcgaacttatcattaattagatggacaactatcaaaggtgatgcttgacagttatctttttctcgaatatcaagggaacatgtatgtacattttgaaatgtagtcacctcaaacatgttagaaagtacgttcttattcgctcttaatctccacccacaatatgtatccttgcatgtaacgtaccaagcagcagtaccggactacctaacgaagtagtcaaaccctttcttcatagcatacaagccaacaaccatctttaaatgctctatgtctaaaaaactttcctagatgtagctccccgcctggtgtgccacccatagatgtataatgactatgatcctcgatgtcttcttttgtaaacatcttctcgttgaatttaccttaacttgtcgaagaagaaaatggatcgctaaatctagtctcattggtccctctagcaacactaggaccactagcattataggtccctctagcattactggttctgtctggacaactactactagtaccaagtgtttgacgattttctctacggggcattctcatctgtttcagttgcttgggttgtatttgttatgatagtggagtcaagttcaaagctacagcagcaaggacctctgtatcttggtcgtctcttacgtcatcattgccctcaacatagcattagggtttgggccatcacagaaaccatcaataaagggcatttgtgctacaatgtcaatactcggcataatagtgtttaattcaggtaacacattggcaatcaacacctctaaatttgtttctagaacaaaactcccaacttcgctagtgtcctcaacagtacttggtgtgggactaggatcaatacaaacattcttctttaacaaagtcacaaacaaaggagaaaatttatttgacttcttcgcaagcctagacaaaaatgatcttacatgcttatcatttccaataacttta

SEQ ID NO: 32315 - DNA, 2032 bp, Cannabis sativa
gaaatggcggcattcttagagccagccgacttagctcgggaataagcataagccatcttcagtactcctcccatcaccaactccagagaaaggtcactgtctaccccagccagctgctcgttcacctcagggaccaactgagtcacatagtgagtgagcatttccttgcctcttttggtctctgggtgcagtaccggaggtggagctggggctctgatcagctcagatctgcccctcgtctactttggcctatccgagctacctccttgagaatccttggacttagtcatttttgggttaggaggatctacaataatttgttccctcgaagagatcaatgactgctttagctggtgccttctctctggacggggtagtctcaccatccttggacttcttagccagaggagataagcccgagcttcctcccactctcttcttcgtagcctcaagcattttctgagacatgtctgcatgaaatgaaagtcacatggttagaaaaaagcatgagaaatatgaaagcataataattaagaaggttaaaagcaagatggagtatcctacactttagcaggagcagctgcctaaacaagacctgatggggcatcgtcatacgacgagtcttcacgctcttccaggacagctttcccctttcctaccatagggttggatgaccgagcaggtagactgggctctctgatctggattgaatgttcaatgggcctataaccggccagatgtttcttcttgcttttgagcggtctttcctgctcttcctcagcctcatcctcctactcagaatattcttgagcatgttgtttggccccagctcctcccttcaacttagcctcacgcttaagttgaataagctccttctcctgctcagaatgctcttgagcatacttcttggctctcgcacctcccttcaacttagcctcacgcttcagttgagggagctccttctcttactcagctccctcagcccggctagcactggacttcctcttcttctccttcataggctgaggtacgaaatctgttggataaagtttgtactctacaaagttggcctcggaggtcaacagggtgatattctgagcatcatccgatagttgaacaagcctttgagctctgtccctaagagctagtgtgaggggtggatggcaatatatagggatctgctgaaaccgagtataagtggtgcccatgccttccaccatgtaatactcgtcaacaaaattcccaattttgctcacgaccttgtttgtggtgtcggtcaagcacttgaagtctgactgagagaagtagaagtaccctgacctgccttgtttgggggtagacttcaggtcaaaaaaccaactaacctcgtgcggagaaggcacgcccacttctaggtggcgtagaggacgaattgggcagacagatacttaatgccctttggagtaaactgggtcggacaaaggcggaagtaatctgccaccttcctgaagtacgggtgcaaaggcagcattgcccctcttttggtgtgagaacccaatcaggcacacatccctttcttggaaattgaagcttggtgatttgaggcaaggacataacattcaagcccgcccagatggccagacttgtccaaatccctcaaacgtgcctcagtgaccttggacggagggctcacccatctggcacctaaggcatcttacctcttaagaggaactgtaggggtaagctcctcagtgacatagtccactcctttgactaggacttcgctgtccgcatacactggctatccggcctcgttgtatcctccaaaatttggaggttcagcctcctcctctttctcagcctcagaagggctaccaggacggagatcgccctgttcctcaatttgctggacttcagcgtccccctcatgatccccctctttctggataggtgaatcctgttcggtgttgggtaatgcggcaagctgggccacgtgaggatcggatgcgttgaccttacgcattgtttgctttgttcgagccatcatcttatg

SEQ ID NO: 32316 - DNA, 1553 bp, Cannabis sativa
tgtaaacccatttgttgcctatgaatctttgtccagcaggtcttttaatcacaatccatgtcttgtttttcttcaaagagtccatttcctgatccatagcattatcccactcctttttatcttcagattgcatgtcttcctcataggaaccaggttcttcaccttcaatgccatctatgctaagagcaaagtgcacaacatctgcatagccaaacctttcagtgggctttactactcttctttttttgtctcttactaacagataatcaggagcttctggttcatgatctgacacctcttcctgaccttcttcatgacctggttcttctgttgcaatctcatttccttctgtagtctcctgatctggttccatctccaccttaaactgagttctctcttcgctattctttgttgtagcatttccagttcttactgcagcattcccatcttgtatattgatcaagtctttgtacatggttttctcatcaaacaccacatctctactgataaaaattttctggtgattaccatcctcgatgctccacactttataccccttcaccccctctagatacccaagaaaaatgcatttccttgctctgggttcaagctttccttgtttgatgtgagcatataccaaacaaccaaagatccttagatggtcatagctaggagtgtcccctgtccagacttctattggagttttaaactcaatggctgaggaagggcttctgttgattaaatagcatgctgttacagcagcttctgcccaaaatttcttaggcaaacctgcatatatcagcatacatctaaccctttcaaggatcgttctgttcattctctcagcaagcccattttgctgacggtttctaggaacagtaagatgccttccaatgccattgtccttgcagaattgattgaactgctctttacagaactccaatccattgtctgtccttagcttcttgatttttctctcagtttgagtttccaacaaaaccttcaattctttaaacttgttaagcgattcatatttatttcttaagataaacaaccatacatgtcttgaaaaatcatcaatgaaagtcagaaaataccttgctcctcctctggatagagttcttgatggcccccaaagatctgagtgaaggtaatccacaatgtttctggtcttatgctttccaactccaaacttggctttggtagcctttcccataatgcattgctcacacagatctagctccttgatctgttctttaccaaataccactctcttactcaaaactttcaggtcaccatgactgatatgtccaagcctcctgtgccatttgagagtggcactatcagaaattctcataactgaattggcttgatccctcttgatacatccttgcagtacatatataccattgtcaatggtagcttccataagcttttctgacccttttatcatctttaatagccccttttcaatctttactttgaacccttcatgatcaagcattgcaacagaaataagattcctcttaagatcaggaacatgtcttacttgc

SEQ ID NO: 32317 - DNA, 1435 bp, Cannabis sativa
  modified_base (805)..(807): a, c, t, g, unknown or other
  modified_base (852)..(854): a, c, t, g, unknown or other
ccgcaaattactctttaaaaaaattattttgggccttatgaacaaatttttttaaaaaaaacaaaaaaaaatcctataaaggaaagattaggaggccttttggggcgagaagtcttggagataagagaaaattacattgtatacccactttacttaatttgttttaatttttactttaatttttatatttttttagatatacccacttttctagatggtgtccccattagaccccttaggttatgtaaattatatgctaaacttaagtaaagagtgagagtatattaagcaatctactcaaaaaagtggatatattttaataaaaaaaatataagggtacttttgattaatgaatacaaaaaaataagtatttttcaacttattcccttagataaaaacttcaatttaccctaaaggtgattttgaaatcactaagttatgtctatgaacatagaaatgatacaacttaatttaaagaatatatagagatgatacaataaaaaattaatgtattaaagttatattgattttttatatacgtggaattaaatttaaaagaaaatgtatattcattataaataaagatatatttatgttatgatatcatgttacttaataggctcccccaatttctatggccaacctcatacattaaatagttaaaaaaacaaaacaaaaaaaaaatatatttttttataattgggtgtaaatatatagaatgctatgtacattataaattctattaaaataaaataatcttaaaaatgaaatatcaataaaaaaatccaataagtcaatcatgtgnnnaaaatccaataagtcaatcatgtgtttttattattattattattnnnattattattattattattgaatagtatatgaatgaactgtcttatctaaataataatattagtgtttttttttttttttttgtaaatgaataatattatattctaaagtgagaaaattgcactagaagtgggagaatatgacaattccattgaaataataatttttaaaaaatgtataattatttaagttaatttataagtgtcaaaagccttttcaataataataaaataaatatatatttatttgatttaatttataagtgtgaaaagccttttcaataataataattcacctaaaacaatgttaggtaaaagctctttatctaagcttactaccaaacaaattatatttggcatttgctatgataagacatctaattttagtcttatactaatattttattattatttggattaataaaaaaattaaattttgaagaaaaaaaattataattttcataaatgaaataaagatgtgtgagactcttatttccaagttttcatttttctattttgcacgatttctttatatatttatatataaaattcattcataacacactcatgaatagaatagaata

SEQ ID NO: 32318 - DNA, 2072 bp, Cannabis sativa
tactgctaaagtttcttgtcttggaactatacatcttttgcctaattaacctgtttcttcaccatgttctatatgtaccaaactttcattgcaacttaatgtctgtaagtgctttgactgacacaggtgcttattcctttaatttcaaaactcgtcattgtattattcaggacgatttgaagaaacgggtgattgggatgggtgaaaagattgggagattgtattacttaaagtctactacaccagcctttaaatctaagcagcctgttacttctttgtattttttgattccaaaatttctagtgatactatatggcattatagattcgggcacattcttcttgtattaaatcacatcctttgaataaaaatttgcattttcatgccaatacttccttggactttcattgttcaatttgtcattatgctaaacaaaaaaggctaccttttgatacatatagacatatggggaccttttaataccctcaccttagatggttgcaagtatttcatcacaattgttgatgactactctagatttacttgggttaggttcatcaaaaccaaagctgaagctcaaattgtcattcctcagttttttcagctcattaaaacccaatttggcatgcaaattaaaggtgttaggtctgataatgccaaggagcttcaattccctactctgtttaactctcttggtgttgtgcactatcattcatgtgtgcaaaggcctgaacaaaattctgtagtggagaggaaacaccaacacttattaaatgtggctagagccttgttatttcagtctcacattcctttggaatactgggacacttgcatcactactgccacttacctattaacagaactcctactccaattcttcaaaacaaaacaccttttgaaaggcttcgtaacaaaccacctgttcatgaccatctaagagcatttgggtgtttagcttatgcatctaccttacctcatgctagatccaaattcacacctagggctgcatcatgtgttctcctgggttaccgtactgggatgaaagcatacaggttactcgatttgaacacaaacaaggtcttttattccagggatgtagagtttcatgaaactattttcccatttgttgctgctgcaacattaccacctcagtatgaacattttttctcttatcctacaccaccctctgctgttcttactgagccttccccagatacttctctcagcaaaaatgctgaatctattccgcatttatccaacagtagacatgttaatcctgttaatccttctcctaattctttgcatactcgacctgttagaaaactcagtaagccttcttacttaaacgattatcattgctttttgtcttctaacagtgtctctattgcttctcgggactcaattccagctactgcacattctataaaccaggtgcttgattactccaagttgtccccacgatttcgtgctttggttctggctatttctagtctcactgaacctaccagttttgaacaagcacatggaatccctgagtgggatcatgctatgttcactgaaatcattgctcttgaagaaaatgaaacttggataattgttacactgcctcctggacagcatgttattggttgtaggtgggtttacaaaatcaaattcaatgcagatgggtccattgagaggtttaaagctcgattggtggctaaggggtacaaccaacaagctggaattgttttttcagagacctttgctcctgtgactaagcttgtaactgtcaagcttgttcttgcccttgctagaaatatatgggtggcatttacatcaacttgatgtgaacaatgcatttcttcatggagatctccatgaagatgtgtatatgactctacctcctgggtatagtcctaagggggagactacactaccacctaatgctgtttgtaaactaaagaaatctctctatggactgagacaagcctccagacaatggttcgaaaaattctccactgctctagttgctgaaggctttagtcactctgcaacagaccactctatgttcatgaagttcacatctacaa

SEQ ID NO: 32319 - DNA, 2838 bp, Cannabis sativa
gacaccatgaaaaaatggctagaataagctaaagggaattggctggaggaactacctgaggtattgtggtcgtaccaaacaacggaaagaacagtaactgagcaaacaccattcgctatggcttatggttatgaagcgatgctgcccgtagagttagaacctccgtcccacaggagagtgacctataatcaagaagctaatcgtgccctcctggcagaatcacttgatcaaattgaagaaaaaagagcctcagcagacctaaagctagtagctcatcagcaaaagctggcttggtactttaacaagcaagtgagggaaaggaaattctttgtgggagatatggtcctaagaagagtgttcataaacacaaaacacaatgcaattgacattctgaaacctaactgggaattaccacatcaagtaattgaagtcatggattttggagcatacaaattgggttggtatgacaaaaacatggaacttgttctaatagcaaggtattagaatgaatgacatttgagaaaatactaccagtaagtgtacaaggtatgatgacctcattaaagtacaagatgctcaaatatctactcttaagtagatggccttcagagccgacctcgctcaaaggtttggaaaaaacaactagcacttaggtcagatgaccatctctaaagtacaattgttttatgttttaattagctaaagatcagttagatcacgtaatagcttttataattcagtaaatgtaagttactacgataataaaatcattcagaccaataaatgaataaagatattaattatcattctaattgtgtcaattatttttcttactatagcaagtcatgaatttaccattaaaaatgtgtacaaagggtctgctcgaatcataaagccaaacagaaaaaaatcaatcttgtgaattacaggtgaccaagagtcataagttttctcggtcacttgaggggaactatacaagtacaaagcataggtaaataacaagctcaagaaaacaaacacaatagtttgcatgtgcaattactgaaacttaagggaaaatattcatttcaaaagataacaaaacatgataaacccgagattaaaggctgcccggtcagctagtcatcttaaaacaaaatgaagtattaccaagtttaaaggctacttggttagccacattgtattgaaaaaaggcccatgggcggaaggaactgaaataaaaaaaaaaaaagagaagatagaaaaacttcacatggctagagtccttggctctttgtacgggtcagctttgttctcagattcttctgtggctttttgggcttcacaaaaactaagatatgcctccttgttctcattgaggtaatcaaagtttgcatctgtgttcgccttccaaaattcataaaagacatctagggcggtcgtctccaagttatccacctccttctaaagtacatcccgctctgccttctcagagttgagactctcttccatatcttgcttcttcttggttaagttagcgagaagagtcctgagaccttccctctcttatttcaaagaattaagatccttggtcagagcctcaatgtttgctttaagctgaacagtggacaacatatccttgatctcctgctacaattccacaactcgcttgttggcgggcaaaagttgtttattcacctcaccagcttcacactcgtctccttgacctccttcttggcatcctccacctccctcttcaagttggtggtggttgttataatctttaaggctgtagactttgctcggagtaggtgtaggtcatcttcaagttgagctgcacaaagaaaagttaaaatgtgcacaggtaaaagagctttatgacttagacacttagttataacttaatgacttagagttttgatggttgagttaaggctctttatatacgagaacttaaaccctaattaataaataaaataagtagatatttacatatttaattgataaaatacaagcctaaaatgccccttaaacataggtattttctatctactttattgggctattaaggcccaattcgctatctagcttccagtccacgttaaggttatgcacctaaatcctgccaggtctaatcctggctggccatacacttgcacgatgcaggatggctggccttatgctatctagaagcggcctaacccccttaaggtggttattctatcactcgtcgacccatttgagtgttgggacccccgttggtaagggtggtaacttgatctctttcttggtgatttgtacagtcatgtggcactgatattgtccacgtaggcacggcacgtcaggtgggaaaaaattgggatagcacccccaagtgagctgggaagtttggacgtctctaacttcttggtcaattgtttaaaacatagcttgtggcttaaaaaacgtaaagcgtaaatttaaatataaactacttctattttcatttcattacacccaaaaatgtacataaagaatgtcattacataaacatttacataaaacttcatggatttcattaaggcttagtaacttctgcctattggtagtaccgatgtaagtggtctaaattccaggcgtgtgggaccctcgatccatccattcttttaagcaaaaaagttctctggcctactttttcaagtacttcataagggccttcttaatttgggccaagtatacccgctctcggttcttacaaagttgggaatgatctccttaatacgaggtctccaacatcatatgtacaacttttcactctataatggaagtgatacgaaccacaccaatagttgtgatgaaacccgataccaattatggcag

SEQ ID NO: 32320 - DNA, 3295 bp, Cannabis sativa
ataattaaaattttattatacttataattttaatttaaaattattacacttaattatttagtatttctcacttaagtatttaaaaagtaaaaaataaaataagctagatgtatttttcaaaaaaaagaggccaaactcctctatttttttaataaggagtcatttactcaaaaaaaccaaactagagtcaaaaaacaaaatcaagctcccaaaaaacgaagcaacctcaatctcgaatagaaaaattcatacttagttcttctagttataagaaaataatttaatatcatttaaaaataattaattatttaaaaatttattaaacaagaagagaattctaatttgtgtaaaaagaagtttactttttgtaaaaaaaaaataaagtttcattgtaaatattataattaaatggtttaattgttaaaataattatagtatggatttatataaaaaaattatttataaatattaattgctaaaagaagtcttgttaaatatttaattaattattttaaaaaaataataattacaattaattgattcttgaaaaaagaaagttttacctattagtaacatgctattacaggtaaaaaacatgtaaccataatggttataataaaaatgtaaccattgagtagtcacccataaatatagatgttaattttcttaattttagttgtttttataaaaacggtttttatattatttttattttcttaattattttaaatattatttgtctttctttattgttatttattttttaaattatttttatagtaagtttctctctcttttgtgtcaattttgaaattttatggtattgattgactaaatcttgatattaaattttgttttaatttttatatgatttagttattattataagtcaaattaaagttttaatttatgttaaaataattttattaaatatctataaatattaatttcttacctggtataaaatttattgtttgttctatgaataccttatatatgtagtattttttaattctaattatagttttttttttaacaagaagaggattctttattcaaacagacaagaacaaaaaacagttcacaagcaaaacaaggctgctggccgaacccccaaccctcaaagccaacttgagattacattaaaaatatagctatcaagcttcccttttcccccaatacagccgcttaagcacctggtttttacacaagatttgatctctttactcatagttctagctgtcttacatttcatctcaaagatacagcaatttctatttgtccaaacagtgtataaggtcgccaatacaactgtattgagcactttttcctgctggttgttggaagaattcgaaaaccactctctgatgttagagggccagtcaaaatgtccacaccaacttgttatctcaatgatcactctacgggtgaagtagcagctaacaaacaggtgatggtgagtctccttttccaagcagcagaccggacaaagatcagaggatatggagataaatttgctgatattgtctctggttagcagatggtcattcacaatttgccaacctatgaacctatgctttggaagaacaattctatcccagatgtttctagcatagtcaacagtgtgagcttggatataagagaaataaaataattttgaactgaatttacctctcttaacagcagccatgattctggattcattaacagttgacctaagacgaaggatctttttaaaataccagctcgcgtcttgtttgaaatcaattgtccaaaagctcaaccttctcaagtaaatcgcatcaatctacctaacccaaagattgtgttgtttacttgatatagcccaaatatacttttccataagagctatgttccatttcttcccttctctaaatccaagacctccagagttcttgggaagacagactttctcccatgaggggatgtgcatttttcttctggttccattggagccccaaaaaaagtccctacaatatttgtcaatagccgcagtgattttctgaggaagcacaaacaaactcatccaataatttctgactccaaggagaaccgaatgaatcaattgagccctccctgcaaaagagaggttcatactagcccaggtgttcaggtgcttatgcattttgtcgatgataataccacagtcagcagctcaccatttggttggccttagattcacaccaaggtatttcaaagggaaggatccctcctccatttgtaaaatattcacaagtctctgtttgcaagaagttgagatacccccaaagtacactgttgatttagccttattggcaacaagacctgtagcatcacaaaataaaaggaaagcctctttcaccaactgaacagacttatcattacccttgcaaaagattatgagatcatccgcaaagcataagttgacaaggcccaatgatttgcaaagagggtgcaatctgaaccccttcttctcagatctttggataagaagtctagtcaaatactccattattaacacaaagagaagcagggacatcgggtccccttggcgaagacctttttcacccttaaaagagccttgaatccttccattaaacaatagggcataagaggctccttgaagacagcttaagatccaagtaataaacttggaaggaaagcaaagagcttttaagaggtcagccacaaagcaccagtctttcgtatcataggccttgctcaagtcaatcttcataatacacctagaagaaatgttctttcttgtgtaaccttggagaaggtcctgcaaaatcaaaacattgtgagctaaaagtctctttttaacaaaagcaccttgattctcatgtattagccaagaaagaactttcgagagtctagtacagatcatctttgagatgcatttgtatgttgttgtgcaacaggaaataggtctgtagtcgctagctccttgagggttatcaatcttggggataagagatatggatgtttcattcacttcctaaggaagcttaccagattgaaaaaaccccaacaccgcactagagaaatcgtctccaatgtcactccaaagatctttgaaaaaaccgccaccaaacccatcgggacccgggcttttggacaactgaatcccaaataatgcttcattcacacccttcttgcaaaaaggacagaccagactcacttgttgcttgatatcaagcttgttcccaaactcaaggcagtcttcttccattctccttgtagccgagctttgtctccccatgaaattacgaaaatggctaagaaaatgctc

SEQ ID NO: 32321 - DNA, 2225 bp, Cannabis sativa
gttgatgcatcagttgtgggctgcaattgttgactgagcatggaaattagctgctgacattgagctgcagtaagttgagatgttgagggatcattctgtgatgtcaaaatttgatgtgtttggggattggtccgagaagaagaaccggtgtctggttttttgctggtattagaggcagagtcattggatcgtggtttgccataaccaggtgggaaaccatgtaaaaaatagcatttatccttgtaatggccgggtttttgacagtgagtgcaatgaggtcttggtcttttattttttgatgtattgttggcagcaggagagggatcattagagggatttttcgtgtgtgctgcagcagtgataggagggattaatcgattaccaagtgttctttgtctttcttggtggataaccatagaaaagactttgttgagtggagggcaaggatcaagtaatagaatttggtctcgggtggcatgataagtttcattcaatcctttgaggaattgtaaaacttggtcatgattgttgtaatcttgattttgtgctgcagctgcacaagaacatgggattcgagggcgaagttgattgatttcgtcccacattgctgtcaatttggtgaaataagcactcactgtgtcatcaccttgatgcagataagtcaaggtttcgttcagttcgaagattcttgggccgtttccttgattaaacctgttgtttaaaacagtccacatctcggcagcagtgtcgaggtacatgatgctgcttttaatctcaggtgaaacagagtgaagtatccatgacataactaattgattacatcgattccaggaactgtaaagatgatcatgaatagggggttgatgtaaggtaccttccaagaatggagttttgtttcttgctcctatggagatcttgaagtctctttgccatggttgaaaattgcggtctgtaaggatcggagttgcaagaaccagccctggatggtctgcgttattgaggtagtatggtgaccgaatgtcttcgtaagggggtctctcgattggggttgatcgaggaagatgatttggttcctgggtggattgatcgacaggaacggatcttgagacaggaatctggtgatgagtattctgttcgactggattaggtcgagtaacagggtcgagattgggatgtaagtcatcagcggagtcgattgttggtggtggggcgtgagtagcatcgaccactggtggattctgagcagtggaggtagctgagatggtggccctagtacgcaccattgttgaagagggaagaagcttcaattgatttcttgaagcctgagagaggagtcttcaattgatttcttgaagattgagaggggagtcttctgataccatattagtggtaacagagaaaattgtttctattgatgaaaaatgaatactgtattacaactgggagaagaaatgagacatatatatacagacacagtaataaagtaattaaccgacttaaccactaattaaccgacttaaccaataattctaataatatgtcccatagttatatacatatatatgtacattcatgcacgtaaatatatatacatatatggactctgaattcatgcggattaatgtatacaaaaagcagtacattaagctgtatatatatatatatatttacactactattgttgtaacgatattataatttaattaatttatattagcattaactgcatgtgacattaattattcatttgtagttgtagactcttccatcaatattgaaatcacaaagaatgtgtaggttttctcaatatttttctataaataaatccatgttattgtttaataattagtacaattaactattttagtatctcatcaacccgataccccaccacaaagaaaataattattaatataattattgtttaattagttccaatgattctcattaaaataaaagttgtatatgtctatcatttcttttaatatcattattagtcatcagattattaataaaatgtttgataaaattgttatacataaataaaattatattagaaagagtttttggcggttaaaccctctcaattgttgttttacttgtatttaattttctaagcttaaattttaacggtaaaattctctaaactattgaactaatagcaaatttaaggtgtcattcggttaattgttactgtgagttgtttatattggtacacttaatat

SEQ ID NO: 32322 - DNA, 1276 bp, Cannabis sativa
tttttttttttcaaaaatacccctcttatttcaaaactcatctctctcttcctctgtcttctctttctctccttctcgtctctgctcaaactaacatcccctcccattctcgtagtaccaacgtccccgaccaaaggaaaagccactgagatcgagacccataaattgaagaaaccattgagactattttcgctgtcgttgtttagatgtttgatttgtagtttttgtgttttttatttattttttttgggtaaaaaaattgatttttggtgaaatatgcattttttgggctctttgtgatttttttatatatggtgcgatggggtacgatggtgggtgttaaccccaaaaatcgacagagttgattttcgagattagtcaacgattagttccagtggtcgagagacatcaactgtaagagttgatcgaagaatgactgagtcaatgcatatggcctaaagatcattaatctcggaaatccatgcttccaagtctcggaatatatccgtgcaattcggaggtcaaccccgtaacaactcatgagtatagttagtaaaatcaaattactaagttataattgttggaggatttttgtagtgatatgttcgaattggatcttgccataaacataagattcaaaggtctctttctcatctttccaacgtattttgaatcgtctcaatttcgatatctattgagagagttatggccaaaatactaagactgctaaattgtgacaacttggtatgcgagcccatggctgttgtgcgagcccatggctattgtgcgagcccatggaatgttgtaagagcccatgggatgttttgcgagcccatgagccattgggtgagccgggggtatttgggtgagtcgtggagcctttatgcaagtggtggagcatccgttcgacccgcggtggagcactcgtgctattcgatatttagtccctcagtgatccaattacgatagcgtgggcaaatgaaggagagattatacatgtgtggatgggcaccatgtgcctgggtgtgcggagaagtgttagagcgaatgcatgggggctcccatgcgagccgtgggtgagtgatgtagggtgtgcgagcctgtgtgagggggaaggggtgagcttggcatggtgcgaggggatagggggctcgcattcgagcacatggggggcttgcacgcgagccatgtgtgcgttgtgggcgagctatgtgagggggaaagggtgagcttggtgtggtgcgaggagatagggggctcgcacgcgagtcgtgtg

SEQ ID NO: 32323 - DNA, 1349 bp, Cannabis sativa
acatggttgataaaatttagtaaatttgcttaacttgttctcaattagattaccccaacaagtttttcacttatatatagttttatcaagagcaaaaatattgttagagttttgatttgaccagttactactgcacaacaagataagaactccacaaagaatacagtgtacactaatatattgcatcacatttatattttttctttaatttttaattgtatcacttttaaataacgtaaaaaaaacctagcataaaatttatacgtgcctaacacgtaactttttcctagtatatatatatatatgtgagcttaatgtgtaaatatattactaactatttttgaaatgattttctttgtagaagttagtctctctttttggtgttctttatctttggaaaaaacttgcattttaaaggttagtattggttatttttaattattaatatatatatatgcttattagaagagtttgaatatcttagatattcatctatagtaaaataggttttgtgattagttatactatggtgaatatgcatgttaaatgagtttgaatatcttagatattcatccgtaataaagtaggtttagtgaatacatgtactgtggtcagataagtagtaattatatgtattgtgaaatgttattctgttattcttgtagattatttctttgtttaaaattttcaaaaatgtccaataattatagatgttatgctactcaaattgtgcgatcggatggatggaaattatatgtatgtgaaatgttattttgttattcttgtagattgttttaattgctttttctttgtttagaattttcaaaaatgttcaagtatagttgttatgttgtccaaattgtaataagaaaataacctcaaatttgattagtcatgatggatagtgactattatatttagttatattattcatttttaaacatgtgttatactaatggatattttgttttggagtagcttattatttttttttagtataatatgtaatatatttatatttacaatttaataagatggtatatttttttagtataatgtctgcagatgttactagataccatggaggtgatggtgggggtgaggacccaccagatcctactaggatccccacgaagtgtgaatttgcttctgaagatgaagctttagaagctgaaaatgagatttttaattcttcgagaaagaggaaacgtggttgtaatgtccttaatgacttagaggataggaggaaaaaatcttcagtgccgctacctcttgtgtgcgacattcgtgctggtaaaatagttggactagagagtgacgctttttctcgtttgattgggagagagatt

SEQ ID NO: 32324 - DNA, 1112 bp, Cannabis sativa
aacatggaatatatggatagtgcaaaatagtttgaatcatgggggttaccataaaaaaaaaattgttgatttaatggagtggtgcagtaagtttattaacgagagtttcatgaaaattccaacaggagaggacaccaaagtcagcaggcaacaactcagtggaagctaccatcaataggtagttacagtttagtggcatgcatgccaaagttgaatttcctgctacaacatgtaggtatgagattcaatctccatattagttgctgagctaattgctgtagggggggattgaaggttggattgcaaagacatctaccttgctttcgggtggagacagactacttggaggttgtacagttggtgatgaagaacatagaggaaggttgttgagaagtggatgtgctgcttcaacagattcgcatgctgctgcaaaatggtggtgttgctggtttgtatttcatttataggaaacaaattaagtgacatgttttagctaattatgtttttttaaacaatgttagtgctatatggattagagttaattctctttatgttccgtcaagctttaacattagacttgccatttctttgtaatgttggttagtttatttaaatgaatgatttctattttaaataattaaaaaaatccaataaatgtattatatatatatatatattttttagtttagtttaggggtgtttattggaccatatctaatatttttaggcctatccagatccgatccaattatatattggatgttatattttaccatccgatctgatccaattaatttcatcatccaatcgatccaatatccattggatgttggattggatcagttccattcattggatctatttcatttatatttattggtttaatttgagtttatcaaatattttagacttagtattttttggattggatcggatccatccaatattttaggtccagtatgtattggatttgactagatccatccaatgtaagaaaaaaagagtaaaatttaatgcaaatttttatatatacatataaattttacgtataacaatataaaatttaattactcatcaaaactaaatgaaaatttttatatatacatataaat

SEQ ID NO: 32325 - DNA, 1872 bp, Cannabis sativa
  modified_base (521)..(528): a, c, t, g, unknown or other
agatgtaagtattgggccgatctattggtcagctttaacaaataactctaagaacataaataacacagttgagatcaaacctaaccatatcaggattaagattgacgtaagatcaactaactaatattgacttacatagatataacggtacgtttatgatatcttatccaaactcaatcggttcagtctgatgtatactccatacatctgagcctaacatacttggccaatgcattgtaaaagacataacactaattcagggtgaaagcaaactcttttgttgattatcatgtctgtttaaatccaacgtactgataaatccttgtacttaaactttgaaacatataatcatgaatatattttactgtgttgacaaaactataatcatgaataactatatgttctggatataatagaatttatacattaaacatataatcatgaaataaaatatgtgaaccatgcaacataaaatgatttttgatcttttattaattcgtaaatctgattatattgaaatnnnnnnnntttaggacacaaaacccaacatcttcttttcctggacaacccttaatttgggaatgccttccagtcatactgtaggattccaataacacggtgatagacacagacattcttctcttcatgccgtgtcccttgccttgacaaaatatggataaatagactctatagttgatttaatctcaagtcttctatttcagtccatctcattctaaacctaaccctgagtgatggatatataaagaaagtgatgagaagaaagaattaacctaagtttcataatgttagacaactctcttcctcttttcttttattcacatattttgaattgcatacatcatgaaattcgaattctctctctcaatattgttcaaaggtgttttgagtattaatctacacttttcaagttgatactcaggcctttgtggaagactgcgatgaatactattaaaggacaagaagatctaggttcagttcttgatcatactctgcaacagaaaggatcaagggttaaagaactaaaaggaaagagatattatattttgctgcaaccaatattgtaaagctttctgtaactcttatgtgtttaattcattgttttataaaatttatatttaggatgcaagattattcataatacaacatgcatgaatagtaaattaagatctttgtaaattatttctaacacaagattaagtccaagaaacacaagatatatctcacagtctgagaaagttgcaatcatccatttaatgttatggttggaaccaaaatatctaaatgatgatcttctccttgatactcgcactgacataatcaaccgtcattttgcaaggccatgctacacgcgctccattaaggaaagtaatctccatgagccaaagacacaatgccacatgttgctttatttcaaaaaataagaattcgtcaaccataaacattttgatttggaattcaaaaaggttcctccttttagcctccacttgtcctcacatcatgcgggaggaagaatgcaagcttcataaaccctagagttccaaaatcttgcggataaattttattcgtgtttttagttcgggacaaatctaattccaaaagcagtacaactctgttacttcaggctcaacataagacccaaccaagataatggactagatccattaacaaatttatgtcttctgaatgttgaacagataactcatcaagatgagataaccctcgagcatagcctgcatataaaagacctcaattagagcatctagacaaataataagcgagcatccatacatcaaattcattatcacactcattaattaccagatcctatgatatcaggatttaattcccaag

SEQ ID NO: 32326 - DNA, 2381 bp, Cannabis sativa
  modified_base (40)..(46): a, c, t, g, unknown or other
  modified_base (662)..(663): a, c, t, g, unknown or other
  modified_base (811)..(815): a, c, t, g, unknown or other
  modified_base (2334)..(2342): a, c, t, g, unknown or other
tcacatgatttattttatgattatgtttaatgtataaatnnnnnnnagtccagaacatatgtatttgttgcctttggtttttttctaaaatacgtggacacggataagggcgacacgtggatctgtaagtcacccacgtactaaaaacaactaagtcttggacaaaaaagaacacaacagggagtgggcctcttggagaagagcatacgacatatttttactctctgggaggctagagccatgttaaggcattttcgggaggtaaagagattacttgaacaatcacttcgcatttactgccgcatgggggaaatcgtattagtgtcttcataaaagatgtgacagatggcgtaagccctatttacggcgattacacaacaatcgatgagtctagtgacggctacattatgaggaatcacatcagttaagagaggataaaagattatatccacctaactcctaagatacctacggtataggtcatgtatttcctaatatgttcccctatgaagctaacacaaaaagacaagtgattcatttctagggatccccttagaaaaacactataaatacccccaaatagactgaaaaggggtgaattgattttattcaatgaatcgaagagagaaaataggagagaaatccaccaagaacattctctnnaataaatactctcataaatacaaaagactcgtggactaaggctcattaatgccccgaccacataaaaatatcctgcattaaaatttctacagctcttctcatacattatttaattggttgtccaaaacctcggtcaacattttggtgnnnnnattgagagctgaaggaagcgtctttatacagacaacaatcagaaaagctagatcaacaatggtggaaactcgcaacaatacatgtcagcctcgtccccctcaggatgcacaaaacccagaggacgaagaagtagcctcaagagtgaacgtgggctccgagggacgagatgaggccaacgacgaagagtacgaagagaactttgacgactatgacacttacgatgaaggtagctatacaaacttactggtcttgaggcaaaaggttgctgatcatgaagctgagatcgtagcccaaaaagagcagaatagaaaaatgcaagaggtgatggtccccatgcaaaaagcaatggagacgacagggattcacatacaccctaaggccatcccagcaagactctaagaaacactggaagagtcctcaccaagtactcaaaaacccaagatcagggaaccaagccctatacggtaccctttcgaggaagaccatgggaaaaatcccacttcaatccctgggagaaagaaaaaggtgcaggatccgcggaaagtccgctcagatttctcgaaagggaaaggtctacagaggggcaggctccctaaagtgagtcttggccctcaggatcgagaggaccgaaaaagcgtatcaatgcaccaggagcccgaagagagaggaaggaaaaactagagatacccttcagttgacttaagacaaaaaatcaacaaaaaacacggtgatctacgagatcacctagataagaaaaaacgtgtaccagcagtctccgtaggaacactaaatgaaggaattctggctgagttggcaacactgcgcaaagacattgcttgagtctcccgaaggaaaaagggggacgactcagattacgattgtgaggaccgggagccttgagcctggcacatactggaagcagacctccgtaataattttaagatgcccgagatggcagcatatactggagattcggaccctagtgatcatttatcccgtttcaaccgggtgatgacagtcatgagggtcagcaatgatgccaagtgtctatgctttctgctaacattaagtggttctgctgagaaatggttcaaaaatttggaaccaggatcagtggactgttggaacaagctgcaagtcagcttccggagacagtttttcgcagcaagaaagattaatctcgaacttagcaccttgactaatataaagcaattgcctacggaaaccttaaacaacttcataaaaaggttcaaagaggaagcttcaaacaccaagaaggtggatgacagacaatagcttgcccttctccaagctggaatccgtacggggaccccaatttgaaacgaattacaacaagagggagcaaccaatctctaagatttccagaaaagggtccaaaagtacatcaattgggaagaagcccagatagtggcctactgtggatactattcaaccagagtctcaggatatgcacccagagcttagctttcatgagccatgtgttggaaattattttannnnnnnnntagatctactcacaagtatattgtttaacaccctaaata

SEQ ID NO: 32327 - DNA, 2578 bp, Cannabis sativa
tgtcattctatcccaattcatccagatgataccacttccactaccagaagagttgttagatttccaccaaaacctagccatcatcttctcaagttctttgcaagttccaactggaaataagaagacattcatagcgtatgagggaagtgattgaaccactgacttaatgagaatctctttcccagcccgagagagaaatttaccctcccaactattgatcctcttcctcatcttctctttaaggaagcccaagacagcatttttgttgcgacccacaatactagggagacccaaatacatgctatccaccccagcttcttgaatacgcatcaaactgcagatacgacttcttgtaaccgtactcgtattggaactgaagaaagctgaagatttatggagattaactttctgacccgaggcgtcttcaaaaaaacgaaggagagaaagaacatgattggcttcttcatcagtggcttgacaataaatgtaactatcatctgcaaaaagaagatgagatatggtaggtgcgcttctatccactttacaataggttagccatcgggacgactcataagaccttatcaaggatgagaacccttccgcacagacaatgaacaagtacggagataaaggacatccttggcggattcctctggttggagtaatcggccccaatttttggccactatgaataacatgatatataaccaagtttacgtagcttaaaaccaagccaatccatcgagtactgaatcccatcacccgtagtatggcctccaagaaaccccactcaacacggtcataagccttgctcatgtcaagtttaagtgccatgtatcccttctttccactagtcttccttttcagatagtgcatgacttcgaaagccaccatgatgttgtctgaaattaaccttcccgccacaaacgcactttgagtttctgagatagcaaagtttaggacattcttcattctattggcaactacttttgaggcaattttatagatgacattacaaagcgagattggtctaagatcacccatttgagaaggatttttcttcttcgggataagaacaatattagtgtcatttatggagtccgggaactggcccgaatcaaagaaatcccgaacaaacttgaccacatctaccccaactattccccaatgcttttggtaaaaagctggtgtcataccatcgggcctcgatgacttatcaggatgcatttgaaagagggcgtttctaagttcttcctcaaaaattgttctcaagagatcctcattctgctcacggctaacagttggccgaataccatccaagaccgatcccaagttaacattggaagtagaaaacaaatcatggaaatagctagtgataacatttgccatgccggactcccaactaacccaatctccattgctatcttgaagacgggaaatactgttgtttctcttcctggaattagcaattgagtgaaaatacttactattcttatcacccaaattgagccagaattgcttcgatctttgcttccaaaatatttctttttgagccaacacttccgccaacttatccttcccttctttgtgttgttggatggaaataggatctttgccccatttagaatttcggatttgactcttgcaatcactgatacgctttcgaaaattcccagttatgtcccgtccccatctccccaagacttcaccacaatgatgaattttctcttgaatagtgactaaacccgaactcctccaacaaccctcaacaagctgctcacacaagggttcccgaagccaagcattctcaaaacgaaaggaacgaaaagaaacaagaggaatgttacctttaaagattagcaacaaagggcaatggtcacttgttgagaactccaaattgagtaatgacaattgtggaaacattgatagccaagaattggtgacgagagctttgtcaagtctttcttcaatccactcaatactatttctccctttctcccaagtgaacgggtaaccaacaagaggcatgtcaatcaaattgcaatcgtccaaggccgtaagaaacccctcaatgagtcgatcgggatacttctttcctcctttcttctctaaatgagaccctagattattcatatatcccaatagacaccaaggaagatgactatcatttttaagtgcccgaaaaaggtcccaagtttgagaccgaagttctctttttggctccccataaatgccagtgaaacgccaaggaggcagccccaccatttgaactgtggcatctatatgatgaaaagagaagccttgaatgacaacttcacttgcttctttccaaagaagagcaagcccaccgctgtgaccacgagcttccaccacaaaacaaccttcgaagcccagttggggtcttaaactttccaaactagacttattgcataacgtttcacaaagaaataacaaattgggcttcttttgaggcacaaggtcccttaagaattgtgtggcccgcaggttcccaagcctgcggcaattccagcttaaacaactcattgctcttggcgggcctggaaaccagagcccacca

SEQ ID NO: 32328 - DNA, 1160 bp, Cannabis sativa
aaaatttgggataatattttccccataaacccctgttcaaacatctggttggatagggactttctagctctcttcttttttgtagtagtctctgttgagcagccttgtctaaccaagtgttgaccttttgcatggcatgcttttagatctttgatctcctctctctatacatgtctcttcttctcttctttgtaccttccattgataagtttcaagctttttaagcttttggaaacttttttaattatcatgttagattgtaattttttttggtatgttgatccacatgacagttttaaaatgtataatgtgtgacttcctgattgaaaagattcaattatagccttcgttgtgaatcttgactctttgagtcataaagaacacgaggcacatatttgagtttaaataaaaataaagatttggattcaataataaccttagccggccttagagatcttgcttgagacctggcccgtcctaggagttaatcatgggagttggctagttctatgatttaaccctataaaactagctggttcatacctaggtttggtgaccttggcgagttcttggctgagtcatgggaccctggctgatccttttaaggcttgggaaccctggccgacttgggccttgacttgaagcgggtggtcagctttgtgtcctcttttgaattcgataaaaatcttgttatggccttgtaggcatatacatcgttagtctcatacgtggtgttataccaaaaattcggctaccatctcagtgggagacatgtgttttaggataaaaggaatatagatcgatgcaatcgctttttatggaagaactcattaattacgtaagtatcctagtatatttgtaacttactgactgtaaggtcttatgcaaggaataaatatagaaactgttgcttagtatattagcgagaaaccatatgtcgttgaatgcgaatagcgaggcatcaagtacattacatctaggaagacaaaagcgacacatgtcaactacgaaagcccttagtgtataatgtacaaactaagtgaaacagtcgggtcggctcgagacctagtaagcgaggtgtttatctcgctatgggaaggcttcttgtaacttcactcagttaacttcagtaaggtttacaatcttgacgagtcagaagc

SEQ ID NO: 32329 - DNA, 2448 bp, Cannabis sativa
tttaaagtattgtaatatttaaatctaccgttaatgaaatcaaatacatattccttttgttaatagatcgattaattaattatttctatattaataaatatagcttgtatgtgtagaatggctgatgcatgcgcaagcaacaataagaaaaagggagctagggaaaaatacaaggaaaaaatattaaagaagaactcgacaaggagcctgcaggacagaatttgaaatttaaatatcataaggggactggggccccatagacgactatgacaacaagtttaataattatgtcaagttgttcgcaataccattcctatgaacaagtttaatattgaggacgttaacgaaggggacattcagactacttgtgatagactagccgtaaattttaaatttttattgtaataaatcaaacaaaactattctataaaaaattatatatgattttaatttttatttttttaggaccaaatttgagtttccaactgacaatcctatgttaaagaactacagtttaaatcaatgtcaaaagggctacgtggctggagagcggacacgaaaaatgtatggaaggagaatattaagaaatatagagaagcgactaggagatcacgtctagatgtggttataccggaggtgtaggcagaggttattgcttttgggaaagatccaaaacatcaggtataaaataaaagttgtaaaaatgaatatctattaacttaaacttttttgctcattttgctaacgataaatttactttaaattacaagcaagagccgaacaaattgtaaaaaactgagcctagatgaggattcaaggtagataggggtctaagaccatagtcggccacatcgtcagcggggtatgatgttgtcagcaaatttatctaaaaattaatatttttggaataatatatttctaagttttttattatataaaaataggttgatccctagacgggagaacttcccagtactgtggacactttttaaaagtttcactgtaagaacaacaaatggcgcgatgaacacacacaataacttcatgtaagtaattttaaattcttaataaactcgttctatatttaatttatattcaactctaacagtttgttcaattttttttgtaggcaaaaatagttaagatttgtgaaactcaaccagcgtcgaccaatatctccttgtagtacaatattgaccccacccagttttccacagacatgcctattatgacacagatgatgggtgagcggtcacgctacttgaggggattgtgcccgttgtcaaggcttagggcaggggctaagagggaaactctcaaggtaggtccttccagccaacctactatctcctagaaggaatataatgcctaaaagcgaagggtggaagaccaagaagcacagaacgactggcagcaacaaatgatgtagactcagaatcaaatcctgagcacatttcagcaacaaatgatgcatatggtcgacgccgttctaggatacaacatgcccctaatggctccgattccaccatttcggtctcctaccactgggtcttcttcacaggctacccctccaacatttcacctgatttcatctttttgacggcgcttaaagtagatgatactcctctggtacgtatccttaacaagttacactattattttcatatttttatccttgctctaaggaatgcatggggtattatattggcgtggaaagctgactttgtctttgaaagcatgatggtttctagtaaccacattttgagtcttgtctacttggaccccctgaccaatctgtggctcctttcctgtgtgtatgggcctatgtatgccaatgcaaaaaagaaattttggttggagttaatgaagttaggggatcggtttggaggttcgtggtttattattggtgatgtaaactttgtgcttaatggatctgaaagagttgggtcaaaaggttttgatcattttgctccttttatttctaatctggcgttttcctgtggtcttatcaacttgccaatccagggtgacaagtttacttggaaaaatcaccgggagggtagggctcatgtgaaattcgcacttcacaagggattagtcaatgtggggtggctaaatttgttccctaaggctacgttgtgctcctcccagacttgtaactctgaccaccgccctttatgtttgaatttcaaaggtatagaggagagttttaaaagattttttaaatttgaggaggggtgggcccgtgatgataggagtaagcttgttgtcgcccatgcttggtcgaactcctatcacccatgggccccaactcaaatctttaagaatatcggtgctacttgggtcgccctattgcaatggaataggctctagtttgggaagattgacaactttatctgttctttgaaaaaaagacttaaccagctgcagagtttgcctgcaggaact

SEQ ID NO: 32330 - DNA, 1579 bp, Cannabis sativa
cgcatgtcttagttctatcagcttgttatacgatgtccgtaaatgcgactatacaagaacgcagacatcttagactcaactaagtgttgagtgaattctaagtccatgagcttatgcaagaatgtgaacagccaactcgcattatggacgtcacatacgttgctgtatttagtgaatagaaactgttcttcatttattaatgtttacgttttttagcttagttattgtaaatcaatgtataaacggattgacaatgaatgcaatactggtgtaaatgacaggacacttgctttgtatataaaggagtgatccaccgtgaaatgggacatatactgaatccttgcaacagtggactaagcagactgtgatctgactgaaccactatattctctcgtgttctttgtatttccagttttttgtcaagtatttgtgttcccagctcgagtacttgccgttctaggttgaatactcgcacttattcatttctttattattattattatttattttggtgttgtcaaattcctttaacaacatttggcgctgtctatgggaatcgaaatactttcttgctaatttagaaggagaatcataatggctcgaaaccaagcaaacggaggactttacaacaaatccatcaatatcggaatgatgaatgtcccactgttaggaagcagagtgcctcccatggatgtgatcaacggcggagtaggacggggcaatgtgacgcctcttaatctgttccctgaaactactggccctcgcgctggggaaacatctacaccggcagcaacaacaggacattttccaccttttactccaaaaatggtattcgaaggcattatccagctgactatcaactagtacactgcaatccaagaccagctacgcgctctgtaggccgaggttgatggacgaaacaggactcaacgtcctctccgagtacctactactcgcacagaaaaccctcaggtaactaatctaggcgtcgtactaaccgtactggcagggagtgtagggccaatcaggagggattcgatttgaaccaaccgacgtcgagggaccaatccgcgaggcacctcaatcaggaggcacagacggaggaggatcctgaacgacgtagcagaccccagtcgagagacaacgacattgaatctgcctcctcatcctcacatggccgcacgcccaacaggtacctagatcgttcggtggaaacaccgcaaggagggcgatatcaagttaataggggcgatctccgcgatcaccttaacgctgtcttcagggcacgctcccagacgcctcgggatgttgaagagccccgtgattgctgaatggacgatcaaggcataaacaatcgtatcaacccgcctaccgcaccagctgcgactactagggttaatatcccagcgaacatcgctgcagtcgtaacgacgcctgcagcaacacaagtcaatactcccttaactgggagtatcgatcaaagtatgctcttacaagctttaaaaaggctcgagcaccagagaaagcccatatacaagttgcatgagacttctcctttcactacagaagtgcgacaagc

SEQ ID NO: 32331 - DNA, 1474 bp, Cannabis sativa
gcctgacgaaacacttaaggcgtacttaagtcgttttagcacagctgccgctagggttagaaacttggatgacagcacgcaacttacaggcctttaggcgggaatctccactaatccattaaccgccaggggcgagttgtgggatgacctacaaggacgtccggtgcaaaacatcactgagttcaatgagaaagctcaagtgtttgtccggaaggaagaagcccaaaaggaaatgaacttgttgaaaataagctcggtaggtaaacccaacaatgtttcaacagggactgttcccacgtgaattgataactcgggggtttctggtccgaaaagaaaagacggaggtagggaatcgtcaaaagatagaaagaaacaaatgaagcatgacaaatatgtgccattgtatactatttatactgagcttaatgaaacttgaggaaaatatttacctcgcacatgagtagaaagtagccattggtaaacccgagcctatgaggaattcgaggagcaaaagatatcctaacaaatactgtgaatttcgtaaagatatcgggcatacgatcgacgaatgtcgcaagttgaaagatgagatagaaagtctcattgctcgaggccattttaagcagtatgtgagaagatagggccagggatacaaccagccccgttagcctaatgacccaaacaaccaggggttacaacctcttcttgtggaaggagaggacatcctgattatttcgggagggccacatattgcaggggaaagcaataacgttcagaagagatatgtgaaaaaaataaagaatgagcagtcgatctttgcccccaaaccttccaaaaaggtaaaaactgaggaacccccctttacgttcacagaggaagacgagaagaacgtgagataccctcacgtcgatctactggtcataacaatccaactcgctaataagaggatcaagggagtgttaatcgataatgggagctcgataaatatcctttataaggagactctaaagaaaatggggctcgaaaaggccaatttaaggccttgtatggtgaatctctgatgattcaccgaagatagcatcgctagccttgacataatcgagctcgcattaaccataggcgaggcacctttaactgctaatgttatgcaagacttcttggttgtcaacctgccctcggcttacaacatattgttgggtcgcccagcactgatcggactaggggcaatcagctcgatcaagcacttgtctttaaagttccaaaccccagatggcgtggggtggtgcgtggcgaccagatgctggctcgcgattgttatcgcatagagcggcagcataggaaggttggtcatcaactaatgacgatcttggtaggagaacacgagaagaaaaaggaagatcttgatcctcgagttcaagatgaaagaaacctgctaaaaccaattgaagaattaaagcggggatgttacaaatgg

SEQ ID NO: 32332 - DNA, 2476 bp, Cannabis sativa
  modified_base (2259)..(2261): a, c, t, g, unknown or other
ggctagttatactttgaaattttgctgattttttagttttttagtaattttgagttagtgttatgggttgtgggtcacattctaagtttgtatattaatcgttattttataaattatcattctaatataattctattttttggtttggtgttgtgatattttttcagtttcgctagctttggtgataactattattaattggaaggtgtttttcaagagatgcatgggggactagctatttgaagacgttatagctttattgtctaaatttccgggggcagttttgtcacatgtggcttgcgatatgttttctgcagctcatgatttggcaaaatatgcccttcggttagacaataagctaccctggttcgaagaggttccaccgccaatcgtagttaatcatatgtgatcagttcaccacgtcaaaaaaaatatatatgtataatttaactattataattaatatatcaaccaaataccaaatgtaacacaaaaaatatatattattattattatattttttaactaaataaaatgttttttagaaacttaaataacataggatatttgaggagtaaatttcataaaagttcattaaattttctatctatttttggtatttaaaaaaaatagtctatttttttttataatcgcgtacactataactatttaggatcattagtaaatttttagaaaatctacatagttcacagtaccaaaaattaaacttaaacagttacttaccacgtgtataaaaaaaatagtcgtgtgagcaataatatatgtaaatttaatttttgatattgtaaattactagaaattttttaaaaatttacaactggtcctaaataactataacgtacacgattataaaaaaaaaattactaaaaaattctattatatactgaaatatatagtggatttatcgaaacatctctttaaaaagtatactaactaacatatatgtaagattataaaatattaaaataacatatttttttaacaaaatatgccatagtgtaaccgtgcatagtgcacatgacaatatgttgtgcacacgggaaaagtgcagaatatatagtgcacaacaataacatctatattatctcacactccatagaaattatcccataataggtgtgctttcttcatccttgtttcttgtaaaaaaattacccaaatttcatcttaccttccagtctatttggggaacaatggcggcgactgatgttcaagcggataatgtttaagcggtggaagaattgataaatgagactgaaaatttctgtatggatgacttctctatccaggtgaccttgatcttgtctctactaagaatactttgaaaataactttagttgggaggattatctccaagaaggtggtatcaaatggcaccatgaggaaggcgcttaatggtatgtggaagttgcatcttgggtgaagactccaggtcccagcacctaaatcgtttatcttttgtaaagactgcttaactttaatttggaaattagcatataagtagggtttatttatgaaacttgcatgttatttatgaattattagtttacggagatttatttgaattcagaatgcattttatatgttatatatggaatttcatatttttgcatgttttatgcccagcaacataggaacgtggtgtttgactattagaatcacatcttagtatctttagtatagtgaggcaatataattagacattgagaatgtcggggatagtcgggattctagaattgactaaaatacccctatgtgttttatgacctttagtgcgggcaagggcattttggtctttttgccctaagttggttttgtcttctagtgagattatagtaaggtttaataatctgaatttttattttattaggttgatattaattaataaaaaccatttattcatttcattttacataaaaaaaaattagaaaaagaaagaaaactctctctctttcactctttctctctcgaaacccttagaacagctagggtttggtgttcttcagcaattctaagtagtttgcagcagatcatagtggcttcaagttcaaggtgagttcctagtacttcccttgttggtttcttgagttttaagttaaggaattgtgcatgttttgtgagttttgctactgtagttgttgttgatgtttgaattgtgttttcgaagttaaattaagattagatatgttgttttgagttggttttggtggctatggtgttgattgagcaagctttgannnttagaactcaagcttggctctttaatggtgatttttgttattgagcataatatgttgttctgttccttgggaaatgtctattggggtataatatgccggtctggaaggcttggtaagctttggagttgatttggttagggtttcgaattttttggggttttctggtgtaaactggttaaccggatcagctgctgggtttcctgaaatttttcgtg

SEQ ID NO: 32333 - DNA, 1748 bp, Cannabis sativa
acttagtacaattaaagatataaactttatataaaataaaaattattaaaatggggtgtctttagaaattttttgggtgtaaataaaattgaggaaattacactatgtatctcttttaatttgatgcctttaattcttaccttcttttttaaaatttattatgtttacctcttttttaaatcattatatcaatttcactcctataaaattttctcccaactttcctacaaacctacacatctatctacaaagaacttaaatttattatatttgaaattatatcttagttatgtgagtgtgtgaggataatttgggtataatactcataaaaagaggtatatttaaattaaattttatttggagttaatttgattgatgtataaaaattaaaaaaagaggatactctcaataaaatttcccaatttttaactgaatgacaattttgccaaatatttttaaaaaagaatatttactaacttaatttttaaatttagggtcacaacccaaatacccaagaaggaaattacattgtatacctactttattttacatgttttaatttttacttttaaatctatattttttaaaatatgcccactttatagatgatgtccctattatacccttagattaatacaaattatgtgttagatttaagtagagggtgatgatgtattagacaacccacttataaaagtgagtatattttaataaaatataatttaaaggtatttttgatgaatagataaaaaaaaaaaaaaatatttgtcaactcatcccaatatcaagccgatgtggcactgtcccatctaccaaagcccagcccaagcccaaacccaagcccaattggatccgctgtgttttacaatacaagttcccttggttgtcgtaattgctttctacttcgaattgtgcgattcaaaaattgaaagcacggtcattacagcgggagatcaaaacggtgattgtctctacgtcggagtttagagccggccggaatcttcaccggctgagattccagaaaaatatgagtgaataaagctaacccaaaacttaatttaattctcaattttacattttttaattcatccccctgttttccacctgaaagaattttcgattttgatctgtttggccactaagaaagacttggggaagcaaatagttttgggaaaatatttatagttcttttttcaattcctctttctctttttaacccattatggatatcttccgggaggagggggtcttgatttttcatgagaacaattgttgctagaactatttttttttttttttttttgattaatttgcggcataaatacttaagttgaacttccacctttccgttatgtgccaggttagtgtccatgtgtcactcgttcattggtccacgtcattaattgttttatttattatttaaatatttaaaaatgatttaaaaattataaaaataaacaaaaataaatataatcaattttgtttatctttaattctgtatatatttaaaaattaaataaaaattatttttaaaataaaaaattataaaattatcaaacccatcaacttaaaatctaatcatacgttaataaaaaaaatccaaaagagaattcgtttgttaaacacaaaaatttaattcactcaaaaaaaaaaaaaaaaaacataaaaatttaaaatcaaattaaatacaaaattaaattcaaagccaaaaaaatctgagaacataaatctctaacccctaatatcac

SEQ ID NO: 32334 - DNA, 1158 bp, Cannabis sativa
  modified_base (485)..(485): a, c, t, g, unknown or other
agataagaattattttatttacgataacataaagtttttagaatcatatttaagatgatttgaagaaaatttactctaaatatggctccaattcacgtcaattattcagaatataccaatgaaccatattttgttcatattcacttattctgattatgattgtttttcaaatagtttagttggtaagttcaatatagataatgtcaattttcttcttacttcgacatcatctggattttggtttggacgattgtaacaagtttctatcccatgatgattcattgaacaaaaatttaatgcctcactaattatatattctttagcaatgcaaccttcagaccgagctttgttctttacatattttttcaaatgaaccattttcctataaaaggttatcaaattaatatatatacattattgcatatttttaaaattcattatttgttaaggtaacaaaaattttgttacctttcaattgaatacanccattgcatttggacaggaccaccaaacttggctacctttggcaagtggatagctagatgaatcatctcatcgaaaaaggcagggggaaaaatgctttgcatcttacaaagtgtgaacacgatgccttcttccaaatcatttaagtctttcacatacaatgtcttcgcacatactttttgaaaaaaataaagataattcagcaattacactcatcacttttctttttcaagtattgccttacataaataggttgcaatatctgtaataagatatgacaatcgtgactttttaaacccgtaatcttcccatctttcataataatatttcgagacaagtttgccgcacatgcatctggaagtttaatagactagaagaccttacaaattgtttgtcgttccttcatcgataatgtatagcaagttgttggtttcacccacttgttctcccgtttcttcatttgcaattgcttacgaattttcaaatcttgtaagtcaagtcgtgctttatcggtatccgtacacttgtcgtcgatgctaaacattgttccaaccacattatcacatatatttttctcaatatgcatcacatccaaattatgccttagtttcagtttaggccagtatgctaagtcccacaaagtacttttatgcctccaatttgttttattttcat

SEQ ID NO: 32335 - DNA, 944 bp, Cannabis sativa
tggttgcctgccaaaactaatctgaagcacagaggtattgatatcaatactcgctgtgacatgtgtggcaggtatgaggaaactcttacacatgccttatggagttgtgatagagttagaaacatttggaaactcttttcttggtacaaaaactgttcaaatttgggggaaggaactatgtttgatgttttaatggccattgagcagacaactaccaggtgtgagtttgaagatactatcaaagtgatgtgggctatatgggaaaatcgaaacaggaaatggaagcaactcccaagtatgaatggtcagcaactgataaactggatcttctctgcctatctgaatgttctcaaagctgaaaatgatgttgttcaccaagaggctggtctcaccatcaatcagaagcagtggatcccgcctgctaatggctgcatttgtgtcaactgtgatgcagctgttatcgacaaagttgcaggtgtgggtctcggcttcatctggcgcaaggctgatggccaaatcctttctgctggtcagatttacatgaagagtatctgctcagccaagatggccgaggcttgggcgattttggaagctttgaagaatcctccagctgatgcatcaaaccagattgaagttcaaatcgattgcagggtgctggtggaagagatcaacaaccggggtcaacatctctcggctgaaagcaatcttctgtataagattcacaatgtgctggataattttcagaatgtaaatatcattcatgtaaaaagaaccaataatgagtgtgctaatttgttagctaagaaatgtctagttgacaaaaacacacagtttttcaaccattttttttttcggattggttagccaaattttgtaaggctgatcatcctgctatggtgtaggttattttttttttggttctaataaattctctttcaaaaaaa

SEQ ID NO: 32336 - DNA, 1458 bp, Cannabis sativa
gaaattaggataccatgcttcatctgtaacactagaagcgataactgagtgttcacattagcagcacctacatcaaaaaaaatcatatttagccgttgataacatcaggaagtaagatgaccaactcgagaacacacctgacacgcaggtcgtgttcttagagggacagtagggggagtagaagaggaaccacgacctagagcagaagatgaattgattggagaggaacctggttgaacatatctttgtgaaatggcataaggatttgagacaactcgtgcctgaccattgaaggtgggattaggcgaagacaacaatcttgattcagcattattagatgtgttggaagtattttgtgatttgaatcaaaaaccacatttagtagcaagattaacagaatcaagatccttgttatgattctccattcgatgctcttgagataataaaagtgtttcaatttcaacaacagagtagtcatcatatcttgaattgacatatataacaaatgtatcatacatcgatggtaagcctttaaaaatgactgcaatgtgttcttttattgaaactttgtggccaagtagacgatccacaagagtttttatacgaagtaagtataaatttatggatagagaacctttcttgaaatttagcaattgagtggtgtaaagatcaattttaacaaaagtttgagtaacaaaatatacctctagcattttctagatttgagcagaagtttcagtgccaacaatcctggtgagaatcatatctgacatggaagaaagaaaccagcaatagagaagctaatcctgaacttcccactcagtgaatcgaggattgatttgaccaaaatcttcatcttcttgagtgagaaatttacgtgatggatgaaacgaatctgagatgtaatcttgaagtcgatgtcctcaaattgcaaaaataacttgagggtgccagaggataaagttatggtaattcagtttgacatagactttgtgaggaaagaccatgggattgaaggtttgagctggagcagccatgtaatccagagagagaaagagagaaaagaacggagaagaagaaagcagaagcagagagagaaaaaagttactctgatactttgttaagagtgaagagagaaatgagaaaagtatgatttcattacattaggaaaggagcaacaactcgatatatatacagagtacaatactgttagaattagcaaaagctattgatataaaccgtcacctataatatactcgacggttttaaactgtcgggtataagggtctattaaaaaattgttatctacttctcgccacatttcccacgttcccacctacttcttttctatataccacatgcccacctatttcttctctatttttcacatcttaaaacgaaaatcttaactctcgaaaaccccatccatgccttccaccattgccctcctctctcgcc

SEQ ID NO: 32337 - DNA, 2715 bp, Cannabis sativa
gtgtggaaagctcttgaacaaaaattttcaagccaatcgaaggctcgattgttacaactcaaaagccagctctctaattcttacaaaggtaatcagtccatctctgattacattgataaactaaaagttgtttgtgattctcttgttgtagctgggcactctgtctccgatcttgacctagttcttcatctattgaacggtcttggacccgaatttgactctgtggtctctggtatcacatctagaagtgacaccttgtctcttgaagaagtttaagcattactgttggctcatgaaacaagactcaaaaggcattctacaatgatggacttatcaactaaaatggctgccaacctcacctttggttcaagaaatggtaatttcggattcaataataatgcaggaagagggtctggtgcagataattcttcaagattttctactcgtgtgtatcagccaccctccaactcgagatccaccaactccaatcgacctttgtgtcaggtctgtatgaggtatgggcatactgctcccacttgtcactatagatttgataaaaattgggttacacccaaagcacctactgccacttcccaccctcaagctcatctcacagaacacacatttgactatgatcctgctgcctttgttgctaatactgttcctgactttggagatgatcaaggctggtttgttgacaccggagccacccatcacatttcctatagtgacactcctcttgacaattccattccttattctggccaagaaacggttgctgtaggagatggtaagaaacttatcatttctcatattggtaaagctttctaacctgctaaaaattcctcatctttgaatctaaattcaattttacatgtaccatccattaccaagaatcttgttagtgtctcaaagcttactaatgataaccatgtttttcttgaatttcataaatcttgttgctttgtcaaggacaaacaaacaggggctgttctagtcaaagggaagcttaaaaatggtctctaccttcttggtgatgatggctcctctctttctcacacatctgttcagtgtcacctagctgaatccgaatgtactttcttgtctagtcaatgtaattcaaagtcttgtacttctcattgtagtccaaactcttgtaattcaacagataataataagattggctttcttctccttttaattgtaatgttgctgtttacaattctactctctctcatgatatacatctgtggcatagtaagttaggtcatccctcacctgctatcctaaccgaaatcttgacccaagccaatattccacactctttgaaaaacttacaattctgtaatgcttgtcaactagggaaaaatcatagacttcctttccctttatccacatctagagccaatcaacccttagaacttattcatacagatgtgtgggggccatctcacattgcttccaaggataattacaagtattatattgtctttattgatgattttagcaggttttcctgggtttttcccatggctgtcaaatctcaggcttttgaactctttattcaatttaaaagtttagttgaaaagcagttcaatctccctatgaagaaagtccaagctgatggtgggggagagtttcaggtatttggcaagttcttaagagatcaaggtatttggtttcaacactcttgtccacatactcatgaataaaatgggagagttgaacgaaagcatagacacataactgagaccggtcttactctcctcgctcaatctggtcttgacatgacctattggtggcatgccttttagagtgctacttatagtatcaacagaatgcctacacctattttgcaacacttgagtccatttgagtgcttgtttcaacagccacctgactatagcattctcaagccatttggatgtgcttgtttcccacatttgagaccctacaatcaccacaaactagagttcagaactgaagagtgtatttttctgggatactctcgaaaacataaaggctatctatgtgaaaatccaagtggcaggatgtttattgctcgtaatgtggtattcaatgaactctcctatcctacaactcgatttcacagcccctctcaggtacatactgaaccttctaattttcccacagctcagttttctaccagtaatagtcctgcagaatctaattctatgctttcttgtgcttcaccaaatgctacacttgagcctcatgctcctgccccagcagaaattaatcaggctcctgatgcaactacttctgcaccagcagcaactaatcaggcaccagatactgtaaatgagactaatgctcttgcaccagcaactattactcatacaccatccattgacactgctccagtagcttctgatgcttctgcaccagttgatatcagtaacaacatcgtgcctgctgtgactcactcagttttacatcccaccagtaatgtttctgctggttctggtgcatctctcccactaagaactcattcaatgactaccaggtctcaaagagggatatataaacctaaggcttaccttgctactcgacacaaattgcctgagtcccttgttccaactgaaccgaaaagtcttaaagcagcacttaatcatcctggctggtttaattcgatgaacacagaattcaaagctcttatttctcaaggaacttggactcttgttccttatgaac

SEQ ID NO: 32338 - DNA, 2182 bp, Cannabis sativa
aggcggacccgggagtgggcaagcgagcaattactgagcctcacttggacctaagagaagaccttgagttggcaaaactcaaggaagctgtaggccatgcagacctaactgaagaaccatgtgctactgattgtgatgttttagctcaatagagatgcaaattcctgagatggatggatgactaggagtacatccttggatctcaccaagcagaattagatcgctgcaatcaggagtctagcaattcaataagacaattcaatcagagaaccgatagaagaggccaagatctccttagggatccacttcaaggaagactgtcaccaagttccttaggaactagggcatgtcttcccttgctagagggaggatagacctttactcaaaggtcaaacagtgagaacaaccagatgtcagcaactaacgacatggggggccaaccagggatctctagctcaacagtaccccccattgtgcagccactggccggccaatactagttaatgctagcagaatacttggataagaaatccattccaagtataatatcaaaatctaataagcccaattccactaaatcaacactcaactttctaccctcaattctgatcggcataaacctaacccacctattggagataactaattctccgccaagtggtagggttccaaacctttttcataactattaaacagtctacccatcttatcaattattttggctgccacatatgaatgagtggccccagagtcaagcaaaaaagataaataagagttattgaccgagagttgacttgtaacaaccgagggactagcttttgcatcagcctgagtaagagcaaacacccttgctagagcgggcttttcttccatcttttgttcttccttctttagttgcaggcaatctcttttataatgtccatgcatgccacactgaaacatccccaccatttacactcacccagatggtgtttcttatagttgggacactctagatgagtgtatcgagtttaagagccaccttgatggttgccacgaccttggttgttctgactcaagccaccggatgctcacagtgcctttctcttctaataggcaatcataaacatgcatgttgaacatgtaatcacatatgtatatcattatactaatcttaccttgattttgaattcaagtgtgccgatcaacctgagtagaactacttctcgacgatttatagcccctaagtcataatatacgcaaatttgattagtgatacgctaaatcactttccgaagaatttaacttgaaactaaaagtttttctgtcaatatatagcaagacaaagtcctaagcatcaagaaaacacaagaaaaaaaacaaaatagggaacttgcttgaaaaacaacaggccatttcttggttctgcaccaagaaaaatggtaggccatttttcaatgcagaaaaaaaaaaaaaactccccaaattgacctaaaacttccccttaaatttccataaagctctagaacacctatacatgccataataaaccattttcaagcactagaacctcaaaaaacacaaaaattccaaaatcaccattgttgaactaattgagttcatgaactcaaacttgcccaactccacaaacaaatctcaaattcacatcaagcaagcgtaaacaaccttaaaataaactcaaaaaactacaataaagctgatctaacctaaacggtaagtacatcaacaaattgcatgtttaaactaataaaaacttaccaaaaacaaaggagaactagggttagggcttaccttagaattatacctcttgataacttgttaaaacctctggatttgaagaaaagaaattgatttcccctggtttcctagctgaaccgaacaagagagagggaagaagccaaaaaccccaatttttttcttctaatttttcctttttcttctaattcttccaatgacttagataattcttaattaattataacactaaaagaatagtggccagctgtcacaaagagaaagggccacctaagcatcaaagtcaaaaataactaaaatcccccactcacctaactaaatgataaaatgacttaggggtaaaatggtccaaaatcataatcccgactaatctcaacatttccaatgtctaactagatcgctatgctattctaaaaatactaaatca

SEQ ID NO: 32339 - DNA, 1899 bp, Cannabis sativa
  modified_base (1870)..(1874): a, c, t, g, unknown or other
atctgctataaattctttatttcgtgaagcttctggttctgatgccaaatttccaagacgatgaccaccggcaacaagttgattgtcttttaatcaatcatccttgatttttacatgtcatccttaatttgatagtagcctgatgacattgttggggtttcaacctaacttgtactgaaacggttggcatatgattctgtatcagtctgggataatcagaaaattacagttgtgttgatcaaagaaaatttccctttatacagcatcttctgtcatctgaagatcttatttctgtagtgtgaatggatattgatattgtgtttcggtttcatgtgtttagtgatacaattataaaagaaaaaaaaaagatcacttgttccaactgtaccagttttctcagcatcataccttcagtttgttttggttttttttttcttttcttttttttttttccacactaaaatatctttaaagacattcaagaagaaaagcagggtatgtactatgtagattggagtttgagtctcttccagtctccacaatttttggagaacctgaatgaaaatgccagctaggccaacaagcccaataaatatattatgcattcacagctaattggcaataacatcttcacatgcaagcaattggtatcttatggctatgaaaaactcttaagatgataaattgttgagtcataataataaatctacaacataatattctcatctgtcttttgggccttgtcttctttaagcagagaagaaaagggtgagcacaaacaacaatataatgagataaaacattaattgtagatgacatatatataatatacgcacatatgtgtttagcactattagatgaaagataatgtagttgttggtgagtcggctgagaataatagccataaaagaaatcattgctttgaagattaaaacacctctaacaaacaagcatgtgatacttttaaagctaaatacactgagcaataagattatgttaattctttattttacttattgttagtgataggaaattacttccaacttctgaatcattcatcaactgatctcatggatgatgcaggaagttaaataatgctcttcttcccatgcactagtaatcatatttgttttgttactttaatagagtactaagctcatgtattattacaaaacataaacgagtatcaaattcttccaaaagaagaatataatccactcagaaatagattgatcactcatggttcaaaatccccattttttttttcttcccctttttgcatggtatattgtcaattaggccaatgaagtgtgtgagaaaagtaaatgtgaaccccactttcaatgactttcttaattccctccaaggaccttaatcatgccttgttccccgagttgggaaagaaaataagacatcctccaaaatctctatctccccccctctctctctaaaaagaaaaggccttaagtttgagtaggggtgtttacggattggtttagtctggattttcatagtttttgaatcaaaccattataacggttttttgaatattaaaaatcaaatcagaccaaaaaatttctcaaaccaaaccattaagaacggtttggtttgattcgaaactacggtttaagtgaaatttataattattcatatttttttaagtaattatactatttttactaagtttttaattttatttttcaaaatatgtatttaacatgataagtaatagatctataacatataaataatgatataaaaacattctcaaaagttaaacataacataaaaattcaaaaaagttataaataatacatatagtcatatataaaatatatgggtgactatttaatggttacatttttattgnnnnnatatggttacatttttctttaacct

SEQ ID NO: 32340 - DNA, 2071 bp, Cannabis sativa
aataacatatgcatgacattatactaatcttacatcaaatctgaatttaggtgtgccggtcaacttgagtggaacagttgctttgcaaattataggctcctaaataacattgataataacattgataagtaacacgctaaatcacaatcgggacttaagttttaaaccaaaaccttatctactggaacttaatatggaaataccctaaactagcagggcattaaccaaccagaaacctgaaactaacgggaattgcaaagctaaaatttttgggagccctactgcagaaaccggttacctagttttacaggtacctgtaaaactgattaccgggttttccccagaaaacccaaaaaaattcaaagcttcaccaaaatgattccaaacttaaccaaaatttccagacctgcatattatacatattttccaagcaacaaaataactacccaagctcaaaattgaaaaacaccattaaagctccaagtttgagttctaaaactcaaaacttgattaaacctaataacatccattaaatcatgcttaattcaacatataaaaccataatctaactccagaaacacaattcatacaccaataataaccacaatagctaataactcaatttcatgctaaatccatttcttaaaattcaagaaaactagagaaggaattgctagaagcttatcttggcttggattcactaagaatctctagaaaacacgaaatttgatgaaggaaaacaaagaaccctagctggttctatagggttcgaatgagagagagagcttgagagaaaagagcttttccttgatttttccttattttgaaaaatgagtaaatgaattttgttttatttaaaaaaaatatcagcttataatccatataaaaatcagattattaattaacaccaagtctactaaagggcaaaataaaaatggcaaaaagacccatttgtcattcccacactaaaagtcataaaatagcacttagggatattttgggaaattctaaaatctcgactattcgcgaaatttccaatgtctaattttattgtccagctatactaaaaatactaggatgtgattttaatagccaaacaccgcgtttcaatgttgtcgggcataaaacatgcaaaaaatatgaattttctatatatgacataaaaatgctttttgaattcaaataaatcatcataaatatataattcaacactaataaataattttcataatgaaaccctaattatttgctaattttcaaattaaagctaagcggtctttacaagaaatccatgaaagtggtcaaccaaatacacaaagtgaattccgctgtgaaacgtaaatttttgggaaccaagcttgagaagtacactaccatgatctattaatctatatttttataagagaatttgattcatccataaataaataaagtgggaaatttctataccttttaattttccatggatcgattattgaagaagttccaacaagcttggttcacccaacctgtacttcttaaaagtagcccaccctccatatttcaataggatggtcacaaatgttacatgctcaattttccaataatgagagcctccattgggttgtaaagaagctacaaattctcttgtcatgtccttaattataagagattttagatttggtaagtgttctatattagacggaatctcttctaataacaagcaatctccaatatcaagctgctcaagatgtggcagtgctcctctatccattttcacaactttcaacccttccaactttctaactattagatgtttgagtcttttgaaactaccttcttcaaagtgcaattcctctccatcataagcctggtgcaaacggatgaattctaaattgggtaaatcttttatgtttcttaacggttcattgctcaacctagtgaaacgtaaggtcaatccccttagattctgaagcactgagatccagcttgggaactcttttaatcgacatcgcaagctgatgaaacgcaaagagcgaggcggagataaaatgctttcgaagtctaaaatttcctcatccctaaaagaagt

SEQ ID NO: 32341 - DNA, 2771 bp, Cannabis sativa
taatttctaatgtgactctatgaaaattataatagtgagaataatgtaaggcatatctcaaatgaatgagatgagaaatagacttgatgtcttgtatagtgcaggtggcatttgggagagagagaataccagttttctaaggtttccaaagttaaaacttagaactcgggacttggcccctagcacttagaactttggcttttggtctagcctaatgctcttaatatagatgagagcttacaaaagatctagtttaagatagattaataaaactcaggaaatggatgcaagttaaaatgagtggagatggataagattcaagttgacaataagatggaaattttgcaagcataagtgaacaaaatcgacgaggaattctaagaggatagtgaagggagtgatgaaaatttgatttaaatagcgaatggatgaaaacaagaaatacaagtaggaacgataaagaagcatctaatttttgataacccaccatgagcttaccttggaggtaagcatgcttaacttggggtaatctcaagatgggaaatcttctggggagtcatctcggaaagcgtacgagtgaggacaaagtacgctagaaagattcacattaggatgcaaaattgttagtcattcccaagattatcaagaggaaggaatgtgttaataagtaaagatttacaaggtatcaagataagaatatgttaataaagaagtgctctaattaaatatctctagaaaaatacttaacttgttaataagttatgtcaatagatttgattaagaggtcccataggaagaatagaaagacacaattataaactatgtattgtgggatcttatggtttcgaccaagtagtaatggttggacataccgagttaatatattgtctactagtgcagacaatttatacgataaatgtggatatggaattcatacgaatcaatagtctaatcttgtgaaatctcaaagttggtatctttggctataaagttaagaattaataaaggttagcgagaactatggggattaaagtgaaaatagtacaatgttttattcttgaaaggtggctaatctgggaggatcaatagaatattagaaatatgttgtgagcatatttgataaaggttagattatcttggaataatcttttcccctgacgaagtgtttgtctaaaagtgatgattatatgtaccattggttaggtactttaataagtgtggtacgagagagatgttggacgcctattcactggagtaaaacaggtattaaaagaacatgatggactaaaaagttccaaggaacctataaaatcattgagtgagttcaagatatatacttgcttcttgagtacacagaaaagctacactgatttaaagcgtagggatattaaatttcatgtgagaaagtcaccatttcttgagtatcacctatgacaggggtgtgtagaattggaaaaaaatagaagattaaaccttagatacatcaatcttttttagatattggattggattgaatttgattggatcaatttatatataaaacgtaacaatatataggttagaagttataaacagaaaacatacgaatctctcatcctccgatgaaaccctctctccctatattttttttttttcaattttcaacctgaaacctaacgatctaagctctggtagtagcgagatagcgaattctcagagcgagaaagcttatgataaggtttaattccattttatgtttaaaataattggtttcgtatagggattttgtgaattagaatagttatgaaggttttaatcttatagaattgttatcgggtagtcatgggactagttccaatattttcttaatgactttgaggtgattttgagttagaaattgagtttagaactttttaaagcttaggttcgagctttaatggcgttttctgtttaagggcttaatcttaatttttgttatgtaaggattgttgtatatatggtatatatgtgtcctgtgaagtttggaatgatttggataggttttgggagcgttcagtgagtgcgaaatttgagattttcgtgcccaaaaacagtcagctatttttaccaaaatggcttgtcgtttttagaaattccagggagatctgaaatcgtatttttattataacttttcactcgggtgtccattttggacgttctatatatcgctttgaagcttgcaacgagctctactatatggagtatgtgttagagccaaaatataagttttattttagtgtttttgaactacaagatttggtaggaaaccttaggttgtcttttgtaactattaagcagtattttgagataaacacttattagtttattattattatggcatagggcctgtaatcatcgatcgtacttcaagaagatcggccaacataccttaactagaactagaggtaaaaaaagtataatgtaccacatggcatgacaggttctaaaattatcgattgtctgattatataatgataatgtgatgataccatggacataatatatgggctcacctgattaggtgatgtgatatacctagagacgtactgggcgtaggtacgagcgttaatgacatatgataagtactgagcgtaggtatgggctcacctaattaggtgatccgatatacctggcaacataccgggcgtcagtgacatatgatgagtaccgagtgtaggtacgggctcacctgattaggtgatgcgattctcctggaaacgtgtatatacggcgtcagtgacatatgatgagta

SEQ ID NO: 32342 - DNA, 3640 bp, Cannabis sativa
  modified_base (1646)..(1647): a, c, t, g, unknown or other
aatcttattagcattgtattttttacatggctgatcacaattgtctagcaactgttatgtaatcttaaaaaactatttcagtatggaaaagtaataacaatctatcaaagtaacttttcatgttgtaagagtttacatagaaatttaaagaattcaaataaatgtcttgtctctatttaattacttagttgtggcatgtcttttgattgtgacttttttctccacatttgctacaactattctatttttttgtttcccatccacctataaatcttttttccttggtcttctagatctcactttctagtttggtgacagaacaatgatatccttgatgttttgaggtacaacccatgttgtgtgattgtatacaggatatattgacctactatatgttttaagccatgttttggttgtgtaatactgtgaacagtaattgtaaatatttaagttcatctttttcatcacagcaagagcatgagcacatggaattttatcttgttgaaatctattgtaactgcatgcttttttcttatagattgactatccatgaccttgtttgttgtaccactttaaacatgttgtcgtttattggtttcccctgcagatttggtaatgataatcaatgtattttatattcacaaaactgaaaacaaacttcaatgaaacgattttgcaacatgaagtttaatgaattcttacattttctgtcaatgagtccataaaattgttaattaacttcttctcagcaagtatgtgtcaaaattattgtagttttctatgcatttttcctattgtgtgtgtctattgttgtatcaaagctctcaatgactctattagtgtagtgattggtagttctctacctgctaagtttattgagtttagagattcaataatgttagaagtcatagttgtatactttttatatttgttatgcgaccttgaccatttgtggtatccaacttattctaaatagggtctaacacacttgtttaagctgtgaagctcactcgtatggtattcaaatttcatctctatgtatgcttttgctactgcaaagaatggtttatcaagtttacaaacattcttcttcaaagtttctttagggttgcttaatatgtggtatacacagtaaccgtgagttatatctagaaatacatgagcagctgccttagttatgttctcatgtatgtttgagatcaagcactgttcttctctgaccctatattcttcccttaatttcgtaaaaaactattcccatgagttgttattttttgaatccacaatagataatgctaggggaaaaatgtgtccatttgcatcttttatacaggctaagagcgatgtccctccatatgttaattttattgaagcatctactgctacaaacaagtacatgaagctgttatctttttcagtttgcatgtgtactatggttcctggattatagttttctacaacatgtgcaaaaaacttggcaacagcctaaatgactcttttattttacttttcttcctaattcttcctgtgctgtgcatgctctttacttctccatgctttcatgtagttcatttttatgtcatacttatcattcaattctcctttgatgtcttgtagcgtttgagttatttttatgttggtgaacnntggcttaatgtagtttccaatcaactttattgtattttgtcacttatatgcaaatcttatgttgagatcacaagtgtgtatcacctttttgtcatatttatagattatgaaacacttggttggtctgtttcttgatgccgttaatgcccacgtacattttggatccaagcaacaaattttatatgtttttgtgtaagactttttaaccttgtactggaagttgtttctaattttatagaaactaagcacactttgtagtgtttctttgtccttatatatttgtgcttcttctatttcaagatgttgaggatcagtgattagtagtttgtcataattaatgatttctacctctctattcgggttgttttctagttgcacaactaattcctcagccaacaattttgcacagtccatgaaattgaacattatttcaccatctttcagcattgtgtcttgcattgtttgttgttgagttgttgattcttttgttggtggtgcattgtctatcattgttgctattgcatttgtttgtgcaactaatgagttgctcatttccaaaaatgttggattgttggttgttgttgtgttgctgaacacattcaaatacaatggatacgttgtgaattcatgttccttcagttttagttgtatgtaagagtatagactttgatcatcctttctccttaactgttggtatccttctttcacttggtattttagtttcaggtcagtattttcttggttgcattccagcactcctttcagcttatgtattagttcttcgtatttacaatcaattgagatgaaatgaccactagcttcgtagttttcatgattcattccatcatcaaactgtccattgcaaaagatgaggaatggaattttgtctttttcttaagagtataaaagtttaattattgtaagtcaacttgtgaaatactgcaataaaactgtaatgcaactattatatatgttgcgagtcaattatcataaaaactcaaaaaaaaaataattcctatgcaatagagaagaaacttactactatcgactttgctctgttcaagtcatgtattgctaattttgagacttgtatttattatataatatcattgtagctcaactattattcaattaaaatgcaactaaggttttataaatgagaatctttaagaaaccttttgtctattttttttttaccatttaacaacaatcaattgtacattaatagaaatatgtggagaaacaactcttagacatctgtcaaccaacttaaatatcaatcaattgaatatattcatatagttaaccatgttataaaagtttctttaaagagatttgtcttgcactgattatatgaaacacctgtaaattaaaccccattattacattatcagtttgtaattactgatatgtcaagtttcagagtgttagtaaaaccttaatgcaacttttcaaaaacataaaaaatcatattaataattcgatgtatgtggctctagatgcatgcaaatttactatactattagtgatttgatatgaataaatttaccattaaaaatatgaaaaataacgtcaatgcaactagataaacattagctacaatattgatgtactttttcggattatacttgatttagattgatcgggaactccagatctttttattagagatctacattttatgaatctgaaaattaaaattaagaggattgttttttacaaattaaattgtaattcacggctgaatttatgttttaaaccagtttttctacacaaatttgcatccatcgaaaattgtagatgcttggattgattagggtcttcttctcaagtgaagtcaccaaaatttatgatggatctctgtcaacagggttgttttatagttgggtttctgagttgatcgatagaagcttgtgtaattttgcttcgtgcgactgaagacttaaaaaaaagtattattataatatttagttcttgatctgtgtaaatattt

SEQ ID NO: 32343 - DNA, 2065 bp, Cannabis sativa
ctggggattagatccaagatttatccaaaacttgtgattgaacctcgttaattgttgttcattttcatttctggtttgctggtttatgtttctagcctctattctttcttgttcttgcattcttagtgcttaagtgcacaacagtgggtttagacttgtttcgtttgatttgtatttttcgtttatattttagcttgtaaccacgattttcctacaatgaagaggaagatttgtgcatggattgtttagaaaaatcctatttaattttctgacaacatcactacatctgaattgtaaatataaataaaatgctattttctaaacaatccatgcacaaatcttcctcgttcaattagttagttactgttacaacacaggtgttatgaatctgtatagctgagccaatcagagctctaagaagtcagtcagttaatcagttagttagttggttggttagttgtccctgcatctctctactcatacaatttctatataaagtcttttgagaggtttgatggtgtaattctctcaaaaaatgtatagttgattgaattggattagcttagaggtgatgaggtttgcgtatttcttgtccataataaatattatgtttttgcctactttgaaaattcaatggtcaaattaggagaaaaaatatttgtgaatttatacatattgtcaattacaaaacccgcctaacttaatatattctctattcacacaatcacatatatataaaaattctacaatgtactatttttcaatggatgtattcgaaataattttttagttaaattttttcttagggtcatatacgttatagctatttaagacatgctgcaaaattttaagaaatttagaaaaatttaacacactaaaaataaggttcaaaaagtgtgctgcacgcgtgaactattttattttatacgcgtgaattattttattttatacgcgtgtaaaatagattgtttgaatactattttctatattgtaaattattctgaatttttcaaaattttgtaagatatcttaaataagtataacgtaaacgaatataaaaaaaattagactaaaaaaattttctatatgtcaaaatataaaaatagcattatacatggtgatgataaaagtgcattattattgttattttgtcttttagttttaagagaaaaatcatgaaaacaaccaaatcaaaatcaagattttcttccattatacatatcacttttgttcccttccaagtaatttctcatttaacttcctttattatttttattttttttctttattattaattccaactcaaagcaaattgaatgtatgaatgttgttgcagtacaataagtagtattagctttaatattatacactccaatgagtcacctaagaaataaattaaagaatcaatgttttaaacttttaagtgttaatttatttggtctgaaagtcattcaccaggagatagttttttatgtaaagtaaactctgttgtactaggatttagatacactgatttctctgagaaagtgattttggttgttatacaaaactcaattgattgtgtagatcaatttttaaacttttaagtgttattttatttggtctgattagtggatagactcattgattaaaactgctttcaaaagtcaaaaggtttagattggaagtaatgttaaacatgaaagtcattcatgttgattctaagatgggcagtgcattgttgctaaaaatgaatggtaaaatggattaatgattcaacaaaataacttgctcataagtttctttaaaatacattcatttggcaaacatagcctaaaagaaacatgttaattacaattacacaacaagatcaaatcattcccattaaactggattgatcaatcatcctacctatatattacattgaataatttgcagcagctcacaatctaattttccttctttaattcctctccactttgagatggttcctcggtttggattgactctttcgcaagcttcccaaccttgggatacttgtcagtgaacttatactcccaaccctccaaaacttgatgctcatcag

SEQ ID NO: 32344 - DNA, 4600 bp, Cannabis sativa
ttttagaaaattatatagtttttatatgaagtggacaactatataatttttatggcaattgacataaaattggtgccccacactttgtaagagattagattaattgacattattggaggctaagttccaattaatcttagttgtttatttacactaacacactagctatatagtaaacaatataacacattaatcaagtaatgatttttttatgtaataaatcaaattataatataattacattataagctattataacacatgttttggtagagttttatggttaattataaatgaatcgaaactgatgtcagtagtgatacacacaattcaataatatatggattattaatttattcaaaatttgggtccacaaaaccaaataaaaattatatatttatataattaatcacccaaaaaaatatagatttataaatatattattaaaagtacagttacatgcatggttgacccctatattaagcatcaaataatatattaatctaatccagacaaaactttacacaagttacaatgtatgtactataatttttaattccaaccttgtcacatttctcaaaattggatcaattttttattggtatataaatccaatctatattaaaagctagatgatgatatgaagccttaattcataacaagaaagaaagaataagaaaaagaaaaatggttgaagaatatgatagattgaaagagattaaagcttttgatgagactaaagctggagtgaaaggccttgttgatgctggaattactcaaattcctcgtttctttcacaaatcgatttctgatgatattcctgttttgaaagattctcaatttagcgttccaattatagatcttaaaggttttaatgatccaattaagcgaaaagagatcgttgatagagtgagagaagcctcagaaaatggagggttttttcaaattatcaaccatagcatttcgaaaagtgttatggaagaaatgaaagaaggtgttcgtcggtttcatgagcaagaaactgaggtgaagaaagcgttttatacaagagattatagtaaagcagtgatgtataacaccaacaatagtttgtatacctctccatctactgattggagagattctttttcttatcgaatggctcccaatactccaaaccctaaagaattgccccttgtgtgtaggtatgtatgtactagtcttgtgtgaatgaatgaatctcatgttgtttataattttgtttgattttcttttctatatggtgttttaattaagaaggattaattgtataacattccttttgagtttttattttttcttttgcttaaactttatagggacatacttgtggagtattcgaaacaagtaatgaaagtaggaatttttctattcgagttgatctctgaggctctcgggttgaatccaaatcacttgtacaacatggattgcacagagggtcatctagttttttgccattactatccaccatgtccgcaaccagaattaactatggggacaaacaagcatgccgatatggatttcctcaccgtgctacttcaagatgacatcggtggtctccaagttctcaacgacaataaatggattgatgtttcccctcaaccgggagctctagtcgtaaacattggagatcttcttcaggtaaactactattattggctatatatattagtaaatttatcatattttagctatatggtcttaactacgtcttaacacataataagtttcttccttaatcaattttgatcttcgatcaaataatttatttatttatttttgttatgttttgtagcttataacgaatgatagattcaaaagtgttgaacaccgagttctagctagccatatcggtcctagaatttctattgcaagcttctttgccacatgtgtaactccaacctcgaaaatgtatggacctattaaggaattgttatcggaaaataccccaaagtatagagaaaccacagtgcaagagtatatttcttattttggtgaaaaatgcattgatggaactaagcccttggatcgtttcaagctcaccaaaacagaatgaagaagggttgagatactttgtttttattactataaataataaataatggaataataaataaaaatataattatatatgtgtgatgaaattaaagtattaaatattgatttgtaaacatgaatgtagaaatcatgtatattaagtggttataattattctattgttgatgaaaatattgtgtacattattataatattatattatcatttttctatatattattgtctttcgtatgcttgtataatccttttccactttagttttggagttaaattgtcatgaaaattaaatggtactctttggttttgatattagtatttttaaaaaacttttgatctacaaattaaaccaaatagtatttaagaaatgcattatataaatattatatagagcagtgttaagtggtgcttagtactttttaaatatgttgtgattggttagtgatactatttaaaagttaatatatttaaatttaaactatatagaacttgatactttgttagaccaatagcgatattgacacgtaagagagtgttagacactactagtcccttttagcatttctcacttatatacatgcattagaagttgtataaatttatatagataagttttaatagttataataaatatataattgtgatggttacatttatttttaattgttggactattattaaacaagtgcaagtgattaacatagaaattaattaattataattaataaactaagtgtaatatgatattgtcctaattttattttatttccacaaagtgtattttagtcaggaagattgatttctgacaattttatgttctccattgagattatgcataatttgaagcaaaagcggacaggcaaaaatgaatttatggctttaaagctagatatgagtaaggcttatgatcgtctagagtaaccttttttactagcaattttacaaaggataggctttagtggtacatggattaagctaataatgacttgtgtgttgtcagtctcttacaagtttgtacatggcaaaagggtgatgggtcttttgatcccttcttggggcatttgctaaggtgattatttatcgccttatttgtttattatttgtgcaaaggagttttctttccttttacataggtatgagatgaattatttggggttgtaaggtggctaggagagctctagtggtttctcacatgttatttgcaaacgacagttatgtgtattgtaaagctacttaatcttcttcgggtatttgaaaggtgcctctagtcaaaaaattaactttgcaaagtcctttgcttttttcagttctaatacagcagttagtgcaaaccaggatttgtggtttattggggattcaggaagttgatttggatattacttatttgggtcttcccaatactatgggtcgtaagaatactactattttgggttttcttagtgatcgtttgaagaagcggatccaagggtgggagggaaagctactttcttgggttggtaaagaagttcttctaaagacggttacccaatctcttccaaattatgctatgagtatttttctcttaccacttgtacttgcaaagaattggaacgtctcatggcaaggttttggtggcaatctgattcttctcaaagtaaaggcattcattggatgagttggtctcgcttgagtcgtcataaacatgatagaggtttgggctctcgtaatctacatgattttaatttggctcttttaggcaaacaaggctggcatttattgactcaaggtgactctctagccggtaaggtttttaaggctagatattatccacatggctcttttctttcagctacaattggtgataatccaagtttcatttggaggagcatttttaagtcccgacaacttattcgagttggtgttcgtagatccattggtgggggtgatgaaactttcattttgggtgattagaaagcacatacgggggtaatgaccacccgtatgtgctttctaatcacccaggtttgacaaacaaggttgtatcaagcttatttcaattgaatgagagagtttgggatattgatatacttcatgatttgtttaatgcctgtgatcgtgagctgattctagacattcaattgagttctactcctgtacatgatgggtggtattagaagaaggaaacttcaggtatctattcaattaggagtgcctaccattttttttaggatttaaaaggttcgtggtctttaaacaataatgcaagcttttggcgcaaactgtggaatttgaaaattcccccagaagtttggaactttctttggcatgctatttctaattgccttcctactcgggctcaactgagaactaaacatgtggagctagttaattttgtccaatgtgtaatgcttatgatgaatctatttttcatattattgttggatgcactttcgctaggtcttgctgatttagaacttcaatttctctgggtaatgttgtttcaaattttggagactggtgggccaatttgatgtctcattcgagtact

SEQ ID NO: 32345 - DNA, 1347 bp, Cannabis sativa
ggaatttagctcaattagacaacaaaaaaagtgataatattgatttgattttgtaattctagcatataatattcatctataatggctatgaaagaaataagttatgactatagtttcatgaataataaccacttaatctgttttgaattgtcatgtacaacgatgttatggtttatatatttgctcatgtatttaccacacacatttacttaatgcagctaaaatgctattatgtgttaagagatactcttcatagagaaattcttatggtgtttgatgtctcaaccatgatctttggtgctgatgtaacacacccacaccctagagaggattttagtccctcaatagcagttgtaattaattaataatcttttattccttttttatggtgtgtttgttttggtgtaatcaaagttgcaatttaatgtatcattatattatttggtttcactttaaaacattgtaatcctattaggtggtaattgtaattatcttatttattataatgatgattaggcgagtgaccatgtttacaatattctattaaactttccaaattctttcttttatattatactaaatcttttttcttcttcttcatcttccttcaaatagggaacacttatgttcttccgtagagaaacaggagaaagacctaaacggattatattctacaggttatttatttacctcacttatagtaaaaaaaatgatttttcattactttttgcctttaattgactagattttgtgctttttggcagagatggtgtcagtgaaggacagttcagtcaagtgttaaattacattgcaacacatgatgtcgatgtcacagatgccacaaataatgtcgatgccacaaatgcaacaaccactgcagattttaggagtacaacttacaccttcgtaacaaactcgagggaatgagaatggtggtgatgataatgaatccacgttttagatgtttagtttattatttttgttagtatgaacatttatgaacacttttaaatattggaacaatgtttagtattaaatatgcaaacaatgtatgaactcttttagtattaaatataaaaatattttgtttttaaggaaattatttagaaaaagtgtgatattaaaaaaaatttaaaatttaatttaaataaatttaattattctaaaaaatatctcaaggacgtgagtttcgtttcttataataaaacagtcgttcttaataatgtgtaaaaactaagctcctaactaaattttttggaacgactttcacttttcaggaataactcatttttcgttccaaatattttagcatcaggcatgtgttcggattttatgccctaaataaaa

SEQ ID NO: 32346 - DNA, 1408 bp, Cannabis sativa
attaatctgatacctactcattgcaaaacagttgaaagtatgatattcgtaatcaatgtcagattataatcaataaaatcaaatttacaaattgaatttaacaataaaatcatataaaccctaaactttaatcttaaaattttctcaatttacttaatgattttacgcataaaatatatcaactgaaagagaatttaataaggaataaaatccctaaagttttaagattcaataacgaaaaaatttaacaaataatacttacaaaattaatatgtaattagagataattaacctatacatatcaattgttatgcaaattataggtcctaaatcatatacaataagcaatctgataccacatgttagaaaattaaataaactagaatataaaatttgtatataatttagaacacaataataaaagggataattgcgacaaaagtcctcaaaaacttagggttgaggcagattagtccctaacctaaaaaattagcagtaatagtcccaagatcacattttctgtaagtctattggtccctccttctaactgatccgttaaacccaaataaaatggcacgtgtcaattttttattggtctaattaataataaaaattaaaaaaaaataaataaaataaaaaactaaaaaatattttttaaaatcataaatttatttattttttaaaaaaagaaaaaaaaataaattattttaaaattaattaattaatttttatttttttttattttttatttttttgcattcgcaaccgacccttgctcttctctctccctttcgtctccttcattctgtgacaaaacctccatagccaccatggtctgaagctccgaccaattttcacccattccactcaccgttctagctctcttggaccctaatctcactagccccacaccatcgcatcaccccaaaattcaggtcttcgtcctcaggttctctagacctttcccttcaatccagcatcaccatcatcacctccattcttactctggttctctcaaatccatttgagccacactaccccaagttcaaccgtcgtctcctatttctccaatgccctgtcgtcctcatgcttccctttcatacccgaccttctcgctgtccaaatctaattttttttaccaaaataggtttctagtgagaggtctaaaaatgcctcgttgtcgaagcctcacccaatagtgactccaatttgggcattttcaaagtccgacgagccaatctccaattttgggttttgaatcgatggtggtggaaagtaggactgaacccgaacccgaacaacccgcccgaacttgaaccggtgaacccgcaaatttttttgaaagaaaatgttcgggcaggtcaggttcaacccggtacccttagggcgggttcgcgggttgagtttt

SEQ ID NO: 32347 - DNA, 4744 bp, Cannabis sativa
aactaagcggtctttacaggtagtgcttgcaatattagcagaatatttttgttgatttttgaactgtaacttcctacactcaaactttgtgtgccctagtttcttacaatagttacacatgatgctctcaaaacctggtgttcgattatcaattccttgtgaattacctcttttgtatccacttggagtagaattttttctcagtgcagaattgttacgaatcaccaaggcaaagagctgaagaggtagtttctatgcaaagaacacgagtaaacacatcttgtaaagaggagacatcaaaatcaaagagaacttgtgactttgcagagtcaaattcatatgagagttctgcaagaaaactcataatagtcatcttctctcgttggcgctgttgaaccttcacatcaggactagatggtaaaaatacattaagttcttcatatatttttttaaatgccataaaggaactcataagagactgatcttaatttcccgcacgataaaaggctttgcaaacatcatatacgcaatgcaagatatgttgtctttgccagaatacaaaaactccaagtagtccattagttctttaaccaattcacaatgattaatcaaactaattaccacattatcgataggatttcgtatttgaaggaacaagcgagcttcctcacggagctatatttttttggaattgtctttttctttgggaggattgtcagtcacgtgatcatctttgtcaatactcctcaagtacagtcgaatcgtcttgctctattcctaataattcgaaccaatcaattatggtcaatgattttagtcatcatgcgaaccacatcgataacaaccactaatttcaaatctaattttatctttgcaataatctcgaaagcaaaaaataattgaaagagaaaatgaagaaagcgaacactaaagaattaacactcaaacacgaagagagcaaaagtttaaaactacaaaatgacaagaaccgccagatgcaaggaggacggggaagggcagggagtgtgtcgagcgctgaccgtcactgaaaaagatgttggacacgccctcacgcgccgacgcatgggattctagacagcgacaatcgatagcgcgtggggcccacacgcagtgaatctagatactcaaatttgggattttgtaggttggcgactggaaaatccttctctatggctgatgagaataaacttgcactccaaataggattcccgaatctcttttttattttttttatgaaccttaatttcaaatttctaatcacaattctaagtattgctctgatatcatgtagagaatggtgaatagaattgtgtggtattccataaaatagtatatatttatatacaaagctaggatactaaaatgaaaaactactaaatacaattaactctaattttgtacaactaatattgtaacagtaacctattattacaagtaaaaaaatataaccatcatagttacaataaaatataactattaaataatcactcgtatatatatttatatatatatatatatatatatttggataaaatcaaagatgcaaacaaggcctttaatctgttgttagatgagtatcaaccatgctacatgtctgtacatgatagtaaagaaataaaagaaaagataaagaataaatagtagtagattatcatcagttttattggcaggaagcagaagtaacttgtaaatttcatttgaatcttttgaaaaaagaatggttcaagtatagttattattgaagtgttttactacatcattattagtctttactcaattatgagggaagaagaagatacagcgacattgcattggctataatgagttcataagggaaaaaaatgacaggtgacgtggggaacagtagcaacatttttataagttgtaactgatcatacagtggtagccttgagagaaaggaagtctgagatcttgttggtgtaaaaatctggttgtatggagttgttggggctctggagcattgacaaacttgtgacacctattaaatcaaaaaaagaaaaataaacaactttcataacaactttgctcatgtaacatacaagcacccaagatactagacaggaaattgcgtatgtcattgaaaaacacaaaaagacatttaattaccagaaaggacaagaagagttttgcaaccaccattttgtccgaacagaatatcagtatctagtctgtccccaaccatgcagatctgtgacttttggatcccaaatctgtcaatacatttataatccaatgaaataatgttagtcattaaatttaaaaattccttataagaaaatgtgctagtgaaatcttttaacacagcttcattaatttcattcgtaatttggaattgggaggtagtcattacatgtgtcctattatatatcttactcgttcttgagtacgcacacatgtatatcccaatttgatttcatgtctatgttgttattattctaaaatccaataaagctactattttgtttcatagtagctgattcagtagcgaaatttttcagttcatcttttatcctgttacactcgtgatgattattcttatgcagtcactactacaaataagaatgaacatgcttatcctctgggttttggaggtttgaaaattgaaattatgtagtcacaaagatgtctcaacatgaaggttacatacattatcatcccatgtatgacacactcaactttaagatacgtaacaatggctattttttttctttttctttctttctctgtccaacccctacaacatttggggagtaggaaactatatttgctatgtagatgcctagaagggactcaaacttgtgggagaaaaatatctaacggtttgaactaatcctccagggctaacatgaaccactcattggaaataagatttaaagcacttattgttagcagaaagaaaaaaagttagaaatatgtatttatagactttagaattactcgtttgccaggtagtccatcataaaagttgagggttttcccacaacaagtggctcacgttgagttgatccaccaagagcaccaaccatggaaccaccacctgaaatcaaatataaataattaggggccttcggaataaagcaagcaaacatcatagttcttgattaaagctcaccgttcagcacacactcaaaaatagtaataaataaataaacaaaagctgaaaccagttgtatgaacattaaagaggaattattatgtatggttgcatttggcatgcaggatatgaaaagatgattgggaagggttgtgttgagtactatgcttccgttgatacagtgcttgatgctgatagacactgtggttagtaggagagggtataattgtcattgtattgagatggtagtgagtggagaataggatagcataaataggtgagtaataaaatagaatgggtaagcaaagtattgagtgaaatctctgcatcaatggagagttcttgctctccaccattgtaagagactttgtctcatgtttacaatatttcctatatttcaataatagctccccacaatctctactactcttctattgattgctactgtttcttgtttctagctactgtttggatattctgctacttgattgagtatttggcagcaggttcttatcaaatgttctccaccatagcactgatgttgccattatttgacggagaggatccatttggttgggtccatcgcatagaagactatttacgtgttaattggatttttgagagagaaaatactggttgctgaaaaatgtctagtggtgttgctcggctatggtttcagatggtagaggagcaacatccgatcaagcacgggttggagtttcgaataatgttgttcaactgttgcggtaaaaccaaggacgatccatttgatcggttgatggctcttcgatatacaaactcgatgatggagttttggacccaatttgatctgattgcaacacagttgccgagtattccgatgacattttttcgtgacttattctttgggaaattgaaggcagaaatcattgttaagatgcatgaattaagacctaggacaatctcagatgtggttaccaaagctcccatagcgaaagaacaactgaaaccacaacatcaaattaaaaaggggaagaaagatgagtcgcaaaaacacgactctcaggccatggcttcatctctaatttccactcagcgatttgaggttgaagagacgaagcttctgaccaatcggagctctcgaagggtaagatgaagttgttgggctcatcatcatttgagttacagcacatgaatgagaagaatgaaactcttggtagagagaaacaagagatgttgtctgagaaagaggtttcattggagatgatgccgaatgggatgatatgacagagacattgttggagagacagtagaagctgaagatagcaccagagaaggaagagttgttggtgtcgtcgccgaagggaaatatgtcgtcgcgcctgagaagaaaagattgtcggagaacgttcaatcgctggtgcaaatgcagggtaagaaatctcaagtcgtgtaggataattttccaacaaagagggcggattggaaaagacaagttgaagtgaacttaaaaccctaccacacaagcccaacccaaatggaacttgttcagatgagccacatcaacttcaacaaaattattaatgggaaatttaaatcgtatactaacttttgccatttttttacaaa

SEQ ID NO: 32348 - DNA, 1890 bp, Cannabis sativa
aatgactcttgttaatttataataacagaccttttctcaaaaaaaaaatatacgttatccctattattaaaaacaatcatcagagtaggtaatgggcagttaatattgtcacgtgcttatatctaaaacaacaataattgcgtgaaatttattactgtggaacacacgatacatttacttataaactacatgcaagtgatgttatattttaatttttttaattgttcattagttttgtaaattacaagacggttatattaaatataaagatagttttgtgatattttaaaattaacttttacattattgtatttcaatgcataatatatatagggccttttttaattttacacttcataacattttttttttttgcatttttacggaattctccatagaaacctctattgcagctagcgctgtaacctaaattgcaacaaaaaatcttgcaactagcgctgcaaccactttagaaactcaaaccgtgaatttaaaaaaaaaagttaaaaaataatatatgaggtaattcccctaatatatattcaacacatttatgacatgttaaagtattataatagttttaaaatgtcaactcgaacacgattcgttgattaaacaagttagacgagtaaatattgaaaattattgtactccaataaaaataccaaagcaacataattatataactctatgacaaataatactaatgtcaaaaacatggattaaataatgttacaatactgaacgaaatatacacataaaacagagaatatagaaatgaagagagggactacaactcaaagcaataagctacacataaaacacattatataaatagcatatataagagatgtgagatcaatatcaataccacatacagcacaatattgtaaaataagggaactaccaaacttgaacaaagtcttattttcctctaccacaagcacttaaggaaaagaaaagaatggaaatagctttctagatttatcaagcataaagtatttttagcaatgtgctctcttgatcaaaactagttgttcaaaagtgaacccaaatacctccatttatagtgttttgagggttcacatatgaaaattaaaatcccttcaccacatgggtgttatctgcactttaattggtgtttaatattaggataaaaatattggacaagagagatagaaacatgttgaataataaattcatgtacgtttatggacgttatttcaaaacttgctccagaggaaggacaacaaccataaaataacatgtcaaaaaccataaaacaacagttttcagaaaatccaaatgagtttttgtattttctctctgagctaaatctttctccaacgtctcaacacccatttaaatgatataaatgagtattgtaatagtttctaacaggtagaaacttattctattgattccataacctcaatatgtaataactcatttaattacatataatcaaatatgatccttaagttacaaaactattttcaaattttataaccactcttgtgttacaaattatgtgtatgattaaattatatattatataatttaatctttacatatatatatattaatctcatattaatctgtaatatatcacatcttgatattttaatctatattatattataacaaataatataatagtaaactcgaacacgacccgaacccatttaaggtaaatctaaacccgctaactctcgtgcagatttcgagttgtgttattgaactctgtgttaactcaaacttttaggttttcttgttttgatgattaacaaatattttattgttatttgttacactaatgatttgttgattttgtagcaaaattaaaagataaaataaatttttccaagacaaattggtattttaccaaac

SEQ ID NO: 32349 - DNA, 2372 bp, Cannabis sativa
gcaaaactttcaaaatttaagaagtctgtgtactgtgttgcgactgctaccatggtttatagtgcctgaaaaatgaagaattctgttatatgacagggtgcaaaaatagacaccaaccgaatggttgaggaggtaaaatggaatataaggacacgggtccatttcttgctcccaaagaagctctcaagtgtagataaagagtggttttttgctttatagatagaattcattgtaaaaatatagatggaaatgatggaaagataaaattgtataaattgaggcccttgtatttcggtgctcttaggttgtaaatatgtttgtgcaatacaactcattgatttatcaaaaagaaaaataatataggatcctgttatcaattaagatttttaattttagcgcaattgaaatgtaataaatatatgttttcgttcttaacataaagattttagagtcttgtagtgtgtattactaatgacagatttttatatttagattttttttattttaataatttgtataatttgaatttaaatttaattatttttttttatatatatgtatgttttttaattacttttagttttgacttttgtttttaagtagttttttatttatgtattttgttaaattatatatttatttaaataaataaatgtaagtcctaaatatatttgtgaaagaaaaatatattttttcaaatatttatatataatcaaaaaaattgattcaaacggttttattaatttctttcttctattaattttaataatgttctttgctaatgacatcaatattaaatgtagtggcgactataaaaaaaatttgatactgaggattgtgactttgagagtagtgacgactacaagtgagatataatgataataatgaatttgaacatagtggcaactacaaatgagatacggtaataacaacgggattgatagtggcgattataagtgagatgcggtactgatgataatagcgttgaatgtagtgacgactacaagtgagatgcggtgataaaaacgaccttaaacatagtgataactacaagtgagacacgtaataatgactttaaacttttgtttatttttcattttacatagctaaaatataatttttgtcttatattgtagcaattttaattatgtgacataaattaattttgtgattaatcaattaaataattttttttatttttaaaattaacatatagaaaataaaaattatttgagttaactaaatttaatagatattaatttaaaatattatgatgtataatttgaatttcataataaatatgaatttaaaaatatctaaataatttatataaacctaatatatatttaaatttaaactactaatctactttatttataaataattttgtacttaattttaaatatttttaataattttattattttaaaattttaaatttatgttttaattttttcattttatttgttaaccaattaatcattacctaacagttttctgttaattgttgttaaggctgttttagttgttaagtacgtaattactatgtaacaactttattttactgcttgtgtattgtattacattggtctataaataaagagctggcaattgggtaagcctttgcatttcactttgtgcctctgttcttacgttttctgctcttagcttcttttcctctgttctggtttttaccttcttcatggtatcatcgagtctttgacctgcgtcgatggaatcttccatctccgatccagcagccacaatggctactgctgcttcttcggttcactggaatccttttgcaaactcattatcgtcttctctcatcatcaaactcgaccacctcaactatctctcatggaagtcacaagttgtacccacggttatagggcatgatcttgatcagatcttgttctctgatatcaccccaccccaaactctcatcaacagagctcacaatcccgagtacctgcaatggaaaaagaaagatcagctcctcctctcttggattcggtcttcaatgtctgaacccattcttgcttcggtggcaacatttacaacatctttctcggtttggagggctcttgaacaaaggttttccagccaaactaaggctcgtcttctgcaattaaagggtaatttctctaaacttcaaaagggcacgttaccgattgcagaatatgttgagaaagctcaagccactgccgatgctttggcaattgctggctcaccagtcaacacccccaagatttggctctccaactctttttaatggtcttggaccagaatttgatccagtggtatctggcatcacttctcgtagtgatcagctttcttttgaggacgtccaggccttgttactctctcat

SEQ ID NO: 32350 - DNA, 3512 bp, Cannabis sativa
gcgtcttgtttaagttcttagactcaggcacagttagcatagctctaatgaactgagccacgtgggggtcatattcattaggcaaacattgacttctcttcatccgagccatgaaagctcgacaatacatgttgcttatagctcaagaaaagtcttattggattgtgaaaaaattcaagcaattttgaaggagaaaattcttaattcactaggaaagtattttaaaattttggatgtcttagaaaaaataattcaagaatttttgggagtttgaggatgcttagagcaagaccaacaatgaaggagaagaagaatttttttaaaaaaaatgccaaaaaaaaaagagagagaaagaaaagaatttttttttctaccttgaggatgaagaacacttgaaggcttgatgaagatgaaattccaagaggcttttctaaggcttgggcgtgcgcaattcaaatgggaagtgtgaaaattttttattgacaactctcttatttataagtgagttcaatctcctaatcctagagtaattgggagtcttttaaatttaaagctttaaaggaagatgtaaatgataagtaaaagatataaatatccttttccttctcttttcaagctaaattttgaaattcctatacaaataggaatgggatttgaatttaaaaggtaacatcagctgctaatgctacgtactaagattaaggaaaattagaagtataaaagaaaaagataaatgataagcaatacatcaaaaatcttttctcttcttctttctctctctaatttttgaatggattcatcaactaggattaagattcaaatctatttaatccaaatgctatgaaaaatataaggaaatttaaaaatgataaaagatatgttaaaaaatataagtttttcctctttttctttgataattggtttttgaaaattcacaaggactaagcaagggaatcaaaagtcctaatttaattgtaaatgcttgaagaatagaaatagtttcaagcaaaacgggctcggttcacatcatcaagttaactctacacaagtgtaaaattgagttaggggaaaattttaacccgaaaactttctttggtgatgtggacatcaatttaacacaatgcaggaaggatgatgtcacgaagttgagtagtagaccttgttcatagcagttgacatgggatgggaccctagcctagcgcccaggttgacttcgagagctctgagatggaggttcagactttaataacttgaattcaactcactatctttcagtattatgtaccatgaagatatggagtaattaaatccaagccacgagagctgaaattacatgaagctacatcttagaagataacttgggcccctagggttccaccttgcacccaagttgacattcccaattagggttttagtttttaggaccgtcttagtgcaaataggtcaaaatttctattgggacataaactagacatagtacagacatatttgaggcatcaacatcaaattcagagtaagtttatttttgaacacccagtgcctaggttgacaatttgtcaatatgggcaccttctaagtatcaaattgatgattccacttttgcatcatcttcatcttcatcaaaaatagggaaataaataattttgggggaataaacaacacttcatgggtgccaaaagcaagggccagcgcccaagttaacacttgggctggcctagtgcccaagttaacaatttgttatcctgggccaattttgataatgttttccaaaaactcttccatgcatcttctctatttttataaaatattaggatttaactattttttgggaccaaaggaaacttccaaagggccataattgggccttagatattttgtcaacctaggctatttccaatcaagttctcgaaaaagtattttgggcattttttctgtcatcagaattaatgaagattcaaacaaactcaacaacaaacccaagcccctagaaataggggtggtgcccagattgacctagtgttaggcccagcgcccatattgacaatcaacctggtgcgctagtttcaatcactcgaatcacaaatctaatttgaccaatgaatttagaattgtcaaaaacgtgttaggagacctcttcttcaagctcaagaaccttgaaagtatcaaaatgatatcccaggaggtcaggaatgagtacccaacgttgaggttgacaaatggcctgtcatttgggttttgcttatccaattctgattctatttcaaccttccgtctaatttttttttttataataactatgatccttgaagccatagaagtcaaattcacaacttcatgtttctcattttcagcatgggaaactcactcgaaaatgaagagttttgagtctctcctttctgcagaacaacaacttctctgagaactggtgatcagcttcgttcgaacacataaataaactaattagtgatgtcaaaatatctcttaaacatcttaaagtgcatcccttggatgtgttttacacttacccagggtctacgttgacgtcatatgtcaacctggatgctgagatatcaacttggacactggatgtcaacatgggcattgggtcttgaactgccttcagtaaaatagtcatacctcacttaatattaatcagattgatgcatttcaacttgcattttgaatctaattaaatgctctatcaagtcatgtatcatagttcaatcacaattctgaagctatcgaccttaaatttcactcccgagttacgaaaataaactctaggttacccacagcgagtcccactaggctccaaaaaatgactattaccttcaaaagctaattttcacaataatatcattgtaatatcttgagattagtaaatggattaacaaccctaatcaaattaattaagtataatgactaattatattattatataattaattatgtgaaattaattgatatttgttgcatttaagaccccatttatgttggggcattttgtaattttggcccgagaaaactaaatttataattttgttatttattgtgctagtggactatattattatatagtatgttcttattgtcttattgtaggtgatttttgacaagttggaatgatattgtcacaatcaagtattttgactttaaccaagtttggggtctaaaatttatgagttatgtgcctagtgcaataacatgaagtgtgtatttgcttatatgatgatatgagtatgtttgttgtgtgaaaggacaaaagtgtccttattgatcactattattattgatttaatccctaggagcaaaatggtcttttgaccactttttcttactaacataagtaaaatttcttttggctaagtgtaataattacaagctcattttttggtttcactactacaaaagtcaaaattcgcgacggtcctaaaaacactttttttgggagaccgtcgctaaaaaaagtaagtaactgtttaaaaccattgggaaaaattgtattcccgacg

SEQ ID NO: 32351 - DNA, 1557 bp, Cannabis sativa
ggcagtcagagaaaagagaggcatgatgccaccccgactgcaatattctgcagcagccccaatggaacgcctccaattccgcagcaaaaggagaggaagctttcctcttagcagttgcagcctcgatcatcacacccgatcgatccaacaccaagatcgcaatgatgccaaaatctccacggatcgccgcatccacaaagacattgacatcagtccaatgtcctccccaaatgtcttccacctgtaaaagagcctgtccttgctgctccaaagaaggaggctcaaaaacagagcaatcggccaccatcaaagagatatcatgctgaattttaggcactaccggagtatgcccttcatggaacgctgagtttctagccctccacatcacaaagcaaagagagattgcataagtagagaacttagcaatgtcactccctctcaaaggggtaccccaaggattcaccaaccacttgaccaagtccaaattgtcatcaaaagccatggaatctgaacaaaaaccccaagggcccgatctccacacctgaacggcaaaatcacagtgaaagaacagatgaagagccgagtcctccccagaattacaaagcacacattgagaactattaccgaaaatgcgttggatcctacacccaaacgggaggatgtctctagcaagcctccaaaggaaaatcttaatcctctcaggacccgaaactttccaaagagcactccaaagtgtctcaagaagaccccgatctcgagtgcgagccaagtatgcccttttaaccgaaaatagaccatccggagctgatttccaaaaaagctcatctttcgccaccaaaggaagcctaggaacctcgagggcatctttaaccaagccaggtaaaaaccaagtctcaagggcctcccgattccaaccgccacttttcggggtaaataaggaactaatccgcacccctttctcacggattcttggattgaaggaagcttcatacctctcccactcataactgggcagccacggggaattccagatatccaccaaatcaccattcccaatcatgaaacaagattcatcccggataaactctctagtggccacgatacttctagctccataagaccaagaggaagacttcggagtgctccaaaaggagctagatcttctaaaatacttatccttgaacacttggcaccacactgcattgctcccagccgcaagattccatccaagtttggccacgagggcaaagttaagatcctcgaacttcttgaaaccaagaccaccccaccgcttcggaacacaaattgaatcccagttggccaaagctagaaatctattcgaatcatcagaccctttccaccagaaacggcgcaccaacttatccaaggcagtacagatactcttagggatcaggaaggaagacatagtatagatagggacgctcaaagccaccgattgaatcaaggtagtgcgacccgcgagagataagagcctagatttccatccttcaatacgccgcgccatcttgtcaaccagaaagccaaaatccctaactt

SEQ ID NO: 32352 - DNA, 5957 bp, Cannabis sativa
gtagcatggccaaaagactatcttacacgtgttggaaaatacttggtacatgttttattttgtttacttaacatattgtgtttattgattaatgacatttttaactttatttttttccatatatatagacacaatcacccatcaagcaaccttagaagcaatccatgaggagaggcagataagcctctgaaaatttactcggtccttaaacatagcctctaaaataccctgagaggtcgagtaagccaacatgccatggctgttatttctaaccatgacaaactagctcaatcattaccttctggaactccgtcaaaaggtagttgaagtcgtccataatcaaattccaggttgcttatgatctatttcgggtcaaagatgactccatttggcttgttaaaaacaatactcatgaattgtgcaccatgaattactttagagcccaaccgataggagtttggtgcatttatgatttctaactcttaataataaacttgatcatatttttcaatagcgacggttattaattatgactttttatcaggcacattaaagaaagattattagacatcaatgggataaacatagtatataatttttttaaatttgactgtaattgccaccgaagtaggggttgacagtaaccgttgtcaagcactagtcactcgtatgactaggattaccaatctagataaatgggttattgctcctacaacaatcagtatgtagatttaaaatgaatcattttagcatttataactcttcataatatttattattattatgtattaacagttttacatatatttattcgtgcaggataataattaattggatgcttatactcatccaaccaagtacgccgatggtggtgtacttggattcaggcaatgacgacgtaccagatgatttaaaattcatcattttcccgtaagttttatatctaatatcccaatatgtaagcgtattttaatttataaatttatatatgctaactttacctttttgtgttgatcgttcaccatatacaatcaaatggcaggacgacctgatagacccatctagtagataactcctatatgtcctgaacaacctgacaacaaacaatgtggatactacgtcatgaaattcattaaaatttttatgaccgtagaagatccaatacacgtgttgacacaactagtaaaataattaataagtactataataaatattattttttattaaatagcatatgataatttctttactaattaatatatacttttaattacatggtatgttcttcattttgtacacaaatgacgagataaatattatgcatgatcggtagattctttacgtgaaagtgaaagcagaatgacaacggaccttgttaataagtgtgtatatatctcaatttattgttactatatagatttgtaaatatatttagatgattattagcgttagtttaattattgttactataaagatttttaaatatatttagatgatattagcgttagtttaattatagtttataaagatttttaaatatatttagatgatattagcgttaggctaattattgtgactatataaatttgtaaaaaaatttaaaaattaatgtaagagaaaatggcaaaaaaaaatctacattttccctccttattatttttccaatgtaacgactgaaaaaaaccgtcgctcaaaaaaactttttaaaataaaaaacgtaacttgtactatatggcacaatttaaaattatcgcctatattagggtatacgcgacgatttaaaattgtgccctatactataggcgatagtttaaaacggtcgcctataccctattataggcgacaattttaaattatcgagaatttcaaattagcaactgtttcgaatcgttgcctattctgcccattttacgacagttgtataggcgataattatagaaactgacgagaatactttacccgcctatttaaaaacgtcagaaaaaaccatttatttagtagtgcaactaatcataatggtggggaagccatcacttaagacccttgctaggaaacagtaaaccagcaaatagcagcttagaaatgtcacaccataccttgaagaaaatataatcgtttaagacaattgtagcaactttcactttttcaacctcgatgatttcacccacaaacccagcctactgatccaagttcctttgggtaatagataatttagggggaagattcagaactcaaccggtgatatgaaaacatagaagctccgactttgagtctagaggcatccgagagatgcgccggagaatgggcgttccattagtcaaataccaaggcatccatctgagaatctaattcaattctctatcagatttgaaagagaaaaatgagaacagtagcaagtcaatcgataacgtaatcagaacatcccgatccttctctttgagtccccaaatttgctcaaaatagtctttagaaaacgcttacacatcgacttattagaccaaagacattcaatcgcacagaaatttcccaactcaaaatcactagcgacatttacttcccaaccatcctcctcaagaatcgtaagattaaaagttttctcaagcaaatcatccatgatagaacgatgcgtgtgaagcaaacttaagaaaggctcttctcgaaagagagcataagcacaattttacttttataatcgttagtattgtaattaatattcaaaattcacgccacatttaattgctatgtaattgttatcaataattaactaacttgacaaaatcttccatgtatatattttttaggaaagaaaatttgttgtctttaaattggtgtgccctccctctcctgccaattattttagtacacaacatctatacctatttaacatattaaattcgttaacacactctaaactaaattaatatatgtaaaataggtataaatgatgtatcctaaaacaattagtggagatagagagggcacaccaatttcgagacagcaaatttattttaatttcttagggtgaatcatcccgataaatgaagactgaataatagtaattagctgtgataaattaaaaataattgaaattgatcagatatttcaaaagagagcatgcatgcaaattaacacaaacttgcattcatatagagcaaaatttgttagttattgaaagcaaaagggtggaaaaaatagtactacaatttttatacgtggaatgaatttttttttgataaaaacgaaaatgaaaaatttagtagaaagacaatggagtttcggatatattagaagatatactttattaaaatacatataaataacattagttaacactaaattattcccttaaagaaaatactattaatatgatataattattaaaagaaaagcaaataaaaacagggaacacgctattaatcaaacgtgaaccaggataacttttcttctataaattagaataacttttagtttaatttcttcaaaagtatattattaaggatatccacacaaacatattgtacaagctgagtgaacaaaaacaaaggcacactagtttaataattttcttcagatatatatggatcatgaatattttgccacgaatcaaattctaaaagaaaaggcatagacataaatacgtataaacattcacatttttcataataatagtatgtttttttcaaaaagtaataatatcgcgtacgtttttctaaaggtagggagatgatgtaataacagcataatcttttgaataataacaaattattatttggtccaagttgtaaggcttaattagcttagtgaaaagcatgcaaagatgtatctatacacatctccataaagagaattatgatacaacattgctattaccacaagtgggccatgcccaataacttatgagtgattaataattttttttttataatttacggcataaatacgtaagtttaactaatggttataaatatatacctaagtttatttttttaacaattattaacctcaaaaatcgacacttataatttatagattaaattgaagcactacaaggacagatcccatgacgattcatgaatagaggacgacagggagaaagactaaattaataaagactttttttttttaacggtaccattatcatctactagcattaaattaagttcctagaatgggagtaaaataggtggtaagcttataaaatcaagtaggaaaacaactaatatcaatgacccttagtttattaaaaattcttgtatggttagcattttaaaataaaatatatcatcaccattgtcaaaatgtataaacaaaatagagagatcacaaataattacaaagtcaagcttcaaatgcatatcatatcgtccactagactccttgctctcaataccaatcatagaaaacgacatccaaaactggttagccacacctgcagataaccaccataataccagagctcagattaaattcactccttgtacagattcaaggtcttttacctacaggtgagtgaacacatgttctacctatgatgacatagagactaggtcgtgaaacaacaatatacacaaatcatgatcaacatgactctcatcaatataaccaaaagcagataaaaataagaacaactgaagaacatattccctttttggaaaatccaatagcatagcgactgtattttgaataaacccaaaaatcataacatgcataaatatttatacaaaaatatatttgtcactcagtgccccagaacagtccaaaaaaaatatgcagaataagttttctatatttcaaacattttataaattagaaaaaaaaaatagaatctgtataatattattcaacacatataaatcaagtctagtaatcaagttgagttcttacctctctcaagtcgttaaactttgtctaaaaagaagagtctaagccatcaaatcccgagctccaattatttagtccaatcttagatatcgctttcgcctatgaccatcagatgactaaataattatcatcattacattctacattcaaaattaagtctaacgaaatataatatgactatatttaatgtttggagttctaaaacctcacctaagcggtacacattaactatcggtggcggtaaaaattggtgtaccaaaaacgttgccaaaaatggaatccccaatcaactatattgtaggccttatggaggtctattttgatagaacatcgaggtgacacattctttcttccattcagcacgtaaatttttatttgggttgaccgacacacttgattttggaaatgaagtaagaatagtataaaatgtgtgtatatgtatatgtatataaattacatgctatgttatgtgattcgtatactactatcactattacggtagcggtatggagtgcatttgtacagtatatgatgttcaaagggtacaatacagtgttaccaacactagtacgggacgactctgtagtgcttgcgttatgacactcattggtactcaaggtacagttcaaccctaccaacactagtacatgacaagtacttagtgcatgtggtacaaaggtcgtacttctattaagaacgttcatgatcatttgttaagccttgtaaatagatgtatatggacgcttaaatacaagtcagaaatatgttatatgcttttctttctacgttggttgactcacaaatattatttacatatgtaggtaaaggaatgacaaaggctgagcactagtgagtccatggcttaagaatgattgtacatatcaggatgattagacttggagagttcattctcgggatgacttaacccttattttgtagttgttgtgcaacatgtttataaaatgtatattgaatatgactgtaaattttaaagacggaattctagcttttacatatgaatatatagatttataaaagtttaaatttgatacaatttttgagaaacccttttatta

SEQ ID NO: 32353 - DNA, 1183 bp, Cannabis sativa
tggcaagtgagtcttaagatcaggaagtacttatgataaatcctaagtaaacttatctttattggatggatgtgtccgagaggccccttcgggcgcttcatctgtattcatatgccaagatattttattcttctccaggagctaggcaatctctagggtcggtcattaggtcccagacatggcttatataggtgcattaaatgcggcatggaagaagcatctgcatatgggtttgaaaagacatgtcagacgcattaaacctatttttcgacaattacactctaattgatgagattagtgatggctacataatgaaatgtcacgtcaatcaaagaaggttaatggtttgtcttacctaacacctagcaaaactctatgttacctactgtgcaaacatacataccctattattcaaacctaagaacttgtgcaagccatggtttaaacttgcaacaatagagaccttttggctctcttcataaagctataaataccccaaccatattctagaaaaggggtcaaaaaaatggtgtaaaaaaactactatattaaatagcaatgactcgtggactaaggcttattaatgcactaaccacgtaaaaattattcgcattaaatctcttctaaccactaaaacaactctcattaatcagttgtcaaaaatctcagtcaacaatactaataatatttttaaaaacctaataagaaaaattaaggtaatataataagaattaaaagattattcaatttttattaaaaaataattacaaaattgctaacaatcatgatttatatgttacttatttagaaaaactatcaacaactatttaaatataaaattttaaccctaaaaatgtagggattatttcataaatatacaatagtgacaaaaatatttacatatttttggatttttttacaataatacaaagtgttgtttttctattatttttgaaataatattattttgacgctgctgctacgaataaacattgtgatttttttacaacaatatggagtgtaatttttccgtaatttcagaacaacattattttcatattgccgctacaggaaagcaatatttttttttttgaaaaaaaaaagacaattgaaagcctgtaaaaaacacaacctttaaaaatgtaaataaaagaaaaaaaaaattctgtaaaaatataaaaaa

SEQ ID NO: 32354 - DNA, 1635 bp, Cannabis sativa
aatgaagttgatattttatttcaaaaaaatatgtaataaaaaatataaatttctctataattaatatgcaaaatattataatatatcaaaagaagaaaaaaaatcgtatattttatgtgatcagtacaaaaacaaatcataataaaagaaagggaaaaacgcacctagtatgaaattagctataataattaaaaattgtatttttaatataataatctttgccaattatgtagtatatctttgtatattcataatcaatataatacacacataaaaatacatatatattatatataggagttataatataaaaagatcgacactatcattatattatttttttatcatgatcttaaaaattaattaattggttgatattgattatgaattggtacctaaatatctttattaattatagttacctttaaaacatattatatccttctattatcaaataaaatgacagaaataaggaagaagaaagaaatattaaaaaactttgttcaaaaaaaaaaaaagaaatattaaaaaactgcaaacccaatagaattataaatataacaacatatataaatgactagtataccaccattttatttattttataggagaacaaattacaaacataagaaaaaaaaaatatcttattattattattaaaacttaaaaatacataaatataattattatataacaaacaatatcattcaatgatttggattaagagctggaaaaaattgtagaccttgcttattgtctgcattccaaggataacaataatcataagcttgatgattagtgttaaaaagacaaggtccactaggatgaataatccatgagtttatatggaaaacaaatctatgttttgtcttgtaaatatcaaaccaatgaaactctttatcccaactaaacccgcaaaagaagagggtcgtgtcccaaatattgggttgaaacgagaattgaaaagactcgttatacttgagagttctgacaccaagatcatcgtctttcgatttacagtgaacagttaagactgtgtccagtataccattatttatgatgactacgtcgtcttcatgtattccaggtacaggaacaggaacatcgccttgttgactacattccgaaaatgatgaagaagaaatgaaaatgagcaaaagaaacaatggaatcatcattttggagaagaattactatagctagggttttcttatagcttgctgtttttggtacaaagagtagctcttttatagagtggtaaaaagatcgaattttgtgaaaaaattaaataagttttactaattaaggataaagggtagagattttttattattattaaatattttatttattttgggataaaactttctatattaattattcaatagcaatatttataatggttccaaagtaatacacatatggaacaatgtttgtattttttaaacgtccaattttattttatttttaagaaaataaagtacagatctctttgtgaaaagagccaaattaagtatataattaatatttatatacgttaccttttaatcttcaattaaggaattaatattaatataatatagataatatattacaaaaatatgaaatatatttgccaataaagaaaagtatgta

SEQ ID NO: 32355 - DNA, 1699 bp, Cannabis sativa
ggtatgggtctaggtctgggtccatgtttaattttcagtcttggtttgggtctaggtcttggtttgggtccgggttctggttcaggtctgggttctggtctaggtcccaggtcacaggtgctaggttcctagttctgggtcacaggttctggagtaagtctgggtccgggtatcgatcctagtctaggtttgagtctgtgttgggctttgcgtctagatcccgttctttgtccaggtccaattcctgtttcaaggtcctgattctgcttgttgtttcaatttcgggccccgagtcaaagtctcggtttgggtcctggtctggaaatggttccaggtttgggtcttagtagattcaaagatctaaacactgactacgagttgggtctaagccccgggtcgtgggtcaagatctggatcccaatctttggtccaagtcttgttcagatttgaatcctgggtcccggtccgtgttcgtgtccgagtccgaatctaggaccgaggatggggtcgggtttagggtcccagtcccagtcctgggtcccgattctggttataatttagagttcgggtccccaatccaggtcggggaccttggtccaggtctaagtctccaatctcggtccgagtcctgcatccagatctcgatccaagtccgtgtctgggttcgggttcgtgtctagagtcccgattcgagttttgaattgagtctgtgtcccggtccaggtctgggtctaggtcctagtcagatttcagttctgagaccgagacggggtcctagtcccttggtcgtgttcccgagtcccggtctgcttctggttctgcttctagttttagttcacggggtccaggtcttggtccgggtctgggtttgagtgcaggtatgggtcctagatccaaacatcgactatgagttaggtccaagcccccggtccaaatcaggatcccggtctcgggtcatagtctagttacactatcctatgtccatgtctgggtcctagttcagggtctaggtccaaggtcaggtcttgggtctcagtgccagttccaaagcccgggtctcgggtccaagttccccatccaagtcccagtcctaggtctcagtccgtgtctagggcccattcggggttcaagtcctagttcgagtttaggttcggtttttgatccctctacaggtccagatctgagttcgagtcccatgttcgagtctagatccaagttggggtctgagtcttgagttctgatctgagttttggttccgaggcctgagtccaggtcccccactatgttcgggtccatgttcggtttcgggtcctagtcccagttcaaattttgattctgtgtccgaattcgggttcaggtctaggtctaggtaggggtttgagtcctggtctgagtctagggttggcttgggtcaaagttcggatcccggcttgggtctgggttcgggtcaaggttcgagtccatgtcttgggtacaggtccagatttttgtctaggtctcagtctagatcaaggtcccaagttttgatcccggtctaggtatgggtccgagtctgggtttgggatcggttccgaagttcaagtttgacctgatcccgaacccgaaccagaacacgaacttggacccggaccaggacctaggacctgaacttagatgggggacccagacctaggaattgggcccctgaactaggaccaga

SEQ ID NO: 32356 - DNA, 2097 bp, Cannabis sativa
  modified_base (643)..(647): a, c, t, g, unknown or other
tcacctagctccattcggacagctctgagttccaccctagcgtcatcagcatccttcttggccaagttcacctctgccctcatggtgttggacatggcagagttcttggaggcagcacactttgctcgagaataggtgtaagccaacttcagaccagcctacacagagaaaaaacattagagtctacgccaagtaaataaaaatgaaaagaaactgtcaagaaagactcacctggtaaactcccccaagactcctcccatcaacagctctagggatgattcggtgtcaacgctggccagctgatcactcacctcatgaacaaaccagttcatgtagtgagtgagcatctccttgcctctcttagcctctggatggactggcgagggtggggtaggaccccgcatctcctcaaatccgctcttggccagctcggatccgccctttctactatccaggcttgtccgcttcctccttgagaatctttggacttaacagttttcagagcaaaagggtccgtgacagttagctcctcagaaagatcaataacctccccgatcggtgccttctccttggatggggtcgcctcaccgcacctagatttcttggccgggggagatgagcttgagcttcctccaactctctnnnnnagagcatcgagcatcttttgagacatgtctgcacggaataaaagcaacatggttagaagaaaaaaggcatcagaagcataaaagcatgatactcaaaatgtttaaaaacaagacagaatatcctacgcttcatgagaagtgtttgtccgagcaagactcgaaagttgatcatcacctaacaagtcttttacctccgccatgacgaccttcccttttcctagtaagggagaaggtggccgagtaggtgagctgggctcccgaattggaatggcatgttcaacgggtctgggctaggctggaagtttcttcctccttttaagcggagtcacctgctcttcctcagcctcatcttcaggattcaaaggctcataagcatactgtttcgcccttgcacctcccttcaacttagcttcacgcttaagttggatgagttcattctccttatgagctccctcagcaaggccggcactagatttcctcttttttctttcactggcttagggatgaaatccttcggggtaaagcccgtactccacaaagtagtcatcggaggtcaacagagtgatattctgggcagcactcgacagtagggcaagtttctaagctctatctcgaagggcatgtgtgaaaggatggcgatgatatgtaggaatctgctgaaaccgagtgtaggtggtgcccatgccttccaccatgaagtactcatcaataaaatgcccaattttactaacggccttgtccccggtgcccgtcaaccacttaaagtctggctgagaaaaatagaagtaacccaacctgccttgcttaggggtggacttcaaatcaaaaaaccagctaacttcatagggagaaggcatatcccacttttgggaggcgtagagaacgaagagggcggacagatacttaatgcccttgggagtgaactgggtcgaacagaggcggaaggagtctaccacattcctaaagtatgggtgcaaaggcaacaatgccccatgcttagcatgagcacccgaccaggcacacatccccctttcagggtttgtggcttgattgttgtgagcaagaatatagcagtctaactcgcccaggtagccgtccgggtcgagatcccgtaagcgtgccttggtaaccttggatggaaggctcacccacctggcacctggagcaccttgccttctatgaggaaccgtagcagtaagttcctcacttgcatagtccacgacctcaaccaggacgtcgccatccgcgtcgaccagctccccaacctcattgtatcccctaaagtttgggggtgcaacctcctcctcttccttcgcctcataaggactgctaggacgagcatcatcctactcctcaatctctaggactttggcgtccccttcatgaccctcctcctcctggaaggacggatctttttcgacactgggtaaggtggcatgctgggccgctt

SEQ ID NO: 32357 - DNA, 3600 bp, Cannabis sativa
aatagataagaaagtgtttgttcaaacaaatacgacttttctaagataattgtttgttagctattctaactgcttggagaactttttctctctcctacttttttctctggcttgagaattgtgcccatgcacacgagggggttccatggctctcctggccatggtaagcaccgaaaccccactggttttggggagaaaaaaaggtcactaccccactggttttgactggctaaaaaatcctggatcctttggcgaccaggagagtcaaaaatactggagctttcgaaccattcataaggtgtttatgatcaccttatcaaatgacgggggatatgttagaatatgtgagaggactcgtctatcgggctatgagatagctgtaacactggatgcagctacatggttaatcgaagtcttagaagtattgcaaaaaagggaggaggagcagagggtgaattttaagagatcatttcgaaacaactcgatcgtttgctttttggagagcttccaaaatagcaggggggtgttcatcaggatatcaatcctttaaaataataggattaccttggtgatcatccctgaggaaagacacgctagggggtggagtgagcttgcaagatgcctcaatggagtattaaaaagaaacattttgcagaagaataagaatcaaagattgctagtggaggaggagtttgttagaagaggtgggacaaagccctcttatgcgagtatagtgaaacagcctgcaaaacctttgagaagccaacctggtcacagatacaatggtccggttgatggcagaagatttaggccatacgggggtccaatacataacaagctgggatactgggacttcttaccaaaggggaacgagagtttcaggccaaggaacatgttcccgagagctaggatggaacaaaaacactttcatgaatatttacaagcagaaaaatgtgacaaggactggaaccgggctttgataatgttcagagataatagtaaggtggggtggagtgtcattttctacaatctctctcgggaaattgatagaaaattggtggttagccaaatgtacgatgatcgaaccataatctggtgtaagaatgaagaagagatggaaagcttgttgaagcttcacaagactgcaatatcgggtactggaggcacgattgtttctcttatcagatggtctatggaagagcaaaacagagacataaaaatagagtgtagaagttcatggatgggtgtggaagggctgcctttgaatttatggaacataaagtttatggggaaaattggagaactgtgtggaggtttgcttgatgtggagaaggacacagcagaaaaaacttttctgcaccatttgagactcaagttgggaggagatgaagacggttttgtacccaagtcaattcggttacactaccaaggctctgaattggtcctaaagcttttcaaactcaacgattggggatatagatttaatggtttcttcaataccatatggcatcaggattctgaattttataagaatgaagaagtaattaagaggagaagatcagaaggaactgaaataggagatggcctggtgcaacataccgacgttaatgggaccagaaaagatcagaggaataatgctgaacctgcaacgactttcttcgaccaaacggtggaactagcgtcggcggttgcagacgactatgatgacacgcggatcgaggaacatccgaggaagattttatgtttcagcagagagcgtacgatgatcgagaacgattctttttccacaattgatggttcggcggcaattgggagttccaaggaaaggactacgagaattcaagggggtcggttactattcatagcatattcaaaaggctgtggagtgatctgagggagccacgtgtgcagctttatttaatgccaacttcttttattaatttaaaagatatgtggcagctgtatgtaaaaggaagggtttataaagtgggccaagataaatgggttaataaaagaactgggccatcatctttgctgggccgagaatccaatggggaaaagagcaaaagtgagttgagcctcctggggccaaattgcttggtgggccaatgctttaatgggccggacagaagctccacacagcccgtgagattggaagaggtgagaaggatattgggccactttatttatcatcacgtggggccctactctttggtactggatcaaggacattggattaaaaacattaaatccaacaaagtgtttgaaggcattctcaagccagtcagaccgaagagaagagaggaatttttcagtgcaactattaattactgggaggagttcaattcctgtggcagccttaattcaaactcagtaatgcgagaatcggaaaaaattactcttgaggaagaagttgtcagtgaaaagaagatgaaagtatatatcaggaggaaacaagattgccttaacggcaatggtggagagcttgagagcttagcgggggatatccatttggaggagaaggaacaggttgaggatccacaattggaagatatcaatgatttcagttcagatgacgacaattcagaagaagaaaaaggctattgtacagatgaagaagaagaagaaaaatatgaagacattttaggtaacatcaaggagctttggcaagaggctggaagttccaaaaaagatttgatgtccagtgagcaagttgatgagccagctggggtggaagaaaccgaactagagaagagagattttgttgctacctgatatcgacctcgttaattctatggaagaaatgggtatgcaattaatactaaatgagaatgaagagaaacagaagattcggagtctcaagggtggaaggaagagtaatagagaactcaaaaaattggcttttaatataaattatgaaaaaggtcaaaaaaaagaggggcctccaaaaagatcattatgagaattttaacctggaatgttagaggaagtggagacaagatgaagaggaaggcaatcaaagctacaattagtaaggtgaatccggatatggtgatattacaagaagttaagaaggaatccgtggacaggtggtacattggcagtatttggaggtctcgtttcaaagcctggattttgattccagctattggaagatcagggggtacgttgttagtatgggatactagaagcattaaagtattggactctatggtcggtggattctccatttcagttctaatagaagcagaaggaaaaaggccatggtggttctctggggtatacggtccatgttcctatagagaaaggttagagttctgggacgagatggctggattaagtgcaatttgtggagatgcgtggtgctcaggaggggactttaatgtggttaggagggtacaagagaaactaaatagcaattcttggaccaagagtatgaagatgtttgatcaacttgtgcgagaattgaagcttatggatccaaagctaaataatggaaaatacacgtggtcgaactttcgaaataaacctatttgttgtaggctggacagattcttatttaccaacaattggagcaacttgttcacttttgtgcaacaa

SEQ ID NO: 32358 - DNA, 6096 bp, Cannabis sativa
tcgccgatgatagttatctattttgtcaagcaacacaagatgtagctgctcatgttcgtcatctattggctgtctttgaagaagtttctggtcagaaagttaataccagtaagtcttcaatatttttcagtcctaatactaatattagtgttcgtgagcaaattcgcggtactcttgggatggtggaggctagtgaagaaagtaaatatctggggctgcccaatataatcggtcgcaataaatcatctatcttgggttttctaaaggaaaaagtgaagaatcgtattaatagttgggatggcaagttgttgtcacgtgcgggaaaggaaatccttttaaagactgtggtgcaatcgcttccaacctatgcaatgagtgtctttcttttgcctctgaaaacatgtgatgaactccaaaagatgatggccaagtattggtggaagacttcatctagtagagggagaggtataatttggatgagctgggagcgtatggctagggataaaaagtttggagggatgggatttcgacttctccatgatttcaacattgcaatgcttgcgaagcaggggtggcggttgttagttcaacctaactcacttgttggccgaatctacaaggctagatactacccaaatggtgactttctttctgctaatcttggagcaaatccgagttttgtttggcgtagcatatggtcttctcaatctttagttcggcaaggggccagacgcattgtgggtactggtttgcatgttgatatcttatctcatccttggctacctaataatgagaatccttatgttacttcgaataatcctggactttctaatcaaccagtggcttctctattcatggttgataggaggtgttgggatgttgatcttttacaagatatgttcaatcaaagggatgtaagtttaatacttagcattcctattagcttcactgccgagggagacttttggtcttggaaaggtgaaagctcaggagagttctcagtcagtagtgcctatagtattcttcaggaacaaagagaagagaggtctggtgcaagtaattcaggcttttgggtgaaattgtggcaattaaaaataccacagaaagttaaaaattttatgttgagagtatgttctgcttgtcttccaactcggtgtcaactacatatcaagcatgttcccctctctttggattgtcctttatgtggtgaagctcaagaaactgagtaccatttgcttgtatcgtgcacatttgctgctgcctactggtttacagccggtctgcaagtgtctgaggtggttaattaccacattgattcttggtttatgaagcatttcgaggagctagatgaggagtgtatttgtagaatggccattatctcttgggccatttggaaggctcgaaacagttgcatttggaaagacaaaaaactctcggtcatggaagtgttgacattggcatcttcttctttacaccattggagaaaagctcaacaaaaggatagtattccatcctacgatctgcagcagccaggggatgggaaagagctttgggttaagccggatataagggtggttaaagttaatgtggatgcagcattctttgaagaggagagtcgttttggctttggcatggttgctcgagatcacatgggaaggttccttgatgcttgctgccagtcgttcacgggacagcaaaatgttgcagcagccgaagccttgggagtgaaggaggctctcagctgggttaaagggaagcaatggaatcgtgtggtcatagaaactgatagtaaattgactgtgtaagcagtccgtagttcaataaatatgagattagtttttggactccttgttgatgattgtcgttgcttattacaagctatgccttttgttagtttatgttttgttaaacgttctgcgaatcgagttgcccactatgtggctaggcaatctcgattatatgctgatcgtagaatccttagctcaaatgtttctgcaactatgcaggatttattgtatcaggattcttgcaattaataaaggttttgaatttcatttcaaaaaatatataaaaaatgtatgagaatatggtaataagtttttttttggacatattttgtaataaattaaaataatgtatacaaaattgtaaaatgcccatacaaataagtaaatgtaaaaataaaaaataaataccgaaaaaagattttttttttttatttacttcttcttcactaaacacgaccagcaacaatgatttttgagcagatgtggctcggtctctaggttgagatgccatacctagccgaggtagttcggccatggctgccaatgtggtagtgcacctcagcatggggccattgtgatggtgcaccttggcatagggctgagatgatgggattcacatggtgccgagatggtgtagtgtggcgatggcgagacagtttggtctgggtcaaggtggggtgcacttggcgatcatggcacctggacctcaggccctttggccctttaaattatttttttagaagtcccaacaccttgttcaccacttctcatacttgtataatttgacaccatcacttcgacacatgtcatatgtatatataggtcatgaatagagtcacgcacagtctaaattgcgtgagtagtcacacacaataattataatttatatattacgccagttactatagtacagtctaaaaagttgacacatgttatttttaatttttcttttgtctgacacttactattttaaaccaacaaaaaataaatgaaggacactactaacctattatactaaccggttgggttgacatcaacatttaataattatttttataattttatatgtgctaggtagggatacatttgtaatttgatattagttttcatacataattaatctattaggttagtgagtgaatatatatcatacataaataatataaatattattgggtaaatatagaccatgcatgaaaatattagtttaccaaaaattttgttaggagtaccagtattatggtaatttcttgttctgagagaaagaataatattaattggaatatttatttcaattttgttataaataatttaaaatttaaaataatcaaacttcataaattttatagattttaaattctacttaattataatattcaattgagcacaattagtctcataatcataattattaatatttacatgcaaatttctaccttaaaattatattttaaatattacatccacttaaaatgtcaaagcaataaagtacagtatttacttttaaagtaaattaaagaatagcagaaagaactaaggccattttattttgtccaagccaaacaaatgtcttgttattggccacgactaagaaagatgttagggttttacactagttcaaaaacttagaaagattttaaatctcagtcttcatttcatttagctttcaaaattagttgatagtttccacaagacccagaagaaaaaaaaaactaaatccaacatagtgcaaattacatagagaaaataaagatctattggaaaggtaccttgtttcttaaaaggaagtttagtaccctaaaataaaaaatcatggacaaatttagacactcatttccaacaaaaaatgaaatataagaacacgcatagaaaagttacagacaatcaacatgcatagaaaagaattataagaacacgaagataaaaataaaaagaacaaatatctgggtgatgatcttcaaataatgaaagagaactgaagtttgagatctcttgagctgatttttttaattttttttagctgaaagtaagtttgatcttagataatgagagaaccttcactttactaaatgggcgcagaaatcgaaaaacttgcagccagttacacttccaattctcaagtcaaatacccctccattcactaaattaaatattatataaaaatgatatatggggtacctaatatcggcccttagatcaaaagtgagactgaatctaatggctataaatccgtgcgacaatagtcactcaaaaagtgcatgcgtgacaacagctgcccctatatattatgtataatatgactatcattaaaatggctccataacttttgaacacacattttttttaaaaaaataaaaataaacccaaaaataaataaataaaataaattatttcctttaatatcaatttaacttagttaattaaattagatttattctaatttaatttaataaattagattttcccaatttgtcaaatttagttgtacctaatttacataattaaattaatttttatctaatatattttcatttaattagcataaataacttataaatgaatttaatttatttttatatgtattatttatttttgaattacctcacttatggcggttggctcacctcccctatttgtgtttgtagatgtatgtccataactattagggaggtgaaactggcctgtctttacacaaactatcagtcaccacttgattcgtcatcatcacctagtttttcagttagtaaagaattctgtatcgggtctcaagagactatatccccttcccatagagtaaggaaattaaagaaggttctcccatgctggtctttttatttcttacacgaagaagtgttgttccagatcctccacgcttgtacagatggttggtccctcttccactcaagaccaaagggaagtggaagctcatacctcctcccctcaccccttaacgtaggcaatccaccttctaacgatgagctaggagtggtggctcatgcaacctctagtggtccttccaagaagtgagaaagaaaaaagccgcctaaaaaattgcttactccattcaagtgaaagtggtgtaccagactaaagtctagaaagctagtgtgacaagcgatcttccagtgagtgacttaaagtggagcaccatggaaaagtatcattcactataacactttggatagtggaagagtgactggaggaagaaagaaccaatgtgacagctctccaaatgcacacatgtacttggacatgatatcaaaaaaccaaaatttttttgatatagcagactactttgatatctcacctgtccagattgctcccaacatggcggtaatgccagtagaggagaggtttgccccgactattgtaacgatggtaaagctcaaattagtagggttgtatcattctgaatatgatttggacaacctaagcatgattgatgagtccaatgtccctgctgagctagccaatgccaaatcaccaactcccattgggatgggacatcctccctctagggacattggcatccctgaagtggtattctactccaagactgactcaagggacactatgtgttagatatattttactaggatctcgatttactaacatgcatgttggattaatagtctaatatcctaaatatgagatttctaaaacaataaattaaacacataaagttatagaaaaccatatattgatggcagcggaataatatgactcattccgttgagatgtctaacccttgatcctttctattgtagaatacgatcaagatctgaacctagattctccttcaggtaacaaaaaactacacagtcttccacactatcttgaatattatcttgaaatgtgtagataattactcaatcacttaaggtttaataattgacaagaagaagaagacgagaatttgaaattaatgagagctttgtatattttctatttgtctgacaaagtgagtcaattttttttataaaataagagttatcatattctatttatatggtagctttagggttaggttttgaattaaaaataaataaaaataaaaagataaaaatggctttataaaaacaatgttggctgaattctatatgggcctaatgggtttaattttgtcattttattgaaacttatttttcttttaacaaatgccatcttttaattctaattctataaatgataattctatcaatataataattataattaattatcaaataaaattcccatttaacttatttattagttagacatttcaaagtttcttaattaatatacaaaccctaaattctctttttct

SEQ ID NO: 32359 - DNA, 1538 bp, Cannabis sativa
  modified_base (202)..(209): a, c, t, g, unknown or other
ttcaaaccagtctgtgcagaaaaaaggcattaaaattctgaactagtcaaagaggaattaaagaaaaacatcagacaggacttacccacgaaagctctttcaagactcctcccatgaccagctccaaagacaagtcattatctgccccaaccaactgttcgttcacctctaggaccgaccggctcacatagtggttgagcannnnnnnncctcttttggtctctgtgtgcaatattaaacgtggggcaggagccttaacttgttcaggtccgcttctaaccagctcggatccacctttcgcctgctcaagtccatccaaagtcctcctcgagaacccttggacttagtaactttctaggcaggagggtccacgataggttgttccttagagagattaatgaccacttcaactagtgccttctctttggacggagtctcatcgctcttagacttcttggctggaggggatacgcccgagcttccacccactctcttctttaaagccttgataatcttctgagacatttctgcatgaaataaaaataatacagtcagaataaggtataaaatatatgaaggcataaaaatcaagaaaaaagaagaagtactctgcacgctggcaggagcatccgaaccagcaccgacggggtgtcatcatccgaagactcttccttctccttcaagacagcttttccttttccctctacaggggttgatgggcgagcaggtacatcaggttccctaatttggatagtatgttttatgggcctctgctcagtctggagggttttctttttcttcagcggcctctcctgctctgaatattcttcagcctccttctcttgctcagaatattcctgagcatattgcttggctcctgcataacccttcaacttagcctcacgcttaagctgaatgagctccttctcttgctcagctccctcagcccaggcagtcctggacttcttcttcctccccatcacaggctgggttacaaagtctgccggataaagcttgtacttcacaaagttgtcctccgaggtcaacagagtgatattctgagcagcatcgagcagttggagaatcttctaagccctgtccctaagtgccaatataaggggtggacgacagtatatagggatctattgaaaatgagtataggtggtatccatgccttccacgaagtagtactcgtcaacaaaacccctgatctttctaacatccttgtccacggtgcccgtcagccacttgaagtctggctgagagaagtagaagtaccctgacctactctacttaggggtagacttcaagtcaaaaaaccagtggacctcgtgtggggacggcacacaccatccttgaatggcgtagaggacgaacacggtagacaagtacttaatgcccttgggagtgaaataggtcggacaaaggtaaaaataactgcaaccctcttgaagtacgagtgcaaaggcaatatcgccccttacttagtgtgagcactgttacaaaatttatagacaatacacaagtgcacgtaatca

SEQ ID NO: 32360 - DNA, 2713 bp, Cannabis sativa
tcccaaatccaaacaccaaccacatgtcgagtctagttcgagttcttgtatgggttcgtattctggtccagctctgggtctgagtccaggtcaaattcccaaatttagacacttactatgggtcgtgtccaagccttgggtcttgggtcttaggtcccgggtgcaattccagatcctggtccagttctagctcatgtcttgggtcgtggttcgggtctcaagtcaaggtttgggtctaggtttgggtcttgggtactgagtcatgggtctgggtccccatttcaggttagggtcctaggtcccggtttcgattagggtcccagtctttgttcggtacttgtacttgtcttgggtcttggcctggtctgggtctgggtcgcggttcggttctcaggtcccaggttcaagtatggagcaccgggtccttgtcccaatcaaggttctagtcccagtctaggttcaggtctaggtgctaatcttggtctgggtcccagtcctaatctcggtacgggttagagtccttgttctagtacgagtccgggtcagggtcttactctaggtcttagtttgggtatcagtccgtgtttgggtctgggtcttagtctgggtctgggttttggtacgggtttgggttctagtccaggtcctaggtcatgggtcctgggttccaggttttagattggaggtcttggcgcaactcttggtccaagttcgggtttgggttcgggtatcaatccttgtctaggtctgggtccgtgtttagttctgcatctagatctggttttgtgtcagggtccaattccttttccaggatctcgatttcggttcttgttctgattttgggtctcgggtccgagtctaggtttgggtcctagtctggcaatggttccaagatctagacactgactacgggttggatccaagccccaggtcgttggtcaagattcggatcccaatcttgggtcccgatctcgtttcgattcagatccttggtcccggtatgtgtctgtgtctgggtttgggtctgggactgagatcggggtcgggtcttgtgtcccagtcccaatccttggtctcaattctagttctaattttgactttgggtccgtaatctaagtctaggtcctaggtccaggtcaaagtctccaatcccggtctgggtccttggtccgggtccttggtctgggtctggttccaagtccatgtttgggttttggttcgagtttgtgtcccgagtcccgattcgagtttttaaacgggtctgcgtcccggtctgggtcctagttagattccagtacccgaactctaaccaagactcgaactcgaacccaactcaggagtacgggtctgggtgtaagtcagggtctgggtgcgagtataggtctggttttgagtccgggaatgggtccaaaatctaaacacttactacatgtctggtccaagcctcaagtctgaatcaaggtcacggtctcagatcctagtctaattctactacgggtcccaggtcccgatctgggtccaaggtcagggtttgggtctgggttgggtcttgggtctctgtcctagttttgatgaccgtatctcgagtccaggtcccccatctaggtacgagtcctaggtcccgatccgagtccaggacccagtcgttgtttaagtcctggtccgagtcggggttcgggttccgatcttggtctacgtccagatctgggttcgagtctaggtctaggtttgggatggggtccaaaacctgaatccaaacccgaaccggtacttgggacctgaacctagacctaaattcagactcgaacattgaacatgactcgggacccagaacttggatcgagacctagaactggaccccagtctgggtcctatacctagacccaaacccaattcgggacctgagacatgaactgaaataagactgggacccgtgattaggatccagatgttctctcgggattagagagccagggcttggacaagaaccatagtcgatgtcttgatttgagactcggacaaggacccaaagctagaccaggacctacacccagaccccaacctgggatccaaaaccgaaacttgaaccagaacatgaccaagaccctggaacaagaccgggacagtgaccaggacctggaccgggactcggaactagactaaatacagccccaaaactcgagctcgaacccagtcctggaccgatcccagacctagataaggactgagactcgaacccaaactcgagactcgatccaataccgagcccttgacagaaattggaatttcgacctcgacatggacatgaacccaaatccaaacccgaataccgaccaagacccagactgggatcaaaacacgggacctagacccaaacccaaatgcaaacccacacctgaacccgggacccagacccaggaccgaaacttggacctttactaagacctggacccaaatcgagatctgaaaaacccgcacctagacttggaataagactcggaccatgaccccaacctggacccaaacccggacccataaccaaacctgaacccagaattagaactagaactgtgactaggacccggacctgagaccagaaccaattggtaagataatatttagcacgtagagtatgcacggtggcgcttatattaaaaatgacatatgtgagtaattgggaaccgggactagggttatcaccctaacatgagcg

SEQ ID NO: 32361 - DNA, 1936 bp, Cannabis sativa
ctaaaggatgtggtacatcaaaatttgcctatttttgtgtttttgtgtgagactttttgcaagaaaaataagatggagataattaggagacaaatgggttttgaaggaatgtttgttgtcgaaccagatggacatactggcggtttatcattattttagaaagaaaaggatcaagcaaagctccgtgatttttctaaaaaccatattgatgttgaagtttcagtggacaactttggtacttggcatcttacggaaatttatggtgagcccaataggattcaacatatgaagacttgggagttgttgactactatggctatggattcaaacatgccttggtgtgttatgggggacttaaacaatgtagtggcccaagaagataagagaggaggagccccgtatccccaatggttgatcgatgggtttaatcaagctctttaggaagcacagcttattaatatggaattagttggccatcagtttacttgagaaagaggttgtggtacatctaattggattaaatgcggtattgatagagtgttaactacacactcttggcttcaactcttctagttggctaaactttataatctggaaggagcaccgtcggaccatagccctctatttttggagccaaaaaaagaaatcatagttcatgggcgaagacaattcaggtttgaaaatgcatggctaactgaacctttatgttttcaattaataaaggactgttgggaagcaaactcgaccatggatattcaatccaaaatccatgtgtgtagtgaaatcttggaaacatggggaaaggaagtaactggaaattttgggagtcgcattaaaagttgcaagaaagagttaaagcaattgagaaacaagagagatagtgcttcggttgaaaagtttcaggcggtgaagaagattttattctccattcttgatcaacgtgaaattttttggagacaacggtcgaagcaactttggcttaatgcgggtgatcaaaatagtaaattttttcatgccgatgatagtgctcgtaagcgtacaaaccatattcataaacttaaagatcatcaaggtgagtgggtagattgagacaatggtttgtctgatcttataacagtttattttcaagagctttttagcacttctcattctgattgggctgaagtaatcagttgcattccctttctatcacgcatgaggacaatatggaacttcttaaacctgtgacggaggacgaggtgaaaaaggaaatatttcatatgcatccgaataagtcccccaggccggatggtttgacccatgcgttctttcagaaaaattgggtgattgttggtggggatgtagtaactttggttcaacatttttttacggatggggtgttataagatgggatgaataaaaccaacattgtgttaattccaaaaaagaagagtccagttttacttggtgatttgcgtcctacatctctttgtaatgttttgatgaaaattgttacaaaagtattggccaataagatgaaagtttttttggaaatggtggtggcggatactcaaagtggttttgtgctttctgacaacattatggtctcttatgaagtcatgtattacttgaaaaggaagaggcgaggtaacaatggctatatggctcttaagctcgacatgagcaaggcatagaattgagtgggcttatctggaggctgttatgagaaaaatggggttccatgagtgatgggttcacttatgaagtgtgtatctacagtgtcttatcaagtcattcatgatggtcatgagatgggtccaattattccaagccatggtattagataaggtgatactctttctccatacttatttattatttgtgcggaaggcttcttagcgctaattaaaaagtatgagattaagaagtggatccatggaatcaaagtttgtcgtcg

SEQ ID NO: 32362 - DNA, 1832 bp, Cannabis sativa
gtttaaattaaagcggggacgggggcggggattacccggtgggagaaagattcccatcgggtacccatagggaagtaaacggggcatggcggggccagggattgctcacccacccccatacccgtatcctaaattcgccctatacccatttaaataaaagtgggagacagagcaagaattacccagtgggaggaggctattcattgggtacccatgaatataattttggaaaaaaaaaatctcaaaaagaataaaagaaaaaaaaaaccatcataaaaactcattcaaataataaccataataattctattacatgaaatataaaaatccaccaatagccttaaaaaaactaacatagtctactgttaaaaaaaaacaacgatagtctaaaaagttcttcaacatcaatctaaacatcttaaaagtccataaataaaagataaatatatcttctatggcagccttcatcatcagtcatcataatctttatcaagtttcaaagtccacataacttggtccctgtaataacatataagaaaaatatattaaaacttataactattaatagaaatagttgaagtaaataatattcgaataattaaaaaaaataattacctcttcatcatcatcttttatatcttcatttactgttgaatattttggtatttttgtagatgaatctaagaaacaaacataaaactattagaaatgactaaaataagaagaaaaaaaaagagcaagaaataacatacctaaaatctcaaatacaaatatttaactaaatacaaataatcatttatattatacctgcagagtaatatacatatatatagtgaaataatattataccaatttaatttatatatattttttttcaaaaatttaaaattaacttcctataaataagaatactgttactatttaaaaataaaagcaatcaaataaatttaaagtaaaaaaatagggttctaatacaaacataatatgagctcctttgagactgtttcgaaaaaaacaaaatatacacagtatacatttatatatataacatattgttagtctatagaataaaaaagtcatgatccaatcaaactagttaaacaactaatcctaactagatcactaatatataccaatatattatacacatatccaacaaatatatataatatacatacgatttaatataaatacctcaactatagtgatacgtaatagggtggcttccttccaactttaacagagaaaaaaaaactatagaagtgaagagttttttcttttttcacttttgcaatttgcttttattttcttagcagggaataactctctcttatatatattactaatgttagtgtaatatgtgaatgtaatttatgatggagagtgaatatgaagagtcatgtaggtatattagtaaattgtgagtaaattttatttatgatatggatggatgaatagtgaatatgaaaagacatgtgagagaggtggtaatgatgatgagtaaagatatttaattaaataatgtgtacattaatcggtaatagtaaaaaaatttaatttaaataagtagtaaacacatgtattttcttaaaaaatgaaaagtcatctcctacgtaattaataaaaattgtccagcatgaagtaaattaataaccacagttattatgtaaatttatgttaatatatatattagtcatatcggggcggtttcgggggtgggtatcaatacccccgccccgacccgaccccgattcaagtataaatacttaaacttgcccctgcccccgccccccaaaattgacccccacacccgccccattaggggcgggtac

SEQ ID NO: 32363 - DNA, 2978 bp, Cannabis sativa
cttgctaccggaagaaccttgattgatgtgaaaaatggggaactcactatgagagtgaatgatcaaaaagtcacttttaatgtgtttaatgctatgagattcccgaatgagattgaagaatgctcctgtttgagtgtaattgattctattgtggctgaaagttttcacaaggaagtgtggaaagatgaaaggttgataacttgaagagcttgaagctttgagtgacaatgaagaaacccaagttgcttaggtagagccaatacaacctttccctaaattcaagagaccttttgagtctttagagttgaaggaaagcaatttcaagcctccaaaaccttccatccaagaaccaccaaagctagagctgaaacccttgccaagtcatctaaaatattcttatttgggggagaataaaatgctgccagtaattatatcagcatggttagaagttgaagctgaaggtttattgctagaagtgttaaagaaacataaaacaataattgggtggactatagcagacataaaaggcattagttcaacaatttgcacgcacaagatactcttagaagctggctttagtaactccattgagcatcaacgaaggttgaatcctgttatgaaggaagtggtgcgaaaagaagtgataaagtggctggattatggtattgtgtacccaattttagatagttcatgggtgagccctattcaatgtgtgcctaagaaaggaggagtcacgctggtggctaataagaataatgaattgatccctactagaactgtgattggttggagggtgtgcatggactatcaaaagttgaataattccactcagaaggatcatttcctgctgtcattttattgaccaaatgttggatcagttggcgggtaagaagttctattgctttcttgatggttattcgggctacaatcaaatttctatagtgccagaagaccaagaaaaaataaccttcacttgtccatatggcacctttgcttttaggaggatgccatttggactatgcaatgctcccgccacttttcaaaggtgtatgatggcaattttttcaaatatggcaaaaagcattcttgagatctttatggatgattttctagtatttggggaatctttagacatttgtttagctaacttggagaaagtgttgaagaggtgtgaagaaacaaacgtaatattgaattgggagaaaggccattttatggtaaaagaaggcatagttttgggtcacaaggtttctcacaatggtattgaggtggacaaggctaagttagaagtcattgaaaagctactgcctcctaccacagtcaagggattagaagctttcttggacatgcaaggttctatagaagattcatcaaggattttcaaagatttcaaagcctttttgttcattgttggaacaaaactgactatttgagttcaccaaggaatgtcatgatgcttttgtgactttgaaaaaggcattggtgacagccccaatcattgtagctctagattggtctttatcatttgagttgatgtgtgatgctagtgattttgccattgatgtggtacttgggcagcgaagaggaaagatctttcattctatttactatgcaagcaagactctcatcgatgctcaaattcactattcaaccaccaaaaaggagttgttggctgtagtatttgcttttgacaagttctgatcttatcttgtgggaacgaaggtgattgtctacaccgaccattcagccatcaaatatctaattgccaagaaagatgcaaagccaagactcattcgttgggtgttacttcttcaagagtttgatttagaaattcaagatagaaaaaggatgaagaaccaagtggctgaccacttatctcggttgaaaacaggtggtgaaaggcaagccgaaatgcaaattcaagaaacttttccggatgagtagctggttgttgtagctcaagcaaacactccttggtatgctaattttgtaaattacttagtgagtggattgcagcctcctgatttaaataggcagcaactaaaaaaattctttcatgatgtaagattctactattgggatgagcctttcttatacaggtagtgtgcagatcgaataatgcggcgttgtgtgccgaaagaggaagtcgcaagcatcatagagcattgtcattcatctccttatggtggacactttggtggacaaagaacaacaacaaaagtcttccaattgaggtactattggccttccattttcaaggatgctcacaattttgcaagaagttgtgatcgttgccaaagagttggtaatatttcagtaaggaatgaaatgccattgaattgcattcttgaagtggaactttttgatatttggggaatcgacttcatgggtccatttccaccatcttatggcaatctctacattttgttggtggtggattatgtttgtaaatgggttgaagcagtagcaagtcccactaatgactcaaaggtggtgataaagtttctccaaaagcaagtattcactcgctttggaacactacaggcattaataagtgatgaaggtactcattttgtgaataaaattcttactgccttgttagctaaatacaatgtcaaacacaagattgtggctgcttatcatcctcaaaccaacgggcaagctgaactttctaactaggagatcaagcgtgtacttgaaaaagttgttaatcctcatcgcaaagattggtctcaaaggctagatgtctctctttgggcttactggacagcatataaaatacctttgggtatgtccttatatcgattggtgtatggaaagacgtgtcatttgctgatagagctggaacacaaagccttttgggctataaagaatctaaattttgatctccaagctaccggagaggcctaaatgctgcaactaaattagcttgaagagatgaggtttttctcctatgaaaatgccaagttgtacaagga

SEQ ID NO: 32364 - DNA, 4475 bp, Cannabis sativa
ggggcgaaaatcctaattagccattagaatattagctatttagattatacttgatttggattgattggaaactccaaatctatttcttacaggtctacatattatgaatatgtaaattgaacgattttttcagggttggatttatgtttcaaacattattttttctgcaaaatccttcatcaattggtaataattgatttttcggtttgatatttttcttcttctcaagtgatttttccaggattaatggtgtttctccgtttgtcagcgttgatttatcgttgctgatctctttcgatcgctggttggattcgtttctctggtgcaaggaatgtgcgactgtaagggtaaagtaagaggtacttttgttattttttttctcgggctgtataaaaatgtattaggcagcgtaaaatatatttgtaatattgttggcttttggggctataagagaaaaaaatcctataattttttaaatatgcataaatttaattggataagttacttttacatattaattaatatccaatctgcactaattcaatttgtgcaaatatttgcacttcacgaatttaatttgattgatcgtgcggattagattagacgggataagtcgtaccaaaagagcacttgtttaatttgaacaggggtagttttgtaatttcacaaaagaccacacagatcacactaaaaaactgtaaaacgattcgaattcgaatccaattagatattttttgacaatgtcggcgacgtcacaggtggccgccggggctctatcagcccacgatcgccagattttgacggcagttaacgccggagcagcttcactttccttcgtcggctccagcttcatagtcctctgctacgtactcttcaaagagctccgaaagttctccttcaagctcgtcttctacctcgccatttctgtatattcctctttctttctatcactcacttctttatgcctacttatatttatctggtttaatgttggatctaattgctcgttcgtttttttttttgtttgttcgtatgaattattggcacgaataaggaatttagcttttaggattgtagttttatgatttggatgaaattaagcgtaatgtcatagttttggagcttgatttatgtttgggtagaacttgagaggaagtaatgaagggtgaacttattcaagttatgatgttgaacaacacgatcttactttttcactgtttaaagctatactttcataagtttgattaagaatttcttgttcaagaagtggaaattcaagtttttaagtgtttcatttgaagctatacttacattactttgattaagaatttcttgttcaagaagtagttattcaagtttcttaagtaattcatttgaagcgatacttacattactttgattaaggatttcttgttcaagaagtggaaattcaagtttttaagtatttcaattgaagctatgcttactttactttgattaaaattcttgttcaagaagtggtaattcaaggtttttaagtatttcatttgaaggaaactagaatcttcacctaaccctgcaatatttgggaatgaggaaactatagcaattgctatataggtatctagaagggactagaatctcagattttgtgggagcacccatttgagctcttttcgccttcaaattctgtcattcttgagtaattgggtaaatgctgcgtttgatgtgattaaatatataagaaaaaggagacttgtgtctgtgtactatcccacgatgtatatgtaagtgatttttggggtttatattctacttagcagctactaaatcttaactccatgattggattttgttaattgggtcaaattttgtgtttggcgtgattaaatatttcaaaaacaattctgccattctgtgtttctatagaaaatattggtctttttcaattagtgtaaaatgcaatgacacttgagtaattttagaatatctactcatcttgtttattttcttgacatcaggatatgctatgcagcttcttcaccatggttgggtatgctttgaaatgcagtcgggtatatcatatgtatacgcatgtgtgtcgtatgatgttggctcatagtaactctattgtgcagggatccgtcgaaaggattcttttgctatgctcagggttacagtacacatttcttttgtgtggcatctttcctatggactacaacaatagcatttactcttcaccgtactgttgttcggcacaaaactgatgttgaagatttagaggccatctttcacttgtatgtttggggtaatgtcatgtggcttcttaaaaactcattatgctttttctgctgtttctgccatcttcagtccttaagctcatttggttattgacttgctatttacagggacttcactggttatgactgtcatacgctcgtttggtaataaccacggacacttaggcgcatggtgctcgacacaaacaagcactggaaaggcaagtgtgtagaagctatggactaacactagctgggctcattgtttataagaatatttctcatttttcaatgaccttggatttgcttagttatttaaaattcttttagttctgctaatggagaatgtttctcggttgcaaatacattcattaaaagccataattctagagcatctgatttcagtgaagatggtgcatgatttatatgaatccttttttttgctggttgtaatctcaacttcatacctattctacaggtggttcacttcataacattttacctaccgctctggggtgcaattctttacaacggttttacatattttcaagtgatacgcatgttaaacaatgcaactcgtgtatgtgtttcaactgctttattttcttttatcagattaacaattctagtcactagtacatttgctgagaccatactcgtttgcactttcagatggctgtgggcatgtctgaccgaggatatcacacagaggcaagaccagacatgaaggtatgcggttttattgacatggatagacagatatttattgtagtaaaatctggataggcttgatgttggagctgtttaaaaaatggttaaggttcaaattactgtgcctaatatattaaacaactgatatgtgtggcatttgctttgtcttcaatttctatgtctatgagaaacataattctgtgttatatattccatttatgatatatagtaactttgtctatccaagtcttgcttcttttttttgtgttaacagcaatggctgctcagattccataatttattagatatatactatttttattttcatctacaggttttaaatcggtggggatactatccacttattctgataggatcatgggcatttgccacaataaaccgcattcatgacttcatcgagccaggtcataaaatattttggctttcggtgcttgatgttggcactgcgtctcttatggtgatttccttcacttttcatgcttatgtgatcactataaatatatttatgtagccaaggaccattttattcctcaaatacttgaaaactaaaaatcagttcttcattgttgttttagggcctttttaactcaatcgcatatggcctaaactcatcggttcggcgggcaatttatgaaagattggatctgtaagtcattaatttttttttgttacctatttataagattaactggtaaaaatagattatttgtaaagttactttgcgaaatgacttcattttactaatttcacgcaaactagaattttcgataagtgtatttggaaaagtcattttgctatacccctcatattgagttttggttattttttgcaaattttaatcagattctggccagataaacttcgaaggtggttaccgtacagttcaaagtacagaaaccaacaacaacaacaacatcaagagagtgaattagtggcactgaaaagtcaagatcagcaatagctaaatgaaaaggactaattttggatctcattctttcactaactgtctctaaaggtacctttttgccatcatcatgctctctttgcccaaaatttgacaaaaacccaactctgctgctgatgatcaaatcaaaaggttctgaaatatttttcttctctttgttgccaaatttgggagagaaaagggtctatagatcgtgctgatctgacttctgtagttcacttgtagaaaagtgataaatgcttagtctgagtgtaccttgatttgctcccccactttttttcccctttgtgtatattgattttttgtggtcctttaacataaaaaacataactcttccctttctggtgttttacacaactctatataggtggatttatttggtccatcatcaaaacactcacaagttcacacacatcggttttgcaaaaatcatggtttgtaggctaccgagccatgagcacgcaatacacctcgtttggttggcagcctgcaatgcaagagtttgtcatttgcaggctacc

SEQ ID NO: 32365 - DNA, 2520 bp, Cannabis sativa
aattgtatatttttattcacttgttaaagtttcttagagaagatgattcctacaacatctgtaatttgggaatctaataatgtggatggctgagaacatgatctataattatagaatcttgactttcttaatagatcaaatgctggttccctttaagtgttaattctgggatttaaaagttgtgcacaattttagatgggatctacattatactttcactagtgaattaacggttctaaaggataaagaagtaattagaagggtaaaatagtattttgaccaaaactaattacgaatcgacacaaggaaggttaatcacttgacttaattatatcaatagacactgcagtaaaactcagtaaatataattctataattactaagagtgcaattccatatttatagtggagtaatcatgaaattaataaataggattagtatttagttgatgagactcaataaataatctagtttattggagcttataattataggtccatggtccccgaatcgctaccttaatacactgtcaagagaagggataaagagttagataatgttattcgaaaaaaaatctattttgaattgccaaaatagtaattatttgtttttgtaataaataactaattttttcaaattaattaaatagagaaaagataaaagttgttaagaaaaaatttatcaagacaagaattgttgagacaaaagttgtaaggacaaaatatactatccttgtcttaattgagacaaggtaggcgcctaccctatagtagggtgtcgctattggttttgtcttttggagttaattaattaagtagttaattcaattagataaatatttgaatttaaaaagtggttaaagatatttcaagttggttgagatattccctcaaagttagttgagatattaactctcaagtggttgagagattccatcttctgaaatatcagtaaccgaattaggttatagatatttatttaaataatcgaaatgatttaattaatggagaattaaatttgagaaatcagaagatgatttttcactactacttttgaaataccaaggagaaaggaaaaactagttttctctctcaaatagttcttgcttatgtgttgagaatttataaagaacaaattatacactttatcctaatagcccacactatttcttgtgtgagtttctactcaaaccaaaatgattcaatgaggatccctgatagttatcaagaggtatacattcttttcttattatttatgtttagattaaatgtttatacatttgaagatctattgggactatggtacaatgataatcagatatacaaattctgtcattgcgtacctgatttagtaccataaaatgaacaagattttcctctgatggtggtgaacacatgcaagcttttaaagcctacctatagactaaaataaatttttcacaattggtatttcattatatcttcttttttttttttaaggtttgaaaagagcattatggaattaattacataccaaaatgttagtgggagtaatgtttttttatacatagacaatatgtcatttgcaaatgatgataaatatttcatatataaggtgaaataattcatatatcaaattattattttgagctaaagaatataaataatatatataattttaattaatttgagagtagccataatatctatgtttaattaaaattacgcattattcatttcatgttattacttttatctttaagctagtttgataaattcaacatctgtgaaatgatctggaatgagaataaattaagaacatccataaacttttatttttagaagcctataatgtatgtctaagagtctgaataagactttgcattgcatttgtttcagaattgttaagtagaactagaataactaaagttaagatcactttattttcatacaaattgatgagatatctttaagatactaaaaattatattcatacatattttattaagatgaattataacattctggaaatatagttaccaattaaattctaacgtacttcactggctatgttgattcatgtaaattaacatttgattacatccttaagattaccagtaagttttattgtgaagaaccttaattgttatttctattatagaatagtcagactcatttattattttgaggatacatctcgtatggtgtattatagagtttcatacaaggcctatggttcagaattatatttcaagccattaaaaaagttttgtgataaatttagctacagtatttatggctaagaattataagagtattggtcgaagctagcatatcgacattaagaatttagccttatagaagcgtgataagtgttcattaaccacacaatattgaattgtgtgatcgtatatcactaaaggcatgtcacaatacaaattcaaggattgtaaagtagatatgggatcagttactcatatatagcttttggttgtacaactaaaattattcaatgaaactctaatttcgatattttctcata

SEQ ID NO: 32366 - DNA, 3146 bp, Cannabis sativa
  modified_base (2263)..(2286): a, c, t, g, unknown or other
atttactcttttaccacttattaatgtaattaataattttttaaattttatttatatatttaatagaatgtttatatacttttaataaaaatttattggttttgttgacattttttttaacacatttctatcaaaaaggaataattttacccaatattggctcattttttagcttaaattatacatcatccattggagatgataaggaaaattctttgagaggtggtaaacactataaattatggcatatcgttattagtatatttgaatatcgagtctcaaaaaattttgatttagtgaataatatagaaaactgctaaccaataattattaagtgtcatatatttgtatagtgttaggtatcttaaggcggcaaataataatgttctattaataataaaaataattgatcagaaaaaaaaaatattgtacaaaaaattatacaaaaaacccagatatgttgttgtaaaaaaattgtaaaaacaaaaattaacaattattcataacaaaaaaaaaaaaattacattaattttttagcattatgctccaatgcatatttgcaaaacttgatgtaattttttttttttttgttatgaataattgttaatttttgtttttacaatttttttatatatctcattagaaatatttttacaaacatatatataataataacaaaaaaataaaattctaatagaatacataataataacaaaaatattaagggacacattaaggtgtcaaacaccacaaaaggtaacatatcgttattggtgcatctcaatatcagtttccacaaattttaatttaatatgatttataaaactgctaattaattattgtgtatgtgaatcggtatgatattgagcaatttaatgtaccacatagcaataatagtacaaaaaagtatttaaaaaaaaaatagtacaaaaatcattcataaaaaaattaagaaaaacagaaaaagaattactaaccaatcattaagtaccacgtacatcgatatgatattgaataccttaaggtgcggatagcaagtacaaaaaattatttaccaataaaatagtatataagaaaataaaaacaaaaaaaagtaaaaaaaaaaaaaaaagaaagaaaacgacaaagacaagtaattattattatttttttgttttattataacatctattttctatttatatatagatgttatagatatatcaaaattaatcttaccgttagttatctttggaaaatgtgttgtaactaatacaaatatcaaaccacaagattaaaactcaatgtaaaataatagaagaccaaaatgaaaaattaaataatattataactctataataaaaatatacattaaataaagaatacgaagttaggagaattacaactcaaagttataacagaatgcaaaatagaacatatatatataatatatatacaagagatgttataataatctcaacaccacatgcactataaatatatatataataattactaaacttgaactaggtttaacatctttatctaaaaaattattgctcctacactataagcacttaagaaaaagctagagtaataaaaataattttataaaaatatctaaagagagtttttaacaatgtgctctcttaatagaaactaatgtatcttaatatgaatcccacaaatctctatttataatgttttggtaacaacaattttaaatccaacactcatatcactccatggctgttatcagcacataaatgagtgttttaggagttatgaacgctgagaataaagctatgattaaaatccgttaagtgctaatacgttttgcaaatctttaccagagttgtctattttctaattccactaatggtacgtatttagtgggatcgcaagcatcctcattaggtctttttgggatttcatccccagcttgtttaaatcctccaccatttcctccccaaagcgaggagtctcagtcgcatttgtcttatggaaactctgatgttctttttcaggacgctgagttgtttctcctggttgagtatatcttcgttttgaggagtgtcgtctgccatggatggaaggatcaactatgtttcatagagggtatttttttgagtttttttttacaagactctcaatgaaagtaccaaactgttaacacagatttttgttaaccagtaaatgagccttaaagtaataaatgaactctagaattaaataataacaatagtaataatagtagtagtagtagtaataataataataatannnnnnnnnnnnnnnnnnnnnnnnataataataataataataaaaggcaagaaagtttttaacgtggttttgaaattaaatttgcatactccacgagttcatcttattctggaattttataaagtgtatgcagaatacaagaaaagatatgtatgatttttactttttctcaaattggacatcttctgttccttgagttctatccctatttataggagttttagggcgacacttattccattgagatcttatccttgtaaccgttcatgaaatgtggacaatccccacgatttatatttatatcacatggggtaataatataataactacataaccacttcttgtctttatctataaatagttatgttgattatattgattcatctcgcaatataaacgatcctcttataatgctttattctgaagatggctttctgtgcctaagtattccctaggtagtacctctcgcgtctttctataaatgagagaagcaaatgcgagatactatcatagtgtgacaattctaagataaattatactgggagtgcttcccttagtctttcaacatactcacgagtatgttgatcaatgaactgcaagtttttaaagaattcattatctatcctttcaaaacatactttctgttgagtattatgtgtatcctgagatggatctcattgattgttcgtctcgtcggtcttattaatcagtagttaatatttacagctcaccattattttcaaaagatgagttcaaatatttttactgattgtattttctgaaataaatttattgagcgcatttattgctccataacacgagctggtttatattgggaaacttacaaaaatactggaatttgggataacttttacaaaaatact

SEQ ID NO: 32367 - DNA, 1758 bp, Cannabis sativa
  modified_base (1719)..(1732): a, c, t, g, unknown or other
gagccaccttttgttgatgagctactagctttaggtctactgaggctcttttttcttcaatttcatcaagtaattctgcaaggagggtgtgattagcttcttaattataggtcagtctcatgtgggatggaggttctaactctacgggcagcatcacttcataaccataagccaccgcgaatggtgttttcccacttgttgctcttttcattgtttggtacgaccacaataccttaagtagttcctccaaccaattccctttagcctctttaagccattttttcatggtgtctttgagtgtcttgctaactgctttgacatgcccatttgtttgagggtgtgccactgcgaagaaactttttatgaaattcaacaatttcttagatgctataattgccaagggctcgacttctgtccatttcatgaagtaatgcaccgcgactactgcatattgtactccgcccttgcctttgggcaactatccgatcaggtctatttcccttatgacaaagggccatggactttgcatctatattagctcgttggggggtgcacggaggatctttgaaaatctctggcatttatcacatttctttacataggcctttgaatcttccatcatgttcggcaagaaatatccttgccttagtattttctttgataactttatcctgccgcatgattaccatagaaatccttcatgtactttggacaagatccgtgcaacctcttcttttgttacacacctaagcaatggcatggaaaagcctctcctatacatcacacctttaactatgatataccgggtagcttttctcacgattttctgagctttgttcatactgtttgggagttctccaatgttgagataagctattatgggtgtcatccaatttggtgttgtatttatcatttcgacttctttcgcatagttgatgatgggctcctgaaggaattggattaggactaagttggctttatccgtcactgtgctgctcgcaagctgtgcaaaggcatcaacaattgtattttcttcccttggaatctctttgagggtgtaacccttaaattgtgtgagcagatcttggatcttgcttagataggccatcatcttttctccacaggctgtgtactctcctgaaacctagtttcctaacagctgtgaatcactacagacctcaatgtctttggcgtgtacctctcgaacaagttttagcccaactatgagtgcttcatactatgcttcgttattggaggctttgaacttatttttattgctccatgtaagggtttcccctaggtgtgataagggcaattcctacaccagaaatctagtccgcaactgatccatccacatgtaatttcctggtaggtctgtctttgttcttttctagtaaagattcttgtactagctccgggttatcctttgtattgctctcttctttgcctgtacattctaccataaaatcctctaaggtctgtcctttaactgctgtatggggttggaagattatttcatactgtcccaactctattgcccacttgagtaatcttccgaaggcatcaagcttttgcaacacttggcgtaaaggttggtcgacatatacccgaataggatgagcttggaaatagggccttaacttccttgtgggtaagattagacagtaagtgagtttttcaattaggggtaccgaccttctgttggaaatattttaccannnnnnnnnnnnnntaccatgtatgtttcattaacatcct

SEQ ID NO: 32368 - DNA, 1621 bp, Cannabis sativa
aaaattcaggtattgctttgttatccacgatgtggaaaaaagtttgaaacttctgagcatgctcttttttcttgctctggtttgattctagtgtggcatcagttgtgggtgtggttggtgcttcgtcgatgtgtatatggtccaatgcaggaaattcttctatttctctttgataggctatcccgtgaggattttgaattaatgacgacaaccctttggtggttatggtatgatagaaactcagtattatttggcaataagcagtcaagatcggagtttaaggagtatgatccgcgataccttcatttgggattgggtcttgcaaacccagttacaaaccgatctactcaatggatgtcacctcctcctagatcctttgctctagcgactgatgcttcggtggttccaaggaggggctttgtcagattaggggagtgatacgggatgcagcgggagtggtttggttggcgtggtctttaggggtgttgggtgatttttctactaatgtggcggagctgcttcctattcgtctaggctgactcttgcgcatcaatttggttttagtatatctattattactagtgattctactgtgacaattggttagattaataagttttacataaattttatttttcagtctagtttagtagatatatatactttattagctgttgttagtggtggttcttatagtgcctgtaaagaccgcttagctttaatttagaaattagtagataattagggcttaattatgaaaattatttattagtattaaattattaatttatgatgatatatttgaactcagaatacattttatatatgtcatatatagaaatttcataatttttgcatgtttgtgcccgacaatattggaacgcggtgttttggctattagaatcacatcctaatatttttagtatagcgggataataaagttagacattgcgaatgttgagaatagtcgagattatagaatttcccaaattaccccttagtgcaattttatgactttttgtgtgggaatggcaaaatagtcattttgcccatttatattttgtcttttgcggtttttaattaaagttaaaaaatctgatttatttgttattctttggttgaaagtaaattaaaacaaaaccattttctttcattaattcatttttgaaaaattagaaaaaagtttggaaaaagagtctctctttccttcctctctctcttctcgaaacccacctagaaccagttagggttaggtggtttttttgcattttcaagcttgttccagcaggtattaagggatcttaagctctaggtaagcctcttgtagctccctctttagtttcttgattttgaagaaaatagattatgcatgtttttgagattttggttgttgttcttgctgctggtgtttagttgtgttttctgtagttaaattatgtttaaataggttgatttgagcatgttgtgattggtagtttgtggattgagcaagctttgagttttagaactcaagattgactcattaatggtgtttttcaattctgagcatgggtagttgttctatcacttgaaaaatatttattggggtgtattatggaggtctgaaaagtttggttgggtt

SEQ ID NO: 32369 - DNA, 1111 bp, Cannabis sativa
attaggtatttttgcctctaaaaaacaagtatttaaatgtataaaatctgaaatataatgtatttatgccgcaatttacccttttaaaaatttaataatgtttgacttgggttttttaaaactatttttacatttttttacttaaaaaaattaatattctacaccatatcatgacataaacccatccaatcccaaattcgaactcagaccccgcctcgaatccagacttgaaccttgacctggacccagacccgagcctgagttcgagttcggtttcagggtccgggtcaggctgagggtcggagtcggggtccgggttaggaacggggtcccagaccggggttggggttcgggtttgggtcgagttcggggttcgagttccatggtccgagtcggtctggggtccaagatctggcgttcaagtttcatggtttgggtccgtgtccgagatctgagttccatggtgcgagtatgtgagtaaaaacgtaaaatataatacttagacaaaaaaaaatatttttgaaagttgaaaactacgttttgatgttttctgttttctagtttattaaaactcagtttttaaaaaatttagccaaacaatccctattagtttccaaaagttgtttttcgttttaaaaactaaaaataatttttaagttataaaatcaaacatccccttaatttcatattctctcgaccttgtttttaggtttttctttctgtaattacttgttccttaagatgactaatgtaactttccacttctccttaatgaaatttttggtcatttactcattttagtgaaaaaaaaagacaattaatatatatattttggaatggaaattcatcaaattttaattaggagaacaacctttttttttttttttccttctataatattttatctcatttttcatcattatctaatttaaatcctttatacactcttaatcttatttgaacacaattttaaaaaaaaaactattagttttccaccgatattttttttggctaattagcaatttttctccttaaactttgacatgtactaaatcgtgccccttaaacttttttggccgttaaaaattgctcccgaactattgagattgtt

SEQ ID NO: 32370 - DNA, 1387 bp, Cannabis sativa
agaacgtatcttggttccgcactcgcagagccttccgccttcaactagccgtacctagaagacttctccagaatcacgagactggagagacgagacagtgtgttcctggaagaccttttcagtttccctttttattcctacacataactaagaaaactccagttgtcagatcataacagagcatcatatcaagattaaaggagaaacttcctacaatgaatattatgcaattaatttagattaattgcccacaatcagtgtacgaagtgttgaccaaatcaatcccaatttgatccacctagtcaacagattgccttctccatgggttggacttcatgagaaagccgaaaaatattatttactgtaaactccccaatagaggaaagggaaaactcaatgtaattctcaaactactataaataccccactaatcctatggattaagagtggaattctcttgtaaactttgttcaagaaaacttgagaacattcattctgtgtatttcctaaggtatttacaagtaaaatatttactaaataatacagactcatggactaaggctagttaacagcccaaccacgttaaaaactatttgtctcattttatactttctcttttgattatttattctttagctcttattatttttattctatttttggaaatctcgataaatattttggtgctttcattgagaggtaaagaaagcagtgagaccacttgcacattacgtccgagtaatcatggcctccacccgaaccgaatctggccttcgtttaactggccctagtgccagagctggagattctagtgacccccaagaggtgactagtcgttgagacgaagatcagaatcaagatgatcccatcattgaggacgcaaagtccaaaaaaagtagttcgaaggacgttgaagttaacgtcaaagatgtactagaggacatgcatgaagacgaccctcgggataaagttgttgatgatgacgctggagagaagagctagcctgatgagtcagacctcgtggtcatcatggcaagacaacttcaactagccgaaaagtaggttaactaggcaagatcaattcaatgagtttctcgaaattttgcaggatgtcttaaataattataacgtaaactatcatgaaaaattggactaaaaattctctcatatgctgaaataaatagggggtgtatcgatggacccataatgcattgtagatttttttcatggtcgtgtacattatagttatttattcctgcaaaattttaaaaaaatcaaaaaaaattaatacaccaaaactaaagtttaaactgttgcacgcgtaacccttttatttggaggggtgcattataaaagtacattttaatttattgtgtataaatttaaa

SEQ ID NO: 32371 - DNA, 3135 bp, Cannabis sativa
  modified_base (1467)..(1472): a, c, t, g, unknown or other
acttttagccacagacctttagtcacaacatcatcataagaaaaaattgcgactaaaacttttggtcacgttatttttcacttatagacaattttttttttttttgtgactaaaagtcaaattttttgtagtaaagtcgggcgaagcataaaattataggacagtgatatggcagatttgttttcattttattttatttctttgtcatttgtaattaagaagtaataaacttgaaattttattgaaattaataaattaattttttaaatatataattttaaaaaattattaaaactgcactaagcccggatcaattccttactttttctaataaaacaaaaaattttaatcaatcccaattacaacacgatacacttaggaccacagtattattataaaattgcccaattagaaaaaaaatattaaataccccacaaataaggtcttttttaaatgcatcaccataaaaatttccaatatatattatattaccgtttcattgaattcagatcattatccaaatgagttctaaatttctaattgtcactaattgaaccacttattagtagataatcaccgaataaccaagtagtgtaagtaagcctataattattattaattagtagttcctcaaccataaaagtcaacgttttgaaatcgagggacaacgtactcatttgggttacatcatatgcaaatcaaattattcaagaaaaatatatcaataacttcggccaattcgattgaatttcaagttgagctcttaattagatatattaggttatatttgagatttagatattgctaaaaacaaaaattataaagaaaaatgtaaggaaaaaaatacatagaataaaaaatttatcaatgtttcatatgtttggtatgagaattttgttcaataaattttttttcatataatttttctttctatactaaacatgctatttatttatttacattttaatttcttttttcatcaaaatttaattccagaaatataagattagtgatattttttttttttttttcaaaatcgatcatctcgtcacattgtattttttggggtctaattatattattatcatgaaataatgatatgataaaagatttaaaaggttacgtgaagtataagtaaacatggtcgtttgcaaagaggttaaggttggagaattaggggatgagagaatatagtttgatataaatttatatatttatatgtataattttctatatatatatatatatatattagatcaccaagtagttaatattagtggcggatctagaatataattttaagataaactaactaaaatttacattgaaatttaaaataatagttattgtaaaaaaatataggttaattagaattttttttccccgaactttactatgtactaaatcatgtctttaaacttttaaggtcgttaaaaatgcccgctgaactattgagattgttgaatnnnnnnacttttgtccaattttagtaaaagtccttaaatttaacaatctcaatagttcatggggaatttttaacggccaaaaaagttcagggggcataatttagtacatgttaaagtttagggggcaaaaatccttattagccaaaaatatatattatatttttttactaataaagttattatatagattgaaaaaaaaatatagcatctaaataataatatgatattttataattcttgtcaactgttttttatatggaaatttgtgttaattataaattaaatataattaaacataatttattaacattataagttcttttaaaataaagttatttgtagattgaatactttatgttaatattttgtagtttttctttcaaaacactattacataattaggctttagaggctatttttaaggggtttcagcgtcggttttgacaaattttactactgacgctgtttcaggcatgggggtaaaaaataaccgacgtcataaggactctatggcatcaattatagtataataaccgacgccatatgtcttcctatggtttttttttttcagctttataattttgtattttagcataagttattatatatatattgttttattattaatataattaaattgagtataaattcataaataaaaattaaattgaaaacttaaataaatatatatatacattactttaagtatttgtatattaactatctttttattaatattttatatttatattaagtgtttgcatttttgtagtatattagtatcatttttataatattttaagttatgttttgtacaataattagtatattgaataataaataatgtgtaatattttaacattgggtattgatttgagatggtgcagattttagttcgagtatatgtgatggagtataaaaagtgaggtgtgtgaagagcacttagaagcttttgaatggcataactttctcatttctcaattaatttagcaatgtgatcacttgtttttatatgatttttcaagaccaataaaatgaaacaataatttaaggacaataataaatggacaaaatcagaggaagtgttgttctttgcatgaaattttttaaaaactttgaacattaataacttttgatccggttgtccatttgaggcattttttttaacttttgtattttttcgcgttctacgcatcccaaacagtctaaggcggtttggccaaccaatttttcaaaaaatgctatttgtatactaaattcatgttatgcacctctttcacccaattttttatgttttattttgctattttacttaaaaataaactaatagaattcttatgttaagtattagaatcaatatttataatgtatttgttaattctaccacagtgaaaattgtaatactaatttctttttatatctcttctaatatttaaataaaatcatagtagctaatttatacaaagattgtattttcgtatattggtaaagacttatcaatgtatccttttggtcacaagtttaaatcccaatagacccttttttgtatttcttttttcttctttagcttactatatttatccttagcactcatcaatatctatcctatgtattacatcaatattattctaaaattactctaagtatttaagggttatctaaatatata

SEQ ID NO: 32372 - DNA, 3690 bp, Cannabis sativa
gtgtattccaactttagattaacttgcaaggagaaacaaagttaaaacttatgtgcaaaaaaactcgtacagagaaattagtagataaacacttacccagatgacttcttttagaactttcgactaggagttccacagacatctcttccgccccagtgagctgctcattaaccttggcatcagacgatcttggtagaaattgagcatctccttggccttctttatttatggtaggagtgtgggcggactagctactggttttggcaggttgggcccctcattgttagccctcttagagcttttggcctaagtgttaagaggttaagagttggaagtcttcttggccggagggataacctcagggatgttcgtggagatggtaattgaccttctctcaatgttaacttgaagtgtcttaattggtgctcagccatgctcatgggaagagcattgtccacctttggacgtttggctggagatttttacccagaagcatcacctaacctcttccttagtgcacgcatcattttcttcgacatggctgcacaaaagaaaacagttgttaaaaatagaaacaaataagaataaatagagacaagtgaaagaaaaaattgctaccttgtacttcagggagtgaaccctcccaaacaagtaacgatggggcatcttcatcagaagaattcccatcttcttcctcgaccaccacgaccttccttttccctatcacctagtcaaaaggacgaccagcttcctcagggcatccctaattatgataggcctttcaagtgttacaagatcaaccttataggttttcttttttcttcttcttcttcttgttcttcttcggagcctcctactcagtagtaaccccctcgactacctgttcagactcctagacctcctcagacgggtaaggcccgtacttgataagattaactgtggtgatcaagagggaaatgttctgagtagagttcaatagttgaagaatctttttggctcttggccttagacccaaggtaaataaaggacgacagtaagaagggatgtgctagaaggaaagaaggttgatacccatatctttgatgaagtagtaatctttgacaaatccaccgatctgggacaccaccttgtccgtggtacctcttaaccaccggtattcattctaggagaaatagaaatacccatacatgttttactttgggtttaatttcagatcgaacagccagttggtgtcgtgggtggaaggttgaccccatccttgagaagcatacaacacgaacaacgtggccaagtacttgattcctatgggggtgaatttggtcggacataacttttaatagttggccatccccttgaagtaagggtgcaagggtaataatgcaccatgtttggcgtgaggtcctgaccacgcataaaatccacccctagcaccgaggctaggtagaaatgcatctaccttcctgaggagaccttcctcgaagagattagttaatctcttgaaagtgagtatggatggaggtgagacccacataagacctttcttccctttggtgctcatgggtcgagcttccttgtactcctcatcaacatagtcctgaccctccaccaacatgttgcctagctcggagataggcttttctcctttagcgtcataaggaccatcaggacgaacctcgcgctgttcctcaatctcttggacttcaacgtccccagttacaacttcagcctcctcgctcaaaagcctagcctgttctaccccagccattgtgaacagctgagcgaagtggggatcaaactctaaagccttcctcatagtgtattttgtatgtgccatcattctacgcttggacagcagcttcaatttagaggtgtgtctcgcaacattcacaggaacatcagctacggtggtatgcctagtagatgaaaaagaccagcgtactgggagtgtgtcaacaacaccaagtcagacctgatatgtccaggaattaggaagatatagtctccaacctttcttctgttcctaaataaatcgaccttacccttctccacttatctggtcagggtactaatgatgctacactacaagctgtggggattctgagtgatcactactgacttcccaatcctcaaagcttaaagttgtaaggcttttgctagttgaagatgaatttgtaccagattttaaagaggttcggccccgtaagaatggtaatagcctatttcccttgtatttgtattaacttgagagaaataataaagtgttctttctctctagagctcttacaattgatctctaagttattttttctcttaaatcactattttctcttgatttgtttctctaaattaattctttcgtccccctcaatagtgagattatgccattatataggagcttaatatatgaagaatagtttcccttaatatataatgaataaagtaggaaactacattagttctataattacaatgtaaaacataggaaactgaggcgcattgcctttattctctgactcaatcccacaaatatatgaattatcttcgtgtcttggaagtgacgagactgatctctagaattgccatacaaattgatttgtgcattatgtatacataatatacggtaaagtgtattgtatataatattttagtttacatacaaattgtataatttaatgtttattgtgtatattactgtatagttatatgtagttgttgtaatgtattattgttaaaatagatacataatagttactatttgatgtgtagtttactagtttaagtttttgtgttttggtttaacgtatgtaattgcttcgtattccgtgtgtacatagtatacaataaggtgtgttgtctatacggatttgtatttatgtatgtgcataaattagtgtatattgtgcatatttttgtatactaaatgtgtgtatattgtataaattaatgtatattatgtcctttaatttatgatgtatacttagattaggtgtatgagtgtatgcttattaaattatatatgtaatagtttagagtatatatatattgtaagtgttatttattaggttagtttttttttttgagtgtttatttgcattatgagactggctcaaattttgtgtatatatagtatacaatatggtatattatttataccgatttaattttttgtgtaaatcgtattagataatgtatattgtataattcgatttacgatgtatacttagatagattggggtataatatatttgttgaatatgtatacaagatagtttataatattttatattattgtgttgtctttatgtttttacaggagtgtgatcaatattttaataaatatgagaatcgtgtttagggtgatgattttctttccaaataacaatttttttgtcggagtgggaacactagttttgtgaaagtttttgttgttattttgctaattttgctatcttatgtgaatttttatggtcggaggtcggatattgacaagagcacaaagtatttttaaggagtaagtgagacagatattttgaaagttgtgtttgtggataaactgtcaaaataagatcagtggtaactatgttgtttacttttttttatatatatttattaattatatagtttacaatgatattaaatgtgtattatttttgtattttttgtagagaatgtagtgtattcgttataaaa

SEQ ID NO: 32373 - DNA, 3913 bp, Cannabis sativa
  modified_base (172)..(174): a, c, t, g, unknown or other
  modified_base (1301)..(1301): a, c, t, g, unknown or other
gttgagtttgacttaaatatttctctatgaacatatttttaaaatactataaaaagagatattttttgatattgttttaattaagtagttaaactaagtatagacattcaaattctcttttatttttcatcattagattaatatttgattatttaatatttttaaaattaannnttatagttaaatttatttagtaaccattcatgaataatacccattgagaagtattttatataagtattaatttttttagtagatgaaaaataaaaatttattgatcagacattaatcattcactcataaaaaaaaaatatttcttagataaagaaaagtaatttgaagtattattaatatacacgaataatataaaatatttataaacgatgtgggactcttaatttgtatttgtagtttatttttcaaacaaaataagaaaatgtgttgtgtcataaaaaaattaattaaaaaaaaataaaaagaaataaatataagatatcatctagactccacctgcgttttatatatatatgaattattttttaatgggtattacctattgatgagaacttttaacaaaaataattataaattaatgtgcattttaaaaattaatattttaaaattgatattttaatacaatggtcgataaggaaagaaaaattagattttttgtgcttaattttactatttaattaaaaaaaatcattctctttttacattatatcaagagtatgattatattttacatcaaaaagatgtatgattatatttagtatttttaacccacatactaaaattttcaactcttttaattttttaatgtggagcggaatttttttaaaaaatactatgtaagttttatactatgtactacgttaggttttcactgtttttctaggcttattttttagttattccattgttgtttaattattttgttttgttgttttacggttattttataaaaagacagtaattttgtttaaaatttcatgtgaaagtaaaattataaacttttacccaaaattcactatttttgtaaaaattccttacttatatccctctctttctaacacaaacttaattttttaattaaaatactaactgaaatttctaacttttttactgttatactgtggggcagaaattttttaaaaaaatattgtgtaagtttcatattgtgtactatgttaagttttcactgttgttttacggttgtttttttttttttttgaaatgtgtttttttatttattctactattgtttgtaattgtcctgttttgttgttttacggttgttntataaaaagacagtattttataaaaaattctgtgtggcagcaaaattataaactttgacccaaaatctaatatttctataaaaatctcatatctttcccttggccagataaaacagcactaatcatttaatataaaaatgaaggatttattttaattaaatagcaaaattaaatataaaaattcaaatttttctaataataacttatgggctatactcattaacactacatgcatataaatatatatttagtataaaaatattgtaacatatatttatttaatgtgatgtctttgatatttttttattttaatagaattgtaacttttttatttatattccattgatacatgtaaacaatttaatatattttttttgacagaaatgtgataggagatgtttatagaggccgtgttgatgttggtgctagttaacgttgagataataaactataaaagagagaagagatgaagatgaaaatgaagagaagactaagatgaatagaaaatggaaagattatgtttagagcatatgtaatggaatgttaaaagtatgatgtataaaccggtgaaagtctcccgttagtttcggagctctaaaactacttggaaagaagcaatcccttcatgggaagggttgagtttatcattccgattgtgatttttctggtttctgtgtggattattcgtgtttattcaatggttttgtaattggttagtcgtcttgctgaagtgttgattctagacgaaggtgacggtcctgttcttccactcaataaagctggtattgaggaagggaagaagagaatggatttgtgtcttgttggcaaggtcattggccttagaccagccaataaggatggtattgagaaagctatgaaagggatatggaaaattaaccatcggttttaggtggaagaattgagttcgaaaaatattttcccatttttctttggcagtcgtgaggataggcagagggtttatggtggtggcccttggacaattgataaatagttaatttgctttgtgaaaccaatgggtttaggtgaaatttcaaaaatgaattttgattttacatcattttggatctccatcaacaatgtcccattagcttttatgacagagctatttgcaagagaatgcggggaacatattggtaagctaggagatatcaagattgtcaatggcacaatgaaggtgagggtgcaaattaacattactgaaccccttaaacggggactacgagtggtagttgatgagcaacgtactgaggtttcactcatttttcaatatgagcacttacctgatttttgttttgattgttgcatcattgggcataaggcgttggattgtccattgagggactttgctggggataatcccaattttgatcgtgggagattttgttcgtggatgtgtgctctgggtttgccaccccgggatcgttttcgttctaataaaaaacgagatgattatcctaataataggcccattatgactatgggagaggcctcgaggattgtttctgctgttgagagaaaccgtattcgttactcaagtccaccactagaagagttggcccctacctctattctggaggctcgtgaacgtgatgaagaggtgcaatccaaagctaatgcagaatagagtaatgccgaggctactggtgcacgacattcgattgttgtatcagctccggttgtgaagagtgctggcagtaatgagggggacaaggtgaagtccgagctatatccatctccggggagtatggttgctgaggtgagtgtgttacccgatgctaagaaaggtaaggtagtggtggtagatatgtcttctacgggtgtggaaaaagtctccactagtttgaatataaacatgtatgatgaggctgaacttaatgaccacagtaagcaacggctgaataaagcaaacaagggcaagggaattatggttcattcatctcgggatgaactttcttttcgccaagcactccaacaaacatttgaaccactaattaaagcgcaaaaatctaagacatggaaacggctcaactcttctaatggtcgtggctctaaaggtatgtctgagccgggctcttttcttattagcccaaaattatccccatgttatagtggctaatgctaagaataagttaagtcctaaagcgggtggaggtggtaaacgaaaaatggatatagaagttactaatgaaagtgtgaagaagggaaggaaggatgagatttttgaagtggcccccggtgctgtgaatacaatattggcgaagcctgtggagcaggctcgctaggagccatgagtcttttatgttggaatgcccggggcttggggaaccctggtgcgttgactgccttacgagcgattgttcgtatgttttccccaagtttagtttttttgtttgaaactaaactttatggtggttggacggaaggtgtacgacaacagattaaatttgcaaatagttttcatgttgattgtgttgggagaagtggtggtctgttattgttttggaacgatgattgggaggtttctgtgaagtcttatacggctggacacattgatgttggaaattattttaccagggtcttagatctactca

SEQ ID NO: 32374 - DNA, 1355 bp, Cannabis sativa
tacttggatccctcttgcacctcgcatgtttcataggtcttggctcgccaaaaacagcttcttgtacgtgtgcgaggtagatattttctcgagtttcattgagcttggtgtatttggtataaagagggatatacttgttgggtttcttgtcattaggcagccttttggaatcatcttttttcattgatcatgaggcttccgaataatattttccaacagtatcgtgccctagttgtctcctgggttttgtgatttgatgtactctggacttattctccaactctctcattcttaaatggaatgaatccttttgtcttgaattgagtcgttgatggaggtcaggctttttcaggttcggatgctctcgtagatcactctcgtcatgattttggccggacccttcccttcctcttaaggtttgactcacttttttcttcctacaagggtttgcatgagtttcattcttatgagcctgaatagtgggttggcgattttcatccgatgttccacgtatcccaggctgtacccctagtctttcctgagtttcctcaggttgtatctcctgagagctcagagtgtatccctgggtcatctccttcaccttgacttgtgagccacgaggtttgcctcataaatctcttttctcaaggtcaggctatttttgggtacaatctcccagcgttgcctttacggcggctatttcatgctccaacttggcattatgctagtttgcttcctccaatcgacgcctaagatggagattttctaattccacgatcagtatgtatctagttgggttgtaagcgccatcctcatcaacctgattagggagtgaccgattgttgctcttccaaggtccgtccagcaagggcctctaatactaggtcttcctggggcttgcattctgttcatgtgatgattcagtagatccctgaggactcaatggttcttttctgggacaatgattgattcctccttgaggactattactagtggtgtcatccatcacttttatgtcaggaggctttttttcaaagatttttcacaaaggctctcaaagaaagcaccaaactgttaacgcagattttcgttaacaaaatttgagcctcatgattatgattcaacacagaaataataaaaactagagaaaaataaaaatatgaacaccggatttttacgtggtttgcagttaaaattctatatagtccacgagtcaatcttattcagatttctgagtatattttttagggcctcttgtatatgagtttttttgtcctcccttttgatcttatctgccactatttataattgcatagtggcagttaattaccaagctgaccaaaatacatttacgg

SEQ ID NO: 32375 - DNA, 2883 bp, Cannabis sativa
cggggtgatccaatatttatagtatatgtaattttgaagtgataagtgaaatatatatctttttgtggatttggtagttttattaatccgagttaaaattctttgcttcctttatttgttatttcgttgtgcttgaagtttattatttttcccaacaagtagtatcaagaccaaagttctcatcaacacaaaaaatgtcaaaaaacggtgtctttcacaaaatttgagatcgagcttttggatgggaagaacaatttgagtttatagcagagcacggtgaaagatgtgttggtacagcaaaggctcctaaaggcactgcaaagaaagaaacctaagagtatgactgataaagatttgaaagagttgggcgaaagtgataaaaactattagtttaagtttggctcctgaattaaagtattgtgtaatgaacgaaacatctccctttgagttatggaaaaagttagaaaaactttatacgtcaaaattcctaacaaatggattatatttgaagaagcagttatatgagttaaaaatggttgaagaagaagatgttagggatcatataaatagatttaataagtgcataactcaattattaagtgcagatgtcaaaattgataaaatctagctattattttgttagcgtctttaccaaaatcatatgagatattagtgactatatttttagttggaaaaactactttaactgcagatgaggtgtcaactgctcttttggagacagatagtatcaagcaaccaagtagtatgtctcatgatcaaactcttgtgacgaggtcagattcaagtagtggtaggagtacatcgagaggaagatatgatgacggaagagacaatcgcgctcattcactgtcttggagggaagaggagtgctactattgtcacaaaaagagacagttaggaggaattatgaagagttaacaaatcatcttgaagcaatgaggaatcaagaatgcaaagacacaatatctaattccatatatgttgttggtgaaggctttgaaagtgactttttctctgtcatagctgatgaaaacttttctgactattggattttaaattctggttcttcgttccacatgtgcccgtataaaaagtgctttgacacttatattacatatgatggttgtactcaatacaagaactgtaaataccgacagactaatatattggtgaaaagacgaaaaacaaccgctaaagcctagtacatgcgggtgtccgtcgctattgacccgctgataatattggattgctattaatctttaatactgacggactgacacacctgccgcttataataaatttagcaacgaactaatagcggcgggaccccccactaatgaggttttataaaaaaaataataatttaattatataatttactatttattaattttttaatttgtataatttcttatttatattatttatataaaatgaattttaaatataataaatgtatttaaatcaataaaatatatttttttatcattaatataaacaaatataataaaatgaatataaaatatactgtgcattaagctaattattattgtttacacataattaaaaacttaaactaattatattgtccacacataattaaaacttaaactaattattattgtcttcatcaaacacattatctaaaacttctaaaccaactttctagttgaatggggttatttgtgcattgtcccgagcttgtagtaatggcggtgaatggtaatacggttgctgcatgcgaagttaataactgagcaaattgtcgagtttgttgttatgggcgagtgagaggttgtggttgtggttgagtggaaggttgttgtatcggctgacattattactcttagaagaaaaaattattatgacttaattagtatgaatgtaaactagatgaacaaaaattatatttagtccaaatgtaaataacataatcaaaattaacatcattaaatataccatttatgtaattattacaaatatttcaacatcagtggagctaataatcaccatcactctcatcattttgagaaataatatcgtcttcacatcgatcaactaacaactcctcttcttcatcagctatttcgtcgtctgattcgtcatctacaacattttcaccaacttgattaacattcaaattttgtgtagtatcaattatcattgccagttctagaggttgcagaattaactttcctagattcatagtcatgaaaaatttgacgagcttgtatcatgtatgacatcttcatcaaggtcgtcctcaatgtccgaaaagtgccgatggtttacatcttcaactattttccagtttctacctctaagcaaatcaataaggtaaaatacttgcttagtttgagtaacaagtataaatgggtcatctttgtaccattcttcactgacattgatactagtggcattattctcagtgattgttttccttctacgtggatcactcttaaaccatttacaatacaacaatgtcactgaatacaaaccagtgaaattgacagaattggagtttttcattaggcttgagaatgtaaggggcatgtggcttcatcaacttaccattcccatcatcataaatctacaaccattctcttactcccaacttcttcaaatcatgtcttgcattggttgtgtcctttaatttatcattgtcaaggagtgtggccaagagactatcacacacattcttctcaacatgcataaaatcaatattgtagttcaaagtgtttgtacaccaataatcaagctcgtagaagatgcttttttttcctccaattttgatattctaaaacacttcaacatttcacacttccaaactgctcatgttttttaggaacttgcaatacaagt

SEQ ID NO: 32376 - DNA, 1508 bp, Cannabis sativa
ataataatctaattaatctaatggctaatggctaaaaaatggctaaaaaaaatgaaaaatgtaaccacgatgtaaccacgatggttacatatttaatgtaaccattagaaccttctcctataaaatatatatatatataagagtgaaatatatgtaacataaaagagcaagtttttctcactctctctctcgcatctcactctctttctctacacgcaacacactacgtactaagtgtggttgtgtggtttttcccaatctccattacagtgtgttatgagttgagaatatactgtaatcagaattggtcactcatcatattatatttataagctcacttttattctgagtgttgatgttgatttgaaaaatttggtgtggattattcatcaagcccataaagctttggattggatgttcgaacaagtatacgaaaagaaacaaggatcctatgataggcttgaagaggtaaaatctttattccatgtagttaaattgaatttatgttgtattgtgttgagaaccgaggtttaaggttcatatcagattcaacaaatattttttttaaaaccttgttcctattttatgtttccgctgatacactaatatgaatcctaaaaaccatcaaatgttactagagcccgctccgaaattttattaattaaacattgtgttgtgtattatgcatttatatatatagggacacgattttgtcccgtaatgtactttcacggaatgtatttcgtgatgtacgacagccgttaaatgagaaagttatttaatttgaggactgggactgatctaggggtaattaaggttaaaaaatagtgacgtaccctgagacccatctaatgtaccacggaatacattccgtgaaagtacaacacgggacaaaatcgtgtccctatatatattgtgatctattatgagtgaatctaaaatatgaaatcgacatttaatgtggatactataagtaaaattgtgcagattaaattggaataacaacctattattctttcttttatgtttcaattattagcttgttgttgatttcttgtatagttgatttattctctattagttgttgttcttgattaagtggttgtttcacaacactacttgatatgtaaaagttgaagtgtatactaactcgactatatacataaagctataaggtttatttttgtcgttgagctgtgttgtattaaataataaattacattatatttggataaagtaatgtattatattaatacataacaaatggtctgtatcaatttgtattataatatttataaagaatatgtggtcaacctcaatctctgatctgcacccgaaaatcagacttggatctgatctgctaccaaggacgcaggacttggacctgggacttgggactcagatccgacctattgtcggttttcgagtcgaatttattgaaaatatattataactttacacaatttattaatacaagccaataccaaatataatattatattaaataa

SEQ ID NO: 32377 - DNA, 1680 bp, Cannabis sativa
ttgaatatatattaactactaatttaatccttaaaaaatgtgattaacatatattatattttttaaaaaatatatatatagttattgaattatgagtggcaaatatatagttaaaaaaattatttttactaacaaaatatcttaacaaatagtgaattttgcttctaaaattttgttgcaaaataaattaatttgatttatgattttttgtagcagtgagtactacaataaatttttatttattattatatttatttggatgtactttttttttatttttattaataatttttaataataaagttttttaagtagtgaaacaaaattaataataaaatttagttaaaatgagttggcaatggcattgaattatgtttatctattacatttgttcatatatgtatgaacaatatgtaaatattattttttttctagatatattaatattagtttgatatattatttttaatataataaaaatttaacgtgttgatatttttattaaaatattaaataatatacaaaaataataaataatataattattttttagagaaatataattattcattactaaaaataaacttgatatacaatatttatttcttttgattttaggcggtaaattctaaaattttctctctatattttcaattccccaccttaattagcacttattcagttgagccttcattcgcatattagcactctcgatcatcttcttctccaaatgaacttctctatcagctttctctcacaaccttagctcactctgactcaccctatcctcacccgacagactaaacccaaccctaacctctgcttcacacccaacgacgacggtggccctcgagaggttccgtaatatgcgcctcactgtatgttgatttacttttcattatgcaccaaactaactacttcttctagtattaagaatgatttcttactacttttttttaggtgaattcttttttccactggaatttgtttgctataaaaatgaccagtctaaaatccatcgaaaccccttcgttattatgtctatttgtgcaacttatttgctctaattggttgcattaatcaagaacgcctcctctcttctcgccctcactctctgtcatcttctcatctatgtaagttagttgtgagggttaagattttatgttttttccaagttaaggttatctctataggatataactctgtggtttatatcttgcttgatttctagttcacatctggtgaatattgtatgaaaattcatttgttttcacataatttaatatttcaaaatgcctaatgcatacaaagcgtttgagaaaatgtctcagagtctttgttaatcttttcctctgtttgtaattattatttcaaatctagatattcatctatttaaaatttgttctctttctatagtaataatatggtcacttcgtattgttcaggtaagaaatgattcattgtttctctatgctttctttttctatatgttcacaaaattaatgtatccaaacttatgcaaagaaaacaaaaacagttttctctccctctgtctgtatatagtttaaatttgggtgtataatttatggcatggctcgatataaatttaaacagttttcagataaatgtgtataatgaattgattatgagcttttccaagttgaaacagatggaaaagtg

SEQ ID NO: 32378 - DNA, 3292 bp, Cannabis sativa
  modified_base (315)..(316): a, c, t, g, unknown or other
  modified_base (631)..(634): a, c, t, g, unknown or other
  modified_base (1316)..(1331): a, c, t, g, unknown or other
  modified_base (1414)..(1417): a, c, t, g, unknown or other
aaaaaaattcggcagcataacagttgtattttgaataaatccaaaaattataactggcataaatatttgtacaaaaatatatttggcactcagtgcccgaaaacagtccagaaaaataagcagattaagtttttaatttttcaaacaatttgtaaattataaaaattgaaatatgtccaatgttatacaacacatataaaaatcaaagtccaataatcaagttgagtccctacctctcctaagtcgttaaacttttttcaaaagacgatcttaaggtcttaagtcccgagctccaattatttagtccaatcttanntattactctcacctataccatcaaatggttaaaaattatcatcatcgcattctacattaaaaatcaagtccaacgacatataatatgactatatttaaaatttggagtttcgaagcctcacctaagcagtgcacattaataatcggtcgcggtaaaaatcggtgtatcggaaacgtcgccaaaaatatataggggtagtgtatatcaaaatgacctcctcgacgagtagatcacacccatgccaaccgtttgtcaaaacggtacacgatgtccccgagaaggagcggagctacaaaaatgtcactggaaaaagtnnnnaaccgggaaaaatggtttagtgtaggttgttctcctcgacaagctgagtctagtggtgaagacctctcgtcaaacggacgccggaggtgaccgaaaaatctattcaaagtttgaatcaccaaactttgacttgcgatcccaagctaacggcggcgaaagaagcggcgccgcttggggggtgaggtcgccgacacctgggggttcgagtggtctggcgcatggggctggtcggtggccaaaggtgggtcgccggagtgtggtggtgatggttgtttgtgggttttatttgaagcttgaagagagagaaagatgaaaagagagaaagagaaagagacgttgatgtctgataaattttaaagaattcatatatatatataaatatatatcatatcattttattatttatttattatttattattattattgtatatatactacttttctttttttctttgacttagtcaaccgagatcttacatgttatataaccggttttatttgttataaccgattttgagttatttcttgttattatttttattcattataatactgttatagaaccgattctattttaattataactggtttaaattattttgtgttatttgtttttattcattgttacagaatcggttatattttaattataaccgttttgagttattttgtgttatttnnnnnnnnnnnnnnnnttatagaaccagttctatttttattatattcaagacatttgatccctacctttttttttaaaaaaattataaccggttttatnnnntactatgtgttatgaagtattttattgtgaaactagtttgtttttaatttatattttagtgttttaggaactgatttcttctttgtttttaattgtatatcggtttgagttattgcgtgttacttgtttgtattcattatgttatataaccggttttattttagttataactagtgtgagttctttcgtgttatttgtttttattcattataacactgttatagacacggttctatgttaattataattgtcttgagttattttatgttatttatatttatttattatgttacagaactggttatatttcaattgtaaccggtttaagttattagtttttattcatataactggttatatttttagttatatctgagacatttacttcttgtgacttttccagtgactttttcggcgacgttgacttttccgacgacttttctggcgacagtgatttttctagccacttttacggtgccagtgacttttccagcgactttttcaataaaacttacaaatatgagatttctatttttttttttacaaaaatatggcctaaaaaaattctatataaatgtaaaaaaatataaaaaaaaaaacccataacgcaatagtgttatttatttatgccataaaaaagtaaactataatctcaattcccatatttatgaaaattctccaatatagtattgtattaaatcatactaacacaatacaatacaatatttaacacaatataatattatacaatacaacataccaaataagttctaaaaaagtatgtaatagccaatacaataataattaacaatgtgccattattattctttcatcaaattcttttccttgaacactatcgtccatcatcttatcattctgaggttagtcatcaacacccaccaaacttgggtgacccaaatcatgtgtcttttactcaacaacgacaaatcttaaataaaaatacaatacaaactctatatatacatatacatatacatatatttattaatatttatagtagactagaaaattaaccaaaataatatacattaatagtacgtacgcacgcaataaaaacggagaaaagaagtgtcatttacaattgagtttataaatcttacccctcttttcttttccacctacccaaacaaattgctactggtaagcaaacgttgatcatctctcaacatcttacatcattccattcacgctaataagttggtgaaacgtttcatgctataaatattattattatttgagtttttcttcagccaaaactctttttattattattttatttatatttaatcatctaaatttaaattttaacaataaaacaccttccgaactaatcaattaataataaatttaaagtgtcattcggttaattgtcactatgggcggtatgtatacactcgtacacatgacacttttatattggtatacacctaatcaattagaaacaaatttaaattgtcattcgaataatttttatatttttaaaataataatcttagatgtaccaatataaatttgacatatgtacaaaagtgtgcacataagttgtctatattgagaattaactatataaaaaaataaatggcatcttaaatttgcaagcagctcaatcattttgaaagttttactttgaaaatttgagtttaaaaaattaagtgcaagtgaaatgatagttaagagattttaaccgcaaaaaattcttattatttttatttaaaatattaatttaatttaattaattagtaaaatattttacaattattgaatgagatttttacacctcatgtcaaaattgacaccttttttacatttttatccatacacggttttttaaacttttttaacttttacattttt

SEQ ID NO: 32379 - DNA, 2792 bp, Cannabis sativa
  modified_base (1449)..(1455): a, c, t, g, unknown or other
aatcagattgtaaagggttttatttagggcacaaaacccaacagagataagtattattgtaagtcttttattcttagtaacgtccatctgagtagtggttgctaagagtagcgcttacaaagtatgaaacaatggtagaagctcatgaattaggaatgaccttgactcttgcctgaaataaagcaacgttggattctctttttgatcgaataaaaggttgctagaacgatttcaattttagatgagttgactactctattcaatgaatggtatctttgactcttgcctaatacgagacactgtatcagcttgttggaaaccttggaaattatttaagatgtacttgttttgtatttttacatctttgttacgtgctaaatgtatgataatttttgaatgtgtatgaattaatattaaatcatgttgttttctgttattaatgttgtagtataaattttgaatcttcattgttggtctaacttagtttgttgtttttaatgggagaaatcccaaaggattgtcatacgttagacaaatataatagtgttagatctcacagataagtatttgtaaatgcgacatctagttctacatccaaagatcacaacttagactagtgtttataatatgaaataaaaaaatttataaaataagaataacttggactctggcctaaacgggacatcgttagattcttaattttaattaaaatatcctttatttttcctcttagctttttcattaagaatttgcttagatagtatatcattggatatatggtttatatatcatttgcttatggtgtcattctatttttttttctatgaaatttaatgatgcaaacgactatattccagatgttctatcctgaaattttattaatcctcgatcttagaaatctcctacatgtatgtgcatactaaaggcaaggtaaatagagtgagattagtagtggtggtcaaagctagaataattactcatgtatatttggtataaatttaagtttttgactttaaattttagattgcaaattgaaattttaaatttcagttccaagaatgcattaaacattacagtataactttcaaaagttttaatatccattttcagtcaatggattcgaactgtatgtttatgtatggaatttaagttttgtattctatgaccagaatccacttgaactattctaagaaatcttattcatagtggttttgacaagatgattctttgtaaagagaaaatatgcctatatccacttgaaagaaggctcatttgtattcgaatatggatatacattcaggggtggatatgaatttttgttatattcttaagacaatcactctagaatttaccttaggccaagaaatttgatatgtttaagaaatttcatgaatttctagcaacgttgaaaatattaaggtaagtggttaaagatcttacgaactgatnnnnnnngagaaatatttggtggatatgcagttcaaagatcattaagctgaacattgaattgtattcaaacttacctccccagaaatttgatttgcatattgatgaagtgaaaggtctatgattagttactaccaactatctaagtccttctgggggaataccttagtgattccaaaatttcagaatgatagaatggttatgtacttagtgtacaccattactagattcagggatgtcctgatcgtgaacttaagaaaagctaaacctgttaacttaagtttgcaagtttgatagctattctaaagtgattaggggtagaccatcctatggtcatttacataagaaagtgttcgttttcaacaaatactacatttctaagaaatgactaaatctgaaaagtagcaaagtagaggagatattccaaagtgttctatcatcttattctatataagatggttccactgcctctgttgtcttgatacaactgatgaggataataccattaatgttcctagataaaagtcaccgtaccttgtcatactgggagggtttcaaggaactcaccctgttatgactaagacacttgtaattaaaaatccattgttagtttaaacaagtaattgatagtcagaataaggaactaagaagcaaagccaagagaactgtggttaaaaaccattcatatggagtaactaaaagtttttctattacaaggacaagaagggaaattttgaaaataagtctatttaatggacttaacaaaacttcctgaacctattattaaaggtttgattttatcaaaacctggtatgcctggtaatttatttactctagtgcaagcaacttactttagtaagatgctagaacattttttcttccaatggctatctataggaagtcttttgctcctagacatagattttatttatataaggaaaagtgtcaactactccagaaaagataaaagtcatgaaagaattccctaagcatcaacagtgagaggtcttgtgtatgctctagtatgcattagaccagaaacctgctgttgagtgggagaaatgagtaggtatcggattaatccaacaaaagaacattggaagacaatcacttaaagatcaagaagaggaactatgtgttagtcgataagggtggtgtttcaatacacttagactacaccaaattaggtttctaaacttgcgtcattgctagaaagtttactgacgagatggtgattactctggtggtggagcaatgattttggagaagtgtaaaaaccggtccaaaatctctaactccactagtgagactgaatgtcataattacaggaaggatacttattcagt

SEQ ID NO: 32380 - DNA, 1257 bp, Cannabis sativa
ctctctctctgtcctcctctcttcacgcgacccacgaaccagtcgacccaaccttctccaccaatctccaaccgacctcacccctcaatcacccacgaaccggcctcacccctcaatcacccctcaatctgtctctccccatttcccaaaggcgaccgacaacgacgaagagaaccacgttgatccacgatgacccacgacgacccacgaccaccacgaccatgaccacgaaccactgagggaacccggagtcaaacttcgccaccaccaatccaaccgtaagtttttttttatattaaaaattagaattttcatagatttggatttgaatttgtgtatgttctttcgattaaattgttttagattgtgtatgcgaatttggatgttatactgcatgctcatcagttgtgtctgtttgtttaaacaatgttatcgatgagatatcgataggttatcgatataatgtcgaccaaacttgaaagcagtttgaccattagaattgtctgtgttgttaatgtatatcaataggatgtcgtaggtgtgttgataggatgtcgacacaataatttagttgattaagattattattttaaagaatttagttgatttatcgataggatgtcgtatgtgtatcgatatgatgtcgacacaataagcataaaattttttgacctaacatgtcgataatttgtcgacggtatgtcgatatattgtcgacaatgtgatttaattgctttctgtgattactaagtgtgataaaatcgaccgaatgtcgacgtgatgtcgacagtgtattgaccattttgttttgctgaataggtgtgatcatatacttggaatatcgacaggatgtcgacaggatgtcgatatgttttcgacaatgtaatgtaattgttcactgtaatttctgtttgataattttgacagaatatcgacatcacgtcgacattgtgtcgacaattttgttttgctgaataggtgtgatcatatacttggaatatcgacagaatgttgacaggatgtcaatatgttgttgacaatataatgtaattgttcactgtaatttctgtttgataatttcgatagaatatcgacatgatgtcgacattatgtcgacgtttttaatttttttgacagtaatatttctttgttatatattttttcagatggctcccagactcataattccagcatccgagcattttactggctgcgtgacatatagagacacctgtacttttgcaaaaatcaagtctc

SEQ ID NO: 32381 - DNA, 5299 bp, Cannabis sativa
gtatataaataatttaagcaaaaatatatgtatgtttttcatttttctttttaagttattgacccctccttattggacatgagcaaggctcatcatagaagcttcatatttcacatcattccaatttccacgtagtcattatcgtgaaagctagctcttagttttgattctttgatatattttttaaaaaaattaaattaaattaaaataagtggtgttgcatctccctttcaccataagaaaagggttttgataaaagacaaccaattttagggccttcgtggaaataattttatatccttgcactttcccaactacctacatattcttaaaatggttttttaatcttatatcaatttgtgtttttcaaacatatatatttgtttctctttgaaccttttcaatttcaaaatcatttaagttattttaaagttaattatatttatgtcactcttttgatgaaggcattaaatgcttttaatttgatgcaaagaatatgtcacatgaaactcttttcttggactcactcacttgatataatttctaattttgttccttaatcttgtaggattttttgtcctttttattttatttgcatattattcttgttttaagcttgatgatcataaatgatatttcgcggttctatatttcttttaaagcttttaaaaactattaatgataaatgaaggttttattatttgtaaactagcttaacttatcattaaatatttggagaaataaatgatgaattaaattagtagtgtattttcacataaacagagtgaaatcaaaggcatttatctgcccctaactctaaggatgcaatttaatcggatggggcaaggcactgcggtgttgtaaacgtttttttttagaaatacaattgagagtttcagaaaacacatttaatataagtatagtattgttgttaggtaatagtggtatccgaaaggttcactgattgataattttaaaaaaattattaaattaaaatatatgagatgcggtatttatattaatataagtgtgaaactcttcactatacattacttttaactgaaggaatgagaacaatgtaggcatcattgcaacattgatttacagagtgagaacaatgtcaacatatgcattcttacaccaatcaattatttgaaaccaacaaaaacattaaaatcctctttttttcccttttctttttgctagttaaagtgggatgtattaacctgaataatcctcacaaaatcaccttacaaaagtcacactttttttttcaggggtcacactcaatttttagcaaaaaaaattaaacacacaaaaaaatgaaattaacttcaagaattgtaaaaaggcaaatgttttttttttcttaaatcaagttcctgtcaccccaatcttggaaggttcaacctcaagcaagctaacacaagtaggctctggtttcaatttcggcctcttcatctgtggcaatgggcagatactatgcttcataaggttgtaacattttctaactctttcctgcaccaattcagaactaaactcagaacaaaacttatccaatatctaataagtttcttaaaaaaaaaacactaagttaaaaagtttgatttttctacatgtatgtgtacttttaccaaaacatactatgctatatatggtaaatatgtgaatgtgaaggtaaaatccaaaaccatgcaataaggtctttttcacatatttgtaatgtgtggtaccttacatttttcttgatacttgtcagtttagggtgatcatgaacatgagaacatcattttttttttttgcaatattttattttgattttagtcaataactcacaagaatccaatttttgttttgtaattagactaagctaatgtgaaccatgtgaggcagcagagttagactatcatttattaggagcaacaaacagaacttactctgctcactctgtggtggaagcatccccatatctgatcatactcatcaatgtactgctcagctgcacagatcacggcggctgcacctatcgtcgacggcgaaaactcgaggaattctatcactggtgaagaaatttttcaatgttttgagttacaaaatgatacgacatatagtcataatagtgatgaaatttattcaaatcagagtattggttttagaatattaatttaccttggcatgttagtacaatgatatttgaggtatgagagattagaatgtgatgatgattttgatattctgattgaaacccaatacttgaaagtttccatatgaagtaatggacaaaatcaaaaggtgttactaagtgtaatctccatttgagattagccattacaatgagctccattctctgaattgttttgggctcaaacatgaatttgggctcttttgtttgtaaatctagtagaagtggaacacttatttcttccattttagcagctagagaaagacaagtcactgataacaactgtgaaggccaacctttacctttctgcattgatacaaaaaactttgatatatactatgctatactatcaaactcatacatataatatatatttatatataattaccggtaatgtcgttgagagaagaaaacggtcgtaataattgactgaaagatatgctgtttcaggcctaaactggtagtaagcatgaacctaacagagtagtaagagagtaaataacactaataacaatacaaacgaatattttaccataaaaaagagagagatttatatatttccacctttaatacccaattgacagcctctactcgagctgagacaaacccagaatcgtttctaaaccgtaggatcatatcagaatccaaaacttgaagttgatcaacttcagaatcaaaggagttaacaatagaagtcgcctcattgtgtagaaaatctgaatttgaggaaagaatatggtcattaaagctggaaacctgatgtgatgaaacgacatcatcataatcatcatcactagcttctaattcgttacaatataaatcaaagtttgaataatcttgggataaagacatagttatgtagccaaaatagtactatagctagtagtgttctacttctgttgttaaaacagagactcttcaataataggtgccattttttttctctttcttttgtatcaaaatttttagttagaactgaatatattatactcataatagtacatcatatcaggtacaaatagccacagctggcggatttaaaaccctaatttctttgacgcgagttcaatcaatttttgcatgaaacttcgtttagaacaatgccaaactagtagggtcaggtccctctgtttttgttttggtatgctatttttaaaaataataaaatataaaaattaaatgaattaaaaaaaaaaaaattgctgattgatctcttcatggttcgagaataattatgtacagtgaaagaaaaaaaactataatgattgtgagatagaatatataaaagggaaagaagaagaagaataagaaaaagtcatactagcttaggcctatgccctatagcaacctacatatatataaatacaactatagtatatagggaaaaatgaataaaaataatggaatttgattcgtggtaagtatggtcaattgagatatcgatgaaaagagagccaaagttaaaaatgtactatgcatgcatgaataatatgttacagttcacgtggttttcctcttctaaaggtcagtattgatcagtaatagttggaactcattttgaataagtagtaataatgtcgttttctttttccgtcttatttgtctgtgttttttacgtgattatttagaaattagtgtatttatatatttcttaacattgatttagcaaaacctgattgagtggacagacaaggaaaataaagaaaacttgacaaattaatacgatcttaaactttgttccattcaacacaataataagcattgttgtgacagtgagatggaaaaaatttcattacttcttatatcgggattgggaggacaaaagtcaaccattatttttataatctttagttttaattttatacattttctattctaccccacatatttatttactgctcttatatttaaatttaactctaagttgtaaattaatatttaaatttaatttttaacggtaataatatctaagttataatttaaaacttctgtagttacctaattgttaagtaaattgccacgcaataatctctgattggttcatatcattaaattttaatttttttttaaaaaaataaatttaaatgtactaataaaaaatgacacatgacaataacttgatatttaacggtcaggtaactataagttaggtattattactgctaaaaattaaacttaaatatttatttacaaatgaaaattaaacttaagtatttataccgcaaattactcttaattttaatatcctacctcacaaactattaatgatattccagaactttaatgcagtatttgccaaattaccttcttcacacttttatgtcagggtaaatttaaggagcttgtatatattttcagcatatatattttgaaatataaaaaatgatccttataaaatatatgtaaagagtgtcaattttaaaattgggctacaattcaacgggactctaagccagggcctgtcctggccaaaccaaaaccgttggatgattttcaaaaatgtccatgattttgaaaagaaaaaaaaatacaacatacggtataaaattactgaaatatgtggggcataataataaatacgaaattttattttaggttaattacctcatatattattttttttaactttatttttttcaaattgatggtttgagttgcttcagtgatttctacgtgtggattttagttacaatttaagttgttttgttagttgctatatagaattttatgttaattttcataaaaatacaaaaaaaaaaaaaaactagttttaagtgtaaaattaggaaaacatccctttattaatttactgtaaacagaatttacaaatttgtaacaatacaattttttttctgtaagttaagtttacacattaataactaaagttttcaaatttgtaacgatatgcgacaattttataaataatatttatgaactatatacaaaaatgttcttccaaaaaaaaaatatatctatagaaaaatgttagaaattgttatagaatttttacaaactgttattttttgcattaatttaagggataattacatgagacactattttttgtgaaaaaaattacatttttacgtttatagattttttttatatatttttacg

SEQ ID NO: 32382 - DNA, 2336 bp, Cannabis sativa
ttatgtcattcatggatgcatactgtggatataaccagataaaaatgcatgtcccagatcaggaacgtacaagcttcgtaaccaacattggactttattactataaggtcatcccatttgggttgaagaacgctggagcaacatatcagcgactagtgaatgaaatgttctcgaatcagatcgggtggaacatggaggtttatgtcgatgatatgtttgtaaaatcgattaaaagtggaagtcacaccatggacctcgcggagtgcttcgaaatattaaggaagtacaatatgaagcttaacctgaaaaagtgttcctttggagtttcctcagaaagtttctgagattcatagtcaatgcaaggggcattgaagcaaatcttaaggaaatcaaggctttgatagatatgccatcaccaaccaagcctaaggaagtccaggccttaacccaaaggatggttgcacttaacagattcattttaaagtcaactgataagtgtctaccatttttcaacgtattgcgaggcaacaagagatttgaatggatagaggaatgcgaggaagcctttcacagcattaaaaggcatttggcgacacctccagttttggcaaaaccaataactagggagacattactcctctatttagctgtctcaaatgatgcaattagtgcagcaatagtgcgagaagagggaaagcaccagcaacctgtttactatgtcagtaaaaggaaactgggggcagaatcgaggtatccccctattgaaaatcttgccttatgcctaatccacgcatcttgcaagttacggccttacttccaggcacacccaattaaagtgttaaatgatcaacccttgagacaagttttatctaaaccagacgcttctggaagactgataaaattggtcgattaaactggggcagtttcacataacctataacccttgaacacccatcaagggctaagctttggaaaatttcttaaaagaaggaatatttccagaggaaaatctgcttgttcaggtgtgagggtgatattaatttcgccagaaggctttacgtttcattatgctttgagatttcgattcgatgcatcaaacaatgaggctaaatatgaagatagcagaagcgttgacgttcaagaatctcatatgtcatagtgattcgcaactgattctaaatcaggttctcgaggaatcgtaggctatgggcttgaaaatgagtaagtatctggagagggttcaaaagaacttggaaagattcaattattttaaaatcgaggaaatcccaaaggaacaaaactctaacgctattgccttagaaaaagcttgcctcgtataacgacttggatgaactaaacttggttccagtggagatgctaaatgatccaagtatatgtgaaaaagaagacatcgatacgatagatagctcacccacatggatgactcctataatcaactatctactcaatggacaacttccaactgacaaaaacgaggcacaaaaacttttgtattcagtgcctcgctacaaaatagttgaaggaaaattgtatagaagaggttattcaatgtctctactttggtgtgttctccttatagaagcaaacgagatcatcagagaaattcatgaaggattttgaggggatcatgcaggttggcaaagtctatcaaaaaagatcattagacaaggatattactggccaataatcaacaaggacaccaatgagtttgtcaaaaaatgttataagtgtcagagattctcacatataccttgcgtaccactagcggtattgaggatgatgaccttgccttacccattttctatatgagggattgatctgattggggcacttcccacagggcgagggggagccaagtacgcagtagtagcagttgatttcttcactaaatggaccgaggttgaacctattgtttccataacctgcatgaaagtcctcaaatttgttgtaagaaactttgtctataggtttggaattccaatgaaaatagtatctaataacagaacttagtttgatggtgacttattcactgagtttggcgagaggaacgaaataattaagagcttctcgtcggtattaaggcctcaggcggacaagtggaagctgtaaacaaaaccttgaaagatactatcaagaagaagttagatgcttccaaagatagatgggtcgatgaactacctcagatactttgggctcatggaacagctgagaagacaacaacgggtaccgcatttttgctagcatttgggttagaagcaatgttacctatggaagtaaatatctccactcacagatgagagttttataatcaagaa

SEQ ID NO: 32383 - DNA, 4555 bp, Cannabis sativa
agagagagagagagagaacacaatgtaatgttgctataacaaaaacaaatattgatttaatataatagttgagaaagtttcattaagattctcaagcttgttgggctttcttgataaattaatgatattagtcatacataactaaaacttttgcaatattaactcagcaagtaacccatagtatttactggttacaaaattaattcactatcttttccatatcaaaatctaagtatactgataagtatctatgtttcttctataattcgtcttttgtgactttgtctctggctttcaagtttttattgatggatcctgctaagtccttcaagctggattttgtagaaagcttaatctgcaatgagaaacagatttcttgaatcaggtaaccatggagttgcagagtattgtattgctagttcagtacattcacacagaaaaaattagacgtttaattaagtgaattaccgggttcgatttatcaccagctcggtaaaacaagagtgttggatagtcatctacctgcattgaagaattatagttcaaactttgcataaaaatgaattattctttagaatacttaaattattcatggtggcccttacctggagttttggatgttcatttgcagaggcatcaaatctggcaaagatcaaatccgaacctttgaagtgcttagccaacttctcaacttgcttggttgtagtctcacaattagagcaccatggtgtaaaaacctgttgcataacagttaataatataaaggttttctacatttgtgaaagaagtgtttaaggggaactgaggagcatcagtatgaatgaagcaagggaacttgaaagtcagtaaggatggtgaaagacccgaataataacatacctccagaagaacattcttgggaccattcaaaaccaaatcatcaaatgttttcccaacaacgctcagaatagttgcattttcctgaaaattttcagtaggttgcataaaacactttgttacaaagtcatttttcttgtatacactttaggcttccagtccaaaacatcaatacaacaagaaatttcatcatcatggtatcgtcagagagagagagagaggctcacattatcaggaataggctgtgatttgaagtatggagcaagagtaccatgcagaagcccagagcagaaatcctataaaagcacaataccatattagccatctaggtaagatatttcttcatgatgaaattgtcaaatggacaagaattattacatcaatgttgcttggtgacagatctgagtcaagaagaaacttagagctgaatgtgctatcgaaagcaatcaactgtaatcacagagaatataatatcatcaatttagagctcagtaataagaaactagagtaaaaaaaaatcaaaataaaaagcctaaatatttggaaaactaacaattgtgttctttgattcttcaagcccatacatagtcaaaaagggcttagcaagattttcatcagtgatgtcgatataaataaacaatatctgcacataaagaacgtattagggagaaattcacagtacacaaagtttccaattggtttcaaagcttcagcattcaatatcatcatagaataccttcgacttgaactttcttgcaacatcttgaagaggctgacgaattttatcgaactcatcatcctcagcaaaagcaataacctgaataacaatggaatatatttattacatttgaaataggctccacaatcagtagctataaacaaatattgctttgccagtacttttgccaatcaatcaacagaaccatgcaaattgtttaggaacctgaagtttgataggactggagtaaacactagcagaattgatctcagtcagtttggtaactaaaggaaacttgttgtagctcaaaaactgaagcagcttctcagcctcaaaggtggtctcttctgcagtcacaaattcatcatatcagtaaagtgtctaatttcgtcaccataagacattgaaaatcagtgcaattcttatgaaatgtaagacattgaaaatcattgcacttctatgaaatgtaaagacattgaaaatcagtgcaagtaatatggaatttactaactcaccataagcagtatatctttctggctcacttttaataataccaacgaacttatcggtagctttaatttgcgggaacaggacattggcaacttcaatgttgctcacttcaaaaaattgtaactcattgtcagctgctgctgccttgaagaattcttcataatcatgtccctaaaacaaaaattgaattttatataattaaccaactacatcattcaaactttttagttatcaaaccagaatgcaatatagatacataaaacaaacgacatacaatataataaaaggcaaatggagtggacaaaactctaaaatgaaagctccccctcctccataataatgtgagttcttcactccattactaaagaaaacatagtgaaaacaacacatttttttcttctttctttctaaattgaggagcctaaatatgaactcaaacttgggtgaccaatgaatcttaagcaaaaaacatcacacacctcaaaattttcaaaaaatccaataacaaacgtatggtatttcttgacaacttcttctgcttctgtcactgagtttattcttataactggaacaccaatctttttctttgtccatataactatgtcttccctgcatcaagttcccatataaaaacgtacacaattagccaaaacaacaaacaaaatcaccagatattcatagcttctctagctatgacaatcatcgttatgaataattccaccattaacaacacattcttaattacaagttaacaaagttaagaacagcttacgcagaaaatccaccagtataagattgagaggtcccattgataaatagaagaagagtagggaaccctttgatttcaagaagagaagcggcttttgggtaccgatcggcatcaagcttggtcatcaaaagggggctttccaattccttaagcaaattagcagcctcagcaaactgaggcataagctctgcacttctgggacaccaaggagcataacccagaaccataacgaactcattgttatcaatgacccgtttggtattatctccattaagctcaagaacaatcctttgagccttggataccacctctgcctccgaggacctcacactactagaactactactactactcccactaatccctccttgttgttcctctcgctctacttcgtcatccaatgctaacaattcttcaataccctctgaatcttcatcgtccccattttcagtggtgatgggatcagaagccaatatggaagtgaaaagagccaataacaagagaagggtgaggcttaaatagatgaatctggaagtgggttttgtcttaaacatggtgataagcattcactcttcgagaattggcagaatttgcggatcttatgagatctgtgttaatggcagaaacaaaaagatgggtttttgtgaggactttctcgtggggtttttatagtgttatgaaagaatttaatgtacagaatcagaaagtagtgtgtaaaattgaagattatttagaaaagcaaaattgttaattacagtcaaaatttgacaaaacaaggttgtttttaattttttgtttctttaatgaaaatgacaaaatgagatttggattgccttgattgatggcattattaaaaaaaaaatagttaaatttaatttttaaatataaataaataattaaatttaatttttaatgataataatatttaaattatatttttaaaactaattaataatttattattaaatatcaagttattatttaggtacaatactttcggaaaaaaaacgacaaatatcttcttggtttaaataaaacgacacaaatatataatatgtacaaaacgacattaaactaataaatgaaaatgcataatgaacatagttttacaaacgacagctccgcaaaatagttttccatgactattttggtacaaacttcatgtcgtttttatcatgtaaagaacaactttatgtgctaagttttatttgctacatgaaaagaacaacttgatgtcgttttttacatgactattttgctacaaacttcgtggccttctttgttaaaacaaaataaaagaacaacttcatgtccttgactgataagcaaaaaaacttatgccatcgactaggaggtttttctactctatattttaaaatatattatcaaaatttcattttttttttttattttaactcatatatttatattatatcatacatcaatttttcattttttttaaaaccatttaaatataatattttttaatatattttactaaaagtgaagcaaaagattaaaaaagtaataaaagtaataaaaagtagtataagagatagaaaaggaataaagaacaaaaaatatatatagatcatttcttaatggatattacccatgaatgattactaaacaaatttaactataaatattaattttaaaaatcattaaattttgatctaata

SEQ ID NO: 32384 - DNA, 2066 bp, Cannabis sativa
actttgtcgccaaattagtccatggagaaatggagttgggtggcaaagaaatcaaccaacttttggctcactccctcagcgagaatgggaacagcctcaggtggattgcatcatcgctaactccgtttactttgaaagtttggcataactccataaaattagacagatgcaaattcgggtcttcagagggcagtccaccaaactgaactggagattataccatttggagtatggctggctttatcttaaagttattggcctccacgacaggtggtcttatacaagactgaacccccgtcaatgttggaagaacatagtccctcagactacggttgggaagattacgactgttttcctggtcttccacggcacctccgttattaccgttgttgccgccattagcgttatcagctatgacttcttctgtttcagctcttgctgcacttctttcttgccttttgtttcttttgtttcttctataggtctttttaatttcaggatcaatcgaaagtattacactttgtccttgacgccgcatgcacccccaattcctaaaatagaataagacaattcaaaagaaacagattggcaacaagaaaaaagaattaaccaaagtagaatttaatctaatttttgtaatatcaatatttaatcaatttttcggtaacgacgctaaaaacttgttaaaaaaattatgagcagttatgcaagtatacgcagtcttttgtagttttaaactcacacaggtgaggtcaatccacagaaaattgttatcgaataccactaaattagatttgtgtttctatttggaaaatcgattaaaaagattgaagaattaactgactagcaattaaaatgcaaggaaataataatgaagagtgcaattaattatggatgagtatttaggaatacgaataaaatgcaaggaaataataatgaagagtgcaattaattatggatgagtgtttaggaatactaatccttttagttcagtttctcaattattaatgttaattatcaattctctccttttggtgatgaaagattatcaatttaaccctaattcttcttagatcattaaggtcctaaatcatttatcatctactcgcatctctgcagtaaattaacctatcacttgcattaaaatcagaatctaaaaaaacacataagctacgtaaatactctctttttacatcaacttatgtttgtcctattagagcattcctaatattcacttctcatatttcatattagaatcataagtcacatttatgatggctagtctaaaatatgtaactaaaataaataagaacaaatcacacaatcagggaggaaaactaacaatcacattaactgaattgaaaaagcgtcatctaacaatcatcatatccctaaattgagagtttagttcatattcatatccataataatactaaaacaaaatttaacataaatgaaatgaaaggagaagaaagaaactgatggtggaatgaatacgggatcctactctgctctttctaccatccttgactgcttctaggtctaaaattctctcctctcctttccttactcacagtctatttttaatagattcagtcccagactcaaagaatagagaaaagatgaaattggccttgaattgtacggagtttcgcggcggccatgaaatgccttaccgcgacgagattcttgagactgaattcaatgatccctgccaggttctcgccgcgaccatgaataaatccatcgcggtgactgggccagttaaaatcctccattctaccacttttggtcgcagccacgaataaattcgtcgcggcgaagaatgcaccaaatgctaatttttttgtttctctttactcgtcttggtctcttatcacacttttgaagccccgtactttcaaagctataggatacctgcaaacacggaaaacaagtataatttcgtcctaaaatatcacaaacaactaaaaaacgactttaattaacacccaaaaactaggctaaaaatagcctaacaagagtatagagagaatttgaattcaataaagagagagagagagaga

SEQ ID NO: 32385 - DNA, 2554 bp, Cannabis sativa
  modified_base (127)..(130): a, c, t, g, unknown or other
agaacgctctatatattccaaatataaatacactattaattattcattataatagtctaaataatcaaagatcctctatagatgatttacatcgagtagaaataaatttattgttctacccttcaannnnttttattcttaaaacacttagtttcctattaatgatatttcagtaaactaatataattaataaaataagagctcttctacttatctctattaagccaagctcaaaggaaattatcattttacttttatattaatatagaagttatagatttcgtatctatgattagtgctcccactgaattgtactactatgtttcctagatgtaagtattgggccgatataattggtcagctttaataaaaaacttaaagaacacaaataacacaattaagctagaacctaaccatctcaggattaagatctgttgatctaagatcaactaaatgatattaactcagaaagatataacggtaagtttatgatatcttatccaagatacatcatacatccgatactggcatactttttcaatgtgttcgaaaggacataaaacttatctaaggtgtaagtaagctttatcactaattatcacatcaatgtaaatccagggcactaataaatcataggacataaactttgaaatatataatcacaattaccttccactatgatgacatcactgtaattttgaacaataatatgttctggatttaccaaaaattgtatattaaaccataatcatcaaaataacatgttaacttaaatgacttctaatattatattgataacaaataagattatattgaaatgggttttaattagggcataaaatcccaacaaactccacttgcactaacataaaattagaagtgcatttcaatcaatccattatcttgatatccatatcaagtgtagcgtgtttgactatacccaagtaataggaactgtaagattgtagtaagcaacatctttctccattattgattccttttgtgttcataaaatattatgcaacatcacttttctatatgcattactcctctaggggatactgaattcattactgcttgataagtgcatctgaacgtatagaagacacaactctaattctatccaaaatggaatagagataaaatcagtcaagaactttcttcaatttaaataactttctagtgcctttaaaaagtaacttagttatttagcttcactggtagaactaaattattatagatgggttttttaaccaccatctcagatatcatgccctgagttggtgtagaaataaggattctaatatatacccctatcatctaacatataggtcactttcaaagatcctttcttgattgtctccttgtgtttcttatttgattacatctttgatgccttccacttaacagtaggagtttgatttaatgcatacacaagtgtgcatttaacctcttactattgatacttacggatatcttgttgtgaccttttatcttaatctgaaacaataagttccttctagactaagtcatcaatatagcattttagtattaatataatattaatgtaaaatatttgcttaagattaggtaatcactagagataccataaaatatttcataagaaccaagaattgtacctaagtctttcgaatagacattgcagggtttcctatcttatcctcattattctgataagttattactatccatgtgaatggtcagattaacttttttgttttattttaaagttccttttgaacatatcatagtaggttaatcactagtgtcatccaaataataataggctacaaaaatccccctactaagataaggtactgtgattctatgtttagggacttgtgatattaatttactattacaattgtaacatatatatgggaacacttatacaagatcaagaataagttcgactagtttgctagtttatatattatattatatccatgtctaatcaatatatgtgtgacatagagattttgtggtgttatgaatatgatctagagcttaatgtaacagatgtttgaactacatatatcaataacttcttccacccctatgtgatatagagattttgtggtgttctgaatataatctagacttcaatgttaaagatctttgaactgcatatatcaataatgtaacaccatactagtttagacgtgttatcgtgattttatattaactgtgtagctcgttgctaatcaatgagtttactgaaaattttgagtaattaaaactttacttaattactagtaatattaaaaataactaacttttatatatttgggatcccgagtttaaaatatttacaactgatttaaaatacttaatacaaatttatcgcctagcaactatacaaaatgcaactagcagtcccaaagatcgtacgcttcaggtctaaccaccctgacatgtacaatctttattcgctcgctctcacggctcctcagccgtacccttgctctaacctacacgtgcaagcaatatctgtgagtcgacaaactcagtaagaaaagcataatcataatca

SEQ ID NO: 32386 - DNA, 3356 bp, Cannabis sativa
cccatcaccattgttttaagctttcttagtgttgttgtaagaccaggcttagggtaacgagtcactgagagttttgatggcctcaatgagcactctagggtagctaagtttatccctttcctttgtcactgcatccattattatcggctctccaatctgccctataattttgaatagggacttttcacttcagtatttcaactctagatcatccatagtaatctaaatcgggaccctactcacatcctccttcttgaaatccacatttggatcccaagctttcattatgacaggtcgtttgttaaaaaaaatgtatcctccattaagaacagactctctatcatcaatctcatgaaatcttatcaggaaaataccataagaaagtaatcctaccttatcaatcttatccttccagagcctcctcacaaaaccatctagtacattcaatggagggtttgctccaatatagcatactagtgacgagttccaaaaggaggtttcctcttcaatatcgtctagagtatcttgacttgactttgcttttttgaattctagttaggttccttactacacttccagaccgtagcactggtggtgtagtatgaataccctttgcaacaataagaaatttaattagcttgttgtgtataacatatttgacattcctaacaataatttctcttttaatcattttattatactctcaaaaaattgtatttttagctccctaaatcagatagtagcttctgtataataaattcatatattttttttttaattttttttttttaaattagagaattgtattccaaggagccaaataaatatatcctaacagcacctttgcaaaacaaagggtataatctctcaaaccattctctatctccattgccaatatttttttggccaaacaaacatattaaagattatcacaattgaaatgtatatgattaattagttaaagaaatattatctcgatatatataactccatattttacttaattaggaaaaactattctatgtctttttctcatgccctcataatacattctatctgttctccaagtctttttataaattaaagaacaaaaatataagttacataaagtagcactaaaaaagtttcaccattagtcacaatatatttatttatttaatttaatacatgcataatcacaagttgtattaatatactttgagctaaaacttttttttaaatatatattataataatatcaatgtctataatatattgtcactaaagatatatataattgaaaatatatataattttgagaataattataatttttccataaagaatatctaatttttattattacataattatatcatgataaattttttaatcacatattgatgatcgatccgatatccattttcaacttttttttcttctattttaaaatctattagctagctagcaagtagcaatgagtagaatagtctatgtaatatgggactatctaataattgtaaaaatatttcaaattcacattgttcaacaattaataagtttgccagtaacgatcgaaagaaaataaaatcttttaacataaattcatcacgaaatatatttttactttttttcaaacaaaagaggatgatattttttaacccatatcatatcatgtatatggaagtactcatattcatatgatagcttttatcattaaaattattcaaatgtgatcgatgatcaccaaaatctaaaacctatattaacgtattatgtttactcagacgtcgtagtttagtaaaactatttaggaaatgataaggatagaatatatggaacatgaggagggattatcatataataagttccatactttattaattatatatatatatatatataatatttgtgtgtgttggcatggctaggtagtctattgttacatgatgccctaaatggtaggacatctagctatagctattgctggttgaaaagaaccttgttttattcaataggatattaattatttggtggtacaaataatcgatcattatgaactaagttaaatttaaaagatataagaaaagattcagaagtaatttattcttatttttattgaaaacattttctcttggtggatctttttgggctgtatgtatttatcatcccaacctagaggtttgtacaacttgaatagtgttataataagtacttaagatatagaatatatatatatatatatatatattggaccacataaataatatttatatattaacatgtaacatgcatgttgtacgtatgccttcccactttgtgtaagtgatacagcattttatgtatacagtccttaagtgacaaggactgatcaaagcattttgtatatgatgatctccatagatgttggatgctgatctatcttttaggaatctttgaagatatataggtagaactaggccggtttgtttatcaaccttcatctatataattatcgatatcctttcccttttctctatttatgcacgtacaataatgtatatacatatattaataatttgtatatgccattgtggtgaaggtgcttactgcaagcttatctttcgtacgtttcttcacatgcaggaaatatatatttatatgcctttagctaatatgttataattattaagatccatcgactcctccaaaaataaatgaagattctagctaattaacagtatcttcgacttggccatatgtaaacgataatgtgaaaaacgatttaaatgtatatgatctagaggctaggatcgatattatatatactcagctaactacaatgaaagtgatacaacgagcttggaaaaaaaataatggggttagtagtggtactcgatcgaagatcacgattccatcattatattaattataatatagtttggactcttggatctttttatcaaatatctacattttattattatccatctttgctttctttaaccccactcagatttgctttacataacccatcaaattaattagctggaatctttatttattatgttctctcgcgcgctttattagtaacatgcctattagtgtgtgtatattaataaatcaattatatatatatatatataatatttgccacacactaatgagtatatagtatttcgatcatgatgcgtttaattcatcaatataatatacatatacatcgtaatgacattatatatatgtatttatatattatgggtgagaatgtgatgctttttgtggcctcagttttgtaaaaagcaattaagaaatacggacatagtaatagctactacatagtcattgtgtaacagtcacataaatgtcatttttactagcatatttcgcaaactgta

SEQ ID NO: 32387 - DNA, 2347 bp, Cannabis sativa
  modified_base (168)..(168): a, c, t, g, unknown or other
  modified_base (322)..(353): a, c, t, g, unknown or other
tatagatttagaattgcactcttgattatatagaacgttttatatgttccaaatatagatacgttgttaattatctattgtttcaatccaaataagcattgaccctacatagatgatctacatcgagtagggacaactttaccattctacccttcaatatattttatncttaaaatacttagctccttgtaaatgatattttagtaagctaatataattactaaaatgagtactccaccatttaatctcgtttagccaagctcaaagaaaatcattatttcacttctatgcatttattaaagctatagattctgtatctatnnnnnnnnnnnnnnnnnnnnnnnnnnnnnnnnttcccaagatgtaagtattgggataattaaattggtcaaatttaacgaacaagtcaaagagcacaaataataaaattgaaccagaacctaaccatctcaggatagagatcattgatctaagatcaactaagtgatattcacttagaaaaatattacgataagtttatgatatctaatctatgtgaatattggtccactccgatgtataacgatacatccaatacaagcttactttaccaatgccttggaaaagacataccactatccaagtgtaagtaaactacattgttgattatcatattagtagaaatcatgtgtattgataaattgtggaactaatgtttaatcacataatgttttttactttccactgtgtagataacatagtaattatgaataataatgtaaaaatgatttaaatgaatttataaatcaaacaaatgatcatgaagcaaacatgtgaaccaagcaatatattaaataattaataaaatatttttgttcctttcgtgataaatgaatatttaagattacattgaaatagagttttagttagggcacaaaatctaacaaactcccacttgtactaacataaaacaatcaatacatttcaattaatcctagattctctatgtgcttttcaaatagagtctctatcattgtcttagtgaatgggcctgctaggttttcttcagtatcaacctcttctaccagcacgtctcctctagccacatattctttgatgatgtggtatttcctctcaatttgtttactcctcttgtggtttcgaggctctttactattggctatagcaccagtgttgtcacaaagtaacactagtggtttttccatatctggaacaacaccaagctctatgaagaattttcttagcaagaccagtttcttagcagcctgaacgacagctatgtattcgacctccatggtagactcagatattgcatgcttgacacttctctaaacaaatgctccacccccaagtgtgaatactatcagagatgtagacttcttctgtcatcaagacaagcctagaaatctgagtcggtatagcctaagggatttaaagcaccacccctatagactaacacatagtcccttatcctctttaagtatttcaaaatatgcttaactgctgtccaatgttcatttcatgggtctgactgctacctgcttaaaattcccagtgcatagcaaatgtttggtctagtgcatagcataacatacattagacttccaactgttgaagcataaggaaattttctcatatgttctatccctcggggatcagtgggacactgctccttagatagtcgctagccatgtctagaaggaataactgcccctttgacattgctcattgagaagtgctctagcaccatatcaatgtaagctacttgcgagagatcaagtgatctgttgttctggtttttaacaatttgaattccaagaacataattagcttcacccaagtctttcatttcgaattgggtgtttagccatttgttcatgtcagtcattttcttgatattgttatcaatgatcaaaatattatcaaactaaaggacaaggaatactaccacttgattatccttgagttggtattcacaaggttcatcttcattttggtgaaagcagtatgttttgattatttcatcaagccttttgttctaagagttagaagctcatttaagtccataaatggacttatttagcttgcaaactttatcttcttatcctagaagtttataaccttccgattgctccatatagattgtctcgtcaagaattccattaaagaaagttgtcttgacatccatttgccaacttttaataatcaaaagcgactgctatagaaagaagtattttgatggatttgagcatagcaactggactaaaagtatccttatagtccataccttctctttgggtataaccctttgctacaagtctagctttaaaagtttcaaattctccac

SEQ ID NO: 32388 - DNA, 4693 bp, Cannabis sativa
atatatatatatttcattacatgtgttgtattctttttcttctacctttcacatatatatgcaatatatacagtgtatgtctgtgtattgtaatatatatttaatcaatctcttattttagtcttttattataatacattagaactgtaatgcatcttgattttattccattgtaataaaatctcaaacaatcaaagcttaagacttattcacttttctcccaacccctatgaaccacaccagcctccttccacaaaaagttctcatctgaataatatacgtctccatgaaccttctatatttacacttattgttcatataaaaaaattatcaaaatgtaataaatttttaaataaattaaaataagcaccctaaactttcgttaatttattatttaaaaatttaatcaaagaaaaatacatgtaacattaccatataatcttatgataatcaaattaaaataataatcatattaattaaaattacaatgtctcatgagtttttcactatttttcctctttattattagctctagcttaaactttgtcagctttcatggtgtatatacatatatatgtgatatataaatatcattatatatatatatttatctttatctctctagttgttgttgtgcagcagcttgttggcaatgaaggtgatgatcttcttcaatgatttctcttctaggacatttgtttaagggaattggaagaacttcagtagttgcaccacttagtctagggctccattcacttgagagagtagaaaaaaattgtatggattgttcttgttgtttcctccttctgttcctcacttccgtcaaccattgctttataatcactcctagttgctcttctactactttgtttttgaattctgaacccatctacatataaaaataaactaattaaactttacatactacttattttagtaatatttatgatgaggtgtgattttttcttggataaaaaattataatctaatttttctatatagcagttatactgtagttatttagtatgtaacacaaattttcataaaatcttgaataattcatgatattaaaatgtggcttcaaaaaaccaatttatttcgtgaaagcgtaaaataaattccaaaaaataaattcactaaggtgctgaatagcaacaatttatgagcttagaaatagattgcaatatgtcaaaaatatgaatgttttgcttggtatctaaactgaaaaggctgaagttagcattgaaagggatcaatcaaacaaggtgtagtggcattcaaaggcgagatcataaagattattaagagatgatagaatgccaataaatattttagaggaatcaactttgtttgtcctttatagaacaagaaagacaaacccaaaagaagtatacaacgattcataaagttctcttgtcctttgtacatcaaaaagtaaaggtaacatggatcatggaaggggatgagaatacaatattcttccgagctaggtgagcttctaatcagatctattcggtgatagatatggaacgtagatggcatgatcaactagaccagagatttttttttcttcactattataagcagttgcaacattctcaaatgggaggaaggaggaatgtggtttcgagtttgattagagcagggtcgactataacttcttctcataggcagttattgttgcaaaaatttatcaaagttgatgtgaaacaagttggttttgcaattcttgagagtaaggtgccaagccctaatggatttggtagttatttcttccaacataattgggattcagtgggaaatgaagtctgtgaggttgtaatagatgttttgcatacatgaaaattattaaaggagctgaatttcacggtaatttattattgtaatgttctctataaagtagctaccaaaataatttgttctaagcttagatctatttttctagatttgattcatggaatcaatgtgggatttttcatggaatcaatgtgggttttttcatagaaggtgtattgcttataatatataatggtttgtcaagatttggtgtgacattatgaaagagctaattctcaatcgatttgtatgattaacatggatcttaaaaaataacatgttacaatgaaatgtgagttcattaaagaggcattacatgcattcaattttacccaagagtttatatagattattatgatttgtatttaaataacaaggtttagctcaataataaattgttcgttgcatggtttttttaagggaaagggaggcttgcaccaaggagatatccaatgtctcctttattgtttgttcttggcatggaatacctctcaagaatcatgactaaagtgggaatggatgagggtttcaagtttcataaatggtgtagagccttgaagataaatcatccttttttcgtagatgatgtcttctttttatgtaatgaggacttcaagttggtttatttcatgttacaagtgctgaactattctcacaacttcatgttatagcctagtgaggctaaattagccttctattgtagtggaatggaccaacaagaggtttagaattcattgatgtgttaaggttgttgagaggtagtatgtcgttcatgtatttgggaatacgtatttgtgaaaaattgattatggaatgctcagtgtgatggtctaattgagaagatagttactagaattagagtttggattctctccatctttattattctgggcgagtgactctaattatttttgtgtttatttccattcactcttattggccacagattatgttagtttctaagagggtcctgaaacaaataatagatgcaatttgtcgctcttttctttgcaaaggaaccactgactttgatggttcatgttatgtttcatggcatgatttgtgtagatctcagaaagaaggaggattggaatttagtaacctattgcaatggaatcaagcggcacttggtttatatgtttgggaagtagttattaaacaagatacactatgggtaaaatgggtgcataatgtatatattaagggtggaaagtggtgggattacaaggctactttgcagagcagtaggtattgaaggcaaatagtagaaatcaaggagagaagttcaggtaagtcattaacctccaacatatctcgatgtacaattgaaaatcaaacaaggatatgaaaagcttctgcctgaacaagtagcgatttcttggtatggtgaggtctggggtagatagaccattcatattcaatattacaaatgatgataactgttagacttgtgcacaaaatgtgaaaatagcaagttatttatttttttaatattaatatagcaagcagtagttagaggacatttcggagtgccttggttggaggcaacttgattaccggttactaagagtgttgaaagccaataaaaggaggaggtgcacaagatttagaagggaggtttttgctacaatagagttgcaatagtgtaccatgtttggagaatcagaatgaggttttttttggaatttttccaaacaaaacattgattgtattaatatatacagtgataaagcatgatgttaaatttagattcttaagagttttaccaaagaaattgtcaaaagttgatattgaatggtttgaaagcttatgaaaggaatatgtgtatagtatagtaatatgtcagatatttgtttggggtactattaagatgtacacgatgaattgatgcaatatagagtaatttgcagcattacatctataagtgcttagtttattgaaactaacctccaattctaaaattttggtgataaaacccctaaaactcgtgttttgtgaggagtttaatattttcatctatttttaggtgttaagttccatgttggaatattcacatgcatacagcgtacatgtggcataatttgattggcccacataaataaatatataaaattaaaataaagaaaaatattttaaaaattcaaagtaaaatattttttttcattccaacaaaatttttttcttcattattttcattttccttcttcttcatgttcttcatatgatcgacatttaccaccaccaatccaccgaaaccaccactacctccaaactatcgtaccatccacaaccaccacccaacactactcagcaacgccactaccatgccctattttgaatacctaaatcacacatacacacaaaaaggaacaaaacaaacaaaataataaactaaatttgagaaccccagatccgaaaaaattatcacgttcatccaacccagatctgaagccttctcgcgtaatgcctccactgctccttctcttgctggaaaacatggcgaaattctaaaaatgaccaccctctccacctggggcttcttcagtcatcgaacagctcagaaagccattcatgactcccattttttccgtggatggacggagacaactctctgtcattaggcctagctaaacgcaaagagagaaagaaagaaatagaaacgagaaagagaaaggaattgggttggggtttttgggtagtggggattattcagatggtggtttggccatggggtggtcagagaatgggttgttgctgtgcgataatgaacagagggagagagtgggagatgctactgatgttgggttctgtgccctaaataaaatccatttcaatataattagttttactaattaat

SEQ ID NO: 32389 - DNA, 5277 bp, Cannabis sativa
ttttttaaaaaaaaaatagtataagctttaatttaatttagtaagcttttttttccatatacgtctcaaattttagttaaaataactaatcaaaataaaaattaaatatattataaatataaattattaacaaaaaaaatggatgcaattgtacttttctatataaaaaatcgttttttatattataaattaaaccgacttaatatcatatatatatataaataaccatttaataaatatctaacaaatttaaattattaatccctaaaccgacttaatatcattctatatataagtaagtaaaccttaggaatataaacagaaataaattagattattctaattaatcacaaatattagtcaaagaaattaacactaatggattcttcggatgatcgtgaggtttcaatcatcaacaacaacaacaatcaagaaaataatcatactaatcaagaagatgatcaaaataatttggtgatgatcatgaataataatacttctactactgatcttgatcaatcttcagaccctgatcagaacagaattattattgctaataataataataataatattattaggagaagaggtcgaccaagaaaatacaatattattgatgataataatcataataatattaatgatgataatgatgatcagaaaataataatgtcaaccaagaggagtagaggaagacccaaaggttcaacaaataaaatcaaatcttcatcttcatcttctatgattttgcctactttttatggtatgtatattttttatggtatgtatatatatatatttatatttatatttatatataatatataacacaattaaattttgttttctttattatatattttttaatgttttctctttcttttaaggtggcaatgctataaaaaatttggctcgtgatgttattaatataaaaccccatgaggtaataatcttttgatagtctttttgaaattttttatgaataatttcaaaaaacaataataaaaattataaaaatatttttctttttttttttaatatttttatattgttttgattttattttcttgttgttttatgtagttttttcttgtgtttttatagaatatcataaaaataattttatttatgtaattagtttttttattagcaaaaaagaaatagttgaattatactaatttttaatatttgagattgataatttggaatattattttgttttcttatatattaataattgaatttattattaatgatgtttaggagattacaattaagataagtgaaatggctagaagagggggtggtcaacggtcaatgatcgttgttgaagttaaagggtcagcaatttttttacccattggtcaaggatatcaacatcaaccacaggcaatctcatcatcattaatttaatttaattagaatttctttgattatttgtttaattaatacttgtttttgtttaattgttttatagggtccttatcaaattaattctatgactatatccaattctgataatgagaatgaggacaaaaaagtttgtgttaagatggtggacccgaacactgaaattgtcaaatttgagggacgtgtaatatcactattagcaattactaaagtcaaggttagtattttacgaaattcttttatgttttttggttttattatatttaattttttttttcttaaggtaaaactctttatatttatccctcatatatttatccctcaaatttatacaaaaaaaaaaaaaaaaaaatagcttaagacagttttacccttaattactcttccagctttattattaatgttatgatggttattaatattaaattaaaccctttatttttatgtcacaagaataattattctttttttagaaattagtttgagatttttatattaaaaaaaaagtaaatagcggcataagttatacattttgtattatttcaaaaaaaacatatggtttgaatttttatttaataaaaagagagttcgaacatatatgtgcacctaaaacatttaatcagacacttttttatatatatttatggatttttttttgtgtaattacatttgaactttttgttttaagaaaaaaaaccttctttttcttttttttttttttttgaatagaaaaccttcttttaacatgtcattattttgtaaaaaaaaaagttgtaaatttatatttttgtaatttttttgtcatatttataaatgtacattataaactagcttaatgatgatgagattaatttactaataattatgatgctatattttattatggatcagatagtcatagatagttttgaagaagattcaagggagcaagtggaatcatcatcatcatcatcaggcatggctatgactactgtggataataatattaatggagtttatggtagtaatactaataataactactcatcatcaatgttaattactcatcatcatcaacaacaacaacatcatcatcatcaacaacaacaacatcatcatcatccacagccatattataatccattactacaaggacaaccaatcccaacaccaaataatcatcatggaagaaatgttaatggtttttcactgcaatagttaccattttttttttctcattttttttatgatatttttcatcattagttgaggcatacattattattattttgttatggtaactacttttaattaatttgttacaacatttaatgttcatagattaaagaaaacatatattcttttatttttattattctgttattttatttgtactatatagtactgcctcttatataattttttttctttttttacattattattattattcaaagttttatttgcacataatcaataagttgtaattagctaaattttattattttgaattaatacatctcttgaaattatattgactaaatgtaccaatatgggctcaaaacactttcttaaaagatatttgtgtaaataaacacatttgaggtaaaaggtaattagttatatatactctaaatttttttcagatatattttttaacttctcaccaaaataattttttaaaaaaacaacaatatttttgtaaatttattttgtcaaaaaagcataataatacatttgcaaaacttacatataaaaataattccaaataaaacaacatatatataattttccatacacgcttatattgtacacagtcaactctatatatagtacactactaattaaattaatagtcattttaacataatttaaattaatagttaaaaaaggtaatgtaattggaaattaattatagaattaatcctaaactattttcaatattaaaaatattaattaaaaaaaattatattttctcctttttgaatggagtactcatctctaataaattgttgtatagctttttttttaacttcaattattttttttcaataccaactgttatttaccggggctatgtatatagttccaccatttctttttcttgactttaatcttatcaacactctgaccaattctctatactaaacacaagcattggaagctaaagtgttagttgaatgttttatctttctattgattaaagtaaaacaatgctgcaaccaccatgctatttgcaacaaaacttttactatgtcacaccaacccattacgagcttgccaaagagattaacaaatcatggttacttatacaccttcgacttagaaaacctcctcgaaacttgatgaaactaattttagaaatcaaatgttgaaagaagccataacgcctcatcaatcctctgcgaacacgcttctgctgatgggcaatcaactaaaatgtgaataattgattcagccctatcattacacactagacagcaagtaacaaagacatccacatacttataccctttagcttagacaaggttggtagacacccaaaacaagctctccaaagtaaatctttttcagcgggattttgagattccataaggctctctaaaagccagagttactatcttctgactatctgtcatgcaacaagtgaagatacttatacaaactcttaacactataaatctcagaagtaacctgaaaccaataccaatgatccggatcttgattatcattcaaaataatatttttaattagatgatgattaattgcattgaataaatcattaagaattttgtcatcccactctcttgccccgaccaccatgattttttgaaccttcactccctctaaactcgaatgggaggaggaaacgaatgactgctcctcactaggaaaccatagctctcccaaaatatcaatggaagagccatcaacaacacaccacctacaccttgcttttaatagctcctaagcaggcagacataacttgggttagaccccaactaagacgtcaacaaagttccatgaggataatatcgtgcctgaaagattcgactaacaagcgagtccttttgagttaagaggtgccacccttgttttccaagtataccaaagttaaaatcatgaagactttgaaacccacgacatctaataaattcccgaaccattaactttagaccgccaccaatccttacacataatttgcttcatctctgaacacaactttaacggaagcaagaaaacacttatatcatagctggaaagagcttgggcaatagatttcaataagacttcctttcctaatcttaaaatgaaagtcattaccaccccaactttctacttgttttcacatcttattaagaaaagctatagcattcttctccagtcccatagcattaggaagacccaagtatatataaactctaatcaatggtcacttgcattctaagaattgcttgcaatgtagcacgattaaactcaaaaatattagtgctaaaaaagatagaagatttagcaatattcatctgttgaccaaaagcttgttcaaaagtcaccaaaagctccataatctagctgctgcttcttcattcgcacgtcaatacaaaaaattatcatcaacaaacaacatgtgagaaactaccggggccctcctagcaaccttacactcatgcaaccacttattcatttcgaacttcctagttaaagcagaaaatccttcagcacacaaaataaataaataaggagagagagaatcacacaaataggagcaatcggccccaacctttgtcctccatgtgtaatacaatatctaatacgtgtaacactactcataatcaaccttaataagtaaaggtaaaaccccacttttaacaggattccctgaagaaa

SEQ ID NO: 32390 - DNA, 1084 bp, Cannabis sativa
  modified_base (772)..(772): a, c, t, g, unknown or other
agctgaaattggggcagattactgcagcaatgctcaagcgaatttagcattctggcagtgacgtggaaacacgagtttcacttatccacgtcaccaaatttgtcccagtcactcacaatacaccagctggctgctatggaaggaaagagactaaacctagtgggccaaagtagaaacagattgggcttctattttggggtgtgaattttgtaccctaacaacccaacaactaaaagaaaagaaggaggaagtacacctccatcatccacaaggacgtgagcagctgttgcaatttttttttaggagtaactacagcagaaagtacaacagagaagaaagaagaggggaccaagccttagtgttttacttttattttactctttcttaatagttttctttcttttcctcttcaattgttgtttgtacttagtaccaagaactttatgagattgtaaagttgggcagcagccatggatgaatattttttagcttggattttattttcatacttgaatatgagctacacttttgatgcttgaatggctaagaacttctaagttgggtatgattaatttttaagcttacttcaacatttttttgcctttgttcattcaagtgagtttcattttgtttgattgttgtttcttggccaagaataacaatttgctaagctaaatcttgtaccgaaagggctagatctagtagttcaacttgaatggagcaagtgaaaacctagatttaggtttttctaagtggaataggaatatttcanttaccttgcataacttataaaattaatgtttgaatagtgttctgcttgctggtttgatatgggaatatattgagctaagtggtagaattaaatttgtgagtgttggaaaattctcacaaacttagagaattttttttattatctgtgtgcagaatgctatagtaatgttgaactgatcctgtaacacatgggaaaaacctaactagaaggaattagctattcaagcaatttttaccatattacatttttatcttgcaagaaatttttctagtaacagtaatattaattttagcaagtttaattactgtcatt

SEQ ID NO: 32391 - DNA, 1674 bp, Cannabis sativa
aatagaaacatcaaggtgaggttcaatttcaactgacaaaggtgaaacgaacatttctgatggagagcccctagatcttttaagaaattgcctcagatttgggccatccgaatgccttttgctgtagcgatttggtgacttgttttctttgccaacatgctgagtaacataaggtgtgactattggctgtgatatgtgaccagtagttgatggaatgggagtgttaatctgataagtttttgcagccgaaagtgtagaactctgtggaggatatgtagcataaatgtttggtgcctgatttatgacagcaaatggagtaaaaaccccagataaatcagtgatcaactcattttgagcttgctgcggcttggacagttgcatggcatttgaggagagtaaattaatgttattcgaagcaggggaaatagtggttgctggtgaaataccattaatcccatgacttgagatagttgctggtatggaagttgaaacagttgggctagtcatattgagaccatgatcagtgcataagtgtgctcctccaataaccatgttgtgacaagttgagacttcaacaggaagagagactgtagatgtaatattggagtgagaagattcctctgcagttagaggtctgggatgtgggggttcacggtttttaagactcggaatagcagaaattaaagagttcttggcaagacgggttagtaacggccaagcattaccctttgagaaatctgtcctatagcgatcatagtttgaaagtggcagtggtgaacccttcattgtaggcctatattctagatccggttcaattccattatcaattttttcaagataaaccacacatttatcaaaaggatgtcctatcctcccacactccatacaatactctggcagtctttcgtaccgaaactcaacccaaaatttctcccttgcttgttgaagtgtgatcattctaccccttagcaaaggtttcgatgtgtcaatgttaactctgacacgtaaaaaaggtccccacccctcattgagagaatcctcatagacatccacaaactcaccaattatattagcaagtgcttttgcaaggtctttggttttactaagaaaggggaatctataaatctgaacccaaaaaggtgtgaagatgagagaatcacagtgaacactttgtcctagtgtaggtgaatgcaggattatatgatggttttgaaaatgaaagggttccctcagtagaacccttgctttgtcccctgcacaaccgaaactcagagaaaacaactcagaagattcagtaattgtgactgggaaccttccattccagtgttgagccatttggtttctaaaggtggagagccaaaccttcttattggtgaggacttttgcatacaagacatggtcagaaggggcagagttatccacaaaagccaaaccagaaaagtcgaaaactgattcttcctcctcagttagtgtcataggtgctttcattttgttaatgtaaggatccatgaagatgaaaacccagaacagtaagagatcaatgtaaggagtttgcagttatgaatgtaaagatgtggataatgctgatgaacatgagaaaaaaccagaaaaaaactgcttaaccgtaagaaaagaaattaactgccacagagcacatatttgggcagacgctca

SEQ ID NO: 32392 - DNA, 1562 bp, Cannabis sativa
ccaactttgctagtgcatcgcatttgagttatgttctcttggaatttgttcaatcttaaaataatcaaacttctctaagttcttccaaactttctccaaatattttttcatctttaaatctttcgcttggtactcgcctagaacttgattcataatcaattgtgagtcactatagcatataagattttttacttttaatacttcggctattctcaagccagccaacaaagcttcatatttggcttcgttgtttgaagtatcaaattggaatcttaatgcatagtggaatttgaagttatctggcgacatcattatcactcttgcccacgagccattctcatttgaagctccatccacatataattttttaagtttctgtattgtgtttgacgagtgggtcttcttctcagattatcccttcaattaggaaatctaccaaagcttggcctttgatagacgttctcaggtggtaagttatatcgaattgccccagctcggttgaccatttaatcaatcttcccaaagcatcaggttttgataaaacttgtcttaatggttgatcagttaagactcttatggtatgtgcttgaaaataaggctgtagtttgtgagatgcatgaatcaggcataggcaagtttttcaagagcaggatacctcgactctacccccagtaaccttttactaacatagtaaacatgttgatggtgctttccctcttctcgcatcaaggctgcaagtaaaggtataaagtttctccagttattggtttggccaaaactgtaggtgctgacaaatgtttctttatgcttttaaaagcttcctcacattcttctgtccattcgaacttcttattgcctcgtataacattaaagaattgtagacatttatcagttgatttgaaataaatctgtttaatgctatcatttttactgttaaggcttggacttctttcgacttcgttggtgaaggcatctctattagggccttgattttttttggatttgcttcaattcccctcgcattaactatgaaacccagaatttttatcgaggagactctaaaagaacacttcttcgagttaagcttcatattatactttccaaatattccaaatcattctaagaggtcttttgtatgatcttcacattttactgactttaccaacatatcatcgacatcgacatccatatttattccaaattgcttttcgagcatcccattcactagtcgttgatatgttgccccaatgttcttcaaaccaaatggcatgactttgtaacaataaagtcccatgttggtcacaaaacttgtatgttcttgatcatagacatgcattttgatatggttatatccagaatatgtgtccatgaatgtcatcagctcgtgccctgcagtggcatccaccaactggtcaatccttggttgtgggaaacaatcttatggacacgctttatttaagtctgaaaaatcaatacaagttctccaagtgtcgtttggcttcgggacaagaataggatttgaaatccacgagagataaaaggccttgcgtatgaaatcgtcg

SEQ ID NO: 32393 - DNA, 1138 bp, Cannabis sativa
attataattagtactcctcgtccattatatccatacataacaatatatgagaaatgttaaaagacacccgtggtatttagcacatattctatgtatcaatatcgttattgatccaattaaatatcaggtctcatatagtttaatgtaataatttttaaagaatatcgctaacgaattgtaaaacgacgtgtctagaggtactaggagtgtctaatagtattactatatatacatattaattgaaggaaatggaatagtttaatgagaggaagttacataacgattaacgaggttaaaggggaataaaggcaccctaattaatataatgatggtgttaattccgattatgataagaatgattttgcattcacattttatattcatcattttcatttagtttggcatgcactatttaatgattacttagggagtaaattaaaaattagtagttaagagagccgtcataacctgaaaatggcccaattatagggatgacacgtgttatcccttctttattttcagtgtaaagatgagtaaattagaccattaatgcatgggcttctataacacataaaaatgggcccaaatccactcaaatttcaatctctcaccatttttgtttcggcccaaatatgtaattttgattgagccttcgtattaggtaggtactaagaaaagttaagaagctattgatactttgatatgtgatggagaattatgttttcgaagagtaaattataattttgtttatgattgattgcaatgatattcattatatattagttttaaaaactttgaatggtgattagttgataagttcaaaacaaataagcaaaggaatatttgaagattttttttgtgaataagtgatttgaaaagggaaatttcattaataatatatgataaaactctaatattaaaatttatacttttcattaatttgtacaaaacaatgtcattattttcctaaactactcaaaatactcttttatttaattttccctccctaactatctctttcttcctttgctctctcttcgtcattctctctctccaccacaccaagaacccaaccggtgtgatataaatccaccccaaaggcctaaagtctcaccccttcttctctctctctctctct

SEQ ID NO: 32394 - DNA, 1147 bp, Cannabis sativa
aaccctagttggactggactgctcatcaaggcttcagtcaattaaaaaaatccacacttctacttcatctagactttacacacacagatgctaagtccatcaactgtgatcaccaagaatatgagctaacacaatagagaactatccaatcaactcaaagttaaataaaaccaataaaagttaatgtaagccccaaaaaaaggccgaacaagtatttatactgattttagttgagccattttaaatcatggtaataagctattctagttagtttgtggtcaaagtttaaacttttatttagatactttataacttttttacgtctaaaccatttggaggtagcctaaatgaataacctacaaaacgttagtagtttgcagtcacaatttgaattttttgatacctaactagtataagtgttagaaagtctcacccttaaaaaaagtaccatatttaccattaatcccttaaacgaaacttaatacatatataatagtattagctactccacatattatccataaattttttaaacaaaatcttatatttcttaccatacatctatcttttgatttcttattatttttaaaagcactctcaacaactttttgatgtattctttacaaatatgatttcctaaaattctaccttttttttttatttattttattttatattatactatacatcagtttttttaaaaatatatcatcaaaatttcacttttttaaaactttaatatatttaattcatttcaaatgtaaaatataaatataaacacatatctcatacaaaaataattattgaaatctataataattaataaagaggagtgtttgttacctaccgtcaacctcctgttcctgttacaatctcttagttaacctctacaggcaaaaacatatgtcggaatattttttttttacggaggtgtttgttatgagtttggagcatttattgtagtgtatttttagacaattgctaaaaggcattacagatagacatcctatataacttaaaaaaatgatttttaaggaatattattaacctatcataaaacactacctataaaaagtgttgggctgggcctgctcatcaaaggcttcagtcaactagaaaagccaacacttctgcttcacctagactt

SEQ ID NO: 32395 - DNA, 1134 bp, Cannabis sativa
tgggtttgggtctaagtcctcgattcgaaacctgggtttgggtctaagtcctcgattcgaaacctgggtttgggtctgggttcaagtttgggtcccaagtttgggtccgggtgtggtctcaagtttggatctgggtctggtcctgggttcgggtctgggtccagatcaaggtgttcgggtgtctgggtccaagttcaggtttgggtcccgaatggttccgatccgggtataggcctgattcttgggtcccaaaaggttcggctctaggtccgggtttgggtctgggtcccatgtcttaggtccgagtttgggtcccgagctgttccagtacgagtccaagtccggttcccaggtcccagggggttgagctctgggtccgggcctgagtttgagtcttgaattaagttatttattaatatattgaaaccgggtcagattattagatccgattaaaaaaaattaggcagggcggagcggatctaattcgagatccaataagtattcgaatgtttcggattagaagtgatgcgttggatcagagctccgacctgatctaactaaatggatctttttgacatgcctatgtatgactagtcgataaacataattaaattattatttttttcacactaaattgtcaaatctatttaaacttggatactttaatttgttaaaaaatatatgtgtatataataatttacatacttaaatagtattaagaactagctcatcatgaaaattaaaacaatagataataaacacataccctttcatcattaaaaaaaaaccagcagaaggcatagtattagtgaggctctacttatagtaactaaaaggtcagtagctaaatgtatcagtcacaaaagttataatttgttgcgattaaatgtgtttttagggacaaacagctgtatttaaatattatattttaatcacaaataattttttgttatgactataagttatttttagccaaaaaaaaaattatgttgtggctaaaaaattatcactaaaggtattaactttttgtagtgagagtagatgatgataaaaaaaaaaaaaaaaaaatggggttcataccttacacatataggaggcttattgcctattatttgtttgtatttagtttttaat

SEQ ID NO: 32396 - DNA, 1222 bp, Cannabis sativa
  modified_base (433)..(447): a, c, t, g, unknown or other
atataatagatttgtgttctttgttgtaggtttgtgggaaagttagaaaaacattttgattagagaataatgaagactatagtgaacatgtggtagggtaaaattggtagaatgattaaaaaaagaggtaaacataatagattttaaaaaagaagataaaatttagagacattaaattaaaagagctatgtagtgtaatttcttctattatttttgtgtttacagtatagtatcataatgttcttaattaatctataatggatcagctggttcaacaataaatatttatagttcttagtattatactagtgttcaatgcttttagtgctatacttgaaaatggtcttcaaaatttttcaagataaatagaatgaaaaatttagttaaaacattgtgtttcgtttaccattgtttgattattattattattatnnnnnnnnnnnnnnntattattattattattatgttaaaggtatttattggagttctggtccacattattttgctggcacattaagtttttcttatttggtttgaaattttaatgcattttttgtagctgttctaagtatttagttgagtgtaaaatatgaaattaaaaataaaaaaatggtgattcctacacctatttttctttattttttttaattagtatctccttccactagtccctcctatatataaatatatatatatatatatatttatatatctataccatttatcgtgttgaagaaagtaagaggtgaaaaagaccatctcatagcaaaaatgaaaatgtatatacatatataataggggccactatccctattttaaccatatgggtactaattatgtaattagttatattcaaaactaaactttttgttgaatatatagtactacgtctattttaattttgttgtggtttgaaatactatatatagaccttttcaaataaagaaaaagagaaactttatattatatatagacaaagacatggtgtagtgtaataaatttaataaatagagaatataatatattatgaaaattgtgcttgttttttggttggtatttttgacaaatatagacaagcacatgcatttgccgacttcaaatgagatagtgatctctcaagaggagcccttataagcccggcatgcacaaaatgataaaaactaactttatatatataatattagaatattctacactaatctattgatgtgcttttattttg

SEQ ID NO: 32397 - DNA, 3398 bp, Cannabis sativa
aaaaattatcactaaaagtagcagttttttgtagtgtattttttttttcagatactataaagtcttattgtttagtttttctaggcatctccttctcatgtaagtcataactttaatatatgttgtgattcatggattaactaagcatgtcttatgaatatacaatagttttttttttatgaaaaagatccttactcctatctatagtggtgacacttaattgattatctgtttcattccaataaaatgatattgacaaaatatatatggagctaattgcatgatccacaacaattatagatagtcttctcaaagattgctctttttctctcattttgctcttacagcttctagctggagccatggctaaaacaagatccaagatgaatggaaaacctaaatctacaatcaagaaatcaaagaaaaaaggtcagaattctgcagatgttatttgaaccaaatttatggatgctgtacttggaattgttccattggagcattcaaaggatgaggaagatggcattggtgaaatataggggagaaggagtatggacttgaatcatgaccaacatgatttgtttcagcctccactgtctcctcgtgcttcattacaggagctccaaaggattgaagatgcacgaaaagacttcaagatcatttatgctaatgagaaaatgtaacagtgcacttgctcaaggtatgaaatcgattcccccaattcttcattgtacttctgtagttcgtaacctggtgaactctttcaagtgttctagtaatggtagcaaagttaaaattgagctggaggatatagaggaagaagtgaacttttggaagccttctattgtgcgttatgttttgggttcgaacccaccattaatgcatatattagagggttttgcaaagagaatctggaaagagggagtggataaggtttgaatgcttgcctatggtatctttattaggtttaactctctcggcgatagggactctatcttgaatggaggctacatcttcttcaacagacgacctgttattatgaaaccctgggaccctaatacgaattttaagaaggaagatgtcaagaacattccaatatggatacaacttgaagaccttgatctcaaattagcccatcatggttgatgatgttactaaaggaagagacagacttaactatcctcgaattctggttgaagttacgatgaatcaggagcttccaagtatgttggattttaaagatgaattcggatcgaacactcatgtgggaattaagtatgaatggaagccaataatatgctctaacggttctggtatgggacatttggctgctgagtgtaagaagaattcaaaacccatgcaagaatgggctgttaaagaagataaaaggaaggttactgatgtggttctaattgatgatgagggtttccagaaggtcacaaaaggaaagaaagtaatggaacaggagaaacctgctgaagcaaaaatagataatgcatttagtatgcttgcagttgctagtacttctaaagccagtataacaggtgaacagactaagaaacaggaagagcctttgggcatcaataggtccaaaacaagagagggggagtttcctctcttgccaatggacaagtttctttgttagaacgtccgaggtgccaacaaccaacaaaaacaaagactaataaaacaatttattaggtcacaaggtgttgggtttgttggtctccttgagacaagggtcaaggctcctaaactttgagctttgtacctaaatgttttttatggctagtgtttttcttctaacattgcttggtataaagatggaagaatagtaatagcttggaaccctctaagatacaatgttgacattactaaatgcacaagtcaatttatgcatttaaaagtgtctattgctgattctcattacagtagctacctcatagtagtatgcatataatgatcgaattgggagattggaattatggaaagacttatttaagattgcaacaacagatattggttattgatgggtgattttaataatatattggccaaagaagaaagaattggacataaagtaaagttccatgctgatacaaatttcattgaatgtgtttcatattgtcaactagaggatgttaaagcaactgaaaatttctacacatgttcaaataagcagcaaggggatgatcatatcttctccaagattgacagggtaatggccattcagtcttaatgtgatggtttttccactactgaagctgcttttctgaatgaaggcctttttgatcactctcctgcagtcttaactttatatcctcaatggaaaggggggaagaagcccttcaagtattttaggatgttagaaaaatcatcctgagtatgaaacaaaactcagggagatttggtcacaatgaaacaaaaatgtatcaactagtcaacaagcttaaagctcttaagctggtgctcaaggaaatcaataagaaaagtttttctgacctccattctgctgcttttgaaaaccaaaattgaattcgaagatttacaggagaaattgcagcaggaccctttgagccacgattgctgctgaacatgtggcaagatttagacatgtcatagtgcagaaagattattcatcatttttgcagcaaaaagctaaggcaaccaggattcaaaatggtgattccagcatactgctttattccatgcaagtattaagcaaagaataaggcaaaaccaaattttctcgatagaacagcaagatgggagtagagtacatgaaccacatcagattactgaagcttttgttacttactataagtccttattgcggtctcagatggaaggaaggaggagagtgtcaactaaaataatcaacagaggctatgtcctatctcaaactcaagctaatttgctaacaaagaaatttactaaggaggaggtgaggcaagccttatttggaattcttggaaataaagcccctagccctgatggattttcaagcttctcttttcaagataactgagagtttttgggggaggatctgtactgtgctattacatattttttagaaacaggtaaaatacacaaggaaataaatgccactgttttaactatagtgcctaaaacaaaatatcctaatactattaaggattttagaccaattgcttagtgtaatgttgtttataaaattgcaactaagatattgtcttctagaatcaaggaaatcctgcctggtttagtatctcaaaatcagggggattcatcaaaaggagatttataggacattacattataatatgccaagatctagttagggaatacaaggctagtagcatgattaagcttgaccttcaaaaaacttttgacactattgagtgggatagttaactcggttt

SEQ ID NO: 32398 - DNA, 1339 bp, Cannabis sativa
  modified_base (645)..(650): a, c, t, g, unknown or other
agggcataaaacccaacagatgagccttcaagtcttgcttgggcaaacgcttagcaaaatactccgtcttgtttttaaccttcttgattattatgctttcatacttttagtgcttttctctaataaagttccttttatttcgtgcagacatgtctcaaaagatgctcgaagctctagagaagagagttgggggcagctcaggctcatctcctccggccaagaagtctaggggcggtgagacaacaccatctagagagaaggcaccagctgaagctgttatcgatctttctgaggagctaaccgttgtggacccttctgccccgaaagcttctaagtcataagtctctcgaggagggagctcggacaggctcgaatagtcaaagggtggatccgagctggcaaaaagtggatctgagcagatccaggctcctaccccacctccatcactgcatccagagactaagagaggcaaagagatgttcacccattacatgaatcggtcggtctctgagatgaatgagcagcttgccggagctgacaacgagcattccctggagttgttgatgggaggagtcctgaaggagtttacgacggtgagtctttcttgacagtttcctttaatccttctttacttggctcagattnnnnnnttttttctctgtgcagactggtctcaagatggcttacacttattctcgagctaagtctgctgcttccaagaacactgccatgtccaacaccatgagggcggaaggggacttggccatgaaggatgctgatgaagccagggttcaactcggagccgttcgaatggaactgggtgaaatcaacaaaaagcttcttgctgttgagaagaaggtgcccgagcgaaccaaagatttagaggcttctgaccaacttgaggctcccatgacctccttgtccaaagaagtgaccgaccttcaggaagaaagggtggttcttcgaactcttttccgcaggttggaagaagagaagaagtcgaaggaggaggagcttaacgctgaagtagagaggctccaagggaaggtgaatgccttagagacaaccgatctcgagattttctatgacttttggaaggctagtcctcacgcaaattttgattacctaggcgatgccaaagacatgtatctcgagtattgtgcctcccagatggcctatggagagtccgaggcaaccacttctacttccgttcagaacgttgacatcgaccaggtaatcaaaattttcctcgacaacagatcctccaactcctacaggcccagaagacccgtacaaggagcctgagactccagccatctgaatacttctctttttatct

SEQ ID NO: 32399 - DNA, 1589 bp, Cannabis sativa
aaactgatgagtcgacagactcagtaaaatatgcataacatatatataagcaatgtataccgactttatgcttaagtcgtcctgaacccaattaccaagctcatcaaatggttaagaacattctcaacggaagtacgaccactgtaccatatgcactagagtagcgaatccatactcgtgttggtagagacattactgtacttctgggagttactaagtgttgtaccacatgcacgacgtaccctctggtactcgtgttggtaacactgtaactatcctaaaaccttacactgtactaacactcttaaaactattcacttctcagtgttagtagtgtatacaaataataacaagcattcaatcacatatatatatattatactatcttacctcgtttctgagctcaggtgtgccggtcagcttgagaggaattgcagctcgacgttttacagggccctataacacaatatttgtaactctggtgagagacacactaaaacacttttcgagaacttaaaatcaaaactagaaatatccttattgatgtataggatggtgataccctaaagatcacaaaaaaaggacaaaactagggttctaaaaatgacccaaccggcagaccgattccccaactggaatttcggttccctggggatcaaacggtcgaccagttcagtgctgggaacctcaaaaatatcctcaagacctcaaatcacacccaaacttctcaatattcttcagaatacctgtatacattccaacataaccaattcaagcactagaacacaataaatggctcaaaaattaaaaacaccattaaaaaaaaaagatttgagttcttaaactcaaatttcactcaaacaccaattcaagcaccaaacctagcttaaaatacctcccataactctaaaatatctcctgaatatagaattaaacaccttcaataccacaaaaccctaattccccaaaatcatacaccgaaacctaacttatattataaaacacttaaaaagataaaagcaaaagtgctataccttgaaccaaagctctcaattccttcaagaattctcaaaagtaagcagaacaatccaactctagctaccttctagcacaatcgagagagagaaagagaattgaagagagagaagggttttcttccaagtttcttcaagttaacccatttactcctattttaacttaattaaaataaacctacaacaaataataaccccacaaaatgaaacaaacccaaaccaaaatgaccacattgcccttggcaagaaaaacaaatactaatggagcaaaaaaggtaatttggtcattttctaaatctcgacaattaaccaatatttttaatgcctaacaaaaatacccagctatctataacattctaaaccatatgaaagcgtgactctctaatggtctaacatctcgttccaccgctaccaaacacaattacagaaaaacgagaaattcacataaataacataatagatatatattgaatctaaataaatctccacaaatacaaaatcatacacaataattaaatcacataaataaatcctaattatttaataatccaacat

SEQ ID NO: 32400 - DNA, 2542 bp, Cannabis sativa
  modified_base (1179)..(1183): a, c, t, g, unknown or other
  modified_base (1361)..(1372): a, c, t, g, unknown or other
aaattaaataataaatttattaaagagcaaagtaagaactccaaactatatctatttagttatgtataatgaaatcgaattaaaatattgattttatataattatatcgtaaagacaaattcaaacaaacttaataaaataatattaatatttacatatttataaaataaataatactaacaattcgttaaatttaacgaaatattcttttatttttaaaatatattttgttaaactaacaaaaatgattaaatagtcacattttatatttaaagatttcgtattatatagataactaaatcacatagtcaatgttaaatgacaacttgccaacaaagaaaatcttaatttaataatagcaataaatatattgttcaaggggcgctatttttttaagggttctcaattactaaaatatttgaataggggtgtttataaaatcagtgattcaattcaatttgtacgatttaatctaatccaatccgcaaagtgctgaaatctgcacttgtgcagattggattggattcaaaaattcaaaattctcatttgtgcatattagatgttgattaatatgtaaaagtaacttatccaatctaacacaattatttaatattttaatgtaaaaaaatagtaatttaaaagtctaatacatatagtacaattatatttcaaaacttaatacatcaaatatatattccattcttatatataatttttcttttctacatactatttaaaataaaattaaacatttatttatacatatatatattttttcttcctttgaatttgttatttgttatttatttattttaatttgttgttagagaaataaaataacaataatttattttattttattgctacatatgtgaaaaaatatattttttcataaatattgaataatttaatattaaaaagtaattaatctaaaataactgatctaatcctcacttttatggattggattggatttgagttattgtgcgaatttgattggatctaaaatatgaaatccatacttagtgcggatcagatgcactatgagtaaaatagtacagattggattagatgaacaaccctgcatttgaaattaaaccttgactaattaattattttaatgagatgtttttattatttttttaagggtaaatataccattttggaccctatgttttnnnnnagttaccaattggaccctctattttgttaaatgacaaaatggaccttatattttccaaaatggtaaaaatgggaccctgagctcaattttcaacaaatttatttttaatagaactaactttaaacaatttctaacgcgaatgtaaccagttttgtcataacatctctagatcaaattnnnnnnnnnnnntattttgacaaaaaatcagttcacaatcctaattgtattattttaaaaaatacatggtccattttataatttaacaaaatagaggattcaattgataacttttacaaaatacatgatccaaaatgatatttaccctttttttaaatgtagttttattagatgtttactttgtataaaatattctataatatttttctttgtgaaaagtcaagcatacattatttaattattttatttatttattaacaagaaaaagtccagcttcattaaatttagtcatcaatttagagtgcttccttccttcccataaataaataaatataataaatgtaacgtgttgactttaatagtttccaaaatgtcatttctattgggtagagttttctaataattggataaacactatgtttaggatcagtttgggatagttgtgctgtggaaaaacactgttatagttatactgtgagaaaaagcagctgtagcagaactgcggaaaaaaactgaactgggtatttgtaaattataaattttaaagtattgtgagttgttaagatctattataatgataatgataatgttataatctagtttattataatcacaaatatgtaaaaacttattttatacaatattttattttctatatatttaatttttttttcaaatataaatgttcatccatttgataaatataatttatagtatttttatattatgttttatcaaatgtaaaaaaaaaatagaaacttaagtatacaagaaattttttaggttgatgttgtttgttaatattaaaataaaatataattatttttttaaaaaaataaatgatttaattatttattttattataattaatttgttttaaatatgttttattttttaatatttaataaataagtaaatatggttttagtacaaaagttgttattatagtcttttaatcaaaacaacttttttgaaaagttggattggaacagttttagcttttagctgtagcttttccaaaaattctttaaaaaatatttttttgattgcttaccaaacacatttttatcacggtattttcaaaaagcagtttttagcttttctaaaagttctgcaaaacggactcttagtgtgattttacattaagaaaaatgaaagttgtgtgtttgtcccacattggtc

SEQ ID NO: 32401 - DNA, 1315 bp, Cannabis sativa
gccagatattttttctctgttgacaaagaggcgggccgcggcatgctaaacccatgtcgcggcctctgtggccaagtgagatccttccttagattttcttcatgtaggcgggccgtggaatgctaataccatgcggcggcccgtctctgctccaaattccacatgtttttatcctttttctgaatctgattctgatattttccactgggatatttttatgcgatattttatcctttttctattgatattttccaactcttcatctattttaaatctgcaaaattaaaagataaaagcataaaaatgcgccaaacatgatttaaactaaatagaaaaatgtgctaaaattaacttaaaattaatactaaaaataacctaacaaggacaccaaccaactcttagctcgctcccttagcgagaatggaaatagtcttaggcagatagcattatcactaacttcgtttactttgaatatttgacataacttcgcgaagtttgataaatgcaggtttagatcttctgagggcagtctaccaaactggactgaagatttcatcatttggagtatggttggctttatatcaaaattgttggcttctatggcgggtggtcttatacatgactgaaccaccgtcaatgttgggagaacatagtccctcacactactgtcaggtggatttgcttccctggtcttctaatgcacccccattatttttcgttatttccattgttggcgttgtcattcatgactatttctggtttagccctcaatgtagcgctttctaacctcttgttccttctattctgtctataggtcttcttaatctcaggatcaaaatgcactcttgaattagctccttgacgttgcataaaccaaaacacctgagataggataggaaaaattaagacaaaatagttagcaagaagtaaggaataaaagaagaatgtagtctaatttctataatatcaatttttaaacaattctccggcaacgccgccaaaaacttgttacgcaaattatgaacagctacgcaagtgtacgtaatcaagtagtactcatacatgtgaggtcgatcccacagggaattgagatgaataccactaagttagacttgtatttctatttggtaaccaataatttttataaaaataaaaataaagaataaccagaaaatataattaagcaataaaagtgttcaatcaaggatgagaaattagggaaaagactcctgttgctttaaatatttaattgctaatgctaattactatttctctttcttaatgtgaatgacaaattataaaaattaacctaact

SEQ ID NO: 32402 - DNA, 3407 bp, Cannabis sativa
aaataagacatagtctaatttttaaattataattgattaattaaaatcaattaagtgagtttgcaagcagtatatctcaactagtttggggatcattgacctataaatgaagagggttttaaaatgacctttttcttcatttttctttttctttttttggattttgggactattatgagggagctctttttaggggggagtagtgagtgagtgagtaaagattcattttcccttattttctcttattacttcatttggaaaattgggaaaatgccctctctaaacaaactcaaaccccagttttcgtcatacaatctcactctttatatatacataaaaggtttttattagcttagatgcaaatttattagttactagttacttgttagaattcgtccaaaaattaaactactttttttcttttgaaaactaagctagtttgttaaaataaccaatatatataattaacttttttttgtttctaaaataattagtttagtattgtgtacgtgtatttaaagtttgttcttttaggagtgaagatttaatattggatttgtaactatcaggtctttacaacttgtttcaagcttagaaatatgattggtgacatttatgtttttcttttcaataaaattcaaatcatcaagaacaactcctaagaaagagaggtccatatctttcctattgaaagcttgaaaagcatgggcacaatcaaattcaaatcgtaaagttctactaaatccagtcccttttttgaacacaatctgatttagttaagcacaaccatatgcttggagtcatttatgtttttgaatgcctactttttgtgtttctgaaatgtcacgccattagcctttttttcctggagatcctagtttgatgcattcttctgtgtatgcactatcctgtggtgttacactgctcaatttgttttgcttttcaatttttttcctctatttttcaatgtcaatgttatattgtagctttcctgtgtttgtagtcctaggacccttttcagttgggatttccatttgcttatgactagatctttatctcaatatatttataaaccctgtgttttatgggtttcaattccaacaaaatgaaagtaagtaaatattgtttctttcttcagtattttagtttatttatcgtgaaatttttggttgtagatatatatactgcttcaaaagaagtaaaacaaggaccagctgccattggaggcccattaatttaatcttatcaaccattgagggtagtaagtgactgaaaaggatttcttggggaaaaggatgttattgtactttggttttactcactgtcgtgatatctgcctaaatgagttaataaatttagctgctgtgattgataaaatagtaagtttatgaatttacaggtgtttctcgatctgtaatgctatgtatctgtgttccattcgttcctatgttatgatgctttaggatgtagatgaacatctaaggcttcacttctcctttctcacctccctcaatttgcctttaagacctcctatttttcttttaagaaaatatattgtttctctataagcatgttagacatagttataacactttactataaaatgttattatagtaaatatttccttgtagaacaaaaagtggggctttaaattgtacccatgttcatctctggtgatcccgagagagataccgtcaagcaagttgctgaatatgtcaaaggtgctttttctttccatatatgaatgttcactgtttattcttatctaattggttaatgtttttgtcatataatttcttattttcttccactaccagagttccatccaaagttaatagggttaacaggagattcagagtgttgctcgtgcatatcgagtctactatatgaagacagcagaggacgatttgattatcttgttgatcatgtatgcctcctccttcattccatttttttcaatgaaaaaaactttgttgaattccttatcatcttgcttatttgcctgctcatcatcatgtaattgtattttcctaattatctcttttaaccaaatgacattcctaccataatcgtgatgggttcataactccttgatcatataaataaggctgcaaaattttacatacacagtattgttctcattatattctaaaagttgacactccctatttctgttgccgcttcgatcatctttctttctttccttccatttttttgatttctgttgtgtcctctaatatgtgtatacgtggacattttctgcagataattgaggagtcctaatatgcagtttgtgaaagaataatgatgttgattcactaatgtgacaaaaaggtatttggtattcagtgaaagctagcacaattcaacttttagaaaaaattgttttaataaaacaatctataataattttgtttttattaaaaatttatttaattatttattatctattacaaaaataaaaatgttttttgaaggaaaaaatatttaaatttctaaattgttattttgttttaaaaaatattttatatttatatttttatttttattattaagaaacaatatgtacctaaattttttataaactaaaattttttcttttacaagtgataaaaatataatttaaaaatgttaaaaattatttttatcaaatgcatataaatttatactatagaaaaaaaatcattaaaaatatatagaaaataaaaattttatataacatattttttgtatatatatttgcgattataataaactagattaaaataccatattattataatagaatcttaacaactcccagtactttaaaatttataatttaccaaatactcagctcatcttttttctacagttctgctacagctgctttttcatacagcacaactacaactatttttcttcacaacatagttgtgccaaactcacccaaagactcaaaaaagatatggagtggtctaaaattttcaagctttattgaacctaaacattttagttgaaaacatgcttgactaagtcttagtcttagtcaagtcagctatgacaatcccgaccaacttaattgtaaaaggtatctatataaggatgtccaaaaccatgtgattaaggctaagtttttccatttttatgctagagagtcttagatgatttgttgttctctctaggaatatgttgttaataagtgaggaaagcactccattgattcttttgttatgtactacttttaaataaacattaaagtattcattcttcttggtgtgatagtatacttttgattgaaatgtgtttactacaaaaaaaacagctacatttagtgacaaatttttaattacagcataaatttttttgtgactagatgtgacttttagtcacaacaaaaagtacatagtatttagatacaagtttt

SEQ ID NO: 32403 - DNA, 1249 bp, Cannabis sativa
ccattttaatagataatttataacatttgttaaaggataaataacattttcgatattgtgttttgcaaaagttatcaattagaatatttattttgttaattgataaaattgacattatattttctaaaatgataaaaataagacatgaatttaatttttgacaactatttttaatatgaccaacttgaaaatgattcctcaaatgaacaaatacagaaaatataaacagttttgtcataacaattttagatcagattattattaaattttattttgacaaaaacttagttatcatccaattagtaatttttgcaaaatacggggtccaaaatagtatttacccctttttaaaaaaataaaaggaaattaattttatatactatatttaattttcttttttacagtttaggttgctatattagtttttttgtgagttattatgtgaatttggattgtgatttaggttgttttgttagttgttatatgaatttctagacattgatatatgttttagcatctacgaagggctttttagtttaatttttttcatattttttcacaatcatgtatgttattgttattttggaccatcggtaaaattttataaaattgcagatagtttatagtgtttaaaataaagttcaaatgtataaagaaaaatagttacgcatgcaataaaatatttaaactttattttcagcactataaattattctattttttctaaaatttacaagtagtcttaagtaagtacaacgtacacgatcataagaacaaatatactaaaaagttttcttgaatgacagaacaaatagagagtactaaaatactcactttaagaggtgtactatatagattttcctcaatatttttaagaaattgtattattctttaaatccctaatgaagattcgatttgttaatcagtcaaaactaatagcaagcatgttatgttcattggccaaagagacatattcttctcatttcatatgggaaatttgactttatatggatattgtaggttaaaactaggggtgtacgtcggtcgatttagtcagtttacgttacaatttattcaacccaatgtaaagatcggattacaaaattctaagtgcaacccgcttaattaacaaaaaaatttcaacccgtccaataaaaattggtcggtttggtcagattaacccgcccaaatagagcactaatattttttttttcacattcaattgttatattttaattaattgtgataa

SEQ ID NO: 32404 - DNA, 2044 bp, Cannabis sativa
  modified_base (1138)..(1138): a, c, t, g, unknown or other
gggcataaaacccaacacttctcctacccctgagatggttagtaggcataggagcctgttaactcatcccaatggtcttcggtcatgcaatttccttttgatggaggctaacctgcgatcggtgggccttttctctaataaggaatatacttgtgattataagattcccaagtattctttttggcaacagtttactgttccgcctgaggaccaggcctcggatcgcttggctcaagcacaatacctttagaacactgcccctcgggaatccggtgaaggagcatcccgaggtaatcaatgtggttggtctcctactgtacttagggctgagtgtaatacattagtcaccttccaagactctcgtcttaatttttatatttggaattcccttctcatggaccgcattagacataagtttgacagttggtatcctaaatttcacgtctaggttaactatcacgagtcatattttggtatagctgagcaatacagtactatggaagatagggcaagtcacatagatgcgagctggtatttaaaaccgatcgagccttttgatatatttagaatcacaggctatagggattttagtggatattatggtccccctaccccttcatctagtgatagctcgccttctcgtgactttggtaaatctcttaggtggaaaattatattcctcccattttcatcagcctttttaatagttgtaacgccttgtcttgttttgcagacatgggttatgaagatatcatggaccggaaggggaagaaaaggacaaccaactttggagtccctattgtcgccgaagtggttcctcctaagaggaaaaggaaaaccactgcccgtaagaagaaatcgctggccgagcccatcgatcttgaggtttccgatagcgagatcaaagaacaaattcctcctctagtcgtttacgacaccaatgctcttcatcccgaggcacccccgctactgcttcttcgagaaaggccattgtgaccttgtcggccgcaggaggggaggcctagtctaaatttgcccacgcatatggagtcgcctattggcgcaaacttcaaactcttcttctccctgattgggattttctcaatcttaggagcccaaaagagatgctttcaaggancttggactataacttcatggtacgttggctttattataataattatattattctatttatacctctttcatattcatctatttgcaattctccaagcttcttttgcttcttttgcttccaatcaactactctctgagcaactcgaatactatgagggcgagctccacaagttattatcccaatgcaaggttgtgagtaagcatcgggacgacacccaacaggaaaatacccgccttaagcaagaagccgagaaagtgaaggaagaagccaataaggcaatgaaggaagccaagaagacaaaagagaaagccgataaggaaaaagaggaggccgagaagatcgtcaaagcctaagccgatgagtttgagaagaagcttgctgaaaaaaaaaagtcaagagcgtagaacggtgtgacatggttggttttcgtactatatatcaggcctagatggcaaaccctaatatggacaacaacttcttggaggagcaggaagaggaaactttagctctttacgaaaacaccaggatggaggaagaagatggccaggtcgaggaagaagaagaagaagatctatccaagtcccctagcatgtagactaaaaaatttatttatcttcctttctcttttagaaaatggccctttggccaagacaatggtttgcccctggtggcccttttttttttataaagacagaattgcaaggttggatggccaactttgcctttttaatgcctttaagtttaaactttaatgtgtgaatgtttgcttgcgtttctttcacaatttaaacaatcacatgcataaagtttattaggggtttgcattgctcatcttttcctctgatgcaaagtagttaatgtcctactttacgcgcagtagcttatctgtccaaccctcaatctgcg

SEQ ID NO: 32405 - DNA, 1717 bp, Cannabis sativa
aagcaagatccatttcttttctttatgtttggaagtgtaactttattttggtaatgatggttttgatatatgttataaggaaattttataaacaggggatccccgtactttagtggtatttttaaagaaagaaaatttatatgtttatttttaattatcaaattttatttaaaccacacttttcctaagctagtagattggtgataataagattgtaaaatcacacacgtggcgttcctgaggttcagggcgttacattgttaggcgtacatatagaataagcatgagttaagttgattgtagtatgtgatgagtatgtattaattaagatagcctagtagagctatatgactgattaatacggtatgtattaattaagatagcctagtagagctttatgactgattaatacgtaaaggaatgcttattaatattgttgttatttgagaagtatgggcagtgcaaagcaatgattagtaaagtattgagtacggagtctaataaggaaatttgtgggattcaatggaaaattggacaaattaggattgactgaaaaacagtaatttatcgctactatgatcatgaagtgatgtgtgttgttatgcagaaaactagttgacgaaatagattgcttaaggaattgataaaagataagttggtttggaagtaagataagtatttgatatgtcatgtcgctcgggggatatgagaaactattaagggcggttatttaagtggtttagagaatggaatcttgttgccctaaaggtggtttaaaacctctagaggtggaataatagataagtataattatgtccattcgagatttgaggtagccagattggagattatgattaagtgagttgtgctatttcgtgctacagaatagatgttcaaataatagaggatagatcccgaggagcatgaattgaatcatgttaattaatgaataatttaattaatgatttataaggagatggtgatgagaacactaatgttgtaagataaagaagattatctagattgatagtaatggtatgatgatgatggaaaatacttttaaggtctgatcagatggtgaatcttgtatatggagtgaccatagaaatcttggtaaaggtaaggctcacttgaaaaatggatgagctcagaacctgtgaataaatgagatacactcaagtggttgagtttcacattaatgagatagatagagtactagttattaatgataataacacttggaaagattcttggaggtctccattctataactagtaaggtaggggttataacctggatgattgaaagaaggaatttagatgatcttctagatgtggggatcaactagaagtattaatgtatggaagtttccattgaaataaaaataaggctaataagcttaccagaacgtttgatagtgaaagatgttttcctagagagaaagagtattgttatttgttaaagaattgattatctcctatgagtgagataaatttctctagtcagtatagagaatacagagtaaacatatatgggttgttttgtttgacgactagaagtaggattactttattaagtaacaacgagagtaatagagttattattctataaatgtctggaactagtgttcttgcccaaccactaggttgggtcttgggttctggtcagccactaggacctggagctctggttggcaaaggccaaggctccaagtggg

SEQ ID NO: 32406 - DNA, 2140 bp, Cannabis sativa
  modified_base (38)..(42): a, c, t, g, unknown or other
  modified_base (1385)..(1387): a, c, t, g, unknown or other
  modified_base (1635)..(1645): a, c, t, g, unknown or other
aataatacaactaagattgaacctaaccatatcaagannnnnatctatagacctaagatcaactagtcatattgacttagaaagatataacggtgatatcttttggggtagacttaatactccaaaacatagctttgtaatttggttagcaattcaaaataggctgaagaccaaagagagactatttcggtttaaagtggcagcagatgtgcaatgtctattatgtgataaaggagctgaaacttgtgaccacttattctttgaatgcccatttgctattgattgtctacaacaagtgaaaacatggctgggatggaagactccagcaacccgattgactagtctggtgagaagcattgagcggaggaaggtttctagcttccaaaagagggttatggcagctgcccttgctgcattggtgtacctaatttggaaggctagaaacatgaagttttggcagcaaagagatgagaccccgaatgttcttatacaacaattgaaaaatacttgtaaaaatagaatacatagtgtatggcctagcaaagtatcactagaagatttaacttcgtttaacacattggagtaatgaagaacacttgctgatttcctaccaaaaaaaaaaaaagtttatgatatcttatccaagataaatatcggtccaatccaatgtgtactccatacatccgataatggtatattttgtaaatgtcctgaaaaggacataacacttatccaaggttactaagtataccttatcgccgattatcatgtcagtctaaattcagtgtactgacaaatcatgagactcaaacttttgaacatataatcatgattatattccattttactgacaacactataatcatgaataaatatatgttttggacttaatagaatttatacattaagcatatcattatgaaataaataatgtgaaccatgcaacataaaatgacttctgatcttttattaattaggaaatcttattatattgaaatgagtttacttagggcagaaaacgcagcaaacttccacttgcactaatataaaactaaaagtgcatttcatataatcttaacaccttcatatccaaatcaagtgtagtatgtagtattctctttgtaataggatttgacaagttgtattcagtacaaactttctccaccattacatccccttaatcatagaattcttgatatagtaaatttcctctctatatgtctactcctctagggatactggattctttactttttggcaactacttttgtgttagttaggaagtatcactagcagttaattcattattggtacaatgccaaaaaaattgtatagaacttttcatagactgaataagtatcctttctgcaactttaacattcagnnncactggtagagttagagatttcagataggcttttacacttctccaaaatcactgctccacccctagagtaatcaccatctcatcagtagtctttctagcatcaaagcaagtcaagaaacctgatttggtgtagtctaagagtattaaaacaccacccttatcaactaacatatagttcctcttttgatcttaagatttacttgattgtcttctaatgttcattacctggattaatttgatacctactnnnnnnnnnnnctcaacagcaggtgtctggtcttatgcataccaaagcatatatgaaacctctcattgttgatcctaaggaattcctttcataacttttatcttttctggaatagttgaaatttttccttcgataaataaaatctatgtttaggaagtcttttggttcctagacatatactttatttatgtaaggaatggagaagcaagtaagtgaatagttaaagttgtctggtacgggtccgggtcaaggtttgggtccgggttcgggtcccggtctgggttcgggtcccggtttgggtcccgggtcctagtctgggtccgagtccgggccaaggtccgggtcccgagttagggtccgagttgcggtctcggtcctaggtcccgggtcagggtccaagtcttgagtcagggtttgggtcccagtcctaggtcccgagtcagggtcctgggtctgggtccgggtccaggtctcaagggatccgagtcttgaattaattttttttt

SEQ ID NO: 32407 - DNA, 1237 bp, Cannabis sativa
gcatgcccatacatagcaagtgagccctcaatcatagtgtgtaagactgcgaagaatccaaacagtaaaggagtttcgggctcagatcctggtgatactctacgacagaaaggatataagggttagagatctaagcggaaggagtcatttaatttcgctgcaaccaatgtaaggtttatttttatcgttttagaaattcatatttaggatataaaaacatacttgttagtaacctagatcttggtaaaagatattccaacaatgacattacaatcagcaccaaagttgatactactgttgtcaccagcaatgaaattgatcaaaatgctgacaccagcactacaagtgataacattactgcaataaaagatcaaaaggctgaaaccagcactacaaacgacaacaatgttgcaacaattaacaaacataataaaagtgttatcacgagaactaaaactggtcgtacatctcacaaaccttcccacttagacaactatgtttgtcatatagcctccaccatacatcctatatagcaattcatatcctactccaagctcagtcctcagttttaagtagttgttcttgctgcattttctcatatagaacctccgtcctatgctaaagcttttcaattcagacattggttggaagccatggacaatgaaatagaggccctagagaaaaataaaacttggatcatcaccaaattatccccagggcataaaaatattggctataaatgggcatacaaggttaaatacaatgaaaaagggaaagtagaaagattcaaagcccgactagtagctaaaggttacaatcaacaacatggtattgattacctacaaacttatactcttgtagctaagttcaataccttaaaaattctacttgcagttactacaatgaacaactggcatgttcaccgactcgacatcaatatgcatttcttcatggggacctatatgaagaagtctatatgaaaattcccccaggttataaagtaccacccaattttgtttgcaagctacaaaaaagcatctattgccaaaaacaagcctcatgacagcggtatgctaaactgagcaccaccctccttagtgaaggcttgaaccaatcgtcatcagaccactcattattcattaaaagaacttacaccttttttgtagctattttaatctatgccgatgacatcattgtcaccagtagaaatgattcagcaataattcacttcaaacaa

SEQ ID NO: 32408 - DNA, 1846 bp, Cannabis sativa
  modified_base (1783)..(1790): a, c, t, g, unknown or other
ttttttgttgcctttgagaatgtttaagaaaggtacacacttgtctatagacttggacacaaatctgcttcatgcagcaatgcgtcctgttaggcttcgtacttccttgatagttgtgggcgacttcatgtccaaaaaggctaggatcttgtctgggtttgcttctattcccctagcattaactatgaagccaaggaattttctcgagcctacgccaaaagagcatttgagggggttgagcttcatgttatagttgcaaaggattttgaagcactcgcgtaggtcctccacatgcccccaaccttttggacttgacaagcatatcgtccacatacacctccatgttgcggccgatgagatctgtgaagatcatgttcaccatccttttatatgtggcccgtgcattagcatgactttgtagtagtataggcatatgtccgtcatgaagctagtgtgctcttgatctggtggatgcttctttatttgattgtaacctgaatacgggtccatgaaactcataatttcatggtcagctatggtatccacaagttggtcgattctggggagtggaaagcagtcttttggacatgctttgttcaggttggtgatgtcgatgcacactctccacttcttgttgggtttaggcaccagtaccgggttggatacccactgtgggtaaaatgcctctattatgaagtcgttggctctcagcctttcgacctcatcttttagtgcttgggcatgctccttatctagcagtcaccttttttgttatagatgctcggatcaatgttgagtgcatgggtcatcacgaaggggtcgattttgaccatgtctccatgtgaccatgcgaaaaggtccaggtttgccctaagaaattctatcataattgatttaatttctagagccaagccttttccaatcttcagtcttcttggtggaaaagtgggatcaacctccacttttccaactcttctacaggcccaaagtttcttatagtatccccaaagcgaggatttatgtttgtgtcctgaccttgggctagactttatttccccttgctgggctcatcttctggacttttggcgggcatcttctccttttcgaccttggatagggccaagttgtaacagtgatgggcaaactgctagtgtctcctcacacatgccaccccatgccttgatgacatgccctacatgggcctgtcgtatggcttctttaagtttgataaagacattatctctatcaaggaactcattcatgttgttggtagagattctccaagtatctttccaaaagtcactcaatgggagtatgccccccagtatggtcgtataacgaccttcttctgtaaggcctttgactttggtagccttggccataaaccctggatgtaatctttcaagggttccccttgtcgttgtttgacttcgacaaggtcttctagctgtgatggtacaagtctcgaagacaagaattgtgtgtaaaattttcctgaaaactcaacccaagaattaaaccttcttggggtaagttcaaagtaccattgttgagttatctccgataatgtggctgggaatatgcggcagcgcagatcacgattgagtaaccttctagagattgagttgcatctcaaagtatttgatgtgagccggtgggtcttctcgaccggtatacatcttccatactggcattttaaacttcggcaagggcaaggcatttatgtatgttgagaatggtgacccctttgtaaagaccacttagctttaatttagaaattagnnnnnnnntagggtttaattatgaaacttgcacattagtcttgaattattaatttatgatgatt

SEQ ID NO: 32409 - DNA, 2363 bp, Cannabis sativa
atttatttagaatatgtgagtataatatgaattatttgtgacataaaaatgttttcaagtttgacaatcttggagacccgatcagaggccaataatgtcacaattagtttagttagtggttttaataagattattatggtaagttagttttagattatcagggtatttttgagtactcagggttgaccaaatatcttaggattaaaaatttcgtagtggctaaaaaatagtaaaatattttttttgttaaattcttttattattattattattaatctttttttttttaaatatgatgatatatataaatataagataagtattaatcaaaggaaaacagtaaagaaaaacaaaccctcatcactctctttctccttcttttctttagctagccaaaaccaagtaagaagggaccaatatctttgattcttctctgtccaaatctgtccctcaacccataagtagcagctagatataagctacttgaagaagaagcttgaggtaagagttttgttcattttctttctttgaaagcttaggttctaaggttgaattttggttttgttattgctggggtataaattagcatttggtttagaatctgggagttttggactggttttggtgcttctttgaagattttgatgctgtagagaggtgagagtcaagtttaaatttttaagctcaaagcttgaactctcatggcaacttttgtgtttaagcatgattttaatttctatcacgtcgagaatgttatattgacgtcatagaagtgttctgtgaagtttggaaacaattggttatgtttgaagcatgttttgggactttgaaaacttgaaatttttgagaccctgctgttgtgaaccagaattccagatggtacagggctgtaccaactggaattccgtgtggcagtaaccgagaaatactgattttttgtattttagccataatttttcactcgggtgtccgttttagaagttctatatgctgttttgaagctcgttaagagctctatagttttaataataaattagagaaaaaaatatgtttatttaagagtattttgtcatgagatttggtagaaaaccctagattattttatgcgaatatgaggcagtattttagaatagacacttatcagtttactgttgttgttacatatgacctagggtgtttctccacttgagttagctgacatgcataaatttagattgaaggtaagaaaagtacatttgtaacacataacatgtcaagttacgattattatcgttatgactcaattatgatcaaggcaatagaacgataattactgttaagtggattgaagtcacgacatcacgtgaaaccattgttaggttccctacttgttgattgtcttattaaatgatgacagagatatgtggatgccatgttagggcatcgtcttgccttattaggcattgtgatatatggatgccaggttagggcatcgacttgccttattagacaatgagatatatggataccatggagtggtattcaggttgtttcctgtgagacaattgtgataagtcatgactctaaactaaaatttttgttacgtttcttacttgtcggtgatcctgattacgtagtggcagtgacatatatggatgccatgttagggtatcgacttgccttattagacaatgtgatatatggatgctaggttagtgcatcgacttgtcttattagaaaatgagatatatggatactagggagtggtatttggtttgttcctatgtgataaccgtgaatagtcatgactctaaactgaaatcgttgttaggtttcttacttgtcggcgatccttattaggtagcgataatgagatatatggatgccatgttagggcatcgacctgaattattaggcaatgtgatttatggatgacaggttaggacatcgacttgtcttattagacaatgagatatatggatgttgggttagggtatcaaacttgccttattaggcattgagatatatgaatattgaggaaatgatatttgggttgtctagtttcacaacgacagtaatatttgaatattagttttttagtatcagggttgttttattaaacaaggacaaagatattagtatgctaggtgatgcattagaattgtttttctaggaaagtagtgagaatagttactttatgaagtaatggctatagctattatcattggattggtgattgtgtataactatatatttctttacattgacattcattgtgtttggatatttgtactgagctagatttgaatatatgagtaatgtacgattatttgattttgatgatgtgaatttgcttgatgatatttgtgtgatgaattatatga

SEQ ID NO: 32410 - DNA, 2110 bp, Cannabis sativa
atattgattgttcatgttcaaactattgaactcaaaaattagggcaagccaaaaccaaactcaacaatcctataataaagatttatacattcaaaccataggaaaaatcgaaacaaaacaatctcagattcttcacataaagaaaatcaatttgagatgtgttagaaatacctttactcctctctaacacagaacctcgttgaaccaagtcgtccaactctggcgtgtccttgacctaagcagcgaaaggcttcaaccccaaatcgcagaaaacaaagagaaggagaaatcggagcaggccttaattcagatttgaaaccctagattagagaaacaaaaaccattgaagaaaagcaatcgtcaaccatgaagaggagagaacgccgttgaacggcgtcgcactaattggttattttctcgggaaaactaaagcttcgagtctctcggtctgggtagtctctcatgtttattttttttttggttgccttgtagttgcattatcgtttcataatagttttatccaatttgtaggaatttcatttgacggtgaaaaagaaagatcacttcgaaaaaactgcttctacatggtaagttttatgaaaatagttacatcttagttttataatagttgcaaaaaagttttgatacaaacaaaaatcatgaaaaaaacagggttcacaatcaataacaactgacttgaaataacaaaaatatcaggagctcccaattaatccaaatcagttataaacaatatagctaaggtatattcagttgcattgtcgttttttttttttctgatttccaaatagaatgaatctacaaccatgttaattggagttatgttccaagttttttcaagttgatttgtagttgcatcatcatttcattatggttttattcaatattgcaggaattttttttgacagcgtaagaagagaaaatacttcgataaaatggttagtttgtataaaattattaaaagctttgttgaatagttgcattttagttttttaatagttgcataacagtactaaaacaaacaaaaaaaaatgaaaaatacagggttaagaattaaaaatacaagacttgaacagaataaagacaatagaagtaagtttcttttctatttcataaagatcattttaatttttgttttataaatttgtatcaaaaatgttcggaaacattactaacaaaagcaattgcagattcaatatagtctcaaattaattgacttacactaataataatttcacattcacagaaaaaagaagacattccattcctggtcttttgcaatggacaacttgatgatcgaatgaattataaaaattatgaagctagtggacaatacatctcaatcgattgtagatatgatgaactaatacacaagcttaaagaggtcctggaatgcaaccaagaaaacattgtcctgcaactaaaataccaagtgaaagaaggataccaaccgttaaggataaaggatgatcaaagcctacatttctacatagaactaaaactgaaggaacataacttcacaacatatccattgtgtgtgaacgtcatcaacaacacaacaacaaccatcaatccatcattcttggaaaatagtaacacattagttgcgtagacaaatgcaatagaaccaatggaatacaatgcaacaacatcaaaagactcaataactcaataacatacaatgcaagggacaatgctggaagatggggaaatttttttgacttcatggactatgcaaaacttgtgacaaaggaaatagttgagcaactagaaaataacaaagacagagaggcagaaatcacagattattacaaactgttaatcacgaatccgcaacatcctgaaatagaagaagcacaaatatacaaggacaaagaaacacttcaaagtgtgcttggtttctatgcaattagaaacaatttccaatttaaggtgaaaaattctcgtgcaagaacatacaaaatttgttgcttggatccaaaatgcaagtgggcactcacgacatcaagaaacggaccaaccaagtcattcataattcataaatatgacagaaaggtgatttacacttgtgatctaaacataagatttgcag

SEQ ID NO: 32411 - DNA, 1710 bp, Cannabis sativa
cacatttactcttgaggccacttcttcgcctcatggggctgacgtgtattgttacgagtttctaccatcgttactctgaattttttgtctaactgttgtcttttttacgaagcttccttcagctctcaatgaaagcaccaaaatgttgactgtggtttttggcaaccaattaaataatagaatgagaagagctgtaaaaggtttaatgcaggtgatttttacgtggttcaggcattaatgagccttagtccacgagtctttgttatttatgagagtattttatagagaatgttcttggtgaatctctctttcttctttactcccttcgattccttaattaatcgatcgacccctttttcattctatttgtggggtatttatagttttttttttcaggagaatccctagaaagggatcacttgtcttgttgtgttagcctcttaggggcataaattcctagcatatacaaaataggaaatacatgacctataccgtaggtatcttagggattagttggatataatcttttatcctcctttgattgatgtgagtcctcataatgtagctgtcactagactcgtcaattgtcgtgtaattgtcgtaaagcggggcttacaccatttgtcaaatcctcttatggaggttctgaaacgtttccccccatgtagcattaaatacgaagtaactgttcgaacaatctctttccccttggagatgccttgttacagttctaacctcctggagagtaaaggcgtgtcttatgctctcctccgggaggctcactccgtgagatgcacttctctgtagggctgagcatacggcccagcgggccgaccaaaccggccaacccaacctgcaatgggccgatgcacggtctctttgtatgggccgaatttttgttgggttgaacatgttgtaacccgtgacttatgggttgatttacggactggattatttacaacccaaagaacccaacccgggccggtcaggcccaatgagtaaaaaaaaatattaatttgtttttaacacttaacacaatcagccaacccatttctttcccaagcccaacccaagttactcaaagtctctctcaaatcaaaccctattctttctatccccattaatattactaccctcccagcctccctcctctttcaatttccaaaccctagcagacaaacaagaagcacacatcaatggcagcacagcagcgacgcccccacgacactccgccccgttagcatcgcgggcccccacgacactccgtttccttcatccagtgacgccaccatttttgtaagttctttctttatttcttttttcttttttctttgttggtttttagttcaagcacctaagctatctattgatctattctactaacttttaactttttttttttctttatttcttttttctgtactcgttcttttttttttttgtatcttttctattttttttttatttctttatttgtatcttatctcaaataataaaaagtagaaaataatttcaaatcaatacctaattttttttaaatcaatggcttaatattttttttttgcatagctgctagtgctcgctagaagaaagtcagatcgcattgcgtcaaagttctttgatcaggttgacatccctatcgtcgttagtatcatcgtggagtatccatagcccactgctcaggtctatcttaatatctagtttgttttt

SEQ ID NO: 32412 - DNA, 1723 bp, Cannabis sativa
gtaattaatccaatttcctgtggttcgacctcacttgcgtgagtttactacttgattgcgtgcacttgcgtattatttcataattttcgtaacaacaacttatcttcaaaactctcaaactcatgctaaagcgacatcgcctaactagtgcctgcacattagagcacccatgagtcaaggcccaacaagacaaaataaacatacatattgaataattataacaattacacttcatatagtcgccaatgcatatatactgtgtcactgcactttatattacattattctatatataataatgtcactataactagtgtctatatagcacagacccacgtattatgctcacacgtctcttttacattaaaggccttactagggtttgtctcggttataattgacaagtctaacctggttatgccttacccacataactctacttatatatacataatccatacattatgctctcatagtggttcatcctaatgatgtttatcagggctaacctagttatattttatacatgtaactcttgatatataaatatgcatacaatacatttagtatatgctcaaccatatgaagttttagggtaataaccctaccttgcataactctaatcattcactcacataatacattatagcatgctcaagaaaatacatatttagggtagtaaccctaattcgccatatatatatttagcgtggtaaccctaattcacaacaacataattacttagggtaataaccctaatctacaatataaatattaagggtaatgaccccagttcacgacacatattaacttaggctaatgaacctaatttatgctttcatctaattaatcacattgtatattattggatattcatgccaattcatacttagggtaataaccctagctctcagtttcactataacaatcacacaatatataattgcattatcgtgctatactctatgtggataatttattatcttacatgatttctaacgtatgaggacaaatctcaatccacaggtgatcctgacccagtgctagtattcctaatcacaattcttgagtttatacacaatagggttaatctccaattccataaaatatttttataaaattaggactcacatactggaccaaataatagagctctccacgagatttccaacgatatgtagaatgttcaaaatggaattcgaaatcaaatgttatgactaaaataattaacaaaatattttggttctattgaatcgagagggccgcaaccttgcaccaaaggtcacggctcttagccccttacatggagcaaaaatgcccaaaagtcaaaggtcgtgactcacatgaaccaggttgcggtgcttagttcagaatccaaaaaaacaagatttttcactccaaaaatgcaccaaaacacatccacaattaaccatacttttcatacaaacttttgatgcaaaagaggtggtttctaaacctagtacatagtaaaaaaatatccacataaactatacttaatatacacaagattaagaacaaaactcacataatttttatatcaaaagcctagtaaatacaaactcaaatccaatctcaaagtttaacattgctaactctcaattcacaataccaaactgaccaaaaatcaaaattcatgcatcaatttaaattaccacaaagttaccacaataaaaccttgactttcatccatggaattaatacc

SEQ ID NO: 32413 - DNA, 1425 bp, Cannabis sativa
ttataattctttttaaattactaaaaaaaatttatcaatattttagaaaattaatatttgtattaaattacgatttagcataaataattttatatcattcaagtatttttattttattattttaattatttattgaataaaatatgataaattattttattatatatttatgatatatatttgattatatatgttttattattttactttattttatgatttaataatttttattatttattatttattttttgctgcgaattatttatttttatttatttattattgtatatttttattgtaatttaagtttttttaaaaagaaataaataaaatagtctagtcaattcttaaaccaaacataagattactttcaacataattcaatcttgttcaatcctttccagtctaattatgcgtaggtataatagatattggtgcaatgtaatattaaatctcacttattttaattgaataaaaattatataaggaattgctaattaattatagtaataaaatgttatgtcatagaagtgctaaataccttagcggtccataatataatttttaaaagtgtttagtttatgcatgaattaattttattatccttttccactaaataagaagatatttggttttgattcgaaatcctcaatagtgaaagcatgcaaaaggagtttttttttttgagggggcctccaaagttcggctttgtgttaactcccacacccacttaataaagaggataaacacacttgaaaattcacaccccaaaagatcttgtgaacttctaactaataatatataaatgtagaaataattgggaataactataaaagagccaattgaacaaataaaaggttttttcatgaaatttttcccaagtatgcttttttattctcattacgaaattaactacagtcaaccaattttgatcttagaaaagacaagaaatatagcaatatatattcgttttaacaggagtgcgccattaaatcatttccacattatgtgtaagtgaaatttaatggagaaatagatatttgggagattttattggttaaagttatatacttttaggctataacttcataatataataaagtataattgtctcatatggagactaagaccctataaactaaattatcaaaaaaaaaaaaaaaacctataaactatgagcaaaatttctctatcacaaaggcataaggacttggtattgacctatattagatatagtataatagcaatttggcagcatcttgacacttggtaccagattatttatttatttatttatttattatagaccatcaaatatgaaagagttaatcttttcaatagaatttttttccaatcaatgttgtgaattaataagtttttgtgttaccaattcttgtggtgtaatattattacttggtcaaa

SEQ ID NO: 32414 - DNA, 1141 bp, Cannabis sativa
gacatttgcaaaaacacggtttttcacgaaccaacccttgagactccaaaacacttctccaaatgtagcttgggttactcactaatgttgtcgtaaggaaattaccattggcaaaatacgttgctttaaagattttcccgaccaaactatgctcataagtaagcaacctccatccttgcttagcaagtaaagcaagctaggttaaaatcacagaaatctcaaaatcccattccacccgtactcttgtgcttcgagagcttatcccaactcaacctatgtatacctttattgttgtttgatcgccaccaaaacttgcttatcgatcgttcaatatcttgacaaataccaacaggaattaggaagacattcatagtgtaagcagggagagcttgaaccaccgatttaataagaacttctttacccgctcttgagagaaacttgttatcccaactttgaattctgtttgaactttatctgtcaaatagctaaaaattgccttcttatttcttcaaataatacttggcagccccaagtacttgctactctcatcagcctcatgaatacccaaccgttggcaaatagcttatgtcattgtggatgtagtactgctgctataaaaaacagtggatttggcaaaattcacccattgccccaaagccttagcaaagctctccaaaagattaataatgtaagacacttcctcatttgttgctttacaatacaaaaagctatcatctgcaaaaagaatatgagaaaccaacggagcaccattcgccactctacacccatgaatccattttctttcttcataccgtctaatgagagttgagaaaccttcagcacagatcaagaaaagataaggtgagattggatcaccttgccgaagtcctctacttggaacaataggaccaagagtgtagccactgcttacaatattgtattgcactgtggaaagacaaccataaatgagacggacccatttttcatcgaaccccaatcgagaaagcattgcacaaagaaagttccaatccactctatcttatgctttactcatgtctaatttcaaagccatataaccatctttaccaacctatttccttttaagatagtgcaaaatctcaaaagaaaccattatattatc

SEQ ID NO: 32415 - DNA, 2610 bp, Cannabis sativa
  modified_base (1773)..(1773): a, c, t, g, unknown or other
aaaaaagaagcttgtataaaagtccacttaatattagtatttgttatattgtttcacaacaagagtgagatttttcccagtgtgttttttaactgaaaaaagtgcccaaaacttgttgttatattaagtcaaagaaagatcactattatgacgacatgatgcattgggaaaattaagtaggccaaaaattaaaaaaaaataaataaaaataagcttatcaagatcataagttgaagctgagtatagggcaatagctaatgctgagtgaagtgatatggttgttgtctatcttaaaggagctccgtattgagcgtgaaaaaattgcactgtgataacaaggctacaagggaacaatctctgcaatcacagccaaacacaaagacaaacaacaccaaagagtttaagagaaagaacaatagatcaaacacaatgaaaataaaaaaataaagctatgataaaatgagacaagagttacttggttcaaataatgtgattgttactactctagggcttttcttttatgcagtctaataccacatgtattccttctttataatttataccatgcatcttgttattctaaattctacacaaggtgatgtgccatccatttggatgactcgtggagagaatctaggaacctggacggacaattctactcgtaatgagtcgtgcagggagatttgatacttaaagtcataacagaagctgaaacatccgaccatcttccatcatgcatgcatctcgcatacaccgactagtggatgcgagctgataattttagaagatatgtctcgtatagtctctagcttgtgagtcacagatatatccctaaattcatgggatagtttctagctttctctccatatgtatacatataaaatccaaattaggtgtgcaacagaagcatttaatagattatcattgtacaccttaggatctccatatgtacatatattaaatctgaaatacaaagatgaaagagattatttacctcttgaagcatataagggtatccttgaatctttttcgtaagttgtatcctataatggtgatgataaatttacaccttgatcttccttatcttccaccatacacaaggatcagtgtgggctaattaggataaaaaataatgagttcttaggtcttttctcggcgcatgagcaagaactctctcaaagtgaataatgaaatgattacattaacccctttccagtttcctaaattatacatatatatatatagatttaagatataccgaataatttaaactaataaaataataataaaagttcacttaaataagatatttattattttaaatattaaaataataatatttaaatattttaataaatatttgtaaaaaattctgttatagaaatttattagaagtcaaatattttatttaaactaaatattttataatcaattgagagaatttctcaaccacttagaaagaatatctcaactactttacgataacatatcacccatataaaaaatatataacaactttatcaactatatcaaactcaaataaatatttattttttaaattaattaattaatgtaaaaataaatctagtggggcccacaattagtgataggcgcctatcactgttattacaccatgattggccccacttgtaacatttattacaagttggtgtttgtgttatggtttatgctctgaaaagcctgtaaaagcatttatgattattaataaagagttgaacattttgatatatgcatgaatgttaaattattaanatttattattgaataatttatataaatattaaaaaatttcttattcatacatgaggctgtgacttgtagctgtacagagaactaagatcactaaagtatgaataaaattgttaacaatatattaaagttataaaatctttaatcaatggttgctagtatgattcactgatgttcgttcctcggtacaagtaatctcggttcagactactaatgtagtatgacatataagtgaaggtgttgtatataataaatgttatatatgacaatgatcgatatgaataaagttaactttatcaaacatgtcatttactataaagacataattcatatcataacgatgataaatagtagatcgacctcaatccttagtaatcatgaaatcatgttcatgttattagtctctttgattcaatcgttaaagtctctcagagagaatgattcttacaacttctatttcgggaatctaataatgtggatggctaaaaacatgatctacaattatttatttttttaatactaatctttaaacaattccccggcaacagcgccaaaaacttattacgataattatggttactacgcaagtatatgcaatcaagtagtatctcacgcaagtgaggtcgaaccacaggaaatcggactaagtactactaaattatacttatgattccatctggtaaaacaatactttttgtgaataaaatagaacaattcaaaaaattaaaagaagaaatgaagattaatcaagatgagagagtagggaggtgaatcctgctgttaagttaccaatgttaatacctaattgctatccttttctcaatgtgaatgacagattat

SEQ ID NO: 32416 - DNA, 1485 bp, Cannabis sativa
  modified_base (255)..(259): a, c, t, g, unknown or other
  modified_base (1420)..(1459): a, c, t, g, unknown or other
aacccggaccccgacctggacctcgacccgaaccccgacctcgacccggaccacgaccccgacctcgactagcacccggactcgggactcaaactcggacccagaatccgacccgatcccgaacctagacccgaacccgaacctcgacccaggacccagacccgaactcgagaccgggacccggattaaataatactaatactaatacaatacaatatattaatacaagtcaataccaaacatagtattatattnnnnnatactaatacaatacaatataatccaatacaatccaacacaatacaatacaatacgacgtaccaaacgagcccttgatttttatattcctcaattaagtggttgttaactgtgaattgattgttaatatgtataaacactttttcttcataagaaaaatgaataatgatttaatgcttttgttggataaatctccatattaactgtcacatgggaaaaatactttaaacaaattacaaggaaaataaagtaagattttttacaagcctcaacagaccattataactcttggagtagtcagttctgttttataggcttaaatctataagctctttacaataacaactcaagaagtaaataacaacattcaagactccaacaaactatcaacaactcaaagaaaacaagtaacaattttttataactgtttctcaaccaatttttctcagcataacacaacatcaacaacaatataaaaggagtacaacctgcccattttgacagtgataatttcggtccagccctggtgtgttacagcaaccattttcatgaagaaataacctcaaaaattagagagaaaaaccagagagagttagacttttactgtaatacaaaccagaaaaataaaagaagaaaagagagaaaaagcttgagattgccagctgactttgtaacttgaaatctccaaaattcttgtaatcggttttgacatggatagtgaagcatcacgcatctttgagggaagcttgacggagatgtacccttgattttaaggggaactccgaaatcaactcttgtgttcttcattttatttttcatgttggttttttctttagttttctctagttttgggttgtttattcttgtgtgtaggctcgaccatagaaagctcttgaagagcttgaagaagaagacaacaaacacatgaaaagaaggagtgtagaggattaggctgccatgatttcaaactaaagaacaggtagaagagtggctgctattcaaagggaagaagaagggttaaaggtgcagctactagggtttgaagaagaagaatagaagctgagagagaatgattcaactgctaggttttcaagcaagaagaagagaagaagagaagtgatgagcgactgctagggttagaggtgttgggttttatgccctnnnnnnnnnnnnnnnnnnnnnnnnnnnnnnnnnnnnnnnnaaagatcaaaaataacattttatgtt

SEQ ID NO: 32417 - DNA, 1281 bp, Cannabis sativa
atatgactaccattaactgatggctgacttttctattttgtagtattatacgatagcattcacgagctagtagttggtcacctcgcactacacctacacctgccggtgtctaaaattttaaagaggtatttgattgaactaactgcccttagtccaattagtgcaagacgacccaacagtatgttataggccgatggtaggtcaacaactagaaaatcttgcattaatgttatggatataggtggctcgcctacagttaatcggagttcaataaatcattgactagagacattatctctagtaaatccgcagaaattcatcatttaaggttttaaccttacattttgcaattctattttcttcagtgtatcctcgtataggatattcactgagctcccattatccaccaacaccctttttattcttttgttggtgagctgaattgtaatgacgagagggttgacgtgtggatacctcacatgctttgtgtcttcctccaaaaatacaattggaggttcttcagtcttgactttcttagatgattccggagcaaaaactgatcgttcgttttttatttccttgacatatattttttgggcattactgctttctccagcaagatgcaggcctcttgagatgaccaaaatgtcatctccttctacaggatgacgttgtaatctttggttgcctgggttattgggtagattttgctagttttgtccattaccctatcgtcttacatattgttggaaataaccgtgcgagataaggctctctatctcgtctttcaactgacgacactcttccgttgtatgccctatgtccttgtgaaatctacagaattttgtttggtctcgtttatgtcttgcatgtctcatgggctcaggcttgcaaactgcaaccctgtgctcatgtgtgaggaaaatgttttcccgagattcattaagctcggtataaatagtataaattggcatgtacttatcgtgcttcttctattttttcttatccttggctgattccctagagtcatgttttctcttcgtgttagagccacctggattgtcagcctttatcgagatggtacctgctgagatagtgctggtttatttcctaagccagtctttaacaatttcatctcgttcctcgcttcctctttctgtacgaacacttaagctctttcatttaacccattgatgttcctcaccgggagaccttgcaaatgatcccacagctcccctccagttgttgagaggtcagtagtaatccctgcttgaagagcag

SEQ ID NO: 32418 - DNA, 1228 bp, Cannabis sativa
gtagataagttgtgcagctactggcaacgtgaaaaaacttttacctttagtggcatggcaagattccatatgcccttccaccaacaaaccagttggctaagtctaatactccttcattaattaaaaaatttcttaattaacttataaacttaatttaataaatacacttaatatggaatcccatctttaaatttacaactggattacaaaatatttcactacaaaagttgtcgcctagcgactatcaaaataaagccagctgtcctaaagatcgaacactttatgtctaactgtctcgatatttacaatctttaatagctctaactcactgatattcaacctttgtcttgcccttaactacatatgtaaacaatatctgtgatttaacaaatttagtaagaaaagcataatcataacataataaaagttagattataactaggcaaccatacgcctaattataaccctattctgcgtaccatgcatactaagtctagaacgtttgtacaacaatactattgaccataatatctacctacactcaatcctctactcgtatcgatgtgacaacgtcaatcagtactatgccaaacatatatctgtcgatagcagacattacttatatgttaactagcagacatttataaatatgcatgctgaatatgtaataagatatgatattcctatactaatcttaccttgatttcttagtggaaactgctgctcgacgatttacaagcccctaagtctcaatatttgaaaaactgataaatgatacagtaaataacttcttggggacttctagaagtttccctatcgatagatattgtggcaataccctaaatatcaataaaatacaaaaaactagggttcaaaactggtaaaactggtaaattggattccttatacggtaaattgattcttggggtcctgtttgggaaaacatataaaatcaattaacgggttctctacaaaaaccctaaaacttcactacatgctcaaaattagcccaaatcgtactaaactcttcataccacctaattaagccttaacaaacatattccaagcaataacaacaattacaagtcccctaaaacaaaatttaccattaaagagcaaagtttgaggacaaaaggtcaaacactatctaagctcaacaacaaacatcaaatctagcttagaaccactcgagcaatcataaaataacttcaaaaagaaaatataaact

SEQ ID NO: 32419 - DNA, 2133 bp, Cannabis sativa
  modified_base (446)..(448): a, c, t, g, unknown or other
tttaggcaagttaatctccaaattttaatttttaataaactaatctccaaactatacacgttttgacaagtttacctccaaatttttattttattagcaatattaagtccccactcttagatattgatatttttattatttttatttattttaggctaattaggatatttgtcccctgaactttggcatgtatcaaattatgcccctgaatttttaggtcgttaaaaaatccccataaactattgaaattattagatttaaggacttctgtccaatttcattcaatttcactaatatgacgattgtccatgtactaaatcttgccccttgaactttgatatctactaaatcatgcccctgatctttcaaaagtacaaaattgtgcctcctaaattttcatccacataagacttttttttagtaaaattggacaaaaatccttaaannnaacaatctcaatagtttggggagaatttttagcgacctgaaaagttcagagaacatgatttggtacatgtcaaagttcagaaggcgaaaatccaaattagcctttattttacttactttaatttattttttaaaattcaaataattacattttttaaattttaatattttcatataataattaaattaatatatttcattttttctttttttgagtattcatataatatttcatttttcaccataatatttaaaatatgctttattcatatattttatatgttgattcgaaaatttggacttgacttttaagccacatctactcgctagattgatgataatatgaaaattttgtaaagtaattaatgagagacacagcaatttatagtagttcaccccctatatcgcgatagtaatagggctacgtctactttgagtttttatttctcacgaaatggtaattataacaagtgtttaagtatcagaaactccaaactctagagagagaagctctgaccttgttggtagttttctgaaagtgaaaataaactaagggagctctccttttataagtgaaggaggcccacaaaaataggagataaaatgcaaataaagcagttgtcggaggaatttgaacaacaccaaactacgtgtacataataaatgaatcgaacaaaaagcacggacactcacttagagtagcgagtattcaacagtgagctaccaacaacaaaagaacaactgaaagataataaggatacaagaaaatatagtagttcagtcagatcacggtttgcttagtccactgttgcaaataatttttgctttgtttatttgatttggatcactcctttatataaaaagcaagtgtccttttagttatacatgactggtcggttttagaattgtttttacaataaatgacaatattaaatgaaaataaatgtaaaagaataaatgaagaacaatttaatacgttcttgtattaagtgcagcaacgtatgcgacttatcgtgcatgagtttcctgttcatattctcacacaagctcgcaagctttaggtgtgttctatatttgctgaatggttgatgggcttattgctgggatgtctatgttcaccttgaatcgcattgacgaacatattgcgtgttgacaacatgaggcatgcaatcctgtcaagtcatcaagcacgattcgtcattcgaaccaattatcatgtaaagaagtgatcttcacttagtcgtaggagaagactacttagtcatcgcatatatttcgatatatgacttgtataaaatcctttcggtcccgcttgtctttggctatgtaaggcatattatgcgactagaccttgtcaaggtggcatcatcttgcgagttcagatcaagcgaggctaatcccttgagagtcaataattgataattcatccttttctcgggaattgaatccacgtgtcaattttataggagactgctcttgagtttctaagcaaaaaatttgcactataacaaaagcattttccaccattgatgatgatccaacagtgaaaattagtttttggtggtgatggctaattttttatgtctggtgggtcccgctgcgagttaccagagcttatttttgtaactcccttgggggtgaacttttacaatgatagcttttgaattttgactaatgtatgagaca

SEQ ID NO: 32420 - DNA, 1341 bp, Cannabis sativa
gaattgtggagaatggatggagagagtagcattgttcctaataagaggttccttctggacacactaggactaggagcatttttttattcaaaaccaaggctctacaaatttcacaactgcatcggtcagcagtaagcaaaagcttaagtttgtcacgaggatggattagtaaaacatccatggtgggaacaaccttagtggcttgatctttattagatgatgaaacctttacaactttacaatggtggaacgaaattacatcaatggctccaatcacaaatcagcaaagagacaactcttctaagtacatagtacaattctcaactctcttggttctatttcctcaattcatgcctttcaaacttgaatcatccttttatgaaattttaactactaaaactgtttatctctctataaagaaatatatgagaatctttctctcacgttttcattctagttttagttattagttataaattctacaaaaagtgttaatatagagtatgtaactttacaattttacatctgtatcaaaaaaaaactttacaattttacatacatttttaagagtatttccaactatattctctgaacacattttttaattaaaatatgaagtgagacttgaaaaatgaattccaaccatacaaaaatagctcaaagagctctctaaatgtaaaagtgctccttacttttttgcttattttttgttaataagtattttaatcaaaaatactattactttttattataaaatattattaaaataatcaaatattaactagcaacaacaataaaaattgctctctattttaactttttagttaagaatattaaatagatgctctaactgactccaataataaaaaaactatcgtttggtagacatttgtttctgtgttgaacagtgttcgttaacaaaaacaataaaactgggatggtgatccatagcacatttgagcaagtgttgacagttcaattatgtgagagagtgaaagtagattgtacatcaattaatacttgagaatatttatataaaacatggattttgccctggagttttacaaaactaaaactattctacagattaagaaataggctgcgactaagttatacatcatgaaatcttaatacatataattcaatggcaccagtagagcacactcatgatttaactacttcagaaatttccagttagctctcttcagactctgcaccaaaattcacaaaagaatgaaacaaaagattaagaaaagcacgactcctgctacaatgtcaagaaaggaagaaagttgaatttgctttttcaaagcaaaaaacctttttgcattttacctaagc

SEQ ID NO: 32421 - DNA, 1569 bp, Cannabis sativa
  modified_base (70)..(79): a, c, t, g, unknown or other
ctaaagggatactttcttcctctctcacacacctctaaggctatacctctctctcattagagatctgccnnnnnnnnnnatgctttgtaaccttatagagagctctatcagatcccacatattgtgatctgaatagtattatctctaggtgttgacctcgcttttagccataacagtgagtaaaataataagcgatctaataatataatcaaaagagaacaaaaacaattaggtaaagtgaacaccagattttaaagaggttcaaccgcgtgagtgtggtaatagcctactccccttgtattgtattgacttaagagaaggaacaaagtgttcttcccctttgaaagctcgtacaaatgatctctgggtaattctcttagatcactattttctctctaaaatctctctctttgaagcaattcttttgatcactttcatagtgaggctaggtcactatttataggggcttaatgcatgaggggtggttttctttttgcttacaatgaacaaaataagaaattacaatgattacataattacaatatatgaaatatgaaacaagagcaggttaccatatttctctaactcaatcccacgattatagagattgtcttcatgtctgggcataacgagattattgtaaagttactatctcttgtaagttgctcgacaggcatatccatacctggttagacatcttcttcacaatcctgctcggatgtcgaagtgtgacaggtgttgtagggcattcacaggctgcccgggacacttttccctgctcaggtatcaagaacatgggacacgtgtcattcagttctactgccacgttgaggtacaaaaaataggataacatttacccccaagtctgtgcgggaccttcctagtcgtacgtggacttcactcaatctggagtcttgttgagatgggtgatgcgtgtcctaagtatcgaatgatgaaatggcgtgaccttgactaggggtctcttcaatttctacccatttaatgctaattgatagttctgcctcgaattacagttcgatgtatgtgtgtgcttgacggttactcttctgtaatgagtacataacgtacacttttagggggaattcgagaaatttaaattttgaaatgattacttccttttttgaactacttatacataggattgaaaaccttaggtactccttttcgtcattcttattctagaaaagccagagcaaagaaattttcaaacgacttttctctcatgttcttcgatgaattcccaggaaactattgttaacaccatccgagcagaaccaacagcttcaaaccagtgagtaagttttttatttctttctttcatacccttagatgcttaattttttgggttcctgtctgcgaatcttgactgttcgtgaactattctaggataaccatagaaatcttaggtttaaaatctagaaatctcaattaaacttaaccatgatgtctgattctaactgccctttgattttaaccccacgatatccattttcacttatccattaggtgtttagtgagaattagattccaatttgaagttttgaactt

SEQ ID NO: 32422 - DNA, 2379 bp, Cannabis sativa
cgctcttccgatctcatggtatcactctttaagtaaaaaatctcatctacaatgtcagaagagggcatgtaaggtgacttggcaggaggacatgtgttgagcttcaaaggctccttgatgggtgtccccacaagtctctctctttcccatacgggcttcaccgagagatccttgcctttggagagctcagccaaagccttgaagatctgagcagccccgaaaccatcggagaccatgtgagatattccgaacccaatggtaaaacctccacatgcaaatcgggtgacttgtaggacgaaagggcagtcactcgtgggagaaggaaagacgaaattcttggccatctcaaaatcgatatcgtccaagtaattaagtgaggaaagacgacagttggcggtggcgaccaaaaaaggaacaccagtagcgtcgcaagtgagctggagccttccatcgtgatctagccgtttgagtctcccggctagagggtagtaatagacgagtgcgtcggagagagcttgcttgatcatctcagctgggtcgactccattagtctcatgttgggccttgtatacgtagattgctttggaaaagcattcgaggttggcctcgttgtcaagagtggacaaggagagaacttcagaaggtgtagatttggcgggcttcacaagctcaacttccttcttcataacagtaaattcagttgtgtttagtgtaggagccatattaattgcagtaagtacgtagtattgaaatgaatttgatgattatttaagaacaagctaagcttaataagggtggtacgtagcttgaggggattatatataatactactgaatgaaggtgtgatcgtagtagctagttagtgatgaatgaatttgaagtggaggtgtctcgtatttatagtatagattcttgcacgtgtgattttgcctttggttggtgggttcttgtttgtgtggcgtgctacatttctttatttgaattgacttaattgactccaatatatcacataactttatatatttctcatttatgtaaaataaatttatatttataagtcttagttaattattattagatttgtatttatatcatacaattattccgacttgtggtttttgacttatttaaaacatatacctatacagatttctttctacaaattaacagaattatttctttattctttatttttttttttatgatgaatattatattatttatttgtaggtacttatggtcaacaaattgtgtctcctaaatcgaaagatataaaaagactagacataaaggtaggcgcggccttttggataatttctgagaaagtttcccttacttttttttttttttagaataaggcatagttgttggtcttaataaaaagaggtgttttagtttattttgaatgggataccatttgaaatttgaaaccacgtcatttcacactcactttcctagcttatccctacaaatataattgtgagtagtactatataaatgataaatttgtcacgttaggttaaccggtgccatataaaaaatggatgtatcatgttaatatttaattatgtaagctctaactaaatggttaacaacacctcagttaatattcaaatttaaaaaaatttgtttgtaccctaaaatgcacaacccaaaaataaaagtcatatataatgaacttcaaatagcatcaaccaactcaacaactccttaaccccaaagaactctccactgcctctctctctttctctctctcttaatttttctatgatctcacaatttttgtttcttgtttccaagtgtctttgttgacatatttttgattgtttgtattaaatcagacacaatttctctatattaatcatctccatctaacttaaaacgaagtgaaattaaataaatatatgtaaatataaaaattaccttatagttttggttattttgcttataaccgaagacatacactatcctatgacctcagttattagcgaaataaccgaagccatagggggtctttactttcggttttttcaaatccctttagctgcacatacaatgcctacggttgcgagtttttcaaaaatcgaagctaaatggtcgaaaaacccatacttaaaggctttttttataatagtagctattgggtgtgtcgggttcgaacctcatgggtgggctgagtttcgagcctccatttgcagccctaaaacacattatgtttcttagttaaattaattaaaagtggatataattaatattttttaaaaatgaccatatctttatatattaaaagtgtctatctaacggcaattcttgttttagcgattcttggtttaacaattctttttttttatttagctttacacgattaacttaacagac

SEQ ID NO: 32423 - DNA, 4425 bp, Cannabis sativa
taaatgacaaattgaactttgtatctttttaaatagtaatcttaattgattttttgtcaaaataaaattttataataatctgatgaagaaactttatgataaaaccgattactttatctattcgtgttaggaattatctttaaattggttatattaaaaaaaaattatcaaagatcaaattaagtgactgagaaagtggcttattgcagcaggctatattggctgattgtggacaaaatttcactagtaatttcaaagatagaattcggtagtatcgtagggagattcaacagtgaaagagaggaagggatgctacttcaattgagaaatatagagaagctgaaaaatactttgtttgagatttacactcaaagagaagtgctttgaaggcaaagtgcaaagatacaagcaactttggcttaaagaagatgatcaaaatagtaagtatttccatgcttatgctactgctagaaaaaagcacaattctgtatctcaacttcaagattcgcatagtaattggattagttgactccggatttttaccagcattgttggagtattgtaggatcagggttactggtgatatgccacacggtcttaatgatactaatatgattcttaatacaaagatcaaaaatctacttccatgaacgatcttagaccgacatcactttgtaatgtcctcaataaaattctgtccaaagttcttgccaaccgtcttaaggtggttttaccgtaacttatctcaaacaaccaaagtactttcgttccgggaaggttaatcactgataatattatgatctcttatttctcttatcatgaagagtgaaaatgtgacacttaacacaaaacaaaagctttaactatggtgttgaaatagtttagctgaaaaagacacaagtttaaaacaaaagtgtgaccctttatttctctcatgataatatccaacttacaaaaaatttatttcacttggcatcacggctaagaacagataaaagagctatgaagtaaactactgaacatctcctatttatgatctctacctttttctgtccaactccaacacatcgtcgtcctggtcgagtgcttatcagtgcctgcgccaaatctacaaatgcagacttctgtgcactcgagcgaacgatacagttcatagtagaagtaacttgcattattagttcttgtagtacctgttaagtacttttctgaactcctatcgatgagcttcgccagcgtcttttctttgatgtaacctgaagcaaagatgagtaccagcaaatcagaaatggctcattaacacagcagcttacacattgaagaacaagattcaatagttttggatcttgaaataaaaaacatatgaagactgtaaatgtatctgtcatataactttctagacaaaatttcaggaacaaagtacttaaatataatgtattccatctcaaacccattactaatatcacagcaaaaatatgagttttcattttctttgtaacaaaatagagagataatgatgacaaagataagaaaaatctggcttggctaatggctatcctcaacaaaaaaccatagtttagacctgtttattattcatgcctcatttcaacactcacccaaaaaacaagtgtcaaaattggaatatattattccaaattataaagatagcaaattttcagtaaaataagcataaactttctatttgtgcaagtcattcaatttatgaaaaggaaaagataacctctaaagcttgccaaaagttcatccaacataagctgatattgccatttgagaacaaagacatgacataagctgttaaaaaagcagtgacaaggggaaaaaagttgaccttagagtatgcgggcggtaatgaagcttggcgctcaacctttccaggctcattcaattgtcgaatctctcgaagctggcctgctatatcctccaaaagttgcaactggagtttttccctctctctatgtccaacagagaaattaagtttctctcttccctcttgtactttccttaacctttccctaagccactcgacttcattctcgattttcaatctttcatagtcaactgctgacattgaatttcgtcgcatatcattacgtgcaaatttttctcgagaatttccttttggtggtaacccactactgcttatgtctgaactacttctgtttgcatcatatcgagtttcgaacatactcaatgacatactaccccatcttcttgcatgagttaaaggagcacttgcagactgactttcactttttcttactgtcactttattcgaaaccttagattcatcatcaataacatgaacatcgaaaacatgagactctgtatcaaccaccactttaggtggctcagtggattcgagacatggaatatcaaatgcctttgagggtaagtcattggttaaatcattccattctgaacatccatccaatctctctacctccttttgttggcaaactatattctcatcaatggtacattcttcctgctgtgattcatcgttggttttagtgctatttaagacatgagaatgtgaatcaatatcatcagccagttgaggaatttctaattctttcccaaaagtaagagtgttactttgtgaattgaatgatgctaactcataatctaaagagctatccacaacttcaacttttggtttctcactaaagtcatttatctgttcaagcatcaacaatggatcttgttttgaataaagagtagacgactcatgttcgagaacaccagttgcatcttgaatctcgaaatctgattgttcatttcccaatatcatttgcctgtatgcttcaacctccttctccaagaaatgcttttctctctctcttcttaacaaaatctctttgaaaatgttcatttcctcagcatcataagcagctttggcttcaatcattctgtggtattgcctggcttccatctctatcgacgccttttcttcttgtaaacgcaatatcatggccattgcctcatctgcagcagtagcagcagcacttctctctttctcaagttcaaggtacagattcgatcgagcagcatgctcttcttctaatgcttgttccaacgttctaatcatattcgtctgattgtcatcagaattcaaattccttagcgcatcacaccccaactctttaactgacatcacttctcttctcacttttgtattttcttcaattgagttactcaattcaagactaagtgaaactttatcagccgaaccatattctgttgtcgcttctcgaccatctaaaattagattattagcataagaaaacaaagcagtgtgaatacttgcaaatcaacaaatcatgcaagcaagaaactattacatagaaacatttccaacaaggtcaaataaaatagctctatataaagatgagcattacctccataattactagaatcttcagcaacttccttcccgaatttactgatgctggaaggagaatgaggagtgttccgtgcatctgactgaaaagtatcatatgatgaaaacggggacaactttccataaccaactgaggctcccctgcgacgacgacgaagaccatgtctaagcctccgcccttgaaccctctttcccttaagattatcatactgatcttccttggaagcatctaagttcgcagtgccaaactcaccaccaccaagcttaatcgatgaatctctctcagaaagatcttgtaagctctgtggaaaggagctacttgaggctgcaaattccaaatcagcatgcctattttcataaatgctctcatttcctaatttcacacccgagttttcaatttgttcgacatcccaaatggaatcaaaagggaacttactccttgctgtgaactgaactgaagagatcttctcatatgggcaatccactaactgtttttgcaagcactgattgtttcttgggttccaaaacaatccatcacaaggacatggcaaacacaatccaaataaacccaataactttgtggcaaagaaagcaagactcgaagcacaaagcaaaaaataagctattgagagatcaagaaatgcagccactaagtcacaaaatgtccatgaattcatagcttggcacaccatatccatcaaatttcacacattcctgttccattaatcaaaacaatcgattaaaaaactaatcaacacaacaaacaaaataaaaccatactataaaccaactaagtctaagataagaaaaatcagtcattcacaaccactgatgaaggattagtaatcctttttagaaatcgaatgaattaagtcttatattgttatacacacacgagaaaggtaatcaaaaaagaaagaagataagttcttctttcttcatcacttaggagcatgaaagtctcgtgcacggttttaaatgagagaaagaagtaagcaatcctcttt

SEQ ID NO: 32424 - DNA, 2637 bp, Cannabis sativa
aacactgggtaagctgtgcaattttacattacctatggaagatcaagtgtgatgattttgagacttatgtaggtatgagactacactgtgtaagtgcatcttgttttttggtagcccatcacagaagaactccacagttaagcatgtttgacctagggtaatttcaggataggtgacctcttgagaagttttctcaagaagcgtgtaagtgaggacaaagcacgctggatacactcgtattggtctgtagggctagtcattagtctaggaagcaattagagtgacgtactcgtgtataatagccataaatctatggggaaagcctaatagaggcttgaagcgagggtgttacaataacaatattaaaatcacgtaaactacaaaaacccaatccaccattatccttgtgaaacaccaatttctcccaagacatctaaagaatacccttacttggagaggttgatcaccttcaatacactacaagaaaatgaccatatttcaagggttaagaacccacgagatagacctatctcagcagttatcaaccgtaggatctgaccgtcgacacagtggtgatgaccaatcttggtggttgggaactgccgagataggtgtaccacatgctcacacatgtacaatcttagcggttaagaacccacgatataggttaataacagtagttttttaacagatatcgtaattgattttaggacgaaaaaataattttttttttaaattttcgcctgcattagtattcacgatatatatataaatatatattgtagtgcaatattgtctaataaaatgcatattattaatttattttaaggagggtagaatgtaacactaactttaatttttcaataattatgtgtgacaatattaatttgatagtaattgcttataattattttacttgtgggatgaaaaggaaatgattggataatttagaaagtttacatttttttagactaatcaatattatggtattattcaaagttcatagtagatatatcatcaagaacttaaatataatgtacagtgatgaatgaatggagtttaaccaaatgtaatttagtcttagataattaagattacatagtaattaagtaatggttataattattgtttgcgtgttataactaattgattgaagataagtattgatctttttattctggctatttttgatgtggagatcgatgtgtagagagagaaaatagggatattggttggagataataggtcaaatactttttaaatttaagttgaagatatttagagtagtatagtatgtaagttttatattttagtagttatgatatcttgatataagccacttcaaaaaaaaaattcgtcttatattgaaacctccatattcacacgcaccacaaagatcaaaagttgtcacacccaatcatagttcaaaaaaaaagatcttagaacaattaatcgttcaagaagtaacttcagtagagtttcgactaaagggtgttctacctatagatatgtccgagtttgaggttgattgtttgagtggtttaagattgtttaatcacgtattaatttaaagtcgtgttattataagtaaggtgtagtttagaacatttcaagaaggcttggtgcaattattctcatcttcggtctctgtttccatgcttaaccattaaggtaaggaacccctaatactcttttattggtctaaaatccataatcttgatctttctattttttttctaaactgttagtcacattaaaactatcttatctctctgaatactgtttcatttttaacgatcttagcattgttggaaagcttattcaaatatccatgttttctataaagaaatatccattgttcttccttgataatatcaataccactcaggaatgttggaggttgcaacttgacaaacttttcaaaaacttaatccctatgcggttgcagagttagtctagtgttagctaccactagagcaagagatggaagaatcacttgctctactagagcagcccgaaccaattgcctaattcgatgcaacttttcttcttgatgaagtatgatagttcgcatttcaataaatatctactaccattcggtaggaggattactattactcactattgcattatccctaagattttatgaaggcattggtaatgtcagtggaatggtttgattagcatcatgttgtacatgtttgccctgtgatctagttaatttactagggcccattctttcaaataccctgaaatcaaaaatcctagcgagtcaggcaccaattccacacttacacattttatgccaaaatcctaagttaacacatacaatttattttgacatatgacaatacttattcacaaataataatcatgcttttcattaaataacattatcttctagatgctcatatgttgcccattaccaaaagtagtaaacatttaatcacatatgcagataagtatttactctcaacacttattgcaccatgagtcgagcttgtctttgacgatgattctacatgttcagtcggtcttcaggaagtttaaaaaccttggtgctttgataccaaattatgacaccctaattaaagggatattgggttttgtgccttaaataaaacctatttcaatata

SEQ ID NO: 32425 - DNA, 2348 bp, Cannabis sativa
atgtaaaatttatgttaaatttgatataaaaattaaatttatactgtatttagctcactatttataattatatttcaaatttttaatacataatatataaaataaaataaaaaaatattattatattgataaaatattaaatacacaaaaataattaattttagtgagtttggaagttactgttacacatcatagtaattacactatattttaaaatataagacgtgtttagataggaggtgataattacttataaaatcttaatgtcttgtttggcaaaattattaatttttacacgagaaaataataatttttagtacttaatatttataataaaaagtttttagtaattacacccaggagcataagaattagagagtgtaattgagacctctcaaatattacttttaattgtgcagttacaatataattacgtattcaaacagatatataaaagtgtgtaattaccttcaattacatctaattctaattccctttaccttttgaaatgcattatattgtttataaataatggtaatatggtaaatattaaataaaaaatttaagttttgtaaaagtcaataaataataataataattagtgacactatagtaaataaaaagtaacatttattgtaagccaaatttaatacaatattatatcttttgctaaatttgacacaacttttagcatgtgtcaaatttgacacattttttagaacacaattggagtaattaatatatatatatatatatatatatatatataacaatacactacttttttagcattccattggataggcatggcaatatgatttgatttttccggtcagattaaagctctgatctgacaagggagtttcaatcctaacaaacggatctcttatcggatctcggatcgaataaaatccgatttggtaaaaattatctagattgaatcatacctaacccgccttagggaattttttaaagcaattaataaagataataatatctaattaacaacttaacatcaattacaaaagattaattttaagtaattgacatactacattattatttattgataatagattttatacagtttttttagttttgctaaaacaaaatctattaggataaattataaactcagattctactattattgaatgattaaaaacataaagattttgattattttttttttactcttataaattagacttcatctttgataaaatgtaaacatattataaaaatataatttgataattaaaattaataaatcatatttgtaaattgtttattttattgggttagatatagtcatacatgagttttgatacaaagatttaaatttgtaaaaaaaaaaaaaaaaaaagagttgaagattcagatcttgccggattcgaaaaagtaaccctgcagagtgaagtgagttggatcaacgtcaactagttcggatcaggtcggatcatagtgggatcagatccgatccgatccatttcacactcctaccatgcttttattatctttctaatcaatatacactacaaaaaagagctatttttagtgtcatatatttttagtcacaacataattttttatgattaaatgtgcttttagtaacaaaaaattacttgtggttaaaatagaatttttagatataagttgtcactaatttatttttagtcacaataaatattgtgattaaaagcacatttagtcacaataaattatatttttttgattaatacatttagccacgaactttttacaacataaaaataattataattattcacaactttttaatttttagttaaaaattttgttgtgattaaaaataaatttttttatagtgatattttaacaatgcacatttactttcagcaagcatataccattatgaagaatgaagatgtaaaaatatatgatatttaagacaaaaaaatgattttataatatatttgtatgaaattttagtattaccttccaatgcctaatgaaaaatcttgttacaaaattaaacattaattaatactttcatttaaaagatatatatttttataatgtaaaaaggtttatattttaagactatagctctataatattattaaaaaaaaacattaatgtaaataaaaaataattaatatatttatggtgatgcaaaatttatataatagtaaattttgtgtttattatagcaaagcataagtgtgtaagacttatttgcatctgtaggaaccttgtacatgaattaaaatatatgtacataaagtgttgagcttagaaagagaaaaaacgaaagcttcatgtataagattttctggaatactcaaagataaggattaatatgcatt

SEQ ID NO: 32426 - DNA, 1660 bp, Cannabis sativa
  modified_base (1632)..(1634): a, c, t, g, unknown or other
ttttttcacagttttgttacagctgttttttctcacaacacaactacaactgctttttctcatagcacagctgtgccaaactagcccgtagtctattttcatattttcccttaaatcgtgctttaatttttcatgtatatggaatatatacttaatgggtattatctattaatagttaataaataaatttaaactataaatattaatttaattacttaattaaagaaaatatttaaaaatatttcttttttacactatataaaaaatgtatttatatgaaaaatatttaagtcaaatacaactttttttatcactttttactgaaaaactttttttttttttttttttcagctgatggattaatcccaacccatataatgtaaaaatgagaatttttttaattaaataaaaaaattaatcataagtatcaagattgagattgacacgtacgtattatattatttattggacttttttatgttgcttatagataatttaacacaatcgctcactaagcacgagtagttattttctagttataaaaatagtatggaccaatgctctctctcaagaagagcctgcttgacggtcagctggaaaagcttgggaaatccatggatgagttgctcgcgaaaacagacaagctcactgttattgacgatgacggttgggaaatcaatgaagatgggggatgagaattggggaagttctatgctatggggagactctgttctaatcgatcgatgaatcgatctctgattaaaacaattctgggacgtatgtggggtttatcggagagaagctggggagtcgaaatcaaacattctttgaggaattttacattcttggtgttctccttcaaatcgacccaagacttaaacagaattctcttgaagagcccgtggttcttgaatcacggtactttaatcttggatcgaatgagggagattcctacaaattgggagaagactctttctcggacacagttgagcggtcgaattctttcagtaccgcctagggcaattactcaaaaaaatctagttcgtcttgctggtttggtgggtgaagtaatggaagttcaacaagccgatgttgccaaaatttcctcaaaaggattctttacgttcaaggtgtggtgtgatctggataaacccatctgcccggggttcatttttacgcacgaaggaaaatcaatctggcttcctttcaggtacgatcgattgcccttcatgtgttttaattgtggttatattggtcatgagatgagggtctgtatggaaccaatcagaagggttgaaactgagattggtaattcctcacacggtcttggaccgtggcttaaggttgaggataaaaaggacttgatgaacatatttgggaaggggaaaaatggcttaaattctagtaagggatcagtgaaacctagttctgaatcttgtgaaaccccgatctcgttgaagaagactgtggggactggttgtgattccggttcttttgatggtaccccttctcggcctattcctgctgggattcctaaggatgttggcactgatattgggagtgtttcctctcttaagattggtgattctggaacggatgaattaaagaagggggtgttgggttttatgcccnnnataaaactctttacaatctgattagt

SEQ ID NO: 32427 - DNA, 3220 bp, Cannabis sativa
ccaccattgcttcttctgcctccttctttcacttttgggtccaatttctgcctcctttccttctaaaatacgagccccttaaatgaaaattagagttgctacctctgaaaaagtaaaaaactgaccaaaaatcccgtgtttcacccctagtcgcgagcacataaagcctagtcgcgaccataggaaaaatatatataaaaaaaaccttgctgtctggcctcctagtcgcgactatgaaaaagggtcgcgaccatggaaagtggtggtcgcgactactgaagcaaaatttgacagcttcagcatctttcagtaaaatgtacataactttcatatacaaactccaaatgagttgattcaagatgcgttggaaagaagaaaaagaaatctaaaacttttatgttttgactttttccaaaatatgaccagaacatagtcaaattaaggcttgaagtttcagttttgttttcttgcagaatttcctctattctatagattgttgtttttcgaattttgatcaattgatatattccaagtgtgaaacctgaaaccaaagaaaacaagcataattatattctaaatataataataaggaaggaaaacaactataaaaagtgacccaaaacgtaggctaaaaatagcctaacaaaaggtaaccttagaactctaatccttgtgttattgaagctttggttttggtttgaatatgcaaatttgtgaatttggggctgctaaggttagatttgtttatgatttagttcctaagttcaatttaagttagaattgagttcttgcagctggtttagggttgtggtgtagtggatgcacaagtttgagtttgaaaactcaagcttggttcatccatgccactttttgatgttgtgtgaatttctgggttttattgcttagaatttgtagtaagtattctagaaattttggtgcggtttggacacgtttcggacatgttttggattgcttggggaaacctggtgcaatctggttaaccggtttgccaggtcctgtaaaatcggtttgccaggtcctgtaaaaccagtttgccaggtcctgtaaaaccggttctgggacaggtttcccgagcaatccattttgtcaattcgtgttgttttcagagccttggttgggtgattccttgttacttagggtattgtagttttagtagtcaatagcagaacctttagttgaaggtttgagtttcccgaattaggattttggcatattatttactcgattatgttatgtgattaggacatccatccagcacgagattttccgttcaggtcggccaactcacatgaatttggaaacaaggtaagaatagcgtagaacatatgatatatatgcgaatgtatgtatgtgtgatatatatatgcatgcttgttatggttagtacactaccaacacttgtacggaagtggtatagagtgcattggtgtagtgtacaatgtttaaagaatacgttatcgtgttaccaacacaagtacggaaaagtacagggtgtgtgtggtacaacagttagtggtactcagggtacgaaacaaaccttaccaacactcgtacagtgttggtacgtagtttatatggtacagtggttgtaccctagtaaagaacgttcttactcatttgttaagccttgtaaataggtgtatgggcacatagatacaagtcgatattatattatttgttatatgcttttcttactgagtttgttaactcacaattgctatttctatgtgtaggtaaaggaaagacaaaggctgaacatgagtgggcttcgagctaggatggtgtttgtacatgtcatggcgacgcaacctgaaatgttcgatttcgggacatctggagttttattttgtagtcgctgtgcgactaaactaaatatattttgataatgttgtaaaagtttaaatatgggatcccaacttttgtaaataaatgtataagaagtttgtaaaatttagtaattaaatataaatttttaatttgacacaattttcaagaaaaatcctttgattagcaaaggtggcactgtaattgaaaaatcactatagcgcacctaagtatcagggtgttacaagtatcagagccgccaggtttgtttattaaagatcgtcaagacatgtacaatcattatcagagacaagctcggttcacggtttagtaagcctttacttgtttagttgtgtatgtgattaataaagcatgttaggaagcatagtagtttataattgtttattttaatatgttgttgttaggctatttttagcctacgtttttggtcactttttatagttgttttccttctttattattatatttggaatataattatgcttgttttctttggtttcaggtttcacacttggaatatatcaattgatcaaatttcagaaaacaacaatctatagaatagagaaaattttgcaagaaaataaatatgaaacttcaagccttaatttgactatgttctgattatattttggaaaaagtcaaaacatagaagttttagatttcttttttttttttctttccaacgcatcttgaatcaactcatttagagttcgtatgtgaaagttatgcatattttactgaaagatactgaagctgtcgaatttgcttcagtagtcgcgaccaacattttccatggtcgcgactaggaggccaggcagcgagcttaatttttgtattttgcctatggtcacgactaggctttatttagtcacgaccaggggcaaaacacaagatttttggccagattttgactttcaccattcagagttagaagccctaattcctatataagggttgcgtgttttagaggcaatagaggcagaaattaaaccctagagatgaaggaggaggcaaaggaagcaattgtggcagcccggaggaagatcaccaactagttctttcttcccctttttatgtctttatgttaatttctatttcaatttttatggatgtgaacatgagctttttgaactaaattcccaatttagggatatgatgaatgttagatgatgtttctttatttcagttaatgtgattattagtttttcttccctatatcgtgtgatttgttcttattcattttaattacatatttcagactggccatcttgaatgtgatttatgatcctaatatgaaatctgagaagtgaatattaggaatgctctaataggacaaacataagttttgatgtaa

SEQ ID NO: 32428 - DNA, 2646 bp, Cannabis sativa
taaaataaattccaacacaaactcccacttgcactaatataaatctaaaagtgcatttcaattaatctcaacatcttgatgtctagatcagatataatatgtagtattatctttgtaatacaatctgaagggttgtattcagttaccaaccttctccaccattacatctccttaatcacaaaatcgttgatattgtgaaattcatttctatatgtttcactcttcttagggtactggattttttactatttggcaactatatttgtgttgtcagagtatatttgcaacctgctgactgtaaggtcttatgcgaggaaaaaatatacaaactattgcctagtatattaacgagaaaccatatgtcgttgaatttgaatggtgaggcatcaagtacgttacatctaggaagacgaaagcaaaacatatcgactgcggaagtacttagtgtataatgtacaaactaagtataacagtcgggttagcttgagacctaataagcgaggtgccaatctcgctatgggaaggcttcttataacttcacccagttaacttcacatatcttctctgtgaggcttcaaatcctaacgagtcagaagctaacattcaatgagcctcgaagaaatcgttgtaaataataaccgcgatcttcacaaagaagcaacaagacgtgtatcgtcgacctcggaaggaaaaatggccccaactcgctattatgattactggaaccaagcttttgtcgagacatccttggatacaacaatgaaagacgtgtttaaatacacgatcgctttaacctagtaaaagttggaaaatcacagctatataattttcaaataataaccgtatttacactacatgatatgcaatcaaaccccattattttaggggatgatcgttataaaaagattacagtcaactttgtaattaactgcccactatgtgattataaatagtggcaagtaagataaaaaaagagataaaaaaaatcatacaaaagaggcctgagaaaactatcagaaatttgaataagattgactcgtggacaatgcagaattttaattgcaaaaatccagtgtgttcatacttttgatttgacagcctttattttctctgtgtgagattgtcactgctaggctcaattttggtcaacgaaaatctgcgttaacagtttggtgctttcattgagagcctctgtggaaaagctcagaaaaaaccctcatttcttttgaagaaaaaccacctccttcatggctgaaaacccagaaaatgttaataccccacatgaggaaacttatcatcgtcctgggaaagagcccatgggctctagaaggtatatcaacccacagtccagatggacctcccgtttcaggaggattcaacttgagggtggccccagcacaccaaccacacgttcgcggaggactcaacctgatgttgatcgtagtacgcaaacaacacgctcgaggagaacttagcgtgggagtggccagaaccctgggatgagggatgaagagcccaatcgtggaggtacccagtctatgggagaaggtacttatgaaatggaaaactgccgcctaagacactgtttggaagaggcgcagcggcaaaacactgaattagaacgtgatgctacagcgaccagggtgacataggggacgaatgctcaaaattaacctgaacttggaatgagaagaccacaaggcaggcctcgtggctcacgaactaagagacaagaaaatgcctgggaagaacaacccagggaaaatgagataccccctgaaaatcaaaatgatcaggcagaaccctctcaccgaaatgagaatgggaggcaaccgaaaacttatgaacgagaaattcctcatgacaatgtggaggatcttgggactcaacctggagaacgtaggtcacctacgagaaatcaacagcgttcttcccgaacccatagagcgagggctagcacagaccctaatgggggaaatacgacaaaccacactaagggggaaagaatagagcgtgaagaagcaagtgtgacctcgaggcggtcaaggacccacagtcgatcaactcgaagaggagaaagtactcaacgagctaatgatcgagaaaacatgggaactagtaaatccgcgagttactcaaagacaaagtctatgagtaggacaaagtctatgagtaggacgcgaattatgagtaagacgaggtttatcaacaattactcccaactggatctgtgagagcacttgaatcgaaagaaacctgacctttgccaataactcagtccaaagcaagaggatcccatccaattgcgaataaacgaactagaggataagttcaggagatatcaagtgggggaactagggagacaatctggatacgactcagacgaggagcttgagctgtatcatctagatattatgagtaccccttttcctttgggattaaaaaactcgcatgtctcgtcatatgacagaaccactgatccggtctcgcatttgaacaactttaatacaataatgcgagcgagcaatgtaacgaataatttatgctgtatattgttccccacctcccttgttggagtagcgagcagctggtttaacaagtttactcaccattcaataacttcttgggagcagctgtccagggatt

SEQ ID NO: 32429 - DNA, 1636 bp, Cannabis sativa
  modified_base (1607)..(1608): a, c, t, g, unknown or other
attataattttaactatcaaaaatacttaaagatgaaagaaattattttaagaagggataactataagcatatattgtacaaattattaaaataaaactaaaatacttatgtaaatacactaggtttcatcgtctatcttaataataagggaacttagaaacccataaaaatattaactaaaaaaggcggtaaactaacactgagtgctttgatcgttttttctagaattttctgtctaaaactatattgaattttaaaaacataagcctctatttataaaaagataaaaggactaatgtgcaattaatttattaaaaattacatgtgggtaaaaatgtaaatacgaatagttaaaaccacagtgacacgtggcacttgctgattggttgctttgtatgagtcggtgccacgtgtcaccgtttgattggctgtaaaaagtaggagcaagtggacttttttgggataaagtgctcggaccgagagaagcccagttgcgagcttggggcttgaggcgcacacacggccagggtgaggtcgtgcgcctcacgcacgcgtgaagggaggaaaagggacaagggctgggtggctgatgcagatggctgtgcagaaatctgaaggtgccacatggcactgatgtcaactggagaggaagatgagcttattaggattttgtccattgtgctctgttttaggcttcaaaaataccaatttttatggctttgggccatagttttgccatttttttttaatttttttttcttttcacaattgctattttctcattcaaacacaaataaaattaaatccaaaaaaaatattttcaacataaaatatgtcataataatttaaatgaaaaatatttatttaaaatctaattaatttagatttttttttcaataaacacaatatattttcttaaataaatattaattattatttataaacaaagataaaattaaatctaaataaaatattataaacaaataaatatttaatattaatttaatgaaatattatttaaaatttaattaactttgtatatttacactataaaatatgtaatattttggcatttaacagccctaaataaaacttattttaatatattctaatttgctatcaataaagataagaagtcatttaaatttacatgttatttacatgtattgttaaatccaaaacatataggtattcacaattacagtgatgtctttacagtggaaagtaattgtgattatatgcttcaaagactttattttcatgatttatcagtgcactggatttacactaataatcagcgataaagtttacttacacttggataagtggtatttcttttccaggacattagtgaagtatactagtataaaatgtatggagtataaattggactagaccaatattgaaattggataagatatcataaatttaccattatatctttctaggtaaatatcacttagtttatcttaggtcaatagatcttaatcctgtgatggttaggttctagcttaactgtattatttgtgttctttgaatcgttaaagtggaccaagtggattttcttaatacttacattttagaaacatggtagtacaattgagtnngagcgctaatcatagatatgaaatatat

SEQ ID NO: 32430 - DNA, 1321 bp, Cannabis sativa
accttttcaacaactcaagcttgggttgtgcttgctgttgcagccactttcgacgccccgaaaacatgttttgctagctgcctcggatcaaaaaaggacagttttttaagaactagagaagagttatcaaaaacaaagaaaagagatacatgatattgttgtgtgtacttgaatgatttgtgttccaactccaccagagcctcctagtataagaatggatttaccagcagaaaaatcagcccttttgaggccttcataggcagtttcaatagctactggaagacttgcagcttcaacaaaactcagattctttggttttaaagccaaaagtttctcctctgcagcagtgtactctgccaaagtaccaaaattctttggtttgtcaatagacatttcgtttatatcaccatacacttcatctccaacctttaacttctttacttggcttccaacttttaccacaacaccagccacatcataccctacaactgtcctttttttagaagaaaaacaaaagaaaaaactgtgtaagaaagttggaacaatgccttcatttattactaaatgattttgagtcataactcattttagacttacatgttaaatgttaaatgataatttgaaccctttatttcttaaaatagtacaaaacattattgagttcaatattcctcaaaataacataataatagcttgacatggaaatgtcatgacgagactagttgcaattcttttgcttctagtcatttcgtgctagaaattgacttgattgattatattttttaaaaaaaattgtcaaaacattaaactaatgatattattttgaaagatatagagttcaatttgttatttattaaaaaagagagtccaatcaataatttttacaaaacacaaagtataaaatggtaggttttccatgaacacacaaggaaatatttcattactaatataaaagaaatagagtgaaaaggagttatactggtggtggagaatcaatggttttgaaaaagccaagcatcctttgataatcaactggattaatagaagcagcaaccactttgattagaacttggtcttctctcacttgaggaacacctacgtttgaatcaagctttaatacatggcaagatttcccatattcactataaacccaacccttatttacacttggtatgaaatcacccatagtttagtactacaatttacacacacaataccttttagttattatggaaaatttataggattttaggagatacatttggctttgaacaaagtggattatatacatttacaaagttgggtgtgataatagttgttt

SEQ ID NO: 32431 - DNA, 3150 bp, Cannabis sativa
tccactacactcttagggcaagctatctttgcaattagtgtgattgtagtggtgttaatctcttttaaaatctttccagaatttaaaaaagacaaaacagcctctacaatgtccttccccgctaaatcccaaattttcttgaaagaatgcacttccataaccatcagggccaggtgctttgttcctatcaattacaaacacagcctcttccacttctttccttgtgtaatcagccagcaaaatctccttgtgactatttgttattttagggccaagatccacaactgattgaaagactttccttcttgcttgtatgttagacccccgtagcttttgataatattctaggaaagcttgttgaaccttctctggtgaatcacaccaattttcactcatcttcaatagagaagattctgttttgaattcttctcgattttagagaagcatggaaaatgtgagttctcatcccaaactttgcccaactaactttagctttttgagacatgaagctagcaaaggccttactaatctcagcaaacttattccttaactcatgctcctattccatcaactctgtgttttttggaacctggttaggtttggcttgtagttcagccaatgctgctcttgttgtgatttctgtcttgtgtatctctgaaaaacctgcttgattaatttgtttcagcactatcttcaaccttctcaatttttgaacaatactgaacatttttgaccccctgctttcctctttccaagactcggtcaccaactcatcatactcaggtgtcagtttccacatgttatagtacctaaagggcttcctctcatagcttctatcttcataaatagtcatcaagatagggctatgatcgaaactcagctcaagtaaaaacacagcttcagaacaaggaaagacatttatccaatgcggattggccattgctcgatcaattttggaaaatattctctccttaggcttttgcttgttgttccaagtgaaataggaacctgagaatttcaaatctgtcatattacaagtctctatatagtctcggaatctctaagatgggaggctatgagctcttttccctattctttcatcagcattcattatctcattgaaatcacccatcattatccatggctcatctattttccttgccaattcttctaattctgcccacagatcatccctttttttctcatcattaaaggcatatatcagtgatacataaaacttccctacttgcgctactgtgatggaacataacaatgcattatttagctagagcaatatcgaatgtctacagagtatacactaggctgccaagaaactactattcttcctttatctaaccaaggattattgtttgtaaaacaccaaccttgaaatagactagtatataaggttcccatgttcttattttgaacctttatttctaggagactaacaaaaccatctttctttgagtagatcaattgcttaatctcattgtgtttgtgttgattgttaatcccccttacatttcaacacaagaacctatccctttgaggaagaagaatctccctcccctcttgtgttaatctcatttccaggttcttctccaagagtctcaaacatattattcactactgtcccttctaaatccttatttatcagaattctcttgcccttgctcactttttggaacccttcagcgtctacctgcttctccttctctattactttctgctttgacacccatatttgtttccttggttcctttttctcctctttcttcctgcaatctttagtactatgcccaattccagaacaattataacacactaggggcatccactcatatttaacatctaactccacttcatggttaaattcatcaataaatgcaattttatcaggaaactcttgtgatagacttacctgagttagaatccttggatactgtagtttatctctgttcttggttacattatcaacctgtaaaggttcccccagctggcccacgattttgaacaatgaggactcccccagtacttgatgtctaggcctttttaattgtatccatgttggtacatttgtcacctcttctttagtaaaatcatctactggattccagggtttcataaccattggcttttgatcaaagaaaacatacccttgctgcatcaccttatctctctgctccaagctctgaaatctgatgatgaaaatgcctttcgcaagcagaccaaccttgacaacttcatctttccaaagccttctgacaaaaccttccagtatgcttattggagggttagctccaataacatagcataccaaagatggttgctagtagttcacttcatctgcaatgtctttgaaatctatcttaattctcttcttcgagcctaaattctcctcagcatcatgactcaatttatcgaacgaattctccaagtttctcacgatgttaaaactgagaataggaggtgaaatcttcttcccataacttacatcctgagtagcacgattagcaatcgaaagccagtttgaaaaatcttgtcgaatcttactctaccttttgataagtacctccgattcttcaggtgagaaaattttctcaacatactgctccattggttcctggcactgttccattgaatcttcagtctcttgaatctccagttcttgttaccctagcacagcatccatgaatctagtcttgatgactctatccaaagatgatggaccagttttcttgcctttagatttccctttcccggccattttcgctttttttgccatagctctgatgagactgaatgagagaggagtgggaaagtttttttcaattcattatttttgtatcattattgctattaaatagtttttcttctaatctagagttttttttatgaaaatattaatttaacaataaattaatgattttaatgatatataaatgagtcaatttgtatttcgggagataaccctaacccaacccaaataaattgtgttatttaagttcgacatacatctatctttcatgatcctaatccataataattcgtatgagttcgtgtcatgacgtgatttatcatcactattttgtttatatgctgttaaagatcttaaagacccttgattttttccgaacagtgtcctct

SEQ ID NO: 32432 - DNA, 2306 bp, Cannabis sativa
  modified_base (31)..(47): a, c, t, g, unknown or other
  modified_base (2058)..(2060): a, c, t, g, unknown or other
ctgatctttttttaattagtaaatctgattnnnnnnnnnnnnnnnnnatttagggcacaaaactcaatattacgactagttgaaagtcatggtgtatgtctaaattatcggcccgcactttgggtgctagcctgaggccaacaatcagagcttcatattcatcctcattgttggaagctttgaaactgagctttattacctcgtgcagctattgcccctcaggtgtcctaagggccatgcttgcaccagacaagttatcaatgcaccttccaagttgaattgtcttgctcatgcttttgctcttgctctcgcttcttctcgggctcttgcttttctcccaaatattgagagatttaaagagatgtgctcgtacattcagcttcaaagttggcgagatcttggccttttatagccatgcttggttgataagtgacctcatattggtcgagctcaatggaccacttaagtggtcggccatatgttttaggtttatgtatcacctgtagcaatggctggttggtgtgcacgtttctgtaagagagtgaagcattcaattggattctctccttaagactttctatacatttggtttaaacatattgtcatacagttgtgtcagagacactattttcaatgatctttggatcactgttagttgttattgcaagatttttctctaaatttccagtagcatctgtatcccatgttcgttggacagctaatgtggatgcacgtgaattagatgggcatgtttttcagatgaatgaacaacttgtttggctggaagattaatctatattatattttagacactttgttaccatagtttgttattttacattatttatttgttcaatgatatattgctaaaataaaattatggcatttgaaatctctcttcttcctgttattattatttacaacctcttagtcaactttcataccagaaatcacatgttggacttttctttgcaatttttatagcagtatttgttatagttacaatatcatctctataaatttttgaaaatttttgaatattttacagtactaaaaataaaattcttgatattccaatttaccaagcgtgtttaaaaaacttcaaacctgttttcgatgttgtaaaccgttcgaaattttttaaaaatttataaaaataatgttataagtataacaaacttatacaatttttttgaaaaaaaaaatattgtaatatatatttttaggcacataaattgactaaaaaaattataataaaaaaatttataataacactcctcttttttcaaacattaaagtttgcgatagaatacaagtgaagtgacacaatcttaattcatttgccatttggcataagctatggtttcttgatcaaactgactgtgtacggacctttagcagataataataataataaagttgaagggaaggtaggttgtaactattttacctaattctcctctaccaaaataaaccaccataacttcataccataccaactttataaaatgaaataaaataaagtgtaaatttcattcattccattcaacatttctgctaattttcttgattaatatttgatatatgttattttttatattattttaatcaaaattattattactttttcattattctataaatttatttgtatttaacaaatttaaattataatatattattaaaataattaaataccaattaaaatatggaatataattaggacaataacaataaaagtggctctttattaaaattttgtaattattttagttaaagaaactatttaattactaatatagtgattagttattgttttataattctttttttaatcttagttaatatttattttagaattttattaattgaattatattatattatattatacgataactcattagctttcaaagtaacaaaaatatatataaaataactgatatataaaaattgtagcttgttatattatatggcaactccctagtttcaaaaaaaattaagattatctaaatgtattttaaattataagctattataatataacttaaaaataannnattaattactaagatgtatataaataaatcttagagttaaccaaagtatatttcaaattatatgaaataaaaatgaaatttttatgtaaagtttactaattaatttttatcaacttattagtaactaaaaattttcttttaaaaatacaagaaaattagaaaagaaaaaactctaaacttaaagtcatgtcaaatttagttattgtggcacgttaataatagtagtaatattattactataaatta

SEQ ID NO: 32433 - DNA, 1745 bp, Cannabis sativa
acttatattattactgttattaagcatataattaaggaacaaatataatttaatttagtaattattatagaatattgttaattatttatagattttttttttttttttgaaattaataaacaaatcaaaccttatatatatagaacagagtacactcttaataaatattatctataaatgggtagtgttagaaaaatttaaatttttatatataatttttttatctaattaaaaaaaaaatcttatttttgcattatacaagttgggttgtcccaccggcttaagaaaaaaaaaatcgacaaaaaaaaaaataaaaaaaatttagtttgacttaaataattttttatataatgtaaaaaaatatatatatttattaatatttttttaattatgtacctaaatcaaacttaaaaaaattcaaatttctctatcattgaatcataatctaatactttaattttttaaattaatatttatggttaaagtatatttaataatttttatacccatatttcgaacaaataatatagtagagacacgtgtaaagaagctagaaaataaaccagctcgtgttataaagcagtaaatatatgtttaataaactcacctcagacaatacgtttggtagaaatatttgaactcgtctttttaaagaaaatgacgagtcgtgaataataactaccgtttcgtaataccagcgagatgaacaaccaacgtagaatgtccatctcgggatacacaggccaacagaacgatagtatggtggaaaaggtagataatgaattcattaagagcttgcaacttattgacccacatactcgtgagtatgttgaaagactaagagaaatttacccagcataattcatctcgaaattttcacacactatgatagtatctcacgtgtgcttatctcaacatttacaaaaaagatgttagaagtactagatagagtatacttaggcgcaaaaagttacctttagaataaaacaaccttagaggattgtttgtattgcaagataatgaagtatagtcagcataattttctatagataaaggcaaagatcgattatagtagttatttattattatcctgtgtgatgtaaatatgaaacatggagtatgtccacgttttatgaacggttacaagaatgagatcccaagggaataactgtcaccctaaaactcttataaatagagatagaacttggaatataagggacgaccaatttttagagagaaagaatataattcataaatcatatcttgtattttgtatttcaaatacacttcataaaatctcaaaaataagatcgactcatggagtatgaagaattaacttcaaaaccacattaaaaaccttattgtcatttattattatggttattattatttttaattgcttattctaaagtatatttattactttaaggcttgtttattggttaacaaaatttgtattaacagcttggtgctttaattgaaaggcttgtgagaaaaaactcaaaaaaataccctcattgaaatatattcgaacattccatccatggcatacgacactcctcaaaacgaagatactcaactaggagaaataactcagcatccatcagaattcacataggacaaatgcgactaagactcctcgctcgggagtggggggaattgtggaggatttgaacaaaccaggggtgaaatcgtagaaagatgtagtgaggacgcttacaatcccaccagatacgtgccattag

SEQ ID NO: 32434 - DNA, 2865 bp, Cannabis sativa
gatcatccttaccaagatcacccaaaagagggacactaagaatgtcatcaaccaaaggattagaaaaacagcttgtaagtttagaaacatcccaattcccatgttcagtaataaaataggacaaaaaaggggaaggaggcctattatcagaaaaaaatttaaccctgttatgaggaagccaatgatcctcaatggttctaatatgactaccatcacccactttccatagaagacccaaattcaataactctctaccccaaagaatacttctttaataagtgaaagaaggcctgtgaccaggtttagcatcgagaaacgcactgcgagggaagtatctagccttaaggacagaagcaaggagagaagaaggattcttaaaaattcgccaagcttgcttggccaacatagcttgattaaaatgaataagagaacgaaaacccaaccctcccaaaaatttagatttgcacaaggatttccaagacttccaatgaattttatgagaactccctgaagatccccaccagaatctggccatcacagcttcaatacctttacacagcttaacaggcaaacgaaaacaagacatggcataaggagggatagcctgaataacagccttcaacagaacctccttaccagctcgtgaaaaacacttagaagaccaactcctaagaacagaattaaccttatcttttaaaaaaagcaaaggagtgatatttagaacgagttaagcattgaggaaggcccaaatatttacatataaagggcctatcttcaagattaaaagtagtgaagaaaacaatacgaatatcaggttgagtattggggggaaaaagaatagaggacttggaaaaattaatagcctgacccgaagccctagaatagacatcaaaaacattctgaagagctaaacaggaagtacgattagcagtgcaaaagataaggctatcatcagcaaaaaataggtgggataatgaaggagcactcctagagatagcaatgccagttagtaaaccagcatcttgttttgccctaagaagagcagaaaggccctcagcacaaagaataaaaagatagggtgagagaggatcaccctgcctaagtcccctagaaggctgaatagatccatgaacataaccgttaatcagaaaagaaagagaagtagttgaaatgcacttcataatgagagaaacaaatttaaaaggaaagttaaaatgaaacatgatactctctaagtagtcccaattaactcgatcaaatgccttagccatatccaacttaagagcagcccaacctattttccaattttttctagaattgatagcataaacaacttcttgggcaataagaatattatcaaagattactctaccagagacaaaagcactttgaaaaggagatatgatcttatctaaaacaacctttaacggttggctaagaccttagatataaccttataaaaggtagagcaaaggctaatgggcctgaaatccttaagagtgtgagcatgctgcttcttaggaataagagagataagagtagtgttaagaacagaaaaatcaaccccttcattaagacaagaaaggacagccttagcaaaatcagcccctaaggttgaccaatttttttcgataaaaataagcatttagccatcaaggccaggggccttatccccagaaagattaaaaagggctttccttacttctttaagagaaaagggttcatccaagaaagcataatccaactcttccaacggaggacccaagcaatcaagaataaggctaatggcatcagcatcactaccatcagagctaaataagtcagagaaataagaaactactaaatttcccatatccatatgagcagagactatattctcatgatcatctttgagaaatttgatagtattattcctctttcgttgagaagcaaaacagtgaaaaaacttggtatttctatcaccagccttaagccactgagttcgagccctttgtttccaataaatctcttctttataaaggagaagatcaagttcagattgaaggcacttaatccgaaattggctttcatgatcaacaatggaaatatcctggaggcatgcaatttccttttgaagatcagaaatacgagacttaatggaaatattggacactttattccaagatttaagtgcagaattacacaagtcctgagtggacaaaaaggaatgaaaaggagacaaaacattctgattgggaagaccgctatcccaagcagtctttacaacagagaaaaaaatcaggattctcaagccaaacattttcaaagtgaaatctttttccatttctagggtgagaattagctccattatcattaagaataagctttaaagcacgatgatccgaccccaaaaaaagaaagatggtgcaaagaagcattagggaaatgatcactccaagaagccgagctaacaacccaatcaatatgttccttaaccaaatgattatgccaagtaaacttgttaccctcaaaaggcaaaggggaaagatgaaacttatgaataaaattagagaagttgtccatatccttactatcataataattacttcctactttatcatcataagaaagaaaactattaaaatcacccataattaaccaaggaagattaggggcattataaaaaagtttatcaagaagggcccaagtaaaaggtctttgagaagaaataggggaaccataaaaacaagtgaaatgaaacagttcattatcattaaaacttatattataatctatatacaagagaagttaataatattaacaaaaagattatccttccacaaaagcaaaagtccccctcccccccccaaaaaaaatatttcctag

SEQ ID NO: 32435 - DNA, 1771 bp, Cannabis sativa
gccattttcggatacatggtcgtcttcagtatctgaattatgttcagggagaacatacactaaaacattgatatcaactctaacacagagattacagcaaaaatcactagtccacattcgtagtgcgtaatcaataatcttattagtaacaacatacacagatgtatgtagatgtgtatcaccgagcatttgtcctctactatcaaacaaatcaatattatatgaatttatatataagaaaaattgatgtgagagcagatttttaaactctttttttctctgtttggtcacaagaatatcttaaccttattgtaaaacgtcattctcatatagtcactcacgccacattaaacaattccaattttaaaattgttattatttttttaattatagcacatcatcttcggaagttgaagttaaattaattataagatattggttttgtaaatatggtagttatatttcttgagaaatgagagaaattatagcatatcatctttggaagttgaacttaatttaatattcaacaaaaaaaattatgaacaattgagacatagatttggagttcaatatatgtgtcagagcattgattgattacaaaaaatctaaaaaagactacattaaattaataaaaatttaaaatatccaaactccttatccagctctatatatgatatgtttactcattgttactccacaactaaaacttctctcctttccaaattgtctcttgattctcatcctccaatccaaaaataaaagcttgcaatagacgttgattactcgagagttcgatcacttatacaaaatatgcttgcgcaactacaagcagagatcacgttttatgagtcagctgttcatcaaaaagtaacatatgactatgaattcacgagtgattcttgtatttgcaagaaggaaaaaaattaccgtcaaatgagaaaggaatatggcattctgatcgtttccaatatcaaatctgaaatcaagctttgggagaaggaactgcactatctaacattgaaagaacaagaaatgaatgttgtcctcaatggtccaagtgatgaagagttcaaaaagtggttaaattctgtgatgaaggtcgttgagtatccacttcaagaagatggtgataatgtcaaagtagatggcgaggacaaggaaaaaacagttggtaatcagaaactcaaagaagaggcagagcttaatagtaaagaagacgttgagtttctagctcaacaagatagtgatgatgtgaaattggagggcgacgacaaggaaaaggcagttggtactgaaaaactcaaagaaaaagtagatcttcatagtaatgaagatgacaatgaaagatccacagcaaagacaggtgggaatgtatcaaaaatagctgaaactaaatggccagtcaagaggatcagaattcctgaaaacaattaagtgttgcttatttggttcctatatgttgtcatatttcgtttattacatatgtatgttgcttatttggttcttatattttgttgtttttggtttattatgcatgtctactgatttatgatttaaaaaaatgcaaatgttttttttgttatatgtatccctgaaaaatttttactccagtgtcagtagtactctgttttgtgaagcaatcattttatatcttgacacgtgtcctccagccgaatttcaggtgtaacaattgccccttaaaaagttcttttttagtaaaaaagagctttttaataattacggaggtcattttcgccaaaatcctttcttg

SEQ ID NO: 32436 - DNA, 2050 bp, Cannabis sativa
tttcattgagagcgtggatatcgtgatgtgatcaaattccatggtgaacacaagaagaactcctgtcgcaccatctgcatcttcgggtctctttcaagacccacacatcgcagatccaggcattcaagtgctagtcacaattggaatccccatgaatactacagatgtggtgaatcctgtcaccacaacatgtgcaacaagtctaaccaccacagctggccaacctaacacgagcatcctaatggatccaagtggcagacccacgcctccaccagtagatccaccatttgtgcctcccattgaaggaaggacccaggggccacaacctcttagaacaacagttggacctcaactccggttctacgctggagagacaggcccaggagtgggcgagcctcacctgtacctaggagaagaccttgagttggccagacttagggaagttataggtcgtgtaggcttaactaaagaaccacaccctgttgattgtgatgtatatgctcaacaaatacgcaaattcctgagatggatggatgaccaggagtacatccttcgatctcaccaagtagaattagatcgctgcaactgggaggccagcaatctaataagacatttcaatcagagaaccgacagaaaaggccaaaatctccttagggatccacttcaaagaagattgctgccaagttcctcgggaactacgactgatcttcctctactagagagaggacaaacctttctttaaaggtcaaatggtgagaacaaccagatcccagtaaccaggggcttggagggctggccagggatccctggctcaacagcatcccccattgtgcaaccaccggctggccagccatcagcaaaagtacccatggtcggccagggtacaacacttcctccccaaggggagcgaggtgaagagagatcgatctttgaccgacaaggaccgagagtggggtggaaacacccaaatgccaattcaagaagtgaaactgatcacttaaggcatcttgatccaccaaactctagcaactggtgtgatttaccctcgatcaacacacaaccaacaccagtcgatcgcggagtcacgggcggccagaccctgcctaacacaggtctggccagccaaggaggcatcataggcggccaatccctaccctttgcaggtctggccaaccatggaggagtattgggtggccaaaccctgtccagtgcaggtctggctagccaagcacaacaatcaggtgtaagtctggccggcctaagccaactcctatacttggaaatggccggcaagggtctgcagggcatggttggtctttaccatacactctcctagggtatggccagtcagcccctatctctttaaaatctacagcctcccaaaggagggccagtcaatcaagtccccacaacaatagatccttctatgcaagcacagttggaccaactcagggacatgatccaagacatagctggcccaaagcctttagactttgaacttgatcagtcaaggggatcatcattcttggcatacataaatgccctacctctactaaagttcaagatgcttgtatggaagatgtataccggacgagaggacctgctagctcacatcaaatatttcgagatgcagctcgacctccagaaggtaactggtgatgtgcgttgtcgcatattcccaaccacacagtcggagaaagcttaagagttgtactttaaactcaccccagggagattcaactcttgggttgagttctcacgagaattttacacacaattcttgtcctcgagacttgtaccatcgcaattggaagaccttgtcgaagtcaaacagcgacaaggggaacctctgaaagattacattcagagatttatagccgaggctaccaaagtcgaaggccttactgaagaaggccgatatacgaccatacaagggggcatactccaataagcgacttctggaaagatatctcgaggatatttttggaatatattttaccaggacctagatttactaacaagtatgttttaacatcctaaacatgaactt

SEQ ID NO: 32437 - DNA, 2531 bp, Cannabis sativa
  modified_base (1485)..(1488): a, c, t, g, unknown or other
cccctacaggtattagacaggaaagtatgtatagtgagcagggtgagttctggtacgtatactgtgagcggctacggacggacaaacgatctagaatgtcggtggcggctgttttattttaagcagttgataaatttaaacacaatggaactgtattatttataatgatttacttatcgtattttgttttacaaatgaaggatccttctctattgcattttgatttctaaaacccgttgttgtattttaagaatttttttttttatattttcaaattatgcatttaaaatagtatttttgtaaagtaaggcaaaaatatcggggcactacaattttgcagttaaaattctgcatagtccacaagtcaatcttattagatttctgatacagttctagagctttttctcttatgaattttttgtccccttttccatctaacttgcctctatttataattacatagtcaggcagttaattacagagttgactgatatctttacaacaattatcccttgaaatcgtggggtataattatatatcacgtaaaaataaatgcggttgatatttaaatatcacacagctatgattaatctgcttttacggggtcaaggtaaatgtgtattaaatacgttgcaactcatatcgttctgggacgtctcaccaagaacatagcaacaagaactctggcagcgagctagagcttttcccacatcttttcgaggttgataatgtaaatcttgttgctcttgcgctgaagacataacactccatctggcaatcgtagttcttggtgacgaggtgaacttcaacagtcaacatcatttaaaatgttagcttctatctgagaaaactggctcaatggggctgtgaatctcattgaaagatgtctggagttgattagtgaaggtaccacgagcatgccttcctatagtgagatggatacctcactatcagttgtatgtgcttatacgactatcttaccgtgtattatgcattaagtgtctcattaattgttatatctcgttttctaatgcgtaacgaggttagtgcctcgtcttgtacacctaaagttacatggtttctcgttaatgcccgaggcaacagtttgtatatctttatctcgcataagactattcagttaaccaagttgtaaatatactctgtcaattttgcttttaacgagttattccacctcacatgtaattacgtgtgttggttcatattcttcccagtttgacacatgtcctcctctgatgtgctagccgaattttaggtataacaaaaaggttgctagaatggtgtccattttagatgagctgactactctattcaatgaatgattactttgactcttgcctaccggggcactgtatcagtttgttggaaaccttggaaatatttaagatatgcttgttttgtatttttacatgtttttgttacttgctaaatgtataataatttctgaatgtgtatgaatttatattnnnncatgttgttttctgttattaatgttgtagtataatttcgaaacttcattgttggtctaacttaacttgttgtttttaatgggacaaatcctaaaagattgtcatccgttagacaaacataatagtgttagatctcaatagataagtatttgtaaatgcaacatctagttgtacatccaaagatgaaaacttagactagtgtttacaatatgaaataatgaagagatttataaaataagaataaatttgactctcgcctaaatgggacatcgttgaattcttattttaatcgaaattatcctttaatttttcctcttagcttttcattttgagtttacttaaatagtatatcattggatgaatggtttatcaatcatctgcttatgatgtcattctactttcttctatgaaattgaatggcgcagatgactatattccagaaattctatcccgaaatgatataaatcctcgatcttagaaatcaactacttgtatatgcttactttaggcaatctagacttagagttagattagtagtggtggtccaagatagaataaaactcattgtatatttggtataaatttatgtttttgactttaaattttagattccaaattgaaattttaattttagtttcctagaatacattgaacaatacagtatgactttcacaagttattaatatccattttttgtcaatggattcaaactgtatgttaatgtatagaatatgagttttgtattctgtgaccaagatccacctggactattctaagaactctttactgtaactagacctaagtcatcaaaagaccaagaccaaagtttaatatatctatgacatttgtatcttgttcatagtagttttgacaagatcattctctgtaaagagtcaatatgcctatatccacttcaaaagtaggatcatctatatttacatatatagatgtacattcagaggtggatatgagctttcattatgttcttaacacgatcactctagattttaccttatgcaaagaaatgtttgagaaatttcatga

SEQ ID NO: 32438 - DNA, 1347 bp, Cannabis sativa
  modified_base (1296)..(1321): a, c, t, g, unknown or other
atcctatcttgctgtgaattcctaaaagaattttctaaatttctcacaacagttgcagatctcagaataggaggagtagagttcatacttttggctaggttactgttacattgctccgtagctttgagaaagctcacaaagtcgcgttgcacgtcctcttgccgttgaatttctctgagtgagcttcgaggagacagaggttcttgaaataggtccgcctgattcgaactcaaacaccttctcccttggctaaattcgtctggttcatccttactttcagtaagttcaagcggttcaacctcatcaggaagattgatttgagattgcctctccatttgaacacctcgctttccctggttcttcgatttcttagcatcagatttcagtttcccccctctcttcgaccgagttttcgccatggcttcagcagagtgctgcacgacctaagcagagagaaaaaactaattctacacaacattataaacttattaaaagtaaaaaaaaatactgaaaaaatgaataattattggaaaaagaattagaacaactacgaaataaaaaaaaaacatggttcgaaccaaaccaatccgtttttgagtggtttggtttggcttggtttgataatttcattgatctggtttagttttaaatttttaaaaaaccgtaatagtagtttggtttgaaaaaatttaaaaattaagaccaaactaatctgtgaacactcttaatatatttggcaaaaaaaataaaataaattgtaatatatatatataaataaatagatgatatatatttcacctgtttttctgataataattaaggtcaccatccagtcgcaactcgtaattttgcttaaaaaaagttcccatgttattagagttcgaccacgacgtacgtcgacacagcatggacaagtcataactgattcttaactttatcacgaggacttggatgccttataatgataaaactatttctatattggcacaaaactataagatgacttgttaaaagtttttcatgttattattttgacaaatgctattaatatatgatactactatatatcagtctaattcaatatcagtttctactcatttaaatttaattaatagataatgtatgaaaccgttaaccacttatagtattatatattgcatactttaaggtgcctaatagcaatgctctattatatattaattcaaaatgtgtgggatcctatattaaaatacagtaacaatatatagtatgtcacttcttgtagtgtttaacactgttagggctcgtttggaacgnnnnnnnnnnnnnnnnnnnnnnnnnntatattgaattggattatatatcata

SEQ ID NO: 32439 - DNA, 1486 bp, Cannabis sativa
attttcatttagactcagctgtaaaaagttttttataatagaggaatagagtttgaaaaatgacattgaatttgtacaaaactctaatctattctatgtaagatagcagtgtcctatccactagtatgggagctcaaataatttaaactaaaataattaacaattttgtccttttaacttttgacattatttaagtttgactctaaaatatacagtggctgatgcatctttataaattaaaaactttgctccctaaattttaacaactatcaaatcatactctctcaaaatagaaatgagaaagattaaacagtgtttttttggtacatcttcaaaattaatttagatcttaatttttttttgaatgattaagaaaattaaaaaaaatataatttcattactaattaagaaatttaaaaaattaattattttttattaaaaaatctatttaaatataaaaaagagtaatttgcagcataaatacttaagttaaactcctggatgcaaataaataccttgttcaatttttgacgataaaaatcttaagttatatttgtggaacttccataggtacttagttttaagtatcaagttaataaccacgtggcaccccctgattagtccagttcattaaatttttatttttaatttaaaaattgattcaaatataccaataaaaaatgacacatagataatgacttgacacttaatagttaatattgacgattagaactcatcaacaaagtaactaagacttaaaatggaattagaagattttaatagatggatgctagaaataaaaatcttaccacttcttttcttaagaaattaatactgtttcattcattcaaaaaaaaggtcctttacaataaattcgaggtcctatttatagtgagcatttggcactttacaactttaccagatccccaatccatagaatgtgaagtcactttcacacctgataacattgtatcctaggtagtgtactcgacatcctaagttatactaaaaatgctcctttcattttgtacattggatgaaatgaactttgtccctattaacactcattgtgccatcgtcatctcgtctaacacttccttgcttagactgtttgtgttaggaggaaaaagaatatcgacaggagtgtaggaggctgggtgcacgggtgcgggcgcgggcagtgtgcaggtgcggacgggcgtggggcgcagacgggcatgctagcgggcacaggcgcgtggagctccccttggcaaacattcaggcataacactaatgactccaaatattacacttagtaatttttgggagggaatagttaagtacctatggaaattctaaaaatataacttaggtattattacgccaaaaattaaacttatgtatttatctacaactgagagttaaactaaggtatttacgcctcaaattactctataaaaaatatattagaaatttaatttttataaaatgtaaatttcacggg

SEQ ID NO: 32440 - DNA, 2180 bp, Cannabis sativa
  modified_base (70)..(72): a, c, t, g, unknown or other
acatattaagaatgtatcttttactatcattatttttttaaaatatatgtttggacataatatataaaannnattttgaaagtaattaattctctaatcaaattcaaatttgtcaaaatattttctaattcatataatccttatatatagagagatcaatataaaatacatataacaatgaaatttattcttttattgtacatataaaatacgtatatatatataatcacatctaaagagcacactaatatagccgcagtaggtaaaaaaaattaaagatcaaaaatttcaaatttaaaaaataaaaatacattacctaactaaaaaaacttgaacgcacttaatatcatttaattaaacctaattaaaaagaaaaataattatatgtgcattgcacgtaatatcaacctagtaataataataatgatgaaaaatatcatttaatgcaaatgagcatgctaactaaactttaataataaaatattaaaaatagcataatagtaaatgtaatattataacatttattttaatgtaaattttttatcatgctatattttgtgatccaaatttaaataattttttattatgtgggatatttacataacaatttgacacgccattaaagtagacttttgataaaataagcaatattttgcattacgtacatcacttatttacatcattattaaagatgctctaacatttgttcatcactatttatttgctattttttaagggcttatatctagattaaataaataaaattttgtttgtataaaggaaagaatttgaagtttgaatatgtgaggtgagagtgtttatttgggttcgtagatggcaaaagaacaaacaagtagtgttgtattcaacaaaaatgcaagtatatattgtctatggatcgagttatagttactcatacgaaagtggcacgaaggttcctttacaaactcgcacaaaacatgaaactttcgaacacatatataaatccatgtattgatttgataaatgattatattaaggtataaagttgattaatatggagatgagggagaggaagataataattatggaatcagtagcctcagaaagcaggaagaagagggggaggagctcactggtcccaccaccaccgagatcaagaggtgggatcaagcgcaagattttatttcttctcttcaaacaactcaagcttgtaactctacaacttctcaatcatctacattccgagtgatattattagtcttatcttactatttccacctttttctttcagttgttgaaggcatcctcccgctatacacttatacgtatatatctgtaattttttaagtgtgtgtttcttaatatagttattccccatttgttaaaatataattatatgcataatgtatgtactagttattcttcaagatcaatttcatatatatcgggacgcgatgttgtattcaccgttgattgtcgtcatgtgatcatttttttttattattgaaatgatcatattgatttccttatgttatttttaaataatataatatataaattaaatatgtataataaattaataatatgtagttgtcattattttgtaaaatatgagggtgatttgtgactacgagtaatctctacaattattatcaatattaagtgtataaattatattacacatcttaatttaaaattcttaatgctatataattatggtgtgtgcatgagttatatctgtttattgagtccataacattcctgagaggtatgagttagaattttaaatgatgatatcctacactatataaagaaatctaaggtgttcataacaaatctcttctcttgaaactctagaaggcttgataatttctaaaattatttgcatgagagttcctttagtgcttggacatagagagaaataaactttctgacaagtaaatataataatagtatgttcaaatcatggtgattccccctaatttacacttaaggttgtgagtgactatatatatatatactagatagaagttacgtgccgaggcacataaatattagttttatttaaagtttagttctatatttttatttagatctcaataaatagaggtatgattatgtgaatgatttgttttattaaagtaatatatttgtgctattatatttggttagtaaaataaaattgggtatatataagt

SEQ ID NO: 32441 - DNA, 2203 bp, Cannabis sativa
  modified_base (480)..(480): a, c, t, g, unknown or other
  modified_base (903)..(903): a, c, t, g, unknown or other
tgtattttgcaaaagttatcaatagaactattatttattgttaaatgataaattaaactctcttttctaaacaatataaaataatagttgaaattaatttttgttaaacttagtttgttttgaacatgggcggctcttatggggtgctgggctattgcacaggccccaaaaaataaagggcctaatatatttttttaatgctctttaatttttttagagcattgctattgggcaccagtagtgtctagcacccttaagacgtgtcgccttgcgattggctagcgatactttctaaaaactattatattaaactatatgggacccgatacttaattagaccaatagcgatattgtcacgtaggagagtgcttggcaccagtggtgtcttttagcatttctcttttttttttgtaatgaatccaactttttaaagagctaacaacttatcattgatcatttctatgtcaattttcaaaatcnattttcaattctattattgcttttaagcaaaaaaaaaaaaataaaattcattgttgctattttttttttcaaacctttcatatttttttctttcatttttttgttgtattgcaatcaataacaatttttataaattaattagagttttttggtgttttgtaaattatataaccatatgataatatttgaaaatattatttataaattacttttttttatagggacccaatttttaaaatagaacagggcctccaaaatatttaagacggcccattctctattttttggttgaaaatttcttcgtaattttttgaagaaacaagcaatgtttctgcaaaattaatttttaatattacttttataattgttaggataagattcattaacttcttaactacgaaaatattatatatatatatatanatatatatttatctatatatatttaaatgtgataatatactttattcaaatatgactttaattgaacaacaatatacatgataatatggttttttgcaacatctccatacatcacatcatctagtatttcggtaccattgaaaaagagctataattttttatttgaatgttatttattaatgcatgtcttattttattgttcactgttataattcatgtaatacaacgtcaatgtatattaacaatgaaaaatataaagcttcccaccataataattacaaccataaaatatttgtagtatattgttccttacattattatttaatgcaagaattttaaattattaaattaattaaaagttaaattaataataaataaaataaatcatgcctttataagggtagcaattcgatcgtttatagtatgtttgaagcacctcatattatccaaagttgtcatagactattaaatttagatgagatcgacaataaatcgagatctttcagatatttttttagtgtaaaatttttcatctatttataatgtatttttttttttatttgaaaaaatttattattcaacttttcagatattgttattaggggaattatctcatatactgtttttttaacttttttttttcaaaattacggtttgggtttctaaagtggtttctccagtgttttctatgtgggttgctatacgattttttgttgcgatttagattacattgctagttgcaataggggtttctatgtagaattccgtgaaaatacaaaaaaaaaatgttttcaagtataaaaatgaataagctccttattattattattattattgcatgtgttattttatggttcactattatactttatgtaatgcaaccgtcaatatatattaacaaataaaaattaacgactttccaccacaataattacaaactttacaacttttatgggataagaaatcttccatattagtaaatattaataaaaaattatattattgaaaggattgaactcatgtcattatacttcatataagataattttactagttataccatgattatattattggttgaattgattattgtaggattaaataacttgaatattttgttcttttctaactgcaattattacgtcaagtagaaaataaaattaattaaaaataaatttataaattcctaattaaaaaagtaattaattgaaagttattcataaggtaaataagtcaaaaaaaattataggtttggaaggtgtggagttttgttagctagagctaattaataatatttaaa

SEQ ID NO: 32442 - DNA, 1258 bp, Cannabis sativa
tggctgccataaccacatctctaaaaatatactcttcaaggcctctgataaacttagcttttcttacaacttcattggctacttcatcagaagaaaacttggccagcctgtcaaagttggtagcatattcagtcacagtcatgctaccctgaactaatcgtgcgaactcttcagcttgagtggaacaaatggattcattataatatttatcataaaatattaccctaaatgcattccaagtcatggtattcagattatgacatcacgaaactatctcccaccatatccaagcatcatcaggtaacatgtaaataacatagcgttcccagtcattatcttcgacccacataaagtcaaagatagaagtaatcatactatccactattctgccttcaaagggtcttgaccaccctcaaacacaggtggagtttgtttcttgaaccgctcataaaatgggtccatacgatcccccatattcagtagcactaactgaggtaccagtatatgtgcaggatgagcctattgctctctcaagtctcgaatctgctccccttgctgcctaatcgtctcctgcatggaagtaaacatttgttcccaaatctgaggaggtggaggatgctctccctcaccacctaccccgagccctaacttgcagttgaaacggctagatcgccgctgcatgatccaatgtgcctgtaacccaaaaccttcaaccatttagaatttagatagatatcaatatcaatgtgcataagccatcatatattcttatcatagacatctctacactttttgttttttttcataacatgcattatatttgtctaagcaagtaatgcaatagcaattaatataaacacttactataccatgagtcgacttgtcttcacaaaaattgtacatattcgagtagtcttcaggaccttaaaaatcatggctactctgataccaagttgtaacgctctaacccgtaggaattccacatgtgtgatttataaactagtttaatactaatagactaataaattattaagatccgtgataatattaaaaacttgaataaagtaaaatactaaaaacggacatcataacgacactaaaaacgtattccaaagatccctgttataaaagttttacaaaagtactatatacaacaacaattcaaaacagaaaatgaagatgcacagcagattcaacccaaaacaactcctgacaacttggggcacaagttggtggggtcaatatgtacattgctaga

SEQ ID NO: 32443 - DNA, 1989 bp, Cannabis sativa
ggatattctgtttctaagaattttttagaacaaacttctgaactagattgggacatttctacaaaaaagaaccgtcccaattcttggatgaaatttattaaactagaggcttatagagtatgataaacctaaattatgcctaaaccctaaaaattactcaaaaaacataaaccctaattgctaaaccaaatggagtgacaaaatgctatataatcataacccataaaaataaacaaaaaaagaaggggatgagacacttactgtatgaagtcgagtagtcgggtattggaaaattctgcaaagggagacgtgatgaatggcgtgatgagttttttgaacacctgaagtccaaaagcaaatctgagtaaattcgcaggaagaatgtcaaagataaagagggcatgcacggtttcaggaagtttggatacaaattctcaggaagcttgagtttttaaaaagacaaaaatggtgaaaaatagattctttactgttttatactttgaacctagcaaccgtaagattaaaatatagaagatctaatggatagaaatataggagaagtggaaaagatagatcattaatgctaatgatgtccttaaaaaccacaaaactgccaaaatcaatggcatgcttattttgaaaatggattgtgcaaaaaataccctcagtaatcatttaaaaagtaccttttattaaaaatggactttttaatgggcaattattatacccaaaattcggctggtacttcagagggtgacacgtgtcaactttagggaatatgaatcaaagaatatatttataattatgtcaataaatattaaatggaataactcattaaatgcaaaatcaatggggtatatttgtaactcgcagactgtacagtttttagtgagacaaggatgtagaaactattgatttgtgtattgacgagaaaccatttcatgtcagaacgcataatcccaaggatgacatagataacggataacgagacatccatctcgctataggaaggcatactcctggtaaactccagctcgctgccagggttattgttgctattgagaacccccaggacatgattgtccagtctacaaggccttatggtcaataagcagttcttaaatttgctcagtacactagtactcatgccattgctggaagacctatggataaatcaagttgttcacgtaccaggcgagacacctcaacgagacacgttttacaatgtgtcttaatccacgtcagcgttgaccctttaaaagtagtttaaatcacaatcgtgtgattttcaaataataactgcatttatttacgtggagcataattataacccacaatttcaagaaaatatcgttgttagattcaaatttgaatgtaattaactgccaacctatgttattataaatagaggcagaatgtacgaaaaaaaagggggcaaaaaatccttgagagaaaaaagaacacactgattgtaaagaaccctagttatgtattagaaaaatctgaataagattgacttgtgaactatgcagagttaactgcaaaacccataaaaaacctggtgttaaatttgtttttgctaattttcgttaatcttttataatttatgagttaaatctattatgaaaataggctcattatcgttaaaaaaaatctgtgttaatagaaagcatcaacgggtgccatcgcatgatctttttttcgaacaacttcaccacctggcgaaatggcatgggaagtagttgtcggaagacaattccggccttgtaccagcaccagcgcatgagtctctagctgaatagagttgtcgcatctgatgacctcttttgagttggtcgtcataatcgcatcaagtcatagctcctttatctagccccaactcctcctgcactcttctgccttcgcgtagtgacacggtgggggatttgagcctgaggatatcgacggtcggtcttgccctcagagagttggctagccagatctgagctt

SEQ ID NO: 32444 - DNA, 3259 bp, Cannabis sativa
ctctctctctctctctaaattctctcttatctttcaaccctaacccaaaccaaagcgaaccaaggaaccaaagaaagttttcagaccaattcttttcctttttcagcaagaattaatcaaggaatttcttagaataatcaaaggtaatcgtagttcccttccctcctttttatggttaaagcttgtttttaattatgtggttttgagaactttgacagttttgttctatctgagtttgaattgtctagaaactattttaaagtttgattttatttgtttatggctggtttttagaagttgtagcagttgtggcaggttttgaggaaatttgagttttatgaactcaagctttgctcatctcaagtgaattttgttgcatgttattataggtgcttttagattgtgggttatccttagaataccccaaattgttgttctagaaagttttgtaggttaaggtaggagcaagttttgatggtcttaaaatggaaatttttgagcctttgctgcccataattagcttccctgaaggttagcttccacgaaggttagcttccctgaaggttagcttgcccaatggtcagctttcctgtaggttagcttccctaaaggttagcttccctgaaggttagcttcccttaaaaatagcttccatgaaggttagcttccccgaaggttagcttctttgaagtttagcttccccgaaggttaccttccccaaagtttagtttccccaaaggttagcttccccgaaggttagctttctcaaaggtaagcttccttaaaggttagcttctgcgtagtaagcttccctaaggttgtttcccacgtagtaagctttttggaggtggggttctgcatttgtggggcttctaggtagggtttaccgagaaggtcaattttagtattttagcgataactttatattgttaagtattcaactcgcatatagctttatgttgttttatgagttgatctcatttacaactactatttttgacttttcctttctaaagaaaaggtttttcaattcttggacttgatattgtccatagacaattttaattaactatcatttcctttgtggaaaacatattaattttttgggtttgcaacataatatgtatttttagatgaattccagttattataaacatatatatgcccccaagtaattttaaagaagataaattttgtaattacttgaacaaatttaaactttattaataataagaatttaattgttacagagataaatacaatatttacattttgaaatcactagtagcaaggtcgcaaatgttcactattccagtggttctttattagcgagtcgttaagccgagctaatttataaactctggttcccactactacttcaataacataaggaccttcctactttaggttaaacactccagcagccggatctcgtctgtttgcaaatacacgccttaacactaaatctccaaccttaaagagccttttcctaactcttttgttaaactgcctcatgattcgatgttgataggatgcattggttgtttggaactcattacgtctttcttcaagtaagtccaaggacaaatttagaagttcttggttttgttcttgactataaaattcacgtctatgggttgcaatgttactattggtagcattactttcgagccgaatgctaacgagaatggagtgtgtcttgtcactgttttctctattgttctgtgagcccaaagtacttgtggtagttcatctacccatcttcctttagcagcgtccaacttctttttaatagtatcttttaaggttttactaacagcttctacttatctgtttgcttaaggtctcgatactgacgagaagctttaaaaaatcttattcctttcacagaatttagtgaacaactcgctgtaaaactgagttccattatcagatacttttttaatttgtattccaaaactgcaaatgatattctttacaacaaaatcgagaactttttaacaagttatggaaactagaggttcagtctttatccattttgtgaagaagtcgactgttactactacgcactttgctcttcctcaccttgttggtaatcccccattcagatcaattcaccatattgcaaataggtatggtgaggtcatcattctcaattttgttggtggtacacgaggtatatgtgaaaacctatgacatttgtcgcatctcttaacaaattcatgtgtgcctttatttattgttagccaatagtatcattaacagataattttctttgacaaactttgccaacgtacatggtctccacaaaagctctcatggatttctttgattatttcactagcttttgttggtaacacacatcgtaagagaggcaatgaatacaagagattacgtgcctcagttttgtctgtaggaagttctccatttagtagatatttgactatgggtgtcattcatgttggcaaggcgtctatcatctcaattttttccttttcacatatgcttgggttgctcaaaacttcgactggtactagattcaacttatcgagttcattttgcgacgccaattttactagtgcatcgacatttgagttaggctctcttggaatttgttcaatcttaaaataatcaaatttctccaagttcttctgaaccttctctaaatatttttccatccttaatcctttcgcatggcattgacctagaacatgattcagaatcaattgcgagtcactatagcatctaagattcctaacttttagtacttcgactattctcaagccagccaaaaaagcttcatatcctgctttgttgtttgaagtatcaaattggaatcttaatgcgtagtggaatttgaagttgtcaggcgacatcattatgactcctggccctaagccattctcattcgaagccccatctacatataatttctaagtttcagtatcgtgcttgacaaataggtcttcttctgagattatcccttcaattagaaagtcagccaaaacttggcctttgattgatgttctcgggtggtaggttacatcgaattgccccaactagattggccattttatcaatcttcctgaagaatcaggttttgataaaacttgtcttagtagctgattagttaagactttaatgggatgtgcttggaaatacggtcgtcatttgaaagatgcatgaattaggcataaggcaagtttttcaagagggggatatcttgactctgcctccagtaaccttttactaacatagt

SEQ ID NO: 32445 - DNA, 1585 bp, Cannabis sativa
aaccttattcttattaataaactgtcgaaccatgtgtttcttgtgctggttgttgattccccggacgttccacactaaaattcaatccattggatagaggaggctctccccctcctccagtattagccaatttcttcaaccccgatccttcaatcacattcctgttctcaataatggcctccatatctgtctcctctagaatcttataagcattccgtgttactatcatagcaggttgtttagactcctttggtttccagcctttctgaaccatctgaaagccatccgagtcagcagcctgcatcttatttgtccctggtacctcctcaggctttttcttaacaacccattcttgcttgcctcctgcttctttcctacactcacttgtttgatgccccattcccttgcactgctcataaaggactggtttccactcatatttaactccaaccgaagtgttgaaaccatgttcatcttcgaactcaatgaggtcaggtaattcatgatgtatcgagacttcaagaagaactcttggatacattagcttccctctctctttggtgattgagtctaacataagtggttttcccaattgaccaataatcttgaaatatgacctctcaccccaatatttcaattccaaattttccagctgcacccagattggaatcacactgagattttcttttttaaaattcccatatgaattccacggtttcatgactacagggcggttgttgaaaaaaatataccctccatttagaacgttatccctgtcttcaatagtgtgaaatcgaatcaaaaacactccatatgaaatcattcctaccttatcaatcctatctttccactcttcttacaaatcaatcaatcacagacagaggagggttagctcctagaacatagcaaacaattgttgaattccagaaattaacctcctcttcaatgtcctcatcagttatcttcaccttctccttctccacgtttttaaaagagctatccaaatttctttgaatgttaccagatcgcagaattggagggatgggggttttacctcgtgagatgctactgttacattgagcattggcctccatgaaagtggaaaagtctgccctgatttcttcttgcctctggattgagcgaagtgacgatttaggagatagaggagcctgaaacaaatctgcatctagttcatgaccgtccccttcatcgacactctcctcattcgtgaaatgaatcggttcgatgccaagaacctcatccattgatttggtttttttgacatcagcagtagatacaagacccttctttcgaaccttcttcgtcttcatagctgttggttgcctcccttgaaccttcgatctcgttttttccatggcgccagctgaggtagctgcgagaaccaggagctagagagaaaacctttagaatcttattttttatataagagaagcaactatgatttttactagtgttaagataggttaccatccatgagcaaaacgctaatggagtttaggtcccatccctcaaaattcatgctttaatcttgtatgaagattaagcaatttgttaacctcacact

SEQ ID NO: 32446 - DNA, 4094 bp, Cannabis sativa
atatcctgctcctcaaagaggtcagtattactccacttatccaaatttctccccttctaacttctcgaattactcttctaatcgtgccccttatcctggcaatttttatcgaggttcatcctcttccatgaatatgggaagaggatcaaatgctagaaccagaggaggaaaaccatctcagcaacaacacaggcttcaatgccagctttgtcacaagtttgggcatactgtggttgattgcttttatcaatttgataagagctttactggtgtagttcccactgctgaaactccctcaatgcaagccaacttagctcagaacacatctgttgatgatggaaattggtatcccgactcaggtgctacaaatcattgtacaccagatcttcagaacttgatgaccaatgctgaatacactggttctgatcagatttatgtgggaaatggcacaggtctgtccattcaacaccatcatacaactcttattgcttctaataatcataataagcctttattgcttcgaaacttactgcatgtacctgagataactaagaatttgctaagtgtttccaaatttgctttagacaataatgtttggtttgagtttcatgatgatgcttgttatgttgaggaccaggttaccaaggaagtgttattgactgggatcctccacaatggcctgtatacttttgatccaagccatttcaaagtgttgtcctcttctcatccatctctcaattctggtgcttagttttctgatccaaaatctgccttagttgtcacaagtgaccctgctatttcagcttccagtagccattgtactcagcctcttgtttcagtttttgatttgtggcataacagacctggccatcttctcacaaggtggtcacatctgttttaaactcttgtaatatctcatgtaataaaacctccaatagtgtatgttaagcttgttgcttaggcaagatacataaattgccctttccaaaattttctaatacaatgtattttgaacctttgcaactcattgtctcggatttatgggggccttcccataccttatcctataatggatacaaatattacatgagttttgtcgatgcctttagtcgtttcacttggatttatttatagaaaaataagtctgaggctttgaaaacatttcttgcattcaaaactgtaactgagttacaactaggcaagaaaattaaagtgtttcagtcaaattggggtggagaatataggaccttttctgaaccacttagacaggctggtattgtccatagacatccttgtccaaccactcatgagcaaaatggtttagtggaaagaaaacataggcaaatagttgaacatgggctgagcttacttgctcaagcctctatgctattacaattttgggatgaggcttttcgatgtgttgtctacttacataatagattgcctacccctatcctcaaccaactttcaccaattgaaatattgttcaacacaaaacctgtctacactaatctcaaagtggtttggcttgcctatgctatccaaatattaggccttataatcgacataaactagactttagatcctcaccatgtacatttttgggatatagtctaaaccataaaggttataagtgcctcgattccaatggtaggttgtatatttctagggatgttatatttgatgaatccaagtttccttatgctacattctctaccaataacaatcctaccatacctgagatttactcttctagtgctatacctattgctcctctcaactactctgttgaagcacttttttcacctacttctccacctactggtgcaccagaactgccaatatctggtttgggcagtaacattccatgtcctactactgagatttcatctcaacaaggcccttctttacatcttactgaacctgctaccacaaatcacaactcccagtcaacaacacccccctgtgtacaacaccataccagtaccactgtcccaaccagtgatcaaaatacactgcctactgtaactggtcctataaccaacactcatagcatgcaaactagagccaagtctgggatttacaagcctaaagctcttttggtttctcaagagcctaccaatgtcaaggctgctcttaaagaggaaaagtggtgtaatgcaatgtcagaagagatggtagctctaaaaagaaattgaacttggacatatgttcccttacctcctggaaggactcccattggctgcaaatgggtgtataaggaaaagttaaatgctgatggcacagtaaacagaaacaaggctcgattagtagcaatcatcaacaacctggtttcgattttactgagacatttagtcctgtagtaaaaccggttaccattcgtgtggttctctctcttgccttaactcatcaatggtctattcaacaattagatgtcaataatgcatttttgaatggtgatttaaaggaggaagtatacatgtctcaacccccaggtttcgagcttgctgatgcaccacatttagtatgcaaacttcacaaagctctttatggccttaagcaagccccccgtgcttggttcgagaagctgcatcactgccttgactcacttggtttttgttcatcaaagtctgatcatagtctttttatcaagcatacttcatcctctgtcactctaatattggtgtatgttgatgatataatcatcacgggcagtgattccacacttatctcatctctcatcagtgacctgcactccaaattctccctcaaacaccttggtactcttcattactttcttggtatcgaagtgcaaactactcctgcaggccttcacttatctcagggaaaatacattaaagacttactgtctagagctcaaatggagggagccaaaccagttccaacacctatgatcagcactcaaaaactgtctgcttatgaaggagaacctgttgctaatccccaactgtatcgctcagttgttggtgctctacagtatttgacaattacacggcctgagatctcctatagtgtcaataaagtttgccaatatatggcaaaccctctctcatctcactggaatgccgttaaacgcattctacgatacttaagtggcactatcacacatggcctgctgtttaaacctttgactgaacttgaagtctctgctttcagtgatgccgattgggctagtgatcctgacgacagacgttcaacatctggtttctcgatcttctttgggccaaatttagttgcttggcaatgcaagaagcagcacactgtctctcggtccagcactgaagctgaataccgaagtgttgctcaagcagtttctgaactcacctggctttctctgctgttcacagagcttcgagttcccttggctcgcacaccagttttatggtgtgacaacttgagtactgttctattgactgccaatcctgttcttcatgcccgaacgaagcacattgagttagatttgtattttgtccgagataagatatcacaacaacttgttcgagttaatcatgtccctgctcttgaccagattgctgatggtttcactaaagctttatctacctcacgatttggtattttttgtaacaaacttggtcttgatgtatgcaccaattccaagtttgggggggagtatcaaggaggatagtttgttattctgttagagagttagttactgtctgttacagttggttagtattagttagtttcttccaactgtttcttgtttgtcttagcttgtatataaagctctgtaacactctctattcaatcaagctattctttcagctcactctttcttcctctttcttcttctctgctttgtcctttttatgtctagatacaacactagatctaacaggcaccaatggtgccctttagcatttctcataaaaaaaaacataatattaatttacttttaaagttgatcttttcgtgattattccaatacaataattctaaataggaatagttgcgggagcacttaaaattacaactttaagtacacaatataaaattgtaattttggttaattacgtcagtatagactccatatagtgttaaatttataacta

SEQ ID NO: 32447 - DNA, 2412 bp, Cannabis sativa
tgacttgtctccattcttcccaaacgcaagttgaattcagccatttttgtagaagcagaagtggaatcagatgcagcaacatgttcatcagtagcactaggagaagcagactgagcctttttcttagtagattttccttgaggaggtttctctggaactttcaaagtggtaccaaaagtaggcagttcactggtttcattctcaagaatcaactcctcttggttagacaaaaacttatagatcaaatgaggaaagataaggttgagtctaggtttcttgccctttctaagagaaacaattttctcccaaatcatatcggccaaatcaattttagcaccaatagaaactttatacaaaaagaaggcaagttcatttgacacatttatcggattggagcaaagaaaccaattggatagggcaaacctcatgagagcagcatggtgataggtgagttgagacatatgcattgtgtcagagagttccacatcattatcaccagtgagatacccaaacaccttttgacgatcaaatttcacattagttgtctccattcccataggcataattagagcttcagccacatccttcacagtaaaggaataccattgtcccctgacaaatactttgccaaacataaaagagtcctcattgaggcactcatcagtgatgttagcataaaattccttcacaattcgatccacatagccatcaaaaccgatcaaagtatccactcattgtctttctttcaacatgttataaacctcaaatggcttatgagtaatgacattgaaatttttcttaatagtaaaatttctattctcataaaatttcatgtctctagcattatcattgtaacaaaaataatgaggataaggcttgaagttttcaagagtaaaaccagagggcctctttcttttttgaggaagaatagggcttggagtgacaatggttcgttttcctttgtccttctttgaaactgcagtagggacaaaactggttctgcactaacagcttcagtttcaggtacttcactttcagacccagaatcttcagcagagggttgtgttcacttgaatcagacaaaccgtctgaatcttgatcctcctcagtttcttcttcaggttcagaattcaatgatgagatggaagggggattttctttgagacttttggcctttgaagatgaagacaccacctttttccctttggagacactttggggcagaaccacttcgggtttttgtgttgtggataccttggaccttgctcgagaactcaccgtgggcaagggaactattactttctcgacatttggagcaccattccaagaagaagacttcaataaagagtgatcggatgaatgagattcatcagaatcaccaagcccagaagttggagtagtaatcggagaggcaatgattggaggagaaacgaggttgtaaattgacttttgagcttggatctttgactttctggcagtgttcgtcggtgcagacgatgatccgcagacttcgtcactggagcagatggcgcaggtggggtgatcggagttgcagaagcagacccacgagaaggcttcttatacggttgagcatttttggtttagctatttttctttgaaatcctagaaagcaaacacactctcaaacttgaagaaggttagacttttaaaaaaaatgagacaggagtgaatagtggtgatcgtcggaatgtgggtagttaagcatatataacacttgaacataattacccaaaaatcagaaaatatgaaaccaaaaaagatgtttcaaaaaatagtcaaaggttaccaaaaatggaaaaaggaaacaacatatccccacaaaatctaaaaaataaatataacaaccaaatccgaaaatgccaccaaaaagaaaaccaacaaaataatgaactaaataaaaataagtttcctaaaacaccacaaaaaataaaagcaaatccttaaaaaataaaggaaacacaataaaatgcattaaaaatatgtttccataaatgaaaaaataaaagaaaaaatgaagcccaaaaaagcgaaattatgcccccctttttcttgatttttttaaaataagcccctcatttttatttgcaaagaatcgaacaagacatcacacaaagaaaatacaaaaagtcaccaatcaacactttagagcaaaaattatctaagaaatgaaacataacaagaaaaatgccaaatttttttaagaaagttcaattgacaatgtcggtcaaacatatatttttaatttttatatgtttttttttttgtacaagaaaaaataaccttgatattttttctaacataaagtacacaatgtccgcttgtctttgtccctgatgaaaaaatcaaactcataagaagagtcagaaattattttatcaagctaatgaacta

SEQ ID NO: 32448 - DNA, 1322 bp, Cannabis sativa
  modified_base (35)..(43): a, c, t, g, unknown or other
aacattaaatgttagttctgatctatattaataannnnnnnnnattatattgaaatgagtttaatttagggcataaaacccaacaatacatgtattacttttttaaatttttgctataaattctgagttcttgactgatctaagagtaggtgatattagggctttcaaccttttctgacatacgcacaagttttagaggcctctaatttcttatcattttagcttgagattatctaaattcacccattcatgggattctaaaaaattttagatatccatcgtctttttaaacttctagatttggaaatttcattttggaatgaagttccttcctctttcatttgaattgtcttggtcggcatattagatatgtcttaccttctttgtccccgtccagctctcaccctttgtctccctccttttatagatgaaccctggtgacttttggaggaggtgaacatcatatcgaccaggaccttcttcaaattctctacgagaatcatccttagctcggtgtagattcatctttgtctagtgaaagctcttcaacttcaagttttgatgattgggaattcagtagtgaccactcaaaatccccaaagcccgtggtgctcagtatcctgacaagataggaggaaaagggtacagacaatttatctgggaactaaaaaaaggttggagatgatatcttcctgcttcttggacatatagggtctgacctggtgttattgacacactaccagaaggtcaaccaactccattagccagacatagtgttgtaacagacgtttttgttacttttgtaatgcacactaccgcatcaaacttgttgtccaagcatagaatgatggtaaggacaaaacaaaccatgaggaaggcttcagagttcgatccccacgttgcttagttgtttgcaatggcgagggtagagtaagctaggcctccgagtgaggaggctaaagttgtaactagagacgttgaagtccaagagatgaggtccatcctactggtccctccgacaccgaatgcgaagaaaacaaagatgaaattcaagttcttccttttggcggctataatgaggtcggagaaccagtctccaagctgggtgatgtcttggtggcggaccgaggctatatttatgaggaatacaaggaggctcaacccatgagcaccaaagggaaaaaaggttctcgatgtgtaataacctagaattaagaaatggattagcaaaaccctaattagataattaagaataattgaggaattatattattatatagttcaatttatgtgaattaatatgattaattatatgttaagac

SEQ ID NO: 32449 - DNA, 2435 bp, Cannabis sativa
  modified_base (62)..(65): a, c, t, g, unknown or other
aaacataaatgacttctaaacttcgattgataacaaatcagattatattgaaataggttttnnnnagggcataaaatcccaacaaattcccatttgcactgacataaaacaaacaatgcatttcaatcaatccattttcttgatatccagatcaagtgtagtgtacttgactaaacccaaattacaggaactgtaagtttgtggtaagcaactgctttctccaccattacttcctatgtgttcattaaacatcaacatcattttctatatgcattgttcatctagggatattgaattttttactgcttattaagtgcatctgaagatatagaagagatgtctctaattctatccaaaaaaaatggaatagagataacacaattaagaactttcttcagtttgaataacttttccagtgctttcaaaagcaactaagttatttagctccgctgatggagcttaaattattatagatgggtttttacatctttctagaataatttctccacccacagagtaatcaccatctctaatattttgagttagtgtagatataaggattctaatatacacctctatcctatgacatataggtcactttcataaatatttcttaattatctcctaatattccttgtttgattacatcttagatggctcccactcaacagtaggagtctggttaaattcgtacataggagtacatttaacctcttactattggttttcagggaactttttttgtgacttattatcttagtctgaaacaacaagtttcttctagactaaggcatcgacatagcaatctagtgttaacattaatgtaaaatacttgcttaagattaagtaatcattaaagataccataaaatattttatgaggattagggattttgcttaagtcatcctattgctacggagggaaacctattgatcaaatagcatgtagtaacaacaacctcaacccaaaagttctttgccacaccaaagtagatcgacatacatctgactctttctaaaatagttctttttagtctcgcaacaaggccatattgttgaggatttcctggcactattttgtgtcttacaattccatttcttgcaaaaagaactaaatacatcaaaacagtactcgagactattatcaatcctgagtctcttaactttctttcttatttgagtttctaccagtgttttctattctttaaacttattgaaagcctcatttttatgtttcagaataaataacttaacataccttgagtaatcatcatggatggtgaagatgtacttttctccacctcgagatacaatcctgaaagctccctaattatctaagtgcagacaatcaaaggtgcctttgttgtgtgtttaccagtgccaaacttgacttttgtggatttccctagtattcattattcattgaaacctagatcttgtacaacattttctcctactaccacttttttcttcaatatttccagaccctttaagataacatgtcccaatcttctatgtcatagagagattgagttcgttatctcctttgaagcaactgaaattgggtttcttgaggtaacaccctccatcacatagaccccattaaccattgatcccttcatcatcgccactgacccctttaacaccttaagagttccctcttcaaccataatggagcaatattccttgtctaacattgccacgaaaattagattagttttaatttttggaacttgtctaacctgatgaatcgtcatgactgttcctcctgctaattgcaattcaattgatccaatgcctattaatgaacatgatctattgtccccaagtctcacagttcctccacagattttcttgtaatcaagaaagtgttctttatctggacaaatatgaaatgaacatccataataaattaccaaatcaatcttcatagaaccatttgtcgccaccattacatcaacactctcatatccatcatcaaaagccacatctgctttgccatacttattatagtctcctttcttgagttctggacagtcttttttcagatgtgaggacttatgacatatgtaacacctcttcttgaactttcattgagattttcctttgttcaagctttcatgattttctccctttgataaattcttccccgagctaccagtaagtcatttgtagagttttcctccatttgttctaactttttcttcacaatctttggacattaaggcactttgtacttcctctaatatcaaggagtcccttctaaacatcatcgtatcaacaaagtgttcatagctataaagaattcaaaataattgtggtcgggtcctcattctcaatcatgattcctatgttttcaagatcaagaattatattgctgaaatcatccatttgatcatcaacaaatttccccaattgcattttaaaaacataaaa

SEQ ID NO: 32450 - DNA, 1570 bp, Cannabis sativa
tctgaaaaggaagactactggaaagaagggatacatggcacttaaactcgatatgagcaaggcttatgatcgtgttgagtggggtttcttggaggccatactacgggtaatggggttcaatactcgatggatcggtttggttctaagttgtgttaactcggttagatatcatgttataaatagtggacagaaactggggccgattattccaaccagaggaatccgccaaggatgtcctttatctccgtacttgttcattgtctgcgcggaagggttctcatctttgataaggtcttacgagtcgtctcgatggctcaccggttgtaaagtggctagaagcgcacctaccatatcccatctcctttttgcagacgatagctatatttattgtcaagccactgatgaagaagccaatcatgttctttccctccttcggttctttgaagacgcctcgggccagaaagttaatctccataaatcttcagccttcttcagttccaacacgagtacggttacaagaagccgtatttgcagtttgatgcgtatccaagaagttggggtggatagtatgtatttgggtcttcctagtattgtgggtcgtaacaaaaatgctgtcttgggcttcctaaaagagaagatgagaaagaggatcaatagttgggagggaaaatttctctctcgggctgggaaagagattctcattaagtcagtggttcaatcacttccctcatatgctatgaatgtcttcttattcccggttggaacttgcaaagaacttgagaagatgatggctagtttctggtggaagtctaataactcttcgggtagtggaagtggtatcatttggatgaattgggatagaatgacaaaacataagttagaaggtggtatgggctttcgatgcttgcgggattttaatcttgctatgcttggcaagcaaggttggagattattgtttcgtcatgattccatagtgggaaaagtctttaaagcgagatactatcctcaaggggattttctttctgcggagcttgggtcaaatccaagctttgtttggagtagtatctttgctgcccgggatgttgttaaagcgggtttgaggaaaaggattggcgggggattgtctgtgcaaatcacatcagacccatggcttcccattgttgatcgagccactccaattcctgttgtgccgggccttgagcacttcacagttaatagtcttttccaagttaataatagaagctgggatgttgatgtggtaagggatttattttctcctgaagatgcatctattattcttggaattcccttaagttcggttgatgcagacacttggtattgggtcgcagagaagaatggtttttattcagttcgaggcgcttatcatttgctccaaacactgaagcatccgccgggtttgtcggaaccaaatgttagttggaagattttatggtctcttaaggcacctccgaaagctaaagaccttgtttggagagcggcctctaattgcctcgccaccaaagttaatctatgcatcaagaaggtattggtcgaaaatacttgccccatg

SEQ ID NO: 32451 - DNA, 1485 bp, Cannabis sativa
cacacttctatccttggagcaagtttccaagtcttgggtttaagaacatagacaaccccaaatacgaaaaatgtttcaaactagattttgtcccattccataattctattgaattcttgtttatgctcttagagagtactacattaaaaatgtaggtagccacttgaagcgcgtattcccagaagctgaatggaagtgtcgagtaacacatcattgatctgaccatgtccaacaaggtacgatttcttcttcgtgcaacaccattctgtttaggtgttccaggtgctgttagttgggataagatccatttatccagcaagtagtctttgaattcaaaatccaaatactcgccaccatgatatgattaaagtgtcttcaatgatttacataattgcttttcagccatggccttgaagtctttgaacttttcaaaagttctagacttcttagccattaggtaagtatgatcgtatttagaataatcatcaataaaagtaacaaaatattcataacctccttgagtttgaatattaattggtctgcacacattagtgtggattagctcaagttgttctttgactctattgcctttagcagaaaaaggtcttttaatcatcttggcttgtagacaagattcacatagcaaaagaattctaacttttagttctctcaaaggaccatcctttgttaattagttaattctgtctgggtcgatgttgcctaaacgtatataccatatcatcatcattagaaaccttttgcttcttattttgttgagacaatgttactctctaaacaattcattatttaaaattattttctcgcttggtttgagcacataaagtccatttctatgctttgcagaataaattggcgttctaaccttagaaataataatatcattattaaaaaattcaatgttaaacgcaaaagcgataaagaaataagattcatgatacaatcaagaatgaaatacacattgttcaacaataaatatttatttttaaagttcaaatggacttgatcaacacacttagtcgataatgtaaaagggaaatttacactcgatattattttttctaattttatttcaattttactgtcactcacacgtttttttttttacttttttactgtccaatttattacactgtatgccaattttaaataaaaagttttattaatttattttaagaaccgtgacagcacatgtatattataatgcatttttttacatttttaaaattttgtaaaaagtgtaatttgattgctctttcttgtcttgtcacttttgtgacatttttttttttaaattgatgatgaaaaactcgtataacttacaatacatgtgtgttaaacttattttcatcccatttctctttctctctctcctctcgtcttttttgtgtattgatgatgtattctttcttttttactctcttcttcctcaagttctctctttatctttctctctctctctctctc

SEQ ID NO: 32452 - DNA, 2741 bp, Cannabis sativa
tctagtctgtgctgccttgtacccaaaaaaatgggtctacgtgggggcaaaactagaagtagtaggtttgtaattggttggagaaaactcggctcctaggagagtcaaggctggagtcgaaacttggggtgtgaagttaggagctgtcgtggaaggagttagagctagagggactctaaaggcttgtatgtaggcattctcaaggttgatgatgccttgggcctttaccataaactcactcaaagttttagctctctttctctgcatttctccccatagtagagagccaacaactaatccaaattggaaggccattaattttatgtcatcgctaaccttagtcttggcagctgcctccattatcctttgaataaaagccttcaagctttcattatgctattgtttgacattggtaagagaaccaacttccatgtccttgtcacacgcaacaatgaactatttgcgaaaaaccgattgtatgtccttccaactatcaatcaatcctaaagctaatcgttaacaacaatcttttgcaaacttggtcaatgtcaaggaaaagcataagcatttggcgtcgtcactgacccaggcaacttgcatcattttattatacttggccaaatgtgctcgtggatcagtcattccctcatataactcaatgtggggtattttaaagttttctaaaagtggggtcaccgcgatcctccttacacaaggttttgggtcttcatcttccgagtctgagagggctctattttgtttcttgaccaacttgatcagagcagctatctgctcctccaatctctttatgtcactctcaggaagatcccgtcccctcatcttatcacttaagtggtttctaaggtcatcccacgtggccttgcattttcacttttatacttcttgtacttggcgtctaattgtcgttagaggtctacagtggaccagctatcctcagaatgtcccacggttgtcctttcgtcctgattgacagaatcactagggtggttccttctccctttaagcttaggtacccatgtattttgtccccttggcacggttttgcctctaggattagaagggcgtccaggctcaaaagcatcggtggccttctatgtccttgagggctggctgaccagattcgtttctttttgaggaggtttaggggtagatttttgtgggggctcacctaccttgcctttaactttatccttgcgaggattcgaggtttcagcttcagtttgtttatgagcacattttttgaccattacctccaccgaaggttcattatcaaaatttgccaagtcatcaaacttgttttaaaggcgttccatcattcttttcatttttgcagtgagcttcctctgttctgctaacaccgtttgagtaacctctaactctttggtcactcgtagcaagtttgggtcgtggtcatagtaaaaaccatcttcaaggctgttaaatatgttcttagcatcctcgcctctattctcggcattggatgtgccttcctctcaacaccacatgtcaaggggccagaggcgagggagtctgccttctccataaataacagtgtccaatagagttttcttgcttatattctttcaggtattcaccatggttgaagtaatgcagcaacaagtaaactttccttagctctcaatgaaagtaccaaaatatttaccgagatttttaaaaatcaattatttagagcttaagaaaaagataaaataccaaataatagacaaatagttttttatgtgattcgggcgttaacaatccctagtccacgagtctgttgtattagccttgtcggcgactacttaagtattataaatatttacagtatgaatattaactttgtattcgttttgtttctcttgaagaagaaaactcataggaattttggtacatgttttgtaagtaaaaattgttcaccctttacacatgaaaaataggggtatttataggcacatgtgtgggtgaggacatacccttcacccgcctaggatttcttactcgacacgttttattagctggtgtttacaactgggtgatttgaccgttggtagatagggaacctcctcattgtgtggtgcacgactactgcaacacaaatcgtgggactaaggacacatgtcgcacaatggttttaccttgcaaaattggtatttagaccaaccattggacaaaaaggagctctagagcacgtacatgcactaccaagatttgacgtaggggacaagatctgatttggtgtcagaaggtatgcaatcgttaggtgtagctccggataaggcatacacaagtgagttctaggaacgtctggctaaggctttcccagaccaaactgattcgctaccatccttgagcactttgtgacttatattccctcttgatagtagttttattaaagagaatcccgtagtcctttccgtattttctagtagggagggcctccgggtaacatctggtattatagtgccttccttaactttgagaagcggagggtgtatattaacaatgcgtaatctaatgtggcctccttctgagattaccacgtacactttatccgagattacagataataaattctattgttagatttctcataaattaattagaactaaattcaaattaaaaattttctttcattcacataatatttttctctgttcattcaattagtatccctaccgctcatccttaaaattttaataggaataattaagagttcaaat

SEQ ID NO: 32453 - DNA, 2123 bp, Cannabis sativa
gaattactatcaagagaaacagagcagaaggcacacttagtctttcacaagaagactacatacacaaaataattgagaaattctcaatgaagggctctaagattgccagccagcctattacaactcaatacacattatctaagaaatagtgccaaccctattaaaaggaagaaatgagtacgataccctatgtaaatactataggatctgttatgacctaatggttagcacaagacctgacctagcctatgtcattagtgtacttagcagatacatggccaaccctggaaagacacattggctagctatgaaatggttactaaggtatctaattggtacagctaaaatgggacacaagtatagacaacaacaagagaagacaactatagaatgctatagtgatgcaaactatgctgaggatagggacaatagaaaatctacctctgcctacatactactaatgagaggaaactattttagctagaaggtgcaactacaatcagttatgggtccacaactgaatctgaatacttgctacaactgaagccataaaagatagcatatgggtaaaatgggtcctagaagaactaaaactcctagatagtatacctgtgatatactctgatagccaaagctgtgtgcacctatgtaaaaaccctatgttttatgacatgactaaacatattaaaattaagtatcactatataagggacaaagtgacacaaggacatatcaacatagacaaagtacctacagaagaaaatcttgcaaatatgaaaaccaaagtgatcaccctatctaagtttaaacattgtttaaacctaatagggttagatcaaggataagttatcctaagatcacggagcaaagacccttagataaggcttaattacttagatatatatcagttcagtgaaggtttaggtggaaattattagataaacctcaacttaaaactgatatcctttcattaagtcattagaaggaaatttcaatacaaaaataactacagtggccttaggccttattacaagcttgatccctaatagaaattagttagaatggatcatgataggtcatcgatccacacctaactaatttctgtaactaacaaaagaaaagacctgctgctatacatatatatatatatacttgtaactcattctctttatatgatgtttgagaagactctccaagatctaggagcaaatatcgtgaggaaagagagaaaggaagaatcacacatgcacaagaaagagagaatgagttaaaaaaatagagagaataagaaaaacactaaaacttgtaataaaatcaaagattaccagtcaaaaccatacttatgacttggaatctcatccttgtaactctaatatgttgattaatagtggaatcgagctaccaatctgagaagcacctcaacggggacgtagcttgaatttttgggtgaacctcgagaaaaatatctggtattttcttaccatttcttgctctttgttattatgtttacgtgtttgagatcaaatcgattgagatctagttgtgtgtgtgtgtgtgtgtgtgtgtgcgtgtgcgtgtgcgtgtgcgtgtgcgtgtgcgtgtacgtgtgcgtgtgtgcgtgtgtgtgtgcatgtgtgtgtgtgtgcgtgtgtgtgtgtgtgtgcaaactgtgtttttgggaaggtttgaggacatagcttcgagtttcttcgaaactctctggtagggtttttttgaagctcgaacctaagatctaaagtgatcgagaaggttcttagtttatgggttttgttttaggctaaaacagagtcgttttgggactctttgacttgctgaagtcaaaagaagtaaaggtcgaatatgaccttggttaatactggcaatgttttgttggtgtagggcaattttgtcatttctcaaatccctacaataagtattgctattaggcactagtagtgtctaacaccttcaataggtggtgtcctacgattggttagtaatatttcttaaaagttattttttttatattatatgagactcgatatttaattacaccaatagtactataacattaaggaatattctagacacctagtaccagtagtactttttagcaattttca

SEQ ID NO: 32454 - DNA, 1876 bp, Cannabis sativa
atccaaaactaaacaatggaaaattcacgtggtcgaactttcgaaataaacctatttgttgtaggttggacagattcttattcaccaatagttggagtaacatgttttctttcttgaaacaagaaatgttggtaaggattgtttcagatcacagcccagttatactagactctaatcccccttcttggggtcccagccctttccgatttgacaatcaatggctagaacacaatacattctccaaggattttggggagtggtggaaaaaggctgaaggatctggttgggcgggcacaattttcatgagcaaattgaaggaagtcaaaaggaaaattcaggattggagtaagaagacatatggcaataaacacgtggtcaaaaatgctctggaaagaagactgatggctctggatagattggaagcttcaggtgcgtgggatcaatcattagtggtggaaaggaagaaactcaaaaaggaatggcagcaattggtatttgaagaggaaagaagtgtgtggttgaaatccaagtgtaaatgggctaaggaaggcgatgccaattcaagattctttcataatcttttgaatgcaaggaaagctagaaacacaatttcaagaatagaaaaggaagatggaacaataattgaagaaaaggaagaaatagccaaggagataatctcttttttttcaagcctgtacacctccgaaagaagattgtgtagcggcattgagggaattgattggcaggcaataccagatggagatgctagacacctagagagatcatttgaggaggatgaagtcaaagaggcagtcttcagttgtgaaggtagtaaagctccagggccagatggcttcagtttagccttgtttcagactcaatgggcggtaattaaagaagatttgatgaatgttattaaggcatttgaaaaagatggcatcattcaaggaagtatcaatgaaacatttatttgtctaatccctaagaagttgaatagttgtagggttagggattttagaccaattagccttataacaagcgtctacaagattattgctaagttgctttcattcagactcaggagtgtactgggagatactatcctcgaaactcaatcggcctttgttgaaggaagacaaatattggactcaattctcattgctaacgagacagtagaagactataggagtagaggaaagagtggtttggtcttcaaaattgattttgagaaagcctatgaccgagtggaatgggacttcctagatctggtcttgtgcaagaagggttttggggaaacatggaggaaatggattaaagggtgtatctcctctacctcattctcagtcttcgtcaatggcacacaaaaggaaagtttgttgggtctcgaggactcagacaaggtgatccactctctccctttctttttaccctagtggcggatgtgctagggagaatgttgaataaggcaattagttcaggcaatctttctggatttctggtgggcaaggagagagtccatgtcagccatcttcaattcgcagacgatgcattattttttgtggataacgagcagtcgctatacaagttgttgcggttagttgaagcgttttgcgctgtatctggactaaaagttaatatgagtaaaagtcaattactgggtatttgtatggatgaaagtaccattgcaagactcgcaggtagaattggttgtgaagtgggcagttggccaatgcaatatctaggtctgcctttggggggttcaccgagaaaatggagtttctgggaaccagttctgaataagtgcgccaaacgactagatggatggaaatgtgcattcttatctaaaggggggaggctgacactcattcagtcagtt

SEQ ID NO: 32455 - DNA, 2050 bp, Cannabis sativa
ttcgtgacaaggttctcaacaaaaaattagaggttcgatagataccatttgcagaccaaattgctgattgcatgacaaagggactgcctcactcaagattttagtatctcttctccgaactcggtgtgaaatcatcaccctctcgtttgaggggtggtgttcagaatggtgctctgctatagtatccatgtaattactgtagttaatggtgattactgtgtattaattattgttagttttatgtgtgtgtgtgtgtgcgcgcaatgtatttctgttattgtggtctcctttattctaacattagggccacctgtccctctcccattggtgtttctactgctcagagtataaatacaaattattcccctcggcttcctttgagttgagttttcgtttctgcattttgtgtaaaatttaacttgcatctatttcatttatgtttaattcttataattgctttatcaccaatgatttgtttatgattttaatgaaaaatttaaaaagtgagtgtatattatgctagctatagtgaaatagacacaaattttgatattagatgaaagtacatgtatggtctttgtagcaattaggatgatttctttggttagtacaaattatgtgtaatttaccatagaagtgtagggttttgccatatgatttagattatatatgtcctaatgaaaatatagattgaattttattctactatcacatataattgaaaaaagtaattagattgtattttgccataggaagttgatgtaattgaatttaaattctttatatttaaacgattgttatttccttatttgtttatttctattatttttgttactttcaacatcaaatcatttttttttaaatagaaacaaagattcaattatttagaacttagttacagtccttgtgagatcacctcactaacatgagtttattacttgaagacgatacatatacttgcatattgaaattttcacagcacatacattgttcatcttctattagtaattggtaattaaagggaataaaattattattttacctttttaattatcttttgttcctaaagtactgttgactttactagtgaaggttgtgtcacaactagcttgcaacttgagcgctcgtaatcttttctgttccaaaaagtcaaccttttagggaatctttattcaatctgtaggttgtatttcttaagatatgtccccaactatatatatgattgaatctttaaaataattgttcttagcctaatcatcctgacaaacttaaacgcatgaatcaaaggatcatatgtatgacatatagaagttcatagtaatctcaggattaaaattatcgtatatatgatcactaattaatgtgtttgattaatactaagaaatagtatttaaacaagtattaacaaatcacatcttctccaactctacatattctctagtatgtacaacacctccactaaagtgtcctaccacactagtaatctggatcaagctcagatgttttcacaatactaatggaccgtactaacagtaattaatctaaagatttcatacctttattttatagtaaaatccttaagttcatgatctcaatcatgatcttctaataataaatataagactcagaattacatacgtaaaaaaaaaatttcccgctcttctccctcttttgttgcttcactagagctatggaaaaagggaaaaaatggccgaaaagtgaaatccaaggaaagaaaaataggaccatcatcttcggatagggtcatcaagaccagatccataaatgcggttcttggagttcaagaattggagattccagatgacaaagaaccaatagaacagtacatagggcaatgcttctcgcctgaagaaattgaatctctctttgagagactgagtgaattacgccaagatttctctgattggctcattgttgcaaatagggcaactcaagatgttagtgttgggaagaatccttctcccccaatactcagatctaatatcgtgcataacttggaaatcagttttgggagctccaaaacgaagat

SEQ ID NO: 32456 - DNA, 1666 bp, Cannabis sativa
tgtttttattttatttaatattagtattttttattgttattttatattttcaaatgtgttagtattttaaattaattatttttacgaaaaattttaatttaaaaactaaaataaagattatatttaaaaataagaattagaataaaaaaaaaaaaaaaaagtttcacaccagattaatttaaatccaaaatctaaaccattaagataataatctatatatatctataaaggagaagtatgagccggtgacgtggcactctcaaatcactttaaatagttttttctattttctccttaattctcttatttttataattttaaattgtattttattattttttctaatattttattaaaaaaaatttaaactaaacgtattttattcattaataagaaaatttattttcaaatttcttttaaatctgcatatatatatatagcttattaatttttaaattcccatattattcatttttaactcgaacactccatcacatgcatataataattcaacttattattacttgtttttttttaaaaaaaaatcacatatttttttttttcaactcaagtgcatataactcaaatactatattattattttagagtttcgaatattaacccataagccatagaggcgatatgcatgaaaaagctttttcttgatacactgagagctagccatggatctatttatcatttatattcaattagtattgataatttagaatacattaaatatatactatggcatttttttattatgtgtttgagctttgattattttgaagtatatttctcattattttcttatatactatgacattttttctattatatgtattttagctttgactactttggacatatatttctgtatatattatttttatctcttagtctattgtttagagttgtgtgttttgtatattttttctgtggggtgctcctgcaagaattcgcatggtcgtcgtattgtttagagttgtgtgttatgtatacatatttaatatctatttactatttaattttaattattatttcttataattttttataatgggattttttttatatatatagttcttaattatatattatttttgaagtaactattttggatatagttctttctctttctttttttttttatcaaaaattacataatttatgtatttataaatttgtcatttatctttatattttagatttttaatttcgtgtaattttttatactttttcttcactatatattttaaaaatacctatttgttttattttttggatcaataacatcatagtggcttaacttgaaaaaaaaaaaaaaagaaggaattgtacataattttttttcttccattaatttgattttaataatgttttgtctaatcttcaagtgatataggttttgaatttagtagatactaaataaatggtttattttgatttgtttgatatgtttgtttttctaaattaatattaaaaaaaaaaattattcgagttaaatagatttaagaaatatttattagaaatatctatatataatggtaaactataaaagcggtgacatcactctttacatatctattctatttaaagtgtgcctatataactaaattcttggtttatgagaaattcatgggtgtgactttttatttatatttaa

SEQ ID NO: 32457 - DNA, 2331 bp, Cannabis sativa
accatttattaaacttttgtattgtttaatgagtttacttattaccattacacctttttgtaaaaacaacacccccaactgtttcttttctttatcttttatatataatacatcattaaaattttaaattttacgtctaacttatatatttcaacaccatacttttttatattttctcaataattttgttataatctcacaacacagaactcaaacaagaaagttagatttatttctaacataatcaaccaatgaacaatcaaaactagaaatcaaaatagataaaaattgcggaatattaaagaacttgagacacataacttttatacaagttaaaccaaacaaaggacttcttgttatttctctgaattttctttttcattaacatattaattacaagcttggttgggttgagtgcacctagagaattacaaaagagatccctaatgaacttagcttgagttcagctccaagagcactgattttggtttaactttcccaaactcccactctttgattttttctctcaatgacactttcccactcaatctctcttaatgtcagttcagtgtgaattgtttctgacattacaaggtaattacaagccctttaaataggctaagaaaaaagcagttggtttgttctaagaattacattctaacaaattccaccttaattcataacaataaacctttcaaattttaagagagtgatccagctatcttcaaatggagctaatgttcagcagttccaagcagtgctggaacttgctgacagatagtaccttagttcctgcatttgaaggttctcttcacttggtactttttccaattctacttctccatctttatatcttttctcttcacttggttattttaacgcatcaaaaacgaggcaaatacatattgaagttgtttccattccttaaacatactcgcaagtgtgtggatcagtgagctacaaactctttgtttattcattttgaacaactttcattgtgcattttgtttatcccgagatggacctgtttatctcgctggtctcattagtcaatagttattacttatgtcttgctattggctatatagcggtgagttcgaatatttctgttaactgtatttcccgaggcgagtcatttaagtgcatttaataatgcgcggtttgagcttattcatatttaagcattgatacacgtgtcagccttttattgttggtcaacatttaggtataaaaatcatcaaatttgaattaattctttaattcataattttaaactcttttaaattaatagattaattttaaatttattaagttaattctaaattaaatttaatcagtttacatgcttagatttcagaaacggtacacataaacacataggacacctaatatatcttgtttctattatgagatgcatgataatttaaactgtgtagagtttccatgtatgacatgttattcactaatgcatgagcaatttattaatcaacaattaatgaatttatttaaaacaataaacaatgatgatgaaccgggtataaattgggtatttataattgtacaatttgtgaaattaaaaactaaattacaaaactaatctccatagcaacaatgacatttttgtaattttaaatcatgctatcaaaattaagtaaaaaaaaattcataatacaaaaacatattgaagagttgatattattttacttattgcaattaggtcaatattttgttattttttttattgttttgcaataatatttttgttattttatagttgtttgttaagttgttctagggttactttttaattattttttagttgttttttttttattttattgaaacacggtatttttataattttgaaactttaaacatagtatttttctaaatttaatacaataaaaatataaaaaaactccgtgtcacaatatatttgtaaatttgttcacattttataatatttttgtaagttcctttaataagttaataagttgatccaaaataaatttgattttttatataaacaagttatatagattgtctaaagtcaacttgtttataaattggttgaatttggatttttaacaaagaataggttccaatttggcatttgtttatataaatcgtcttttttttttctttaaaggtggtacatgccccaacaaacaataatatatacttgttagtatgcattgcttttcctatataacattaatgctcattgataaaatattgataaaaaactctttaaaattttttaaaaaataatttttttaagtttttaaaatttttaaaattttaattctcaattaaaaaataaaaaaataa

SEQ ID NO: 32458 - DNA, 1865 bp, Cannabis sativa
tacacctatttacaaggcttaacagatgagtacgaacattccatactagggtacagccactgtaccacatacactttgtacaaacattgtacgagttttggttaggtttgtttcgtaccatgagtaccactaagtgatataccacacacaccctgtatttctctgtacatgtgctggtagcatcgtaatgtactctttaaacaatatacactataccaatacactttgtaccatttccgtacaagtgttggtagtgtacaaatcacaacaagcatgcatatacatatcacacatacatacattcgcgtatatatcacatattacgcgctgttcttagtttccaaattcaagtgagttggccaacttgagcagaaagtctcatgttagatggatgccttaatcacataacataatccggtaaatcacacgtcaaaaccctaatccgggaaacccgaacctacaacttaaggttctattattactaattggaactacaatatcctaggaaacaaggaatcacccaaacgaggcactgaaatggacataaattgaggaaaatgaattgtttggggaatttgtcaaaatcggttaaccggttttataggtcttggcaaactggttaaccggtttgcaccaggtttctccaaataattccaaacttgctcaaaacttgtccaaatgccaccaaacttttcagaacacctataatgagcttacacaatatattccacccaatagaattcagaaaaacataccaaacaaatatatgccttggatgaaccaagcttgagttttcaaactcaaacttgttcatccacaacccccacaacccaaaactagcaactaaattaacatttaaactcaaattaaactcaaaaactgaattacaaacaattttaaccctaagagcccttaaataacaaaatcacatattcaaactaaactcaaagtttcaaaaacataattaaaggttctaggggttacctttacttcaaagctacttaaatcctcactcaatattctaaaaatacaaggtttgatgttggttttcctctggtttgggagtgctcgaagagaatgagtttctctaatttcttaattttttcttattttctcaaaatggtaaattattcatttaaccttaatttggctgaaataaatcaaatggacagccacctaattccctaaaattaattcccaaaatacccttggtgcttacactaaacccaattcaagcctaggggtaaaatggtcaaaaaccataaccccactcaaactcggtattctatttttctccaatatcccactaagaaaagaatctagacttacccatgtgattaaaatagctatccatcgcatttttcgttgtcgctgagcaaaaattgtaaaaatagcataattcaaatgtaatacaaataatacacttagagtttaataaaatctctggaattaagaaattagaactctaatgcccacttttgataatgggacccacaattaaataaattcatgaataactataaaaatattaataattcgtgctaattgactaaactaatctatattataaatgcggtctttacaaacaacaacagcaacaacaaaaaccttaaaataacctctcaaaatgattcccaaacatgccagacccaaacagaaccaaactcccaaaaactaaaattaaaatcaagtgaaaccttaaatttaaagaagaacaagagagagggcttaccttgagtccttgctaacaattctcttcaacaactatgatggattccatcttgaaaactggatgaagttggtatgaaattctagtgttcttttaggtgggtttttgtcgacagaaaagagagagagagagagag

SEQ ID NO: 32459 - DNA, 1872 bp, Cannabis sativa
acagacatactatataataatatagttccattaagcacgtaattaaattaatttcatcattttacccttcccgggtcacaattgttaaaatgctcctcgctcaccaacaaggtcttaacatgttaaaatcatattaattcacataaattaaactatataataatataattcctcaattattcataattatctaattatggttttgctaatccatttcttaattctagggtcccatgacaaatagtatgtgatcaagttaggggaagtgtaccggagtcactagttttgtaacgaaatcactaatcgaagttgaactagggttctacttaatggtgccgatgtaaactcgcagtagtgacactatcactgtcggttaggggtcccgtgacacatagtatgtaatcaggttaggggtagggtaccggcgtcactagtttcgtgacaaaatcactaactgatactgaaagagggttccacttagtggtgtcgatgtacaatggcagtagtgacactatcactgtcagtgtttaggggacctgtgacacatagtatgtaatcaagttaggggtagtgcactggagtcactagtttcgtgacgaaatcaataaccgataccgaaataggattccattaagttgtgccgatgtacaatggcattagtgacactatcattgtcggtgtttaggggtcccgtgacacatagtttgtaatcaagttaggggtagtgtagtggagtctctagtttcgtgataaaatcactaaccgataccgaaataggattccacttagtggtgtcgatgtacaatggcagtagtgacactgtcactatcagtgatttggggtcccctgacacatagtatgtaagcaagggaggggtagtgttcggagtcactagtttcgtgatgaaatcattaactgattccgaaagagggttccacttagtggtgcagatgtacaatggcagtagtgaaactatcactgtcagtgtttaagggtcccttgagacatagtatgtaattaagttaggggtagtttaccggagtcactagtttcatgacgaattcactaaccgataccgaaatatggtttcatttagtggtgtcgatgtacaatggcagtagtgacactatcagtgttggtgtttaggggtctcgtgacacatagtatgtaatcaagttagtggtagtgtaccggagtcactagttttgtgaaaaaatcactaactgataccgaaatagggttccactcagtgtggcccatgtacaatggcagtagggacactatcactgtccgtgtttaggggtcccgtgacacatagtatgtaatcaagttaggggtagtgtaccggagtcactagttttctgacaaaatcactaactgataccgaaatagggttgcacttagtgttgccgatgtacattggcagtagtgacactatcactgtcagtttttaggggtcccgtgacacatagtatgtaatcaagttaggggtagggtaccggtgtcactagttttctgacaaaatcactaactgataccgaaatagggttccacttagtgatgctgatgtataatagcaatagtgacactatcactctcggtgttcaggggtcccgtgacacatagtatgtaatcaagttaggggtagtgtaccggagtcactagtttcgtgacgaaatcactaaccgataccgaaatagggttccacttagtggtgccgatgtacaatggcagtactgacactatcactgtcggtgtgtaggggtcccgtcactactacaatctggccttttagtgacactatttagtgacacacattaaagtgtgtgtcactatagagttaggaatgatttttagtgagacacacaatta

SEQ ID NO: 32460 - DNA, 7517 bp, Cannabis sativa
ctctctcgctctctctgactgttgtaattctctatgtgctgtccgtctacaggttttcatcgttctctcctgcatgatctctgtctctgtaaattttagtacattccttgttattggaaagacatctccagttacatatcaggtacttggacatctgaagacatgtctggtacttgcatttggttatattttgcttcacgacccgttcaactggaggaacatcttaggcatcatggttgcacttgttggaatgatagtatactcctacttctgcactcgcgagactcagaagaaaactgatgaagcaacattgccatcatcccaggttggtcacagtcaattgatccgttcactacactttctttttcctttcagtcattaccatacctgttaatattctcactctttgatttccgctctcaaatttttccagggaaaggaaggtgaatctgatcctctacttaagacgggaaatggaaatgatgttgtaatcgatacggttgcccagaaggctccaggatgggaaagaaacaaagatttgcatgcttgatggaaccacctttttttcaatcttttttacttcacaagatataagagaagcatacataacatacaaaactgttggaagaaaaatgagtgttggtggcactaaagactcctctttcaacctcaccctgaaatctctctccaatctgcactggtgttgatggctctcatttcatattcagtgttttgtttttttaaagttatgaatttacatgttgacaatcaatcatctgaggagtgcccataatagttaatgttgttgtacctagaaggccaaggaaatataaagttcagttttgtagaaaattattctgatattttatttatcattaatatttgtatggaaattcttactttctttttcttttgggcattctcaaataatccaaacaaacatgggatgggagttttgtttgtttttgaattaaatagtgtcaaagtattggcagtaaaaaaacgatgacttgttaaaacgtatttttctagaattgaagcattcattgataaaaaaacctcttataattagaattgttgttacagttacatatgagctgtctcagtcatggacccaaattatcaaataatcttattagtgaaaatgagctaaaaaaaaaaagtaaagatcgaataaaccgaatagctcatagttagaatttcctaactctcccaaagcctgataaaaataaaagaaaaagaaaagcagtagatcagtttttcataagtttagaaggttcagtttttgaaaatttcatatttcactttaatttaatgatcttttgaaaagaaccaaaaaagaaaagtgaccgtagatcagtttttgtaagtttagacctatacggtcacttttcttattggttcttccacctgtttacaaattagtttctaattcttctttttgaattttaataattaattaattacttggatttttgttaacgaaagagaaatttcagttgaacttgaactgtactcgaaattttttggatttatttgcaaaaaaactatgggaaaatgaccaagaaaactatttgcttttgcaaatatatttggttaattgtttggtgttgtggtctgatcaaactcgtttgttaggattagatatggtattatcactattgagataattaggtaaggtatcaatttttttttgtaaaatttttataattttacatttaaaagaattttttttatatttttacggctttttatagaacaacacgaaaattacataaaaataacatgaaaataacatctaagagcatctccaaggagtcggtatatattatatataccgtgaattttggtccaacgaagctgcatatcttgcagcattatgaggttttgtctacaatgcacggtatatatgccgtgcactgtagacactacatatattttttttttttaataatttaattaatatttattatgtatatatttatatttatattattgtatttataaaattaagaattattttttgagaaattttacaatgcacaattttaaaagtgatgtacgaatttactcctagttatttcgatacccgacaaacctttttactttatttttttatatagtcaagtcatgtatattatagttaatataatataacaattatttaaattatattagttaaatatatcaattgtggtaatttttgttaattaatatgatattaaataattaatataataataagaaatattttttttagtataatttttggtgttgtggttggagtggaaatattctttgacgctaaatttagtgatagtgtaacaccaaatttagtgtatccttggagatgctctaataacatcaaaacaacaacaaaaaataacatacaaatttaaaaaattgtaaaaatgtttaaaatttttatttttatatatattttttctttttttttgattatttttgtatatttgtgaaataatcgcattatatttgaacatttttctttcaccacaacactctagtctagagtccagacaaggaggctcattgatttgagaaaatgaccaataggcccatggtttttacaagctgctctattccgattccctttccatttccgtacaatgtttttgttttgcgtataaatatatattttggtaattgcttggccaggctttgcttttactcatttcagacttggctagcttctcctcagcttccttactctactgcctcgccatttccatggctctccgagttatcttcaccaaaaaattactcagatcagggtttcatcctcaacccacttctcaaatcgtcctctctcgcggcctccaaaccttctccctccccgaccttccctacgactatggcgctctcgagcccgccattagcggcgaaatcatgaagctccatcaccagaagcaccatcaggcttatgtcaccaactataacaaagctcttgagcagttacatgaggccatttccaagggtgactccgctaccgtcgccaaattgcagagtgccatcaagttcaatggcggaggttcgttgacttctcctcttactaccctttgcattattgtgctttgaattttttgattattgttttacctggttttccagtgcgagctgaaaataccataatgttagtcgtagtcctgattttgatttgttattttctttaaattaatcaagattgtatgataatatggttgttgaggcaacacgatatacccaaattggtaaggtgtgaaatgggaatcaattgaccttggaactttatgcttgtctacagtttgcttcttgatacaatttcttaggaatagtgtgctagctagaattttgggtgattgcctaatatctatatagtaaatgttcttaggtagctaagttgggagaattgttttgttttatataaggctttcataaaattgtgcgggtacagactttatggataccctttgttgctaaggaaaggggaaaagaacttttggggacccatatattttctatctatcaaatttgagcaattttcattagtttcatatttagaagattttttatcttcttatataatcattgctgaaaaataaattttcaaagttcacccttttattattttctgcaggtcatatcaatcactcaattttctggaagaacctgactcctattagtgtaagttcatttttttttcctcttttttcatgcccttgtgttcacttctattatgtattaatgaagtaaagattgcttctcctaataatttatgcattgcaggaaggtggtggtgaacccccaaaaggatctctgggctgggctatagacacagactttggctctttagatgcattggtgaaaaaaataagcacagaaggtgctgctttgcagggttcaggatgggtggtatgttttacctcttatgctattaaaatctacaatctatcccttcctttcttaaaaaaaaataaaaataaaaaaaattatgtactttgtcttggcagtggcttgctctggacaaagaattgaagaaactcgtggttgaaactactccaaatcaggtaaattctgaaataaatctgttttttttttccttcttcatggcaccactagctagtaaagatggccatggttggttgtggctttttatgttgttcacatgactgtaattctactcatatatgcctgaaaccagtaagaaattagcttgagtaaaatacaaaattctttgttgcttcagaagacattatgttataacacttttcaacttaacgtaacactatttagacaatataattgtgagtgaaacactacactagaagtcctttgctcaagtatcaatcatattctatcaaggaaataatattgtaaatgctgttgactgtaggcatataaaactaattttctattgatttgtaacaggatccactggtaactaaaggagcaagtttagttccattgcttggtattgatgtttgggagcatgcatattatttacaggtaatatttagttttctgctcaaaagtcctatctagttcgacattcagggaactaattatttctctccaattatctacatcaacatatttgatgatattttggttgatttgttcacattgtaaacgataggagatatttagtgattctccattttgagcatcaataaattatagttattttagttacttgtaacaaatatatgatcttactgattgagattctcttcgaattgatagttcttttctatcttgggtttcagtcaactaaactaaagaggatcttccttacgtgtttttgttcttattttattccaatggacaaactttgaaatattgtgagctcgagcatgctcaatagtaaaatttatactacgatagatcagttatctttttcttattgtccttttgcctctatggggttggagaaaaaatactagctcaagctcaacattctttgacaatgtctccttgggcaaagctgagtgaagttttgaaatcaagcactttatggtgcatgctgctgtcctcttaatttttttttcctcgtcttcattcctatgttgatatgttcctaccaattaccttgttgcattgtatactttggctcgagttgagtgttttctcatttcattatgcagtacaagaatgtcagaccagattacctcaagaacatatggaaagttatcaactggaaatacgccaatgaagtatatgagaaagaatcttcttgagctaaacttaggtggcttgtggcgccagaggttgataatggaataaattgaaaccgtgttggttgaggctttgagtttctcacttgttttgagatgtttgaaatactgatgtatctcatttatgaaatttagagtaccaactctaataacatttttttaaaaataatgtataatctctatttcaattgggaatggctttctccttcataataactaagccaggttttatggcatttgctgatgattaatgattttggtggataacggatatgggagttaatatatttgtatcccatatatttccttttgtttcttagttttataatctgtgtatagagtttgggatgaaaagcttaaggaatattaagaacacctagttatattgaatattagagctctcttataagtaatgattttctaactttttttttaatggaagagaagagtatttatagggagttctaatggctctaaaatataaatggtttcaaaagttaggggacaaaattcattttgtaccatgaagagtagcgcgtcatatgggtagtggagaggtggtgtcgagtgtcagttagtactttgagtaagacaaatagtgtctttactacttgtacttgcgtacatgcactttttcctcttaggcgtgcatgctttaatgattttatcatttgatgtccgtacttttggcttctctctctttatcacttacacttacgatgcgagtataacatttaggaaatttaactaagtattggatctttgtgaactctcttgtttaggtgaggagcatgaggtagtgacttagggagagtgtttgaatgagggaatagtagtaaacaaagagatggagataaaaatgagggatggagagagagggagatattgagatgggagtgtgaggtagcgaggggctccacttaggtgtgtgagaaagagaaggagagcggggagaggctggagcgcggggaacaggggtcacgggggtgtaggggagctactagcgagcagggagatgctcgggcgcggggagctgttgatgtgcagggagctacgggtgcggtggtgcacggggagctacgggtgttaggagcctgtccacttgttgctcctcatgttggggggctttcttgtgtggggcgttctcgtgcagggtggacccatatttgattcatttaacatacttttgaagtgttttttaggatttttctcccatttgatctagagaacctaaaattaatacttagcaaattttggggtcaacacttgccccctactttagaagaatctttttaagtgttcttatagactaagtttggtgagctttgtctctgtcgattggtcccatggttgcttctatgggcatttgggtctcaattttttatttttatgtttttcatggagtgttggctttatgagctaactcgaccccttttatggtaggtactcatcacactaagggattgttggcttttttaagctttctcaacctattatatgggttgtcattattttgtttgagggagtttttgcaacttggccttctcaacttcttttatgagttatcattttatttgagggagcattttgtcacttgggctttctcaatctcttctttggcatagccttttcatggagtgagtatagactcttagagtagtctcgaccttttttcggttagttatttgatatgatggagattttgtcctcttaggcaacattcaatattttttaagatttaagattttattgggggagctttggcctcttaggtgtcgctcaaccctttcgctgcattcgtggtgcttagagtgtgtttttgaatgttataggatttgtaatcttttcagggaggtgtcctttacatagtcatactttttttcttttttccacacacattatatatatatatatatatatatatatatattggcctgatgtggtcattcaacatcgctacacacttttatttattgtcacttcgtttactttgataattttaattgacaagtatagtgaacaagttgaacagacatgttgagagtgatgaatacaacatgttaaggaaaaaatttaacatttcattgataagagaactgcataagcgcctgagtacatttactatttccaaatgtcaacatagatgccatctttagttcatcaaaggaaaaaagacaaacttgttattcctataagtgtcttttttgatcggttgtaggtcattggagaactttactttgcataatctcttgatgtttaacgtttataatgttggaaattatttta

SEQ ID NO: 32461 - DNA, 3243 bp, Cannabis sativa
tcttcctctcgaattcttagttgagggtaacttgggcgaagatcgatcttggaaaagaccgtcttacccttcaattgatcaactaagtcatcaattcgaggtaggggatacttgttcttaatggtaagcttgttcaattctctataatcaatacacatccgtagtgacacatctttcttctttacaaactataccggagcaccccaaggagagtaactcggtctaataaaccccaggttcagtaactcctgaagttagatatttaattctttcgattctgctggagccattcgatacgatgcttttgatactggttctactcccgaaactagctcaatcacaaattcaatctctcgggaaggtggtaatctcagtagatcttcaggaaaaacatcaacgaactcgcataccaatcttgtattctcaggtccaaatgtcataggttggccggtatccaccgcagtgactaggaacagacaacctctgcacatcagatctttggcttttaaaagtgttattcttggtatgcgcgtcccctgaactttacccacaaacattaccgagttagcactgtcgggctcaaataccaccatcttctacttgcagtcgatcgttgccccatatttagatagaaaatccattcccaggattatgtcaaaatcagatagttgtaactcaatttgattggcggttaattcacaaccgtcaatccaaaaggacaaggatcgaatccacctagtggatactataaggtctcccgaaggtaacagagtaccaatccccaaagcatacacatcacatggtttatgaaaaaattctattactctactccacacgtaagagtgagtagctcccgaatcaaacaacacagtgtaagaacaaccatttatagataattgacatgtcatcactaacggactagcatcctcgtcaacctgagtcatggtaaatagtcatcccgggttctggttggtattcttcttcgactcttatttcttggaatgaggacaatctctaataaagtagcctaccatgccacactgaaaataagttttggctcggcattcaccctgatggtgttcttgcattttggacactcaaggtatgatcggaatgaagatttgtggccttccgcttgtgatcagggttaccatcattggtccccttactgacattaccacttacaagaggatttgatgtcgtggcggcatcctttacagcctgcttcttaatcacatgatgccctgcctcctcatctactaaggctagttcgaccactttcttatataatgtgtcgtgagtagtggtaatcttcaagtctcgacggattgtggcattcagccctctcacatatttttgtttcttggtgaaatgtgtaggcaccagatcaccagcaaatttagacagccgatcgaactccagagtgtattcggccacagtcgtttttccctaagtcagttttataaagtcttccatatgtgaagtccttacagcaatgttataaaacttttcctcaaacaaactcttaaactcatcccaagtcatcgtactaacatctcgagtctgccccacaatgtcccaccagacgcgggcatgatcttgtaacataaaggcaatacaatgcactctttctattctcgtcacccccatattatctaggatgtgggtaatagtactcatccattgcgcaactttaattatatcagcacctctcagaaatgttggaggttgcaactttacaaaacactcaaatactaaatctctgtgcggtagtatgagtccctagttacccaccactggcacaggagctggtggtaaaacttattctgcaggggctgtcgatgctagttacctcaactgacgtaattcttcttcttaacgaagtatgatacctcgcattttttgaaacatctactgctagtcagcaggcagattagcattgccaaccgtagcatgatccctcggattctacggaggcgcaggcagtgccggtggattggtttggtctacaataggctctacttgctcgccatgtggtttaggtgattgtggagggtccattttcacaaataaccctgtaatcaataaccccggcgagttagacaccaataccacacatatgcagttattacctttaaaccctaactcaactatttcattctaaatacataaaaacatttatcaattaatataataagcatggctttcatatcacaactattctagatgctcacatactgcctaaaatggaaagtagtaaataaataacacataagtagttaagcgtttactctctacacttactgcaccacgagctgagcttgcctctgacgatgatatgtttagccagtctacaggaagtttaaaaaccttggcgctctaataccaaattgtaacgccctaacaattaggcacgctacgaaagccgatattgaaaccctaatcccattaatccgggattactaaaaagataagcgcaggtaaatttaaactttattaacaacagaatgaaaatataacttgtaataatttttaactttacaataaaccaaaaggtacaagtttcgggatcccataaacattttcaaaaaatattacaaatttatttcacgtgtcgacctaagcagtaaatcagcggtttcaaaatacattactggtagaccccaactcgcttggtctagtgtggcccgaacatgtacaagcaccgccaagctctcgcactcatggctaatcacagactgatttatcctttcttgcatggtagagcactcgtgagccaagcccagcaagacagtatagatatcaataatcacaaataacatatcgcatatataataatgtcatttcacttattgtctatttgatatagacctgcttgttacgctcacacgcccatatatgtctatgtggcatagacccacctgttacgctcacacgtctaaatacaatacgaccttaaaatggttcgtctcagttctaattactgagtccaaccaaattatgccctgaattcataattcttaatctcaacatctatagcatggcatagcatttaaacatcaataatcactagggtaataaccttagaccatataaccgctcactttagggtaataaccctaatttcggtttttaattaatcacaattataatattcaacatgagcgccactgcacttaactctacgtgctaactactatcttacatgatatcccgtaaacgtggagattctaaatccctggg

SEQ ID NO: 32462 - DNA, 3440 bp, Cannabis sativa
aagcagaggtaaatatactaatatatcctgtttttccttttcaagtaggattgaaaagacctttataatttggagtgtgcatgaaacatttttgacctttatgaagtaaatcagtcatgcgtagagacagtcatggaagaattcagtatattaaggttcatttaagtttataactgataataagagaaatctttgcttgcttaatacaacttgaattttgaggcattgagaaattctctagcattccttatatttgagatctacacaaaagttaaaaatcttactaaagaaagatttatcattacttgaacaaaaagtgaatgtgaaatatgttatgtcatttagacatttaagtgggtcagtacttatttttagtgcacactattcgtcccattcccattcatgaagttagaaaggaatctaatttatctcatctgacatatatatctgttgtcttatgctatcaggtgggggacgagggcgtggttgatttggtggttagttggtgaaacaaaatattggaccattggctgcttttataggcatattggttccatgttcaagtcaaatgtctctagtttccggcctctgatattattttctactgctgtgtaacgcatttggaatgtcgctttataagtagcagcaaatgtagctagtgtttttctttctttttttattgttttacataactagaagctatttattgtgtttcattttgggtgagtttgaggaatatatgcgtgcatttgccaaagtaattcctgcttggccttgttattgtttttcttttataaacgactctgttacatctatatattttgctccagtttcttttcattacaatttacatgttagttttgggttgatagtactagtagactggtttgtaaaattcttgtctataacttgtaatttaaacaagacaattaattatacagtgaactcacgcaaaggtgaagaggataatgcatggttttaaaacaccatgataataataaatataaaattcaaaaaatacatgaaaagttaaggaaaaccaatgacaagattgcaaaaaggggtagatgctagtaaggttgatgcctagttttcttgcgagtattgggcgatctcataaccaatgcacttgagaaccaggactgatctgtctgtgatgaatcatctaaaacccagcaacacaagcgaccatcttcaccgcctgtccatccgaacatgcctggactgtgatcccgtccactgcagatgcttgatacaggcaaagcacttctaacaatgccaccatgtccgcccataagaaccgcttcaggggaacctatagctgcttctcctttataatttacaggaaagtaacccaaattgccagaatttgtgccaccgacaacccaaagtcgttcctcttgttctgagtagtggcaatcaacaaagtaatcaacctgccaaatcataacaggccaacttaaacctatgcaccatgtttcaatgaagatttggtaggggcattagtcaattaaaatttggagagagattattacttgatctgaagtccatgacttggaggctattgagcgagcatcctggaaatcgccttcatttcttgcatcgttccagtcccaaatactacaagcagcaacagttaaaaattggcttacacaagataaaaaagagaaattcatcataatcaatttgggtagctatgatgacatgaaacataagtagattaagatcgatacctcaaagtttcaatatgggacaaacaccatagtttctgaaacttatctccgaaaaaccccacttttccaattgaagttcccacattaatcacctgaacgtttgcaataccaaaggaacagaacataagtatacacattggctccaaagaaacagggaaatgcatattatgagcgagaagcaaatacaatataaaaaggcgcttactgactccaggttatcatcgtcgttgatgtcaccgtctgtatcaaatatgcatatcaatccatcaacagaagcagataacaacttgcttggctggctgggaatgaagtgtacctagcaggtataattaggttgttaataattttgtacgaataattctgtaacataaaccaaaataaatgaatggctatgtcatcaaaacaacataaggcacactaaaaaagaaaccacagttgtttttctaatatcttagaagtatatatgatcaacctatccaaaaacattttattatgcaatttctgtttcacagcctaacaatcacattagagatcagatatacgattaagtattcagttattacagggatgtatcataagccacaaaagcacccaatgaatatatatatgtatattgatacgtttctatacatctgcaattcatctcaaccaactgactacaatagtgaccctatatatgcctgcaagtatacttagtgtgaattattggtggtgtcaaagcgagaagagtacatagccaatgagcctgtatacgtatgaaccaacctgagtaacgtcctcaacatgggagtcctctagacatgcaacttgtttcttgttcctccaatcccaaaacagtatctgagattataaatgtcaagaagcaagaaatctcaacaagaaaaaagaaaagaaatttcacaatataaaacaacaaaatctccatacagagggtattcgaagcacaaatactatggaaactaatattaacacacactaatataagtacttgattccttaaatatcatcccaaaactaatacacacttccttccttctccactatggaagcacaaattcaggaacaaaaactctgcaattcattcccctatgccaaaaagtgatatttttctatgataaaagaacaaacatctgagatatgaaagcctctaaacacaagcaggggtacctgtgatttacatcccgcggataaaagattaccagtggatcctccaaacgaaaagctgaagatctcttgtgaaggaccagcactaatggatgaaacctgtagtaccaacaacaaaagtacatacatttacttcaattgaaatgaaaaaaagagagaaactacatttagtcccacgtactaattttagcaaaaaaataataaaaaaagaacaacaacctctttgaatgtacgggtgtcccaagctttaagggttccatcagaggagcaagagttcaagacatgaggggttgatgtagcagagaaagaaatgtggttgattgtatccgagtgacccttacactctccataatactgaccagttactggtgagtaaagcttcactacgttcgtcgacaatgagaccgccatagatgtccaatcattccttccatcaaaatggaaaattttctaaaacccattaaacttatacccttttggttcgatcaaaaaacaaaacaaaacaaaaatccaaccaatagaaaatgaatatggaatttttga

SEQ ID NO: 32463 - DNA, 3049 bp, Cannabis sativa
gcaaggttttgcttaggaacccaacttagaggtgcaaaagatatgctaaaaaatattattggtgtctagtatcctcctatgtgtcaatattgttattggttcaattaagtattcagtgccatataatttaatataataatttttagagaatattgctaattaatcacaaaacaacatgtgtaaagaaatactatgcaccattatgttcaatgacaatatgtaactcacattaattgggattggccttgcgatttggcctttcctttttccttccttgttttcgaaattcataaatgcctaataatgaaatgattaagtaaagttgaagatatctcttggatcacaaacttcttgaatccgatgccctaattgatgcacttacaagcaatcagtcttgaattccgagaagtaatgaaggaaccacatgatcccaaataaaaaaaaataaaataaaataaaataaaaaaataactaaaaaaaagttttacttcccttaagaacagaaattttcattttcttttgttatgacatatagatgttagattgtagatgtaaaggttttttttttaataaaaaatattcattttttctcttgcttgtattaattaaataaaatataatatatataatattctttcactacataaaataaattttatttagaagaataatttaagaattattttacttatatttttctcttataaatttattttattagatgaaagatctaaacaaaacctaaggctaaagggaaaaaaaaaaaaaaacctaacagtactatagtgaggtagcataaaaaggagacattcattaaatttatattgaatgggtaaataaataaaagagatcggctcaaggggttaggccattaagaaactgtctatagcatcccttgaggtaattaaaagctcaattatacaaattttactaactaattgataagtgaaaaaattaatgctatcataggcattaattactaaacaaaaagttctttagatgtcacccaacagtagttctctaggaactttagtttatctaacttctagtttagacgatgagaaacttttaattggataactttattttgtaatgttcagaatttataaaatatgaagaaaaatatatatattttttaagtagtgattagaattatttatgaatttacaatgtagatatttgtaaatagtgtaggaaccctcttgaatcaagatataactcatcgtctaactgaattgggtatgctttgccaaactatgaattgctaaaataagtgagcaacattgggacaaatatgcccccataaatttaaacaataaagatataacgtataacatacaacatgaatacaagttgttttctgtctcaagagaacgaattcgttggaattatatggtttggagttggttaagtaagctgaaacatagatttatcatgtggttggccattcttgaaagattgcaagtgaaatcgagactttttagattcataatatgtaaagatgacatatgcttgttatgtaggaatgacataaaaactgtcacccacttattctttgaatatcatcacattgaacaatgttagctataaagatgtggttggggtggacaacagatagtattctgttggcagatttgataaagagaatatgctgaggtaaattgagcaagtttcgaaaaaatgtgatagctttgataatggcagcaactatatatagtatttttttttttgataaccaactatttggtggaatagaaaatgattctttttgacaccaaagaaattaaagttaatgttaaatatagagtcataacaacctaagaagataaggcaataggatgtagattggtttgaaaagtcgtaaataatttttggatttttttcaaaaatatacataaaatataaaataattacaaaaataacttaataaatctcaattacaataatgtcttgccatgtcattaaaaaataccttaattctaaaataatatgcctgaaataaaactaatcccgaatatatatttttttttttaattttcttgtgtttcaaaagtaactttttagttacttatgatgttgataataaaccaataagtaactttttcataaaaaaatatcacttttatattatataatttgatatacatttttactacttttaaaatttataagtatgcaatttaataatcaattaattatttagattatattaatacatttgggtaactttcaaatttattttataaataataaatggtcatccagtagcctatcatttttgtaaactgtatttcaaaaaaaatatatacataatatttaagtcacccatattttttttaatgtaaattaataaatacattttgattagttaaataaagaataaagttacaaataatttctaaatcattataaatacgatatttttttggaccaattaattataattttgataagataccaattagttacttttgataaaatcatcaattttaaataaaaagatgtgatgatcagacgaaaaatcttatataatcaaaatatgtctatactcatatatgtcaaataaacttattagtttattttggtatattatttactttagcatattgaaacaaattttcgttctttgtttacacttttcgtatagcttaccatcatatttagtaacaaatctattggtttattttggaatatattgaaataaatttttatttttcttttggtatattggaacaacacttcatttcatttcatatagtctacgtttatatatgtcaataaacttactagtttctgtttgttggaacaatattttttttaatacagagtaaactataatcaaacataatgatatacaccaataaacctattagtctatttttcgtatattgaaacaacaattttttttttcagatcgagacatcaaatattgttatatataaaatacataactataacatgtcttacagacttacatagtaaacttggataacaatatatgcacttgtcaaagatttgaatatgataagatgtcttgctcagacaaaat

SEQ ID NO: 32464 - DNA, 5628 bp, Cannabis sativa
atattgactttgaaagatataacgataagtttatgatattttatccaagttcaatatcggtccaatctaatgtaaactccatacatctgatactggtaaataatgtcaataccttcaaaaggacataacacttatccaaggtgtaagtataccaatatttttcatcttattttttttttaattttttttctgtcaataatttcgaaattaaatagttgattatttgtctcgttttttaaattctaattgtatctctaaatatctcaattagattgtttgctgtaattttaatgattcctattaataaaattgcatgaattattggaaaaggaaaaatggaatgtgtttaagtgatgtataaatgtggatatacaagaaagaagtcaagtcttccacggcggtctctacttaatttccttctttctttcactttttctaatttgtcaaatattcggataaagttcatatctaatgtagcatttctttttatattctacacattacaaccacccaactaaatccggcggctgtaagctaatccgaatttgtggtgttatccttatcggttatcatataattgaaaattttaatgtttgaattcaaaaagaaaattaaagaaaaatgaagcacaaacaacccataataatattaataagcgaatgatacaatctttgtacaacgacaaacagcaataaccaaaacgacactgagttttaaagaaaagctaataataagctaaacacaaaaacgacaagtcctaatgccaaaacgactctaaaatcaccacattaacaaatagtagagtaggaacattacactacgccaaaccaaaccaaaacgacatagattgtagggtaaaacgacacacgttattcagttgagaaacatgtctgcggaagccgtgatgggctgaatggggtaggcgagctgccatggcttcatgagaggatcaggtatctcgggaatatcgacggagaggccactgacatcttcaacgatctggagaacagagttgagagagcggaggcgatcggtgagttccatggcttgagccctcaacacgttgttggcagactcaacctgagaataagcctgctctttcgcattgatgctctgctgaatctggttaatcgccatctgcaatcgacccgtttctccagttagatcctctaactgcttctgcttcctcatccgggaacgccgtgccgattcgcggttagaaagcatccgcttcctcttcttctcgtcgaccaccgtcgctgacccgtcggagccggagctcgcctggcgttgaatcgatgacatttggggtttttttgttctctttttgaattagagacttaagaattggattaggaaaattggggatcagaattgaaaattaagcagggaacgggaaaaaaaaggacagaaattaaaagaaacagattaactgaatacgaaatttaattatactgattatgacgatgaagattaattcatgaaaacacgtagaaccagtagagaaagacaactgagaacgagtgaagcaaacggatccgccgcatgagggaagagaatgtcatagaatatctaaattcattggcgtagtctacgaatccaccaaatatgaatcacaacccagaaaaacaattcaaattgtatagatctagagaaaggagtcaacaaaacccctaatttgaaaccctagattatgattttttccgatgaaagaccaaatatttatacaactttgaaaacaaaatctcaatcaaagaaagaaagaaaagctaaatcaaaagaaacgaaggaaacagctagagagaaagagaaacttagctgaagaaaagagggaatatgcgaattgagatgcgaagcgaaagaaggaaggttagggcagaagaagagaaggggttataaaggaaaaacaggcatgggatttggggtaatttcggaattataattgtaagtgtaaatattaaaagttattacgtgtcgtttttttattgggcgatgcctatattcacgggtttggtgttggcaaattgtctggtatcatggctggcgtaagaaatgacgtcatcaaccagctatacacacgttttaaggcattccctgtcttcattgcatttgcagtacggctacctccttccacgacctttctttttttcttctttaattattttttaactttaaaatgtaaaaggtgtcaacaaaaaaatatttaattataggttttctttaagaaaattaagtttgaaaaatctgtagaaattaaaaaacattacagacaggccacagcttattctattgaaataatgggtaacatcttttattagtagaaatgagtaacttccttttaaaaaaaaaaagtaatgaatatctgtccaaaaaaaagaaaagagtaattaatttaaatcttaatttaaatctcaaaatttaaaagaatactagtatttcttttttttttttttttttgaacatgaatactagtatttctaattgattaaaagtttaagtgtatctaatattacttatttatctgtaaattattatattgaattgtgttagttgttttcttttcttttttttaagcaaagtgatgatgttaaaaaaattgattatatataattacataaattatttatgattaatacttagcttcgggtcgggttaataatcctacttagttcgaattaataaccgtgttcataatcaatttcattttgtttttggaattgctttatttaatatttttctaaaatgacgccaatttgcaattccaaatttactaaatataataaatttagaaagatattagtaattaactgttcatttccaaaattagagttttatttatttgttaaaaaaaatgttagttcatttatgacaatatacattactctttcatattaagttaaatccattaaaaaacaatacaaaaaaaaacgataatcaaggcaaatgagatatgttaaggctaacaacatgatatactaacagcgcctttaacaaaatttccgttagagatttttggggtcgtatcacctgatacgtttggtagtctctctgtttttgagagtttgttctgagttttagtgctatttttgtttggttccgattggtgtctaagttctatgatggcatccagtagtagtgaggaaagagctttagacgcagggagagaaacgattcctttggatgaggaagagacagaagttttacgcctccaaggtatcaacacataagaagtgtcgattgacaccagatggtgcctagtgggtaagcttttaactggcagagtctcagattttaatgtgtttcaaaacatgatggctttcctttggcagccgggaatgggaatgtacgttcaacccgaatttgtttctttttcaattctatcatgagattgatatacaaagggttattgatgggagcccgtggacatacgatcgtaagcctttcattttcactaggttgaaggaaggagataatccaaggctggtcgaaattaacaatcttgatatgtgggtgcaaatacataatttacaaacgggaaatatgactcttagtgttgtgatggtgcttggaaactttattggtacgttcattgaatcggatcctaataattttgtgggagtttggcgggattatcttcgcgtgagagtccgattgaatgtcaataaacctatcaaacgacgaatgaagataagtatcgacaacctttcctggtattgggccaatttcaagtatgaaaaaatcccaactttttgtttcatatgcgggataatcggccattcggagaagttctgccccagattgttcttgaagccgttacacttgcacgagaaaccttacggattggatcagaaggctcagacacagaggagacaatcgacctttggagcacagtggctcaggtcaggtgcggtggtgcgtgaaactccgggaagcagttctgcacagggtgttaattcttgtcctcgatcagtggagattattggggatttgataggcaagaatcatggtaatgataaacttaatgatattgtgccaagagatgggcgtaatatcagcaagatgacacaaggaataattgaggaagatttgactttaaatgtcaatagtaatggaaacttttttgactctactattaccacaatggttgacttaaagagaaggaggcctgattccactttaggaaactttgggggcccacgtatgagtgaagtttcggctacagaagatgatatggagcaagatggcttgaggctttcaaaaaatgggttggtgggctctggtttccaggcccaccaagagtaatgagttgttaagctggaattgccgcgggcttgggaacctgcgggccacacaattcttaagggaccttgtgtctcaaaagaagcacaatttgttatttctttgtgaaacattatgcaataagtctagtttggaaagtttaagagcccaaatgggctttgaaagttgttttgtggtggaagctcgtggtcacagcggtgggcttgctctgctttggaaagaagcgagtgaagttgtcattcaaggcttctcttttcatcatatagatgccacggttcaaatggtggggctgcctccttggcgtttcactggcatttatggagagccaaaaagagaactccggtctcaaacttgggatctttttcgttcacttaaaaatgatagtcatcttccttggtgtctattgggagatatgaataatctgaggtctcattttgagaagaaaggaggaaggaagtaccccgatcgactcattgaggggtttcttaaggccttggacgattgcaacttgatggacatgccccttgttggttacccgttcacttgggagaaagggagaaatagtattgagtggattgaagaaagacttgacaaagctctcgtcaccaactcttggctatcaatgtttccacattcgtcattactcaacttggagttctcaacaaatgaccatttccctttgttgctaatctttaaaggtaacactcctcttgtttcttttcattcttttcgttttgagaatgcttggcttcgggaacctttgtgtgagcagcttgttgagggttgttggaggggttcgggtttagtcactattcaagagaaaattcatcattgtggtgaagtcttggggagatggggacgggacataacagggaatttccgaaagcgcataagtgaatgcaagagtcaaatccgtaattctaaatggggcaaagatcctatttctatccaacaacacaaagaagggaaggataagttggcagaggtgttggctcaaaaagaaatcttttggaagcaaagatctaagcaattctggctaaactcgggtgataagaatagtaagtattttcactcaattgctaattccagaaagaggaataacagtatttcccgtcttcaagatagcaatggagagtgggttaattgggagtcgggcatggctaatgttattactagctatttccatgatttgttctctacttgcagtgttaacttgggattggtcttggatggtattcggccaactgttagccgtgagcagaatgaagatctcttgagaataatttctgaggaagaagttagaaacgccctctttcagatgcatcctga

SEQ ID NO: 32465 - DNA, 1623 bp, Cannabis sativa
acttctctacttgattttctactgtaaggctacaatgtcattctttcaatttcatagatgttactcactcatcgatagacacttgttctatgacactttgaaataaatatgtaagctctttaaaaggtcttctatatataaatatttaatgatccatttcgaccgtctttttgtctaacattcacttcttgatatcctttatccatgtattcattgtatttgtcacgccttcccattttcttaggtaatcgaagttggtttcttttgtagtctctttcttgtactactctgttgtattttctttgctaatctctcctatggtgcttggtcttctattactcatttcaatcaaatcgacttgattatgaggttagctagttttccacactaactttgtctactttggtattacattgatatagtggtgaagtttaaatctgaaacactaacatatatgttcaatgattgcttcctttattatactaaccctctacgtatcacagcacttcataattaaaatacaacatattttttttcaaccatatttatgtcttgcatatggtagacctctttaattcacaaaacaaatcctaacttcttaattgcactgtgaagacctccaaaatctaaaaccaacttacattccagtacagaccatctacttttagttaagtaagatcataccatacatgttctaaaatatcgtaagtacactagtaaccctttaaaacgaattcaaccctaacatgggttaggtagcccaactatttatttatcattgactcttaacaataggttaaccatctagtctcataatattaatcagtcaagtttccgaggtaaagatactatatacataattggcaaaacatgccaaacagaccttactctgttcactattagtataccttctacaccccacttgtatctgatttgctactagagactcaccttttataattatttagtcagggctctttgactcgtacttcctaaactacattttaaaataagtcaacaattcacttaagcatcttcattccatatctgaatgcaatcatgttaccaatatatacctcccttgttcttttcttctaatttttccactgtcaattggatgaaacttaattgtgtgcaataagttggttattgtcagcttgagagagtccttccaaagatctctgttgctggctttttagattgataaaaatatctaatgtttttctaaattctttgctcttaacaattttagcttttgacaaatccattgtcattctcttctcaggaactatagggcctagagacaccatatgttttcattagggctggactctgtgagttttcctcttagtttctcattatgatgacactccaatatgcttatactattgtccataatataagtcgtaattggattgtagtatcctttgcttacgttgtgccttgaattcctttatgttgcattagtattttctgaccccaacacttatcaaaaacttgtatagtccttgacatgccatgacattcttcaatatatgttactttggtcctaattgtgtctcacttttctcctgtctctaagtgaggctttcctaacattttctcattgagctatactccaca

SEQ ID NO: 32466 - DNA, 3085 bp, Cannabis sativa
taccacccctaccataaccagaggtaggaggagtaggggcaccaccaacaacctgagtcccttaggactcctgagcgcactccactgcgcccttagctcgcagtgccttccccaccatatcagcataggtggtgttgtcattagtggtgatcataaggtcgtgtcttatctttgaattcaatccatccatgaatttttctttcttactgaaatcggttggcactattcccgaggccaatcttaccaatcgatcaaatttagttgtgcattcagtaacactcatattttctttctggtgagctgagtaaattcctttctttttgcacttctgactgcttcattatagtacttcacatagaacaactcctaaaacttttcccaagtcatagtggtaacatcacaagtcagggacaccatatccctccaaacctgggtatcttcttgaaattaaaatgtggcagaggccactctgtcattgccggtgacacccatgaaatttagaattcttgtaataaccgtcagccacttctcagctttcattacatcgggacgtcctagaaatactagaggtgcctgcttgcagaacctttcatacagtggttcactgcagcaactggtcctgcctgcacagcaggggtaggagctacctgcatttctggagcaagcattgcaggagcacccggctgcctcaagcgtctgatctcttcctcttgctcgttaattttggcttgcattgctgcaagcctattttcccattcctaggcaacctgcggtgggttaacatcaccccgaccgcatgccctgcctctaggcctctgcctcagccatgaacatttgggggaatttgtactcccagaccgccactggattcaacagagttaccttgactcctggtattttgtctagcgtccatactattaaaacaacctcataactaagagctaggctagtcagatcgcgatcaagaataacttactaattaccacttatttggaaattaaaaacatgcgcctattcagctattaggctagtagcatgcttcctattaggcttttcttaaaacgtactattaacataaactactaaagcaataaaggcttactgaaccgtgagacaagctaatcactgatgatgattgtacatgtcgtgacgatctttgaaagacaacctggcggctctgatactaaattgtaacaccctactagtttaggcgtgttaatgtgatttttaacttaactgtgaagctcattgctaatcaacgagtttattaaaaatcgtgattaattaaaattttacttaattaattataaacactaaaataaaatacatatattaaactaagatctcatttataaaagtatttacaaaagttttactgtacatatacaaaattttttcgcctagtgactatacaaaatatgccctgatgtcctaaagactgaacgctccaagcctaaccgccccgacatgtacaatctttatctgctcgctgtcatgctcaaccttggccttgcccatacctacacatgcaacaatatctgtgagtcgacaaacttagtaagaaaagcataaataataacataacaataacctggattataatcaggcacccatacacccaaccataaccctaactgagttaggaacgttctcgacaaagtatgactaactgggaatctagcctatactcagtactctaatcttactgatgtggtagcagataactcataatatctaatagcctagcatatatatgttggcatctcggtgcaactctatgtacacctcaccgatgccttgatatgctaatctgattgctataaatttgcctattctgacggcaactaccatgtaagctaaaaaagtatacatagatgcaaccattatactaatcttaccccgtttctgaatttaggtgtgacggccaacctgagtggagcaactgctcgacaaattacaggaacctaaatcacattattcgtaaaactggtgagcgacatgctaaatcacaatctggggacttaaacttgaaactaaatgtttctctatttatatcgataagaaacatggaaataccctaaaaatcaaggaatcaacgaaccaaagctctgaaaataacacgaatcgacaacacgaaaaattcaagaaactggtttcagattcggttaaccagttttatagggcctatggaaccggttaactggtttgcaccaggtaatccaaaataattcgaaaccttgaccaattcgtatccaaaccaaaccaaacattctagacctgcttaatataccccaaggaatatatttcaagtagcaaaacaacctaacatgctcagaatcaaaaattgccattaaagatcaaagtttgagttttaaaactcaaactttgtctaacaacctaatccagcaataacctagtctcaaatcatctcaattaacattactttaacttcagaatactcatacaaaatcaaaacataacaacaacagccctatgtccaaaatcttgtatagaactttaacttagaacttaataaatcatacaaagagaggattaagggttttaccttggattaaaacactagaatcatgctggaaatccctgaattgagcagaaaaactcccaaatcctagatggttcaaggaaaatcgagagagagagaggtttgaagaaagagaaagagttatgtgtgtttttttttttctaattttttgaatactagaaagtactagggtattatctaactaatataggatatattcagattatataaaagttaaataaaactcactaaagacaaaggatcaaattgccaaaaagaccattttacccctcactaaccaaaaagcttctaatttactgaggggtattttggtcaaatctaaaatctcaactatttccgacattcccaatgtctaaatataatgccccactatactaaaaatactaaaatgtgattctaatggccaaacgccgcattccgatgttactgggcacaaaacatgcaaaacaaaaacataaaattccttttatggcatataaaatacattctgaattcaaatgaatctccataaaatgataattc

SEQ ID NO: 32467 - DNA, 4198 bp, Cannabis sativa
ctttggctttggtgacacacctcaggagaggcatagagaaactccatctgtacaaaatcgcatctaggatcaagtacctagcagctttttccttagtttggtagcctcgtttttgccttttagcaaggctcttatttataggtaagctgcaataggtgtcatccatgttggagtgtcatctagtatgtcaacctcctctaagacaataatgttgggttcttctaggttctatatgggcaccaagtttgctttgtcagctatggtactgctcgctacgcgagcaagtgcatctgctatggcattctattctttgaggatttgcttgatcgtgtagcctttgagctgacttaataattctctgattttgctcaagtaggcaaccattctatcacctcgagctgtgtattcacccaggatttgactcacagctaactgagaatcgttgaatatgtgcaagtggtcagctcgtacttcatatgctagcttgagggaagctatcagggcctcgtatttagcctcattgtttgaggctttaaagctgaatttgattgctctgtgcacttgttgcccccaggtgttgtaagggcaatgcctgcactggacaattggtcagtgcagctttcgttatcatggagtttccatgctagatattcgagattttgttgctgctcttaatctcacttcttctctggctcttgttattctccttagtcttgaggggtctcaagagttgagttagtgcactcagccacgaagtctgcaagggcttgaccctttatggttgttcttggttggcatgtgatctcaaactggccaagctcaatggcccatttgagtagtcgacctaatgcttcaggtttctgtaaaacctgtcgcagtggttgatcggtgtagacctttatggggtgtgcctggaagtagggcctaagctttttggaagataaaaggaagttgtaggccagcttctccaagagtgggtattgactttctacatcgaccagtcttttgctgatgtagcatatagggtgctatacatcgccttcttctcctgtgaggacagcactcacaacgtgctctgtgattgctaggtacacgtctagctcttcattgtctatgggtttagacaacaacgatggttgggccagttacttcttcagctcttggaatgcattttcacattcctctgtccacttgaatatattgctgcctctgagaatgttgaagaagggtacgcatttgtctgtagacttagacacaaatcttcttagtgcaaaaatgcgtccagttaggctttatacttctttgatagttgtgggcgacttcatgtcaaaaaaggcttggatcttgtctaggtttgcttctattcccctagtgttgactatgaagccaaggaatttccctaagcttacgccaaaagagtatttgagggggttgagtttcatgttgtagctatgaaggattttgaagcactcgcctaggtcctccacatgcccctgaccattttagacttaacgagcatgtcgtcaacacacacctccatgttgcggccgatgagatctctgaacatcatgttcaccagcctttgataagtggtcgttgcattttttagcccaaagggcatgactttgtagcagtatacgcctaggtccatcatgaagttggtgtgctcctgattaggtggatacatctttatctaattgtaacctgaatctgcgtccataaaactcaggaattcatgaccggccatggcttccactagatggtcaatttttggtagcgggaagtagtcctttggacatgctttgttcagggtggtgaagtcgatacagactctccacttcttattagatttaggtactaacactgggttggatacccactgagggtagaatgcttttgttatgaaatcattggctctaagccgttcgacttcatctttgagcgcccgggcatgctccttgttcaacaaccacctcttttgttgatcaggctagatgttgggatcaatgttgagtgcatgggtcattatggaggggtcgattctgacaatatttccatgtgaccatgcgaactggcccaagtcttcccttaaaaattatttcaagattgacttgatttctagagccaaacctttaccgatctttagtcttctagttgggtgaaagggatcaacttccacttcttccaactcttttacaggtccgaagcttgctacatgatacctaaagcaaggatctatgtttgtgtccccgccttgggctagacttcattgccccttgtagggctcatcttcttgacttctggcagccatcttctccttttcggccttggataaggccaagttgtaatagtgacgggtagagcgttggtctcccctcacacatgccactccatgccttgttgggaatttaaggcataacttgtagatagacgtaaccaccttcaagtcattgatggccggttggccaatcatggtgttgaaagctgagggaacgtcgatcacgatgaattgcatcatcaatgttcttgtggttggattttctccaattgtgaggggtaatctgatatacccgacaggtgcaatgccttggccaaaaaagccatacatcacttggttataaggcaccaggtcggtgagttgaagccccatctttcatatgttgttttgaaaagaatgttggaggaggctctatcgtccaccatacatctagccatggtcatattcccaatttgcacagtaatgaccaagggatcattatgcgggacactgactggtgttgcatcttcttcggcaaaggagatcgtgggctccataggcttctactgcttagagcttcggtcttcgacagctaggactttgcctttgggctcatgatggagtgtccgagcatcgcgctcgctagctttgttagttttgccagcaatgtggagtctgcctatgatgacccctagatgttcaaccacgggttgtggcattggatccccattttggcctccttacgcttgggtttggttgtcttgcgcataacgacacaggtggggattgttacaccttattagatactcaatctccctctttacatttcgacactcattagtgtcgtggccgaagtcgttgtcatatctgtagaactttgacatatccctcttgcccatctctcttctaattggaaagggctttcagtatgggactgttccttgagtggccgtgaagatggcctgaggcttctctttaggaaggtgaagcaagtattcttctcctccttgttcatctgtggcatgggagaagtgttaaacttccccttttggcaagtgttcctcccagagttgttggtgtcgcgcttgtttctagtgtttttaccactagaagtctgggcagcattgctattgtctacctgtgcggccagtgggtaataatgctggtgggtgcctcatgacttcctgctattgacatgccccgcctgggcctgtcgtatgggttcttcaagtttgataaagtcatttgctctaccgagaaactccttcatgttgttggtggatatcctccggatatctttccagaagttgcttagtgggagtatgcccccccagtatggccatatattgcctttttcagtaaggcctttgactttggtagcctcgaccatgaatctctgaatataatcctttagaggttccccttgtcgctgtttgactttgataaggtcttccagctatgatggtacaagttttgaggatgagaattgcgtgtaggattctcgtgagaactcagtccaggagttgaatctccttggggtgagtttaaagtaccattgttgggctatctccgatagtgtgtttggaaatatgcaacaacacacatcaccaatggccttttggagattgagctgcatctcgaagtatttgatgtgagccagtaggtcctcttgtctggtacacatctttataccgacatcttgaacttcagtaggggtaaggcatttatatatgctgagaatggtgatttccttgaccgatcaagttcaaggtccgaaggctttgggtcagctatgccctggatcatgtccctaagtttgtccaattgtgattgcacagaaggatctattgttgtggggacttgattggctagccttccttacggaggctacagattttgaaaagataggggctggccgaccataccctgggagagtgtatg

SEQ ID NO: 32468 - DNA, 995 bp, Cannabis sativa
caactcacataaaaactaccagagaatccactttagaaacccaaaactgtaaatttttaaaaaaaaagttaaaaaaaaaatagtatatggagtaatttccttatatgatttattattttgtaaatacaatttaaataaaattaaacatttctttctacatacacttttttcctttaaaaatttgttagtttttttttattattattttaattcgttgttggagacataaacaacaagaatttgttttgttttattgttaattatgtgatttttataataaattaaaataatttaatattgaaaagtgactaatcttgaattaaatttaagctattgtgcgaatgaaatattagatcgaaaatataaaatccagactaattacgaataaaatgcactataaataaaattgtgctaattaaattatatggtaacccaagatgtgttaaactaattggcatttaatattatatagttttaatttatatatatatatacatagttaacgtagtttttcattactttttcttataatttttttaaaggatattcttattattaattatttgaaaaattgtagcaaaaattttcaaaaagtttactttgatgcagataaatctccaactttaaaaaataccggtaatagttttcaagttcgaaatttttgtaagttctgttaggctatttttagcctaagtttcgggtcgcaagaataagttttttctcaaatattatcttttggagcggttttacgcttgattttttttatttcaggttcccggtgcatttgagtttaaattcagtcaattaacggaaagacgggacaaactggtggaaaatcggctgaagctgttaaaattggatcagtagtcgcgaccagcgtatggcctagttgcgacccttttatctggtcgcgactatggtcgcaactagaagattttggcagaaactctgattttcgagttttgcctgtggtcgcgaccagcctttaagtgggt

SEQ ID NO: 32469 - DNA, 1682 bp, Cannabis sativa
atgattgtgatgatttggatgtattcatgttcgtttatgtgcttaattgatgattgtatgttcattacaaatttttgacaaaaaataattgttagttttatactagaattattttttctagaaagtggatgaaaaattcatgaatttaggtttttctataactcaatttagatttttattgaattagttatgattttttttttatttttgaaaaaatatctagctagggtgtaggtggacgcatgcgcgaatcgggtgtcactcggttaggaggaccgagcttcaaacaaccccatgactaagttttctcagacaagggttgttaaagccccagctgacatttttttaacttttaaaaatcgtttttcaatgaaataaaattcaaattttggtagaattttgtgtagaatcttaatttttaaataaaaatctaattatcagattaaaattaatttttattaattttttaattaatttaatttagttttagatattagtgggctttgaatttgaaaaattaaattttcacaaacttgcatttatggttattttaaaatttgattatttttatttagatttattattttaattataagatcatatatttacatattttacttgaaatgatcttattttgacattaaagtattaataaaacttaaaaataatctagctaaaatttcaaaattgctaaccatatcacattttcaaaaacaaaaattgctgtttttaaaatatattttattaatttaaattataagattaaaaaaatgttagttttttgacattttatcttattagatatttatcttaattaaaatttatattttttgttaaaataacatgaaatttttgaaaagttgttaattttgtttgaatagatattttaggattttctaaccataaaatttttaaatttaggatattttatttattctttaaataaaaattgataatatcctaaccataaaaatatgctattttcaaatttttttattttgttaaatttagttagttaaattattagatttaaaatataatattggaaatatctcaaatattaaattaagatattatattatattatcttattagttatttaatgaatttaaattatttaaataaactagatatttaaaacttagttagatatttgaattttaaatatgaatttaagatattttagagtttgttatattttaatattttcaaatattttctaacaatttaatttgaattcaagtctagaaattttttaaatggtttattttaaaatagaaatatcttaacctactttccaaatatttttacatgtaatgtttgtttaattaattatttatacaaaaacgttttttaacaaacatattatttatttgatttaaattgctatgattaacttgttgatagattcaatgatatgattttaatcatagtccaattgtcaataaatcaaataaataatttgaaataggtaaattttgtaatttctttcatctgtgataaacctagtaacatgatagggcccatccaaatcagtttgcttgtgtaagcctatatgtttatttttggacttagatgcatataggaagctcatttattcctgaatattttaatggactaggttgctaaaataaaatagggaaatttacaaaaatactgtaatttgggttaacttttacaaa

SEQ ID NO: 32470 - DNA, 944 bp, Cannabis sativa
accaaggtacaacttagcactaaacatgtaaatgttgatctcatatgtcctttatgtaatgtcaattacgagaccattttccatgtgcttcttgggtgtcgttttgctcaagcctgctggcatctctcggctgcaatagctgctggtgtggatgatttcagcagctggtttttcatggttttggatggtaatcaaggtgaggtggctgtcgacactgcaatgatttcgtggagcatttggaagacgcgaaatgaagttttttggaagaaaaaaaccagcaatgcgttgagggtagtacagtcggctaggaaggcccttgatcaatggcgagttgcaaccaagaacacaacaacttcttttgctactggtgtactttcaaacaacaacatatggagcaagccaacgggtaataagataatggtaaatgttgacgatgctatttttgaagatcagcaaaggtttggttttggttgtgtggctcgtaatcatgttaggcatctcttggaagcaatttctgattctagaattggcatggtgttgcctgaaattgctgaaatcattggcatgaaggaagcattaagttggattaaaaggaaagggtaggaggatgtgatcattgagactgattcattgatggttgttcaagcactcaatagctctgttcatatgtcttcctactttggtttgttggtggaggattgtcgtttgattttatctaccttaaagaatgttttaatctcttttgtttatcgatctgctaacaaggctgcccattgtcttgctcgggagtcttgctatttgtcaggttgcttgtttaatgagctaaatgctcctactttttttgaagaacattgtaatagctgaggctgtttcttaataaacttcttttcaaaaaaatatatatatttttagtcacaataattgttgtgactaaaactaaatta

SEQ ID NO: 32471 - DNA, 1280 bp, Cannabis sativa
ccatacaaaaagacaaaaacatggaaattaatccatgaagatgcaccacatgtatcaattaaaaggatctcatataaacttaatttaccataaatgaaccaagcataaaaaatcaactctaatcttgtgagaacataataaaaagagaaacatgaaggaatcaatgagagtcatatatgaaaattcttctggtgtgcaacaaacatgaccatgaccatgtttgcaatagaaatattaaatctactaagaactacacaaaagtttaaacaggacatgaaaagctcaaaagagaatacaaacttccctaaaaaaatgataagttgatcctcatctttgaaggctaccactactacaactcaaaagtacatcaacacaaaaagtcaagttctcaaattgttcatgctctgtcatctaaatcaataccattgtgtccactaacaaacccaacacaatattttttttttatttgtccttataacatccttaaatgagctaactaaaagaaaactccctaattgagatgaaaaattcaaaaataggcaatggttagctattcaaaagctacggacaacaatgaaagaaaactttggcagaatcaaatgtgatcattcttataaagaagactaagtgaaaaagctgaagagtaaacaaaggaattttatcaaacacacttcctatgcagttgtattaatattaagtggtaacatggaattcactagaccctttgttagacttacattggagaattcagtggagcacaaatttcaaataattaaattaaaaatagtacattcaataccatcaatgaagaagcaattttggatacttaagaaaacctgtcactaacaaaagcaatatttttggtactttttatagatgtctcaaaaatgcatcatgagaatagtaggtaaagcttctatggcatcaagtagtattcgtatgtatatatattagtaatttaaatagataaaaacagaaagccttgtgatgcacagacataggatttaatataagaatatttcaaattaattattgttaaattaattctccaagtgattagctttgatgccactcacacttcaaagtatacaacattccaaacttgccaatcaaatctttcaaagttcaaacgctcttctaaaagactagctacaatctaggatcaccatttagatccaagttcatcaaaagtaagataattaaaatatctattcagaaaaatcaaatatgaatcaaaaaggacccattgagcgagatgaaaaccatggagagagaaccaa

SEQ ID NO: 32472 - DNA, 2771 bp, Cannabis sativa
attactaattagcctaatttaaataagtatggtctcatataatttaatataatgtatcgctagttaatcgaaaagttatatgtagaaatattaagcaccattgtcattgtcaaatagtaatgctcttttttaaaatactaaaaatctccacatcatttaaaaatataatattctattttatttttcttgcatatttttttgatactcttatttctaaaatactcaaataatatagcactcttcaaaaatattataactatgttttcacatattattattacaaaacttgataaaaatattaagtttactttaagaaaacctaaattattcctaaaaaaaatatttcactttattttatgggctgatatgtaaattggccctattagaatttaagtgagtatatgtttttttttaaaaaaaaaaatagcagaatggtcaaaaataataaattagctaataaaaattataaaaatacatttacaacatattaattttttaaaaaaaaaattatataataattaaattaaattatataattttttagtattgcacattaatatagtataacaaaaacgaataaatatatcagatcattaaatgggtaaatactcatttggtaccttgtattttattaaaatacatagttagtaccttatgttttgaataataatggatgagtaccctttatttgtaaaaactaaccacttagtaccctttgaacatttaaatttttaatattcccatgttacccataattttaataattctatttttttttttattatttttaaattgtgtaaatatattttctgaattaaatttataaacaataaataacacaatttaaaatatcataaaaaaataaaaatatttcttttttcattctttatgttcttctttttccatctccatatttttttaagatctttcttctccattcttgatctttgatggagcccagaggcaagcttagaggtagatctaggctatggcgactttcaatctttgggtgcgacgagggaagacgatgtgtggctaagtttaatcgacaatgaggtggtaggtggtgagatcggactcgacaaagtgagagagaaattgagaaggaaaaatgtgagggagctggacaatgacaatggggtcataaagatgtctttgcttgcaagaataacgattaggtcaaggagtgtagctgtgtaaggagttgatactcatcttcaatctctgattcaaatttttttcagtttttatacttatttttgggtttgatacaaataaaagattcttttaattattattgtttggtctttctatatacttagtttgtgtgagatgacgatgatgatgatttcatccaatttaattaatattttggggggttaatattcttgggtttagttcgattctatatggggagttttgggtttcattattctaatagtttttttttttaattaaaatatatttttagttagtttaataatttatttttctaaaaaaaaaatgtaaaatgaccactcataggcaaatatatatttttatttttaaatagctcataggtagataattggtaattaataattaataaaatatatacaatttaaaaataacaaaagtatacatttaaggggtaatgtagggatattaagggtaccaaagttgttaattttacaaatagaggatactaattgatcattattttgcttcaaaaaaaaaaaattgatcattatttaaaacatagggtgccaattatgtatttcaacaaaacacaaggtaccagatgagtatttacccatcattaaatatataaaacattattgaatatatcatatcacgaaaaaattaatatatcgtaataataaaattatatactacaaaaaaattataacaatactaaattaatactcaacatatatatatatatcatactaacaaaattatatatcactattaaaatgtgtattctataccaacaaatttatatttaatcattatatataataaaataaaaactaaatatcattttaaataaataatatggtatacacaataaaatgtgtataccatacaacaaaacataaatacctacaataaaaaataaaataaaacaaaataatatattattacttaaaaaaaattatacatatcatattaacaaaattatatacaaccataaaataattatagcatacttataaaattatacaccacgtttatatataataaaataaaaactaaacattcataatttaaaataaaataatatattataaaataaaatttatatgccatataacgaaaagcatatatcatacaacaacatatatatacctacaataaaaataaaataaaataatataatatcattaaaaaatagtatatactatattaacaaaattatatataattataaaataattatatcatatttataaaattatttataataaaataaaaattaaacatatatgatctaaaataaaatgatgcactatacaataaaatttatacaccatttaacaaaaaaaattacatcacttacaatagaaaaatatatataagggactttatataaaacataatttaaggtttcacatccctcatatgggacaaagtatattgaaatgtaaactacttggtagagctagttatgaaacttgatagtacataatttgttgtgagttaaataattttaatttagttgacactactacaaaagtgtgtttttgcgtaggtcaacacttcgatcaatgccaaaaatcgatgtaaaa

SEQ ID NO: 32473 - DNA, 2253 bp, Cannabis sativa
ttgggagaattggccaattatagaccaaactgtacatgcaatggatgcacttgtgggggaattaaaaagatgcaggaacactaccatatggaatacattatgtcattccttatgggactttcggacaacttctctcaagtccgtggaagcatactcttgatggaccccttacctgatgtaaatcgtgttttccatcttgtcactcaagaagaaaaccagaaggctaatatcaccactggaaatgaccctaatactagccatgcttttgcctttcaaggagacaaaagtaacaaatccgataaccaaaaccaaaagcctcaagctaccaagaaagggagacccttttgtaactcattgtaaccatcccatgggcataccattgaaagatgttacaaaattcatggttacccacctggtttcaagactaataaacagaaagaaagcatggcaaatcagttccaaaccagtgaagaaaacaaagggaaaaccgaggatgctcatacacttttgcctcagctgaatgcaaaccagtataagcaacttctgaacctactcgctgggcaacaaactaacatgagtactgctgatcctggtacatcaacaggtaattcaggtataattctcactcatgcttcatctgaattctttgatacatcttggataatggattcgggtgccactaggcatatatgcaataatcccaaaatgtttcagagtatatgtcatgttcctagcatcaagttaatcctgccaaataatgaagttcttgtggtaaatcaaagtggcactgttgccctctctaaacaccttattcttgataatgtcctgtatgtttctaaatttaaattcaatatagtatctgtcagttgtctaactaaaggtgattccattaaagttaagtttgatactaatagttttaccattcaggaaaaagcaaccaagaatgtgattggaaagggtaaggaatggaacggcctatacatattgaatgatgcaaacaaccagatgtgcaatgctactgtcactgctgatgtttggcattgccgattggggcatccctctcacaaacgattatctttgctttgtaataaaatacattgtgacattgacaatgttcataaacaatctctttgttatgtttgtccattagcaaaacaaaagaaaattcctttttctaaacatattggttttgctaaatccaaattcgatttaatacattgtgatacttggggaccttaccatattccttctcacactaatcacaaatatttcctcacactagttgatgataaaactagattcacttggatatttttaatgaagcaaaaatctgatgctgtgactattgttcctgaatttttggcttatattcaaactcaatttaagtgtgttttcaaatgtttcaggtctgataatgcgcctgaacttgtctttaaagatctttttgctaaatatggtatattgcatgagtttacttgtgtggaaactcccgaacaaaatgcaatagcagaaagaaaacatcagcatctattaaacgttgctcgtgctctttacttccaagcaaaaatgcctattcacttctggacagattgcattcttactgcagcatatctcataaaccgcacacccacgcccaaccttgacaataagagtccttatgaaattctatatgatgaattacctaagtatgatcaactaagaacttttggttgcttagcttttgctagcactcttactgcccaaagaaacaagtttactcctagagctagaacttgtgtctttattgggtatcccaaaggcataaaaggttacaaattatatgatttaaataccaaagatatttttatctcaagaaatgttatttttcatgaaaagatatatccttttcatcgccttaataacactacagatcatatagaccctttttcgaaaatggtttttccttctcatcacatttctgagactcatgttcatgattttcctaatattgttgatagtcctccttgcactaacgttttgcctcaggatataaatacgggtcagcacacagatgctgatgatgaagattatactgatgaacatacaccagaacagcccacgagcaatgaagttcctgatgaagattatactgatgaacatacaccagaacagcccacgagcaatgaagttcctataattcaacaagaacagatgccatctgttcctcgacgcaccagcagaatacacaagacaccagcctatttgcgtgattat

SEQ ID NO: 32474 - DNA, 1203 bp, Cannabis sativa
  modified_base (159)..(159): a, c, t, g, unknown or other
ttttaaatttaaggtcagatatgttatattttatattatttaatttttataaaatgaccttattagcaatttaaaataagattactttagtctagaaatttttttaaaaaaatctaacgagatattttgtcaacttttaaaattttgttattttatttnaattaaattataaaatcaaatgaatgatgtttatttattattttatgttattagatatttaattttagtttcttttaaaataacataaaatttaaaagttggttggcaattatttgaatatatatttaggtttgttaaaaacttaatttttcaaatttataggtttaactttatttaattattttcaaaattatttatttatttatttaatttttgcaaattaatttaattatttaattaattcaaattaaataaatcttatatccatctatggagtttgttacatgtgtgtggttttatatattgtttattatcaaaacttattttataaaacatattattgtttgatctaaattcttatggttaacttgttgacagatccaatgatctgattttaaccaatagttcaattatcaataggtcaaataaataatttgaaacatgtaaattttgcaatctactttcatctgtgtataaacctagtaacatgataggatgcatccaaattaatgtgcctgtgtgagcctatatgtttgctttgggattagatgcatatattgagctcatatattttttgtaattaaaatggactaggttgctaaaataaaatgatcactgttgatagattttatttaggcccaattattgttgagcttaatcaatgaataacagttgttgaatttaggttaaattcctctccttcgggtcctgtgtgagagctagggggacattagtagtgggtgcgacatactgaaccagccctccctcacatgaacaactccaattgtgaaggcatgtttgccttatttgaataactgtagtaggttactcacactagtataacccaataaaattgattagcgacataattaatttcgaaatatatgaaattaattttttatcagattactaaattaatttaagaaaaacacaattagtttaataaaatatattcaagataaactatatatatttttctgtatttaattaaagtaagaagttataaccaatcagatttttctagatacttaattatttaatttt

SEQ ID NO: 32475 - DNA, 2117 bp, Cannabis sativa
  modified_base (1075)..(1076): a, c, t, g, unknown or other
  modified_base (1142)..(1161): a, c, t, g, unknown or other
  modified_base (2056)..(2057): a, c, t, g, unknown or other
gaaatccttgacaacattcaataaattatagcaacactttgtagatacatacatttaatttattttttgacacatttttttaaaatacaatgataagattttttgttgttttaattaattaatacggtgtgcagtagtagacattaatataactatttatttaacttataacattttaactatcattaactcaaaaaaaaaaagagatttttttttttgaaagaattaaattttaacaacaatttccatgaaaaaataatataatagtattaaaaggcaattcgagttgtcaaaactaagtgaaaaaaccgcaatacaaaaacctatttaagagttgatattattttgcttatcgcaattaggtcaatattgttatttttctattgctctgtagttatctttttgttgttttatagttgttttcatgttgtttgttaagttgttttggagttatttttaagctattttcttattttactgaaacactgtatttttgtaattttaaaactttaatacagtatttttataaagttgatgcaggaaaaatgtaacaatcttcgtgtcttaatattttataaattttctttcattttctaatatttttatatctccctttaatatgctttgcaccgtggtatgggctgacttatcctaccaaatcagttaattttttagaatttatttatttatttaattttttttatattagggaagctagaatatgaactttaaagtgtaaaattaacaagttatgtttatgaccacataaattttttttattttattggaacactaatttctctttttggaatatgttaacatttatatcattacaaaaaaaaaacaaaaaaaataactgttaacgttacatacaatgttttcaaaatatgtttatttcatatttgaaatttttgtgcaagagtgtaaaacttgaagaatcctagctcttcgacatgacaccacacgaaacttgagctttgagcccaaaagtgaaagattttatactatatactgaaattttaacttttttacttttttttactgtaaagtaaaatttttttcaaaaatattgtgnnagttttatactgtgtattgtgttaagtcttcacggttgttccactgttgttttaattattctgttnnnnnnnnnnnnnnnnnnnntataaaaagacagtatttttgtaacaaattccgcccacagtaaaattgtaaacttttacccaaaattcagtatttttttataaaaacccttactaataagaattattatatcaaaatttttacttttttactgtaggccagaattttttttcaaaaatacaatgtaagtttcatattgtatactgtattaagtttttaatgttattctacggttattttttagttactccactgttgtttttaattgttcagttttgtgttccactattgttttatgaaatacagtatttttgaaaaaaaacaattgtatgacaatattttttataaaagttaactcaaattctaatattttttaattttccaataataattctcattgtaaattcacacctaaattaggcaagtagagtaggcccatgatcattttaacttctctctcttagtccaatccaacttcatccaataccaagaagacaatagcccaggtctcactcattcttcaagcttggcccaactaataatgccatgtccaaaacaagaactacatgttctcatattattcagtttacttttgttgaatcctattgaattttaacttcctcagccttgccctcttgtaaacactactgttacttaaattagattttgcttgaggtatatttttcataataatactaatgttttgctaatactcttagataccattttcttgaacagtaataataccaagtctttgtttgtttgtttgtttttttagaaaaaggaataacaagtctttttagaattgcatgcagttaagtaccaatcaattttttttttctatttttggtaataataccaattcattaattactaatagctgtacttaagtgtaggggtgtgcataaatcgatcnnatccaatgagaaccgaccgatccaactacaaccgaccgccaaacattggatatccaattg

SEQ ID NO: 32476 - DNA, 1448 bp, Cannabis sativa
ttacctaactagacaacccaatgtcactatcgttgtctaatgagacaaccgataagtaagaaacctaacaaagatttcaattattagtgtaataactctctcttatattgttgcctaatgagacaaccaaatggagtaataacccttcttattaacattaattagcgaatcatatattgacatgctatgtggtacaattgtatttttcttacctcaagtccaaattcaagcgtgctgatcaacttgagtgaaaaatattcgatgatcccagatcctatgtcacaacaacggtaatttgataaataacttaatttaatctcttctatgacttaaactcaaaatttgaagtttctctttcgataaaaggcatagaaataccctaaatatagataaaacatgaaaaccaaggcatccaaactagcccaaccgattaaaagaaatcttgatctgattaaccggaactataggatccagctaaccagttcctaaccggctcaccgtcagtttgcaccagtaaactaaaaactcgagttttcactactcgaaactatcccaaactcctccaaacttaccaaacttcatagaacaacataaatgacagttctaaacataaaccatagctcacataacataaaagcacaaaaattacaaaactatcattaatgagttagctttgtgttcttagaattcaactcactcaatttaagctacaacagccacccaactagaattacaaatacaaacaacgttaatttaaattcaagaataagctctaacaagattaaccctatatagaactgaatttacaaaattcatctcaaaacctatattttttcaaaattcgaaagaattttttttaaaaaaataggttcctcaagtttcttcaattctactctaattctaatagaaatttttagttgaaatgatgaggataaggtctgaaaattctagcttgaagaggattttcctctaagttggttttgggcaaaagaaaggaaaagagagagatactaacgatttttgagttatccaactaaatttagaaaaaaaaaattcatatacacccatttttgtaaaagatcagcccaagcaagccctagaatatacactaaggacaagatttaaattaattaagacaaaagaccaatccttaacttagttcataagtaacttttattttaggggtaaattagtcatgaaatcggttacaattatttttacccttaactttataaatttataatattattaatttaatgggacatgaaatcggccattagatcttgcagtatactaatccaatggctataattattttaggaccagtccatgctttgtaccataatcaggccctatgtataaacatatatatacagtagaacctttatccaagaatacacttgggaccaagtaaattatattctaattgggaggttataactaaatag

SEQ ID NO: 32477 - DNA, 2568 bp, Cannabis sativa
cattttttttggaatctcttttgttcttatccaacactttgagtttatgacacaatatgagagtgataacaatgacagtaacaaataatactaggccacaaacaagaccaatgaataatataagaccatttcttattttatttctttgccttctacagggtttaagtcttgtagctttgtggttatgagagatgttgagaatttccaactttgtaagcttcgagaggcttgagggtatttttccaaagagtgaattgctactgagatcaagctcatattgcagagaaaccaagtttccaagctctgatggtatttcacttgatagaatattgtgactgaggcttaagctaagtaaactttcaaagttaccaagccaatttggtatctcacctactaaattgtttgttgacaaatcaagatgctttaacccactcaagtttcatagatgattattgctgagattaagctggtacaaaagtttaaggtttcccaatacagttggaattggcccattcaatttgtttgactctaggcccaaaacttgcaacttcatcaaactcccaacttcagatggaatcttaccagagattttattatgacccatctgtaaagtggtgagattttgacattgtccccaagtacttgaaacatggccaatgaattggttgttgtttaaaaaaatggaatcaagatgtgggtgaacaccaaaggcattggtgatgttgcatgtgaatcgattccaatcaagccttaacctttttaatttggtgcaattcctcaggcacttgggcaatggtcctgtaaagtagttgttgtttacactcaaatattttagattgaacctgctacacaaaccttgaggcaactgtccaaagaaattgttgtttgcaagcagaacaaagctcaaattaggactgttcttcccaaagtccctagggattgtcccagtgaaattattgctaaaacagagaacactccaagttactcaaccttgaaatattaactggcaagtctcctgatagttggttgatgcttacatcaaaagttgacaagagatttagatttccaatcactggtgggatggttccaactagattgttgttgaaaagttgcacactgttgaggtttttgagtttccatagagaagctggaataggacctgtgagatggttatcagaaagatccaatcttttaagtttcctcatgtttccaatctctgaaggaattgaaccagtgaaattatttttaaaaatgaataattcctctaagttacttagctttgaaatattaaatggtagggctcctgatagttgattggtatttacataaaaaaacatgaggcttttaaggttccacatagaggttggaattggaccagtgagattattataagaaagatccaacattttaagttgtaatagatttttggttttgccaatagaagaaggaatacttccactaaagaaatttctatacagttcaagaacctcaagatcatgtaggagaccaattccactaggaatactacctttgaggaaattaaattgcaaatgaaggtgtttgagcttagaaagtttagaaatattagatgacaaatgtcccacgaaattgttatccgtgagattgaaagattggagtttgacaagattggaaaatacagattgtggaatcgacccagtccaactgttttcagacaagtcaaggaaagtcaagttcctacactttgttatgaaatctgggaatgttgagttaaattggttcccataaagatcaaggtaagttaaggaaggcatgcttgaaaaatcagaccaatctgaattctccaaatagtttgctcccagggataaataccatacctttggtagattgctgagctggtaaggtattcttccctcaagaaaattgttgaagagactcagatattgaagctctaacaatttgcttatctccactggaatttctccttcaatataattgtagctcaagtccaacaaagtgagcttggtgagattaccaatggctgttggtattgaaccaatgagtttgttgttgttgaggttgaagatagtgatgttaaggaatgaggtgaggttgaactgatccaatgttccattcagttccatgttggagagatcgatttgtgagatttctccagtggagccatcacagaccacattagtccagttgcagagattaatgatgttgctgctgtcccatgtatccagagaagatggcttcaccaccaagctgttcttccatctcaacagagccactgcttgtgctctttgtgaggaagcaatcttcaatggaagcaaggaaaggactaaaatatgaagaagaagaagatagaaacaagttgttgagtctcttttcatggtgttgacttgaatgtaaattactaaatttgatgatccttaaaaataatctgctttctcttatacatattagatatcataataacttaagtattaatcaatttggtttgaccaaaattttgtggatctagttccaaagcgtgatccataattttgtgtaattcacatgatgagcattaaaatatatccaaag

SEQ ID NO: 32478 - DNA, 2116 bp, Cannabis sativa
  modified_base (289)..(289): a, c, t, g, unknown or other
  modified_base (692)..(695): a, c, t, g, unknown or other
  modified_base (792)..(800): a, c, t, g, unknown or other
  modified_base (1755)..(1757): a, c, t, g, unknown or other
ctctctctctcttttttttttaatgaaaagataactaattcatcttaaataagaataactattaagttgggcacaaaaaatattatatttggctcaatctctcaacacttaaatagaaaaaaaaaaaaaaaaaagaatacaggaccagtcacgcatgtgtgactgcatccgtatcctataaatatatacatttaaatatacatcttatatttgtcagaaaaaaaaaatatacatcttatattgaactatgcaatatagttgctcttcgcgcggctaatttaattttttntagtattataataaatagttatttaaaaatataattctaatatatagtaaaattataaatatattattttatttcatattattattagtaatttatttattaaaaattaaatatgcacaattttattaattattatttaaaattatttataaagaggtttaaaatttattatatgtagtatttaaattactttgctaaaagaaaatatttttataaaaaaaaataaataaggtggtgtagaaaaactattgttattattgtatctcatttgttgtctcattgtatctcacttatttttatcacgtatatcacccgttgtcatcactgtatcacatctcttgtcattaccatagttcaattgtagtcgtcactattgtatttctcaaatctatatcttaatctnnnntttcatctcgaattttaaatatttttttaatatttttaagacattagagaaaagtcattattttgttatgttattattaattaatatgttttaaaannnnnnnnnttattttttaaatatcttaattaaaaaaagaaagaaaaatagaaaaaaatgtgatattttagctatgagaaatgctaaaggcaatcctccttgttggtatcataccactattagtgtaattaagtagcttgtttcatataacttaaaaaaaataagatttatggagtatcgctaaccaataatcgtagggtgccacttatgaaaggtgttgggcaccactagtgcctaatagtaatgctctttaattataattatgtgatacttgacattaaagttatcatttcaaaaaatacataaagtaggcttttgataaaaattaattattatattttaatgaaaaatttaaacgtggtaaaaagcaattgaaatattatttcaagtatcacatacaacagtttcttttattattattatatcttaatttttttttaaaaaaagtcaaaaacgcacgcattagagttatcattttatataaatattttttttagaaaaaataaaaaacgtacacattagagttatcattttataatttgaattttatagagttatatttatatttttttttatagaattaaaattgaaaaagtgagaaaattaaggagaaaagagaaaaatagttttagagcaattttatatgaattaaaaattaaaaaaaaatgagaaaactaaagagagaaatgaaaaataactttaaaaaaatttagagtatcatatcaccgctttatgtctatgttttatatatatagatatagatctatatatatattgattgatattttatgtatgtatgtaaacgcaatttacaattaattatatttgatttaaattttaataatatttttttggaatatatttttttattttctaacattttttaaaatattttatatttttgtaaaaaattaaaataatatagtaaaatatcaatctgtagatttatgctttaataaaatannnaaattgagagaattaaggagagaagagaaaaatagttttagagtgattgtagaatgctacatcaccgcctcatacttctcctttatatagatatatagatgtagctatctaatatctcattttttttgttaaaattaaccattaaaactaatgctgctaaattaattaattaattttttttttttaaaaaaaaagttgtaaatatttaaatttattttaaaagtatcaataaaattaaataattttttttttgtaaatattaatttaaatttgaattagacgttaatttaattaattaatcatactttataataaatttattagttagatatattctcttataaataaatttaaaatta

SEQ ID NO: 32479 - DNA, 3171 bp, Cannabis sativa
ttttttaataatattatttgttttattacatatgtgtgaaaaaaaaaaataatttgatggcatgagaaaataagagtataattgtatatatatgatgatatgtcatgtatatgtatattgagagagaaaaaaatagtcagtacacatgcattgagaaaaagaaaattactataaaaaaaaaacaaaagtaaagaatatgcgtcagtgtaatagaaaaaaaacatatgcatttttataagtatacacgtattacaataaaattaattgaagaaacgatatatgtgcaaattaattgaacaacaatattgtggtaattaattttaaattttagttgttagatgcaattttttctattttttatatataatttcaaatattttatatatccgccgcgaagcgcgggatgtttactagtttatataaagaagaagtataagactacgtggcgctctaaaaatactttaaagttatctttctttcttttttttccttaattttcttaattttttgattttttaattttttaattagttaattaatctcatattttttttttctaattttttaatactgatattaataatttttttaaaaaaattacataatataacataaaactattcgctttcacgtttttattttctaattttgtaaattaaaatcttctaaattataggaaaaataataatttaaaaaaaaaactctttcatacgtaaatctatactatatatatatctattatataatatatataatataatatatataaaagaaaagtatgaagaagtgatgtgtgagtctaaaattactttatttagctctattctttttttattttttttattttttttatttttttatttgatgaaattactttatttgtctttatttattctcttcttaattttatcatcttcattctttattttttatttagtttaaaatttctaaattttttttaaaaaaatttaaaccacatatataacattaatttgtctgaagtatttactttttaggttagttaaaaaaaactgtaaaaaaaagttataatatatatatatataatatctacatatttatatgtatatataagaaaggtatgagaaagtgatgtgtcagtctaaaattgttttatttaaatctatctgttctctatttaattttctcattttttttatttttttgtttgataaatttactttatttgtctttatttattctctcattaattttcacatctttatttttatttttatttagtttaaaatttctctaattttctattttttattctttaaaccacatatataacatttgcttttaatgtatagtcaagccgaagtatttattttttaggtctgttaataaaaaagaaaaaaataataataatatatatataatatctacatatctatatataaaaaaagaagatgtgtcaatctaaaattactttatttagctctatctgttctcttcttaattttcttattttttttaatttttttatttgataaaattagtttatttgcctttatttattctctccttaattttttcatctttattttttattttttatttagtttaaaatttctctattttttttttaaaccacatataacatttgcttttaatgtatagtcaagctttatttatttttttaggtttgttaataaaaaagttaaaaaaaataatatatatatataatatctacatatttaaaagaaaatattaatataaatttattatttttttttatgaatgtattttgttactatagatatagtaacaaagtaaaaaaaaataatatatataatatatatattttaagcacttatatgtatttgatttattaaatttataaatatctaataatatattaaaaataatattaaaacttaatatatatgttatattatcatatatcattaacacaagatagtatattaaatttaatatatatatttaatttattaaatttattaatatgtaattgatttattaaatttattaaaatatatttctttatttttttttatgtaaatactttttagtgataagtttgaatttatagttttgatgatgcatgatttaaggacaattatagctgttttcagatcttaaaaatttgttaataaaaaaaattaaaatttgggatggaatctaagatttgtgaagaacaatagtagtgactattagagatacggtgataccaacacgtaagatactgtgatgacaatcggtgagatttggtgatgacaacgggtgagataaagtcaaggctggccctaaaatttagtgggtcataggaaaacaatatttttgggtctttctttagagtaaaatattgtatttttcaaaattagtaaaaaaaaatatatacttttaaaagaggacaaatattttttggccccaaggctaggtgggcactaggtacaggcctagcccatctatacttagggtcgtgtatggatgaggtgataacaatgagagatacaatgatgacaataactttaaatgatcaaaatataatatatatatatatatatatatattataagaaagaatgtttatttaaataataataatactttaatttttttttcacaccactatatttatttatttttaaaaagtgcaatttaaaactctattatacgttaatagtataaattttaaacttagaaataaataataaaacacactaattaacttttgaacattcctaataataacaattaataatataataaatagatttaaaatatttatttttggagctttatgtttttataaatgtatttactaataataatgtgtaattagataatttaattttactattattatatattagaatttttttaaaaaagttttagatattatattaaaaattagtcatgtttttattataatactaagaaaattaaaatagtcaggcaaaaagtaactatgttaactagtatatatattaaggagatatatgaacgagtgacatgttactctaaaatttgtctaaatattactatttattatctccttaattcactcgttttttcaattttttattaagctcataaatattaatataaattaattaattaaataaaacatctatatatctatatgtctattctatataaaatgtgcctatataacagaattcttagt

SEQ ID NO: 32480 - DNA, 3797 bp, Cannabis sativa
tattttatttccttaattagaaatattctaatataccttagtaaaattaagaatacgaactaagataggaaaaggtacatcggttggcctaataaaatatcttcattgatttatttccagtaattgacaactcttttattgagttcattgatactccatatttctttatgtaacattccactgatgatggtatatatgtatagtttctttcttgctcaaacttacaatatatatatataaatcatatttaaagtaaaatcaaatattttgtggatttttatattacttttgccaaagtaattttatttcaaaaaaaactatttgatgctatttgatggatttttttttttttaaaaaaaaagttttgaaagtataagcctaaaaaggtaattgattatttatctagttaattgaatgttaagtaaagaataatgtaattcctaatttttaatctctttttttttttttttttccttttgattttttttacataaaacaactttttatgagaaaaaaactataattttcacaaaactgaaaattttcttataagaaaataagttatctaataataaataccattttggacaaccattaaaaaagggttggggaaccttttcttggcgagcttgtttgtggccatcgagattagacacaatctcaacggtcaaaagttgtcgaaataagacaaaaaagagtcagaatttgacttatcttgacgagactcaaaaagatctttcgagataggttgagcaattttggtgtacttttttttaatctcagagtcattgaccgccaaaaaaagttcatctcgggtaaccattagtataatgaccctacttttactaaatactttcttcgagctcattaaaaaaaaaaattacaataaagaatataaattatggtatgtacctttcgagaagctatatcattcatgtgtctgaaaggagagtggaagctttcacaattttagggtgtttggagagccattgaagagtttgatttgttacaattaatatcattatccattccaacaaaacttgtggctatatcaacataatgttaccacaattagtaacaaaaccttctgtttagagcatctttattggtgtgctaaaatatcgatgtagtgttatattttactttttttttctcaacagagaataagttgttgtgtaggtttacacattgtatagtactttacagtgtagtgaagaaatttctctctttatgctcatcctttaaataaattccaacccctcttctaaaaacaaactaaaggccctttagttgattcactctcattccttacatctttttttgatgtttttttttttttggtaaagtttcattaaatgttcacattaaattttattaagaaagaatcaacgtgtcataccgtctctcaaaaatcgctccttagagcactcacaataagctctttgtaatagggattctttaaattttttagctaaatgtgataaaaaaaatctctatcaactcctttatatcatatacttataataatgatgcgctcaaaccaatgtaacttgctctacatgtagaatgaataattcattctctaaacttattttaataatatataaataatatttttatttatgtatggtgtatatatatgtttaaaaattattattttaatagtgtagaaaataaaaataatattaatttaatgattaaaaaaatataaagtaattgatggatggaaaaaaaaaaatataaagaaattgatgtatggtataatgatgtaaaagtgtgttgtgaaataaaaaaaaaaaaaagtagaattttgatgatgtattttaaatggtaaaataaagaaactgttaggagtgctcttagtaaagaggagggcctctggtttagacatcccaattggcatagacagagtggttaagcaattggtgaatttctttggatggctttcgagaatttcttttttaagcttttttgcttacgttcaatttcgatagaacgtgtcttcaaaaatcaagaaatatcaatgcaataggctaaaggagtgttcattggatcacatataatgaattttgacccaactgattcaatccaatcatttaatggatattgaatttggcaatctgatccaatccaaacgaattaaatcatctgatccgatccaatagatgtattggattggatcggttccaaccattgaaatcacgttttccaatccatgattgcttgctccatattatctccatcataaatgagtaagcttgagacaatgaaagcaataaagactctttgactcctcttttttttttttttttttgaagaaaaagtgtactctgataaatataactagttagacctcacgatcattacataaaatatttgtcggaatggaagttaacgggataaccccaaacctcttgtgggtaaacgcccacttagccacattctgggcagcataattacagtccctgctaatataagagaaaatacaactagaaaacaaatgagagtaactattacaaaatgagacatagtttccaataacccagtgagactccttcccattaagcgcattgataactaccctcaagtcactctccacaattacaaacttggcaccaatatccttagcagtcgaaatggccaaacagcaggtcgccgcttctccacaaagagcatcagaaaagtcaacacaggacgtctgaacccaaaccaccctaccaaagaaggttcttgacaacaacctgctaagcacatgctatcaagccccactttaacatcgcaatttagcttgatccaatcctgaggtggaggagaccagctcaccttcgaacaagggctaaggttagggaaaattgtaccatgtaaatctgcataggaagaacatataagtcaatacacttcttcacatcaagaatatagttattatgtaccttgttattttgagtgcgccagatggtatcaagcacaacagatgcatataggaaaacctcctccgcaccaatctccttgtgttaaaggtcccaaatgaattcgacccattcccacatacggattccggtgtcacagaccggataaataccccaaggagatgattgcaggcatggaaagccacatcacaaataagaaaaaggttttctaaagattcatcctccctcccgcacgaagggcaactcacatccttaatatgaaatattttcctgatcatagacctgacagggagggaactggagagaatacaccaccacataatcttatggtgctccaacactttactgttccaaagtttattccagagcgagggagcaacctcacagtatatgaaaagagaatcaagcttttatatgagactcgccccgttggaagtccaacactctcagatgagagaagtccaacacgctcatatgcacttaagcttaaagatagaaattgttaagatttataaaacactcaaaaatataaataatcatagatctaatcatatttagtgcttcaatataaaaaatcctaaatcataaattttctgctaaattaaagaagaagatgatgataaaagatgagcggaaaaactaacttgaagccaatcttccaagaatacgctgtttcttaggtattttctctgatgggagaaggagagaatacagaaaccctagtatttcttagcgactactacctattttataggctcattaaataatgtgtaattttggtatttctaattcggcccctcaacaaattataaattaatttatggtatctatacattatttctatgacaatttaatacccttttgataccc

SEQ ID NO: 32481 - DNA, 1421 bp, Cannabis sativa
gattggattcaaaatataaaatccgcacttagtgcggatcagatgtactatgagcaaaatattgcggattggatcggatgaatacctctatgggcgaccatgatatgcatggattaaattaagagttgatgttttgtaaattttagtatttgagtttgacaaatttcagtgtgcatgtaaatgtggcttaaataccaccatgcaaacactatatgaagtacattgacatgaaattgtaacatggtatgtctataatattaaattagttaaattcttaaatgtagttgtagatagaggtcatttgagaattttgtttatctgcctaaaatatattatacattacctcatttatttgattatatactaattacaattttatattataactttttagtcaattttcacatttgaaatcacatatcgaattttttttttcataacaatgtttattatagttacaatattatttcctatcttctgaaagtttttgaatagtttataatatcaaaaacaaaatttttaatattttaatttaccacgcatgtttaaaaaactttaaacttattttcgacactataaattttttagaattttttaaaaattataaagatgaactaccccacttggtttctctttttttttttcatttcaaaaaagaggaaaaagagatgaggtacacgtggcagaatgggagccgtagaatatggcgccaaataaggaagtttgggataaaaattgagtggatataagagagagtggacacactgttaaaaattagaaaaaaaagctgggtcaaaccatgcctcagtccacctcattctgtcacatgtcatgggcctaatgggcccacacctctccccaacccattttaccggctttaccggttttctctctcttcaaaagcccggcccatataacaaacacccctctctctcttcttcaacctccatagccgtagtttcagaaaacaaaactctctctctctctgcgcgggggctctccggagcccattgtacggaggttaagaaggatttccacccttttttgattcgtcgcagagagagtttgtgttgtgtgtgtctttcactgaaaatggagatttccagggttttgttcttcgttttgggggttgcttctctgtttttgactattacggctcaatcgtctgctccggctccggctcccaccagcgacggtgagttctctcagcttgttttttaacagatctgaattctgaatttttattatatatgtcaatgcagccatggttaatgtcgaattagggttaaagaaaaatgggtcttgaaaaatgtgatgatgcattgcattgttgatttctctctcattgaatcttcctagggttcattggttgatcaaattgggtactgtttgtaataaagatttgatttttattttttttt

SEQ ID NO: 32482 - DNA, 1220 bp, Cannabis sativa
ataacctcagaaaactatactaaagttcatccaacctaaacagcaactacatcaataattttcatgttgaacctaaattccaccactaaaaacaaaggaaaaagagttctaggttttaccttggatcttagctcccgaaatcccttgaattccagttaaaagctactgaaattggtgaagaaaaatctctggtacttgatggttctcctacggccgaaagtagaaagagaaagagaagagatggattgtcttaatttgtcattttcctaattttgattattctagctaaaacaataatataacttaatccaattaatccaatattggccagttgctaacacaagaagaggccacataatctcaaagacaaaattgactaaaatgcccccacacacataactaatagataaaatgacataggggtaaaatggtccaaaactatatccctgactaatctgactttctaaatgtctaactagttcacctcgctattctaaaaatactaatactaaagtgactctataggtcatacgtcgcgttccaatgttactggacataaaaatacgagaaagtataaaattcatatatgatataaatagcacacctagaattcaaatatatctccaaaatcataaaaataaataatttaaagtccactagtgaaattagaccctaattatctactaattctcaaaaaatcactaagtggtcattacacggtttgagtaggaaaatgtgacaggatgtattttttgatgcctaagcaatattttgacatcactaagccagtttttgtgttatggtgaagttggtcactaattcttggagatgttgttattttgcagaaacgagagactcgaaattacccgatttttgagtaagtcactttgtcagaatagtaaaaagatgaagttgcgaatttgacacatctaacttcatggatctcagttattatgaaaaactagatgaacagttgagacagaatcaaaattggataagcagaacccaacgcaccaggtcatatgtcaacctgggtgttgggtgctctttttagagcttttgagatgtcattttgatacttccaaggttcttgaaattgaggatgagatctcctaccccactttgaccattttagagagaattctcagagcaaaatttgaatttcagtgatcaaaaccagtgcaccacgttaattttcaacttgggagctgggcccaaca

SEQ ID NO: 32483 - DNA, 1923 bp, Cannabis sativa
tgtctgtcaatattatagtaaacatcatttcccactatttttctttctgtttttttttttttggggtggtagtggtgacaataatacctgtgagtcactgtgagcatgttgattcatatggtcccaaatattatacatgcgcgcgtgcaaaaatatgatgtctgatctgaagtgagccatgaaaaactttcttagtagccacatacatggcttgccgtatgaactaccctttgtaaaacgacgccgtaaatgtcactgaacacccaatacgcattctggtttatttatataaatggcacgcaaatatcacattaaagcatccaattaataatgactaaagtttaggcaaacatcgatacggccaaatcaaggaacaaaaatcttaacttgactggtaaaagaaaaaaaaaacaaaaggattagaaagggcttaaacttaaaaagcaccaaacatggggtactctagtactactagtactattactcctaggccaacggctaggattttcctctataaattgtgtatggttggtcatcacatgtgaaagcactctctcatcacaaacacacaaaacaaaaacatatttaaggcatgtgaactagacacggatatagttgagcacagaaccttggctactgacctcattgctctgttctccttgtgaccatcacattattattattataattattggggttcccatttctgagcctcaattaactcaggcctcagctgtttacgtcttactttcactcttgctgatcaatcgtcagaggagcaatagtatttttggtactatttactcctatgaagatgagattgatccttgttctcttcttattcaatatatgtccctttttagttgttgcttcattgggtactgatctctcatcactctattatttgatttgataatagtaatttttttttaataactagtttcaatgattgtgtggctcattattttggtaatgcagcagatgggcctttgtatgattttacggcttacactgaggtatttattattgttattgttattaataataataataataatattggttaatacatgattttttattatacatatataatcagaataatattatatggttgttgttgcagtgtaaagtgaagccagagaggccactctacaatgggggtattcttaataaagagaagcctagggctgttggggaatatggaagtgatgatggtttctattcacctgcgttcatacttcgcaacctaactcaatccaccatttactgcttctccagttgagtcttccattccatctcttatttccacacatttctttcagttctcaaaacccaaaataataataataaatcgtaaaaaagaattccgttgccgggacttgaacccgggtctctcgggtgagagccgagtatcctgaccaactagactacaacggattagtgatgtatgcttgttaaacaacggattagtcatgtatgcttgttaaactaatattattctcaaacttttgttaattaattatttttaaattttatacttattttattatgggctattaaattagagggattatttgttaattctatactaaaaaagtatatgaaactagaggaattatttgtcaaattttctaaatatgggtatattagttgaaagttaaaaattaaaaatcaaaagggcaaatgttcttaagccaatagctcacttactattttcgaaagaaaaggggagctgagctcacttactgcacaatgcacaaggaaagttatacataatgaaaagattaattagcaattttttctcccgaactttgacatatattaatttatgtcccctgaactatttttgccgttaaaaattccccctgaactattgggattgttagatttaaggactttagtctaatttcattcaatttt

SEQ ID NO: 32484 - DNA, 1117 bp, Cannabis sativa
tttcttatagctcaatattataatcatactttagtagttgccgaaaatctcggtcaacagctataataaaagccacaaattaatcatggtgaatgaaatggacaaatacatttaaaaaatatctccctcacattttaaatattttttttaaacaatctatatatctatctatctatatatttatataatttttttgttaaggcggcttctcatatgaattttcttctatttttgttactccctgagtttttcacaattttgttatatttttattcttcattaatatttatttatcatttaaaataattattagtgtcttttcattttcataactcctgtcttaatactattttattattactctattaatattatcactgttattgttataacatttttttttatattctattatcataactaataatattaatttgtattattaaataataaatattatactttcaatctttgaatactatataagatggtttggcttgtgagttggtagctagagaattttttttatttgattataatggctggttcgaaaagatgaacaaagcaaaaatgtcatgcaagatatttgtggtttgaacattgaaggtatccatcgtgatcattatcatgtcatctttcttcaagttttgtattttttttttccatcactttaaaaatagacttctaaaattatgagtgaaagtcttttattttacttaatatttaatctctatatatatatgtcttatgattatgggtgaaggtctttacttaatatttttttatctccatatatgtctcatggtgaggtatgtccttaagatagatgatcactagactattgagtaaagtcaatgtgtataaggctttggctcacaaagtaattaagaaaggacgacaagagcatgaagaagagggatgaaactctacttgaagaactctaagatcataaaaaataggatggtaatgtccccttattttccaatacacaagagaacaacaatgaagtttatattaactattgcagacaataaaaaattcttatccaacattgtgaattattatgtttagatttttttttttttaaatcactcccatattgtgctactgtatattt

SEQ ID NO: 32485 - DNA, 975 bp, Cannabis sativa
atttttataggtaattttaaataatacaaaatctatggatatattattatatatatatataaaaactaaaaaaatttctaaaatatcaaaataaataaatagcataccaaaaaaactaatttaggaagtatactacaaatttttccaatataataataatgggaacgttgtccaactatatttactaaaattaaataatagacaaaaagattatcatttgtaaaatattaataccaatctctcataatttcatgtcatgcaaaaatttattttacattattacacgaatagtataaaaggcataagtattaatagatacataaaacaaagcactgaaatttcatattcattaatttactaaatttgtgatccaaaatgccttagattttgtataaatatataaatatgccaaaataatatttgagataagattatcccaaaaacacatcactatctaattccaaagtgaaagctgaaattggtaaagaatatttatatacttttagataatgggtttggtccacaaattctttttgagatgcctttgttattaggcaacaaatataataattaaaaaagaaaaaagaaagtagagtcgtcaatttaaatatatttatctaatataagttattatcattatatattgagacacaagtaaatcaatactagcctcaaaaagtaaatgagttaagggtgtttattataccaaatttagtattttttaggtctatttagatatcatttaattatatattagatattagattttactgtctgatctcatttaattaatttaaatcatccaatcgatttaatattaaatcgaatccatttaatattttaggtctaatatatattggatgaatctaatctaatttaataaatattaaatcaaaaatattagatgaatctgatctaatacagagatttatattcattggatggaaccaatctaatctaatatttatcgaatcg

SEQ ID NO: 32486 - DNA, 2041 bp, Cannabis sativa
aggaagatacaatcgaagagaaggaaaaaaatagaaaaaccagaaaaaccagaaaactaaaaactgttacagtaaactaaaataacggtatttaactaattttagttacaaagtgagttgtatcacatgattatagtgttgtctacatagtggaaaataatcatgatttatgcttcaaagtattcagctacatgatttatcagtacactgaatttatactaacgtgataattagcgataaaatttattgatacatatatatttatatatatacgtggaatgtcttttcaaggatattagaaaagtatgctagtatgagatgtattggttatactgttgggattttatacgctaaataaaattcaatttcattgtaatcatatttactttcaataaagattagagatcatataagcttgtcatatgtttggtttacatgttttatacatgattatagttttaatatataagttatattaaatcccaaacatatagctctccacaattatagtgatgtcatcacagtagaaagtaattatgattatatgcttcaaattatttagtcccacgatttatcagtccactgtatttacactgacgtgaaaattaacgataagatttatttaaacttagacaagcaaaatgtctttccatgtattattcatgtttccgaagaagacacacatggcataaagtagagtagaatcacccaattaattactgtctgagtcttcttgatccccaaaagataaatacaaaccttaaataggcccaggtacagtgaaggcacaatgccttgccgcaagatgcactattccttccatgaccgaaagcctcctaaaccttctgggacgcggaaggtacaaaacactctaagctcataggggaacgcatggtgtcttgttgaagaatcaaagccagatgtttgcaacaaggagaatgttagatgcttatcgtaaagtggaaattggatgtgtcctgtgacgtgtctgccttactgacacaggatcagatcttgtcccctatggtaggtcatggtagtgcgtgcacctcctctacgtacactcgatttgtctgacgatcctctgaggactttgttcgctaggcgtgatttctactttacatgtgccctgcgccaaaagttgtcacggttgtacgaaactgtcatcacacgagggagaacctcctaatgggccctctaatcaagtatattgtgtattttgtctcaatagtgagcctgcttttacctaataacctaaacagctaacaggtatgcctgaacatgaactctagcctatatacaccccaaaaccctttcatgtaggggacgagaaaaaaaaaccttgccaaaacttagcataaatactttctaagctttcctcttcctcaaaagaaaccttgagagtttgcctcacaactagagttagggttttcattttatgtccatatttaattatattttcttatttttttttttataattatttgtcaaaaatactcatatttaccaaaaaaaaaattattttttggtggatatgatctgagagaagagatatgtacaaattttttttgcattgttctttgacttcgccattagagaattttcgagtcttaacctctatttttcatttaaaaaaatatcaaagttcttagttttgattctttgataagtaactattaataacttttagagaaaaaggaggagaagaagagagaagtgaatgatatataattttttttttttggttaaaaatgaatgatagtgtttttaacaaataattatatatgtaaaaaaaataaataaggaaatattatttaatgattatttaatggacataaaataaaataatcacacatattaaaaaactaaaaattgcataaaatgtgggaaaattttaattctttacttttttatggcatatttttttaatgcattcttggacgataacaagactatccatctccactgtgacgttggagatatttgaattttttttatccaacttagagcttctttcactcctaacgcctcagcataacca

SEQ ID NO: 32487 - DNA, 3197 bp, Cannabis sativa
caacatgtggatttacttgcttcagttggtgaatctctctcagctcgtgaccacattgctgcaatttttaaaggattgccaagcgagtatgatacatttgttatttcatccaatactcggatcgaagagtatactgtagcagaaattgaagccttgttgctagcttcagaatcgaggatcgagaagactgataaggattttgatttaagtgctaacacagcaaaggtggacacggcctctcaatctgagcatctgcatcaatctgaagctaacatcgctcactttaacagaaactttagaagtcctggaacttcaagaggtcagtactatccaacctaccataactttccttctcctcactcaaatttcatgaatcctaatcgaaactcctattctggcaccttttctcgaggatcacctatgcctttcaatgccacaagaggatcatatacgaataccagaggtggaaggatgtcacaaactcaaaatcggcctcaatgccagctgtgccataagctaggacacacagtcattgactgtttctatcgttttgacaagagctttactggtgtcactacaccaactgatgctccttcgatgcaagccaatgtggctcataacaccactgctgatgatggatcgtggtaccctgactctggtgcaacgagtcattgcacaccagaccttcaaaatctcatgacagctgcagaatacaatggctcagaccagctctatgttggcaatgggacaggtttgttaatcaaacactctgggcacagtcatgttatttctaatgatccaactaaacctttgtgtctgaataatctcctacatgtccctgagatcacaaagaacttgctaagtgtctctaaatttgctctaaataatgtcttttttgagtttcatgctcatgtttgttttgtgaaggatcaggttaccaagaatgtcctcctgactgggactctccacaatggcctatatatttttgatcctggccaattcaagatgctatcccaatctcccactatcccaagcccactgtccacttccaagtctgcctttactgtcatttctggttcaaattccagcaccagtgttcagtcacctcaaactgagtttgagctatggcacaatcggttaggccatccctcaagtaaggttgttaaatctgttctaaagacatgtaacatttcttgtaatgaaatttcaaaaactgtgtgtgcagcctgttgtttaggcaaaatacacaagtttccatttcccaaatcttcaccaactgtctattctgagcctttacaacttgttgtttctgatttgtggggaccctcctacattgtatctcataatgactatagatattacatgagttttgttgatgcatatagtcgttttacatggatttacttgctgaaaaacaagtatgaagctcttaaaacctttcaaacttttaaggcagaaactgaacttcaattgggaaagaaaattaaagtttttcaatctgactgggggggtgagtttaggaacttcactgaacctttaaaacaagctggcataatacataggcatccttgtcctaccactcatgaacaaaatggattagtggagaggaaacatagacaaattgttgaacatggcttaagcttacttgcccaagcttcactgccattgaaattttgggatgaggcatttaggtgtgctgtgtttttgcataatcgactccctacacctgtcttgaatcaacaatcaccaatagacatactgtttcagattaaaccagaatattctagtcttaaagtctttgggtgtttgtgttatcccaatatccgaccctacaacaagcacaagcttgactttcgatcctcaccatgcacttttttagggtatagtctaaatcacaagggatataagtgtcttgataccaatggtcgattatacatctcacgagatgttatttttgatgaaaccaagtttccatatgctactactaccatctccaatagcactttctgtcctcctgagtcattttctcaaagtaacattcctcttgcaccttccaattatagcattgaaagcttgtttcctacacaggtgtctatccacacaccttccaccactgtgccagccccagtacacacctcaaccatgcacactgctgcagttccatctgtccatctccctgttacatctattatccctacagtttcatctatccctcccagtattgtgtcgtcacaacctgtgctttcctccccacagtgtcctacctctagtgatccatcaccatctcgtgattctcatacactccctgttttacctcagttgccacctacacaactctcagtcactcatcctgatcctatcacgaacaaacatagcatgcaaaccagagcaaaatctgggattcgcaagcataaaattctgttagcttctcaagagccatccaatgttaaagcagcccttaaagaggaaaaatggtgcaatgccatgtctgatgagatggttgcactcaaaaagaataaaacatggacatatgtacctttaccacctgggagaacacccattgggtgtaaatgggtgtataaagaaaagcttaatcctgatggtagtgtcaacagaaacaaagcaaggctcgtggccaaaggtttccatcaacaagctggtttcgattttacagagacattcagtcctgttgtaaaaccagttactattcgagtggtgttatctcttgccttgacacacaactggtctctacaacaactggatgtgaataacgcttttttaaatggagatctcaaggaggaggtctatatgactcaacccccggggtttgaacttcaagatgctcctcatttggtttgcaagcttcacaaagctttatatggactcaaacaagcccccagggcttggtttgagaagcttcacagttgcttgacattccttggtttcacatcgtccaaatctgatcatagcctcttcatcaaacataccaccaattcaatcactctgatattggtgtatgtcgatgatattatcatcacgggcagtgattccaccaccattgacacactgatacaggatttacactctaaattttcacttaagcatctcggccagctccattattttttgggaattgaagttaaatccactcctactggtctgcatctctctcaagaacgatacattcgtgatctctt

SEQ ID NO: 32488 - DNA, 1545 bp, Cannabis sativa
aatactaacaaatagttttctatacacattcacatttaatatttctagttacattatttaagttgcatgttagttaaataataattttgctactacattaatgtaagagtattatataaaataagaatcgaaattatcaaatactcgacctgaatagataaaacatgattaatatttgtttgtattaaatatgtggaattattagttattttgtagatttatgttagtttgctcgcaacagatataactgttgcattatagtttcatcacaattgtcttgaagttggcttactatactcaaacttttatactcttaggaaaaagatgcaattctatttcccatattttgcaacacacagtttgatgaagaaatcaattaagcaaattacaaaactagtgggtaattcatctcaattgattgcaaatatgatgaactaatacataagctaatacaattgctggaatgcaaccaaaaaatactcaaatgtaattgaaataccaaggaaaagaagatttttaggtgcatgggacacaaaaaaaaaaaaaaaaagaataagcgcagcaaatgtggccaaaaaggtcataaccaaaagacatgccataaccaaggaattagatattgagaaaatattaatttgaattatttaattttttttgtgaatatttacaggcaaaaatattactttaatacattgctattacatttaatacattattagttcttaaaaagttgcataatagtagttttgtagttgaaagccagatcaaacatatcatcaatatcataaagcattaataacaccatatttgaaatattagttagaatttcagaaaacttttctcattacgttgactagtatgttggttattcaacagttcacaaaccgttgaatgatagttgtatagcgggtgttacacataacacattgattcaaaagaatcaagcaatttctcccatgactttcatagatataataatatttagacatgttgaatattgaatcaaatattttatatatcagtataaacgagaaacatgtacaaaaaaatatgcattataatctaaaaataatacattgtctcaaaaaaaaaaaagatagcaatctgatgtttagttcataaacaaaaaggaaaaaaataacaatagaaccataacatcaataaccaagtcttagatctaagattaaaataaccaagtctcagacttctcattgtcactatcaatattttcatcatttttccttttacagaaaatctcatgcgataagtttgatatcaaaatctagtggaacatatgttccatgtatatagaaattagcaaatgcaacaacaaaagcatcgtacgtagtcactatttaataaaacagaaatcaaaatagttaaaataactctaatgaaacacatcaataattaaaatgcaacagcataaataaaaataacttgacttaaaatgatcaaaaataaggaatttgcattcccattcctaaaaataaaaataataaaaaacttaaatgataagagggaaataagaaaatatttccaaac

SEQ ID NO: 32489 - DNA, 998 bp, Cannabis sativa
caattttattaaaattaatgcagattgttaactttttacttcaaaacagttttttttttttttatatatatttttatggaattctacatagaaattcttattgcaattagcgctgcaacttaaatcgcaacaaaaaatcggatggaaacccttactgcaactagcgctgcaactattttagaaattcaaaccgtgaatttgaaagaaaaaaaattaaaaaaatagtatatagagtaattttttttttaatgtttttatgaaaatttatatatcaaccaaccaaaaaactgaaatcgcaattgaaattataaattaaaaaaaaaaagttaacaatattctaataattaatatttatgtaatatataaatatatattggttgaatcttttatgggttgaagaaaaaacgtgttgttgtgatgcaacatgagatcataacaactattatagtaatggggcaaatggcaaccacttacttattttttttattattattgttatattttttttaatatcttaggttttattctattaattggtttctatatattgtgataaaaaaaaaagtatttagttgacattatattatattcccatcaccctcatttcattaacatattaatacttaagattgatattgtaaagttttaaatgttataaatttatatatcaaagtcaaaaacatatagaataatagtaaaaacaaaattaatgtcaaccatcttatgcaatgccttactgcaaacacacacaaatatcataattttatgataatttataaatatcttttaaattttaaaatacatttttgatattttttcttactaagtagagatgacaattttacttaaaaactcatttattaccctactcgaccctatccaattatatatactatgtatttagtttatatttgaaaaatacgtaaaaaaaaattatttttatattaattattataaaaatataaattctataattatttaccacctcaaatattcta

SEQ ID NO: 32490 - DNA, 1217 bp, Cannabis sativa
tcaccattcatagcgaggtgatatcatactaatgctaacaaatatatgcaaaccatttcagaatctattgatcttttttttttttgaaaaagaaacagaggccattatcttagactggctcctacccattaatatattgaaggccctctcacttgtggcagaggaaaaccgtggatacatgagttttagcataaaacatactaaaacaagcacaaaagcaagaccggacacaaagtgaaaaaacagcactaacattagtcctaattgaaaaattacatcaaagttctccagtctctacttaagtctaagaatgacaagtgttcaaaatgtctagtcttgtacaccaaagtggctgtcaaaaatctaattctttcccacaaatcctctactaaactttcagatacttcaaaaattctattatttctttctaaccaaacagcccacaacacagccatgattgctgttctccatgaacaagacctgtgcttactgcctcccaccttactatcaaacaagaatctattgaagtgatgtccatttgcctcattaataaatcagaatattccatggtaaacacaacaattaaaggacccataatttttttttgagaaagagagaggggccacttgtcttagacatgtcttagactagctcctccctgttatgtagtgaaaaactctcacttgtggcggaggaaaaccgtggttacataatattagcaaaaattacactaaaatgcagcaaccaaaagaaaatacacacaaaaccgtggtcaaaggaccaataaattaagttattttcatctccaaactattaaggacccatgttatttctctatattatggagctgtatatcactgggggttatatcaaaaaggatgataataaaattctgctttttttcattcataaaatatgtacctagtgtttttaaacataaaagagagggagagagagagagagatatagtgcaccgtggttgtgacgtaagcatcacaataaaatttattctttatataagcaatgatgtcccatacagcctaaactaaaagaaaatcctactgcagacaagttagcttcaataaattcaaattacttaccgccttggatgtgtatttggggcaggacgttctgcaaggccaaccaagaattgagctacctacactaagattgtattttcttagtaaaccatggcccaatcaaatatatatatatat

SEQ ID NO: 32491 - DNA, 3217 bp, Cannabis sativa
  modified_base (3190)..(3191): a, c, t, g, unknown or other
ttctacttctggaactacttccagagctatgtagaatttcttcaaccaaactgcttccttagctgcttcacaagctgctatatattaggcttctatggttcaatctgcaatactggtttgcttaatgcttctccagactatagctcctctacccagagtaaatactaatccagatgtcgactttcgactatctttatttgattaaaaattagaattagtatatccagtaagatttaactctccactggaatacacaagcataagatctctcattctctaaagatacttgagaatgtgctttacatccatccagtgttctaaacttgaattagattgataacaactaacaatccctacatcatagcatatgtcaggccttgtacacaacattgcatacatcaagctcccaactactgatgcataagggtactttctcatgtcctcttcctcttgaggagtctttggacattgatccttgcatagtgtaattccatctctagatagtaattgtcctttcttggaattctccattgagaatctttctagcaccttattgagataagttgcttgagaaagtgctaatgttctcctctttctacctctatagattttgatcccgaaaacatatataacttgtttctccccaattcttcatttagaatttgtcatctaaccacttatttacatctgataacctttctacattatctctaataagtataatgtcatcaacataaagaactacaaataccactatattaccattaatgtatttgtatacacaggctttctttgttttgttcgaagctatactctttagtagttttattaaaggtgatattccatgatctagaggattgcttcaattcataaatagatttaagcaacttgcacactttttgatcttcccttggtaacacatatcctactagttgttccatatatatggtttcatcaagatcaccatttagaaaagcagtcttgatgtctattttccatatctcataattatatatgacaactatggaaagaagaatgagaatgtgtttaagcattgccacaagagagaaggtatcttcatagtcgatgccttctcgttgtgtgtagcctttggccacaagcctagctttaaaggtctccgccctccctttagcatttttcttattcttaaaaatccacttacacccaatgggagtaatatcctaaggtggagtttcataaacccagactttgctggtgcacatggaatctatttctgaatccatggccttattccacttgtatgagtctggatcatccattgcttctttgtaagtcaatgggtcgtccatgtctatgttaaaaacaagaacatgtgcatcatgttcgtaacggataggttgtctcaaaatcctcccactacgatgatgtaccagagtttcgtttttcaggaattgtggtaaccgttgttagtcgttcaagtaatggtgctgaaattgttggtttagaaatctcatttctaatttcctcgataaccacatgactgggtggcttgcaaattttcatatagtcatgttaaagaaaagtatcatttattgacacaaatactttattatcttgacggctatagaatcaggcacctcgagtctcatttgaatatcctataaatatacaaacttcagtcttaggagcaagcttcccatacttaggtttaagaacatgagcaggacaaccctaaatatggaaatgttttaaattgggttttgtcccattctataattccattggagtattacttatgctcttcgagggtactacattcaaaatgtaagtacctgccaaaagtgtgtatccccagaaatttagtggcagtgatgagtagcacatcattaatttgaccatgtctaacaaggttcaatttcttctatctgcaacaccattctacgaaggtgttccaggtgctgtaagttgggataagatcccttcttctaaaaaatagtctttcaattcaaaatctaaatactcgtcaccacgatctgattgaagtgtctttaatgatttacccaattgcttttcagccatacccttgaagtctttgaactttcaaaatgttttggacttcttggccattaggtaagtatgaccgtatttagaataattgtcaataaaggtgataaaatatttataaccaccttgagcttgaatattgataggttcgcacacattagtgtgtattagctcaagttgttgtttgactttattacgttttgtaaaaaaaaaaaaggtctttttgtgccttctagacaagattcacaaaccaaaagagttccaatttttagttctctcgaaggaccattctttgttaaccaatttattctgtctaggctaatatggcctaaacgtagaagccatagatatgtttcatcatcatcagaaatattttgtctcttatttgattgaggcaatgctactctaaataatttattatttaagatttattgctcacttggcttgagcacataaagtctgttactttgttttgcagaacaaataggtgtaccattcttagaaataataatctcattattaataaaactagtatttaataatttttcatgcaaaagagataaagaaataatattcctggtacattcaagaataaaataaacattgttcaataacaaaaaattattatcaaatttcaaacagaatctaccaacacccttagcagacatttatacccaattacccacgcgaagaaaaaatataattagtggctcaagaatccacaatccataatatgattagtggctcaagaatcaacaatcaacacccttagcagccaattcccttgatgagtgaagtatcttcatagaagaaaaaatatgattagtggctcaagaatcaacaatccataaggatgtatcatcttacactaaattagcttcaagaaaaaataaatcatatttacctttcttaagcttgtacagatactttttacagtttctcttccagtgtctcattatgccacaatgaaaatagtttcctttacccttcttgtccttggacttgggactggctttgttcttcttggccttgggtgacttcttgcctttgggcttgtcaccgctattgtccttactgttccacttccttttcttatttgaagatgaaggagagtttgacaatgtttgtaaagcccgcttagttnntttggaaattagcagttatttatgtt

SEQ ID NO: 32492 - DNA, 1867 bp, Cannabis sativa
caatccacaacctagggttcaatctcaaaacccagatccggttccccaagattcagccaccattgttgaagacaacacaactcaagcacttcattcccgttcagttgctgatgatcattccagccccttcttcctcagcaccggtgatcaccccggccttgtgcttgtgtccacagtcctcaacggccccaattatcaaccatggaaacgaggaattacaatggccctgactgccaagaacaagatttcgttcatcaatggctctatccctcggccagaacctggtaattctaatctcaattcttggttaaggtgcaacaatatggtaatgtcttggttagttaattctgtttcacccgacattgcacaaagtatcatgtactttgatttagctactgatatgtggaacgatcttgctgagcgtttcaacgagggcaatggccccagaatttttcaattgcagacccaaatcactcggcttcagcagggtgattcttcggtttctgcctattttaccaaactaaaatccctatgggatgagttgaaagagtttcaaccaataacaacttgcacttgtggtgcaatgaaaattttcttggattcttacaatcaaaaccaagtcattcagttcttgactggtttgaatgaatcctatgcctcggttagagcccaaattttgctcaatgacccaatccctaacttgtcccgagtctttgctatgatcactcaagaagagcgtcaaagatccctcggttcatctgaaacaattccccttgctgctgcctcgacttccaccaacccacctagatccaagaagcctcgcccatcttgctccaactgtggaaaaccaggccatttagttgataagtgctattttctacatgggtttcctcctggatatggtgacaaaagaaagcaagacaagggaaaagccaaggccaatactgcctctacaaacaactcgaaatctgatgttcaaggtctcaatatgcatactgatcttacctctcaatgccaacatctaatttcactacttagccaacaacttggccaaaccagcaatgctgaaactccagccccgacccctgcagcttcgaatctagcaggtacaacatccatttcttttgcaaattcttggataattgatagtggggctacccaccacatgtgttttaacattaattgtttctcctcttttactaatgtttcctttcccaagtttgtcacattaccaaatggacaaaatatacctgttcaaaaggttggaactgtcaagctaaattcgcatataacactacagaatgtgttatacatcccacagttcactctcaaccttttttctctcaccgattttatactcaataatcctaatgacattgtgtttcatcgaaattcttgtgaaattcaggatcttactctgaatgtggtgattgggacagctaaaagatgtgggaaattgtacttgattcaacaagacgactccactgctacagcagctgctactttccctttttctttcaataaaaccaatgtaaatcaatggcataatcgccttggacatccttcgatgtgtatctcaagtttctttaataaagaacataatatttcacatccaaattctattaaacattgtcatatatgccatttggctaaacaaaaacgcttaccctttatctccaatcataatttttcaaagaatatctttgatttggttcatatggacatttggggcccttttcacattctaagtgtggaaggttacaagtattttctcaccatagtggatgacaaaactagatttacttggctttacatgctcaagaataaatctgatgttcaacatattattccctcattttttcatatg

SEQ ID NO: 32493 - DNA, 6450 bp, Cannabis sativa
aaatatagatcctggtaaaatattcccaacattaacaatttttgtctttttttctatttaattaatttgaaaaaattatttatttattgaaaaaagaaataattactattttttcaattcaaaatagattttcttcgaacatccttatacaactctttatccctacccttgatagtatttcaaggtggcatttcggtgaccatgggcctataactataagctccaataaactagattatttattgagtctcatcaaccaaataatcccttgtttattaaatccatgattactccactataaatatgaaattgcactcttagtaattatacaattatatttattgagtttaactgtagtgtccattgatataatcaattctagtgattagtcttccatgtgttggttcgtaatttagttttgatcaaaataccattacctttctaattacttctttacctttagttccattaattcactagtagaagtataattcaagatcctatctaaatttgtacacaacattctagttttacaattaatacttaaaaggaaccaatatttaatctgttaggaaagtcaggattctataattgtacatcatgttcccagtcatccatgttattagattctcaaaacagaaattgtaagaatcatcttctctgaaaaactttaaccaatgaatcaaagaaactaataacatgaacagaagttcatgataactcaggatttaggctgatctactattgatcatcgttatgatatgaattagatctttatgataaacaacaaattaataaagacaacttcattcatatcagtctttgtcatgtataatctctattatatacagtaccttcacttagatttctcactacattcgtaatctgaaccaagattacttgcaccgaagaactggcatcagtgaactgtactagcaaccattgattaaagatttcataactttaatatatgttgttgactgttttattcatagcaaagtagtcttacttctatgtacagctacaagccacagcctcatatatgaataaaacttttttatatatttaatataaattattcaataataaatattaacaatttaatattcacacatacaaatatttaactctttatttaaataatcaaaaatgtctttacaagcttttcggggcataaaccctaatatttcccacttgccctaaaaacaaattgggcatatcccttagtctcatattagcaatatgacccaaaaaaagattttgctagtagcgtctttgtgaatggatttgccaggttatgttctgaagagatcttcaagaccgtcacatcagctctctctactatactccttagtagatggtacttcctctcaatatgcttgcctctcttgtggctccttggttccttcgagttggccacctttccactgttgtcatagtagagcaccagtcatttttctacttctggaactacttccagagctgggtagaatttcttcaatcaaattgcttccttagttgcttatcaacctgcaatatatttggattccatagttgaatctacaatactagtttgcttaatgcttctctagactacagctcctctaccaagagtaaatactgatccagatgtcgacttttgactatctttgtctgattgaaaataagaataagtatatccagcaggatttaactctccaccaaaatatacaagcatgagatctctcgttctccgaagatacttgggaatgtgctttacatcaatccattgttctaaacttagatttgattgataacaactaacaatccctacagcgtagcatatgtcaggtcttatacataacattgcatacattaagctcctaattgttgatgcttaagggtactttctcatgtcctcttcctcttgaggagtttccgcacattgatccttgcatagagtaattccatgtctagatggtagttttcctttcttggaattctccatcgaaaatctttgtagcaccttatctatataagttgcttgagaaaatgctaatgttctcctctttctatctctataaattttgatcccaagaacatggcttgcttctcccaaatctttcacttggaattttttggctaaccacttctttgcatctgacaacattttggcattattcctaattagtagaatattattaacataaagaactaaagataccactacattacccttaatgtatttgtatacacaggctttttctttattttgtttgaagtcatactctttaatagtcttattaaatgtgatattccaagatctagaggcttgcttcaatccataaatggatttaagcaacttgcacacctttcgatcattacctggtaacagatacccttctggttgttccatatatatggctccatcaagattgccatttagaaaagcagtcttgacgtctactttccatatctcagaatcatatgtggcaggtatggaaagaagaatgtgaatggatttaagcattaccacaggagagaaggtatcttcatagtcgataccttctggttatgtgtagccttttgccagaagcctagctttaggggcctctaccttcccttcaacatttttcttcttcttaaaaattcacttacacccaatgggggtaaggtcctcaggtggagtttcatatacctagactttgttggtgcgcatggagtccatctctgaatctatggcattatttaacttgtctaagtcagggtcatccattgcttctttgtaagtcaatggaacatccttgtttgtgtcgaacacacgaacaagtgcttcatgttcatagtagacacgctgtctcacaaccctcccactacgacgatgtacagggatttcctttgcaggaactgtggtaaccgatgttggtcgttcaactaatggtgctgaaattgtaggttcaaaactctcagttctaatttccttgataaccactagactacgtggcttgtgacttttcatatagtcatgttcaagaaaagtagcatttgtagaatcaaataccttattatcttgatgactatataaataagcaccttgagtctcatctaaatatcctacaagtatacacacttcagtcttaggagcaagcttccataacttgggtttaagagcatgagcaggaaaaccccaaatacagaaatgtttcaacttgggttttgttccattccataattctattagagtattgcttatgttgttcgagggtactacattcaaaatgtaagtagccgccaaaagtgcgtatccccagaagttcagtggcagtgatgagtagcacatcatcaatcttaccatgtctaacaaggtccagtttcttctctctgcaacaccattttgctaaggtgttctaggtgttatgagttgggacaagatctcttcttccaacaaatagtctttgaattcaaaatctagatcctcaccaccacgatctgatcaaagtttattcctgatttacctaatttcttttcagccatggccttgaattctttaaactttccaagaatttcagactttttggccattaggtaagtatgaacgtatctagaataatcattaatgaaagtgatgaaatattcataaccacctcgagcttgaatattaataggtccatacacatagctgtgtacaagctcaagttgtttttttttggctctattgccttttgtacaaaaaaaaaagtcttttttccatcttgccttcaagacaagactcgcataccggaagagttctaacttttagttctctcaaaggaccatcctttgttaaccagtttattctgtctagcccaatatggcctaaatgtagatgccatagatacgtttcatcataattaaaaatcttttggctcttattcgattgaggcaatgctattctaaacaattcattatttaaaattaattgctcacttggcttgagcacataaagtttgtttctctatttagcagaacaaatacgcatatttggaaataataatctcattattaataaaaccaatattgaaaaattgtttatgcaaaagagataaagaaataatattcttggtacatttgggaataaaataaatattgttcaataacaaaaatttattgtcaaatttcaaacagactctaccaacacccttggtagacacttgtgctccattaaccacgtgcatagtcacttctccatcggccagttccattgacaatttaagtatttgcatagaagaataaatatgattagtgtcactcgaatcaacaatccataaggatttatcatcttccactaagttagcttcaagaatgaataaatcatatttacctttcttaagctctaagagatagttgttacagtttctcttccagtgtcccattatgcaacaatgaaaacacttgcctttatgcttcttttccttagacttagggctagctttgttcttcttggccttgggtgacttcttgcctttgggcttgccactgtcgttgtccttactgttctacttctttttcttactagaagaaggaggagagttggattttgcttcaatgacgtttgattccccttccttgaacttatccctgttaagattctcaaacacagtcaacttattcaacaaattgagtaatgctaaactctagcttattcatcacatagtttgtgttgaaagctttgaagcaaggagatagcgactcaaggatcatacttacttgagtcatgtcgtctatgatagccccatgtgtctcagcttcatgcattagctcaatcatgtgcaatacatgagatcgtacagggacacccttcttcatcttacaattcatgtagctacgagtagcatcatgtcttgtttgattttactgctgcccaaacatggcctagaattcactatttgagatgcattctccatgttctcatgcatcttacatagaacattgtccatacttacaagcatgaaacatttggccttgttgttagattaaatccaagcatcatatacgtcttgaatattttttggggcattggcagcgggctcctcagaatgctcctcggttaggaaaaatttatgattcttacaaatcaggattaatttcaaatttgatttctatttataaggttatcaccatttagttttttaagtgctagtaaagtagtaagaggatttgacatagttgatatgactaaaaataaataaagtaacataatgattatgcatgaataataaatataattttagaattgctgtaaatgtgatgcatgagtgcatacaagtaaaatacataaaatcttgtttaagttattccacgataaagctctttgacaattgatcgccgccttagggtcagtatcgagtcaatttcattaagcctataagatacatctcatctttattattttgaaacctaaatatctcatattttattttcaaaatataaagaaacgcttttgaccaagttaaaaactaatcactatgaagcttggttgcactttgtgagtgtaacccattattttagatttcatgacttaacttagtgtgtctccttaagggtcaatgtcacactaaaatacatcacttcctcttatcttaatcaagagatcaaacatgagcaacagtatagacaaatactttccttagggggacaaaaataaaaccatctcgaggccagtctattctcccttgggactgactaataatggaggtcgtaggttatattgacatgtactccttctcccactcactattttaggttaatgtgttttgtttattaattcttagtattaatacatattaactactttaataattatgattaattcatttataataaaatcctcaaattataaataaattacctgtcataattattaaatctaaattaactctttaattcataattaaaaactcttgcaaacataatctggttttttagagtcttcaaaaccaggaggttataccatatacacatcttcttcgagataaccatttagaaaagtattattgatgtcaagttgtcttatggtccaatttcttgacactgcaatggtcaaaatgattcttactgttgatgctttaatgactggactgaatgtttcactaaaattaatacctagtctttggtgaaaacccttggcaactagtctagccttgagtctctcaattgtcccatcttgtctgagttttattttatagacccatttgtttccaattaggttgaactcgggtgagtaaggcactagcacccatgttttcttcctttctaaggccacaacttctattgacatagcagttgtcgactcctttgagctgagtgcttcctccgaattccatggttcttctgtaagttgattccattttgctttgctaagataaacctttagtttgaagatgcctgtaacaccctaactagcctaggcgtgttacgtgatttttaaacgta

SEQ ID NO: 32494 - DNA, 2336 bp, Cannabis sativa
  modified_base (2180)..(2182): a, c, t, g, unknown or other
  modified_base (2267)..(2281): a, c, t, g, unknown or other
tacagacaaatatgaaatggcatatgtgatgtgttaattatgattattgataattatactgtcttgttgggcttggctcacgggtgctctactgtgcaggaaaaggtaatcagccatgagtgtgggagctagacgatgaatttacatgttcaggccgtactagaccaagcgggttggggtctaccattgttgaaacttctgtaattctgttttgccgcttaggttggctaagggaaaagacttgtaatattttgtaaaaaaaaatttgggatcacgaaacctgtaacttttgtttgtaaggttaaaattattacaactttattttcattatgttttcttttaaagtttaatttccacacttattttattagtaatcccgtttaggggattaggattttttaatcatcttgggtagcgtgcctaaatgttagggcattacagtttggtatcagagcgccaaggtttttaaacttcctgtagaccagccaaacatgtacaatcatcgttagagataagctcgactcatggtgcagtaagtgttgagagtaaatactttactgcttatgtgatcaattatttaccgctttctattttaggcagtatgtaagcatctagagtatttatgtgatatatgatgccatgcttaaaatgctttatgttaagtgtttaattaaaagaagtaaatagttgagttaaggtttaaggtaataagtgcataagtgtggcattggtgcttaactcgctggggtgtttgattacaggggtacttgtaaaaatggaccctcctcaatcatctagaccacagggcgagcaagaagaccatggtgtagaccaaaccaatccactggcaccccctgcaactccaaagaatccaggagataatgcgggggttggcaatgctaatcctcctgctgactggtagcagatgttccattaaatgcgaggtatcatagttcgtcaagaggaagagttgcgtcaattaaggcaaccggcaccagctgcctttgttgagcaaatgttaccaccagggcctgtgccagtggtgggtaaccaggagtttatgatgccgcatagagattccgtgtttgaacggtttgtgaagctgcaacctccgacttttttgggaggtactgacataattaaagctgagcaatggatgagtacaatcacccatatcctggataatatgggagtgacgggagcagaaagagtgaattgtgcagctttgatgttgcaatatcatgcccgcgtttgatgggatattctgggacagactcgtgacgtcaatgtaatgacttgggatgagtttaagaatatgtgtgaagaaaaattttataatattgctgtgaggacttcacatatggaagattttgtgaagttaactcaggggaagatgtctattgctgagtacactctggagttcgatagactatccaagtgtgctagggatctggtgcccacagatttcaccacgaaacagaaatatgtgagaggactaaatgccacaattagtcgggacatgaaaattaccactacacatgacactttgtacatgaaagtggtagagctagccttaattgctgaagaggctgagcaacatgtgacaaaagagcagattgcaaaggatgtcgccatgacatcgaatcctcctactagtggcaatgtcagtaaggggaccgatggtggtaaccctgctcacaaatagaaggctgatgcttccgaaacattagggcgtaaaagaaagtttcgaggaaacagaggtggtcgtcagggctgcggatctttattccgatcttatcctaattgtccgaaatgcaataaacaccatcagggtgaatgtcggaccaagacttgtttctagtgtggcatggtgggcccatcagagattgtcctcaagccaagaaggaggagcctaagaaaaatactactaagaactcgggatgactttttaccattacttagactgacgcagatgctagtacgtcagtggtgacaggtcagttatctataaatgcttcgggagctactcattcttacgtgtcgagtagagtaattgaaagtttccataaaccatgtgatatatatgcttcggggtttggtacgctgctaccttgaggagaccttatagtatcaactaggtggattcgatccttgtctttttggattgacggttgtgaatnnnccgccaatctaatagaattgcaaatgtatgattttgatataatcctcgaatggatttttcgtaaagaccgcttagctttaatttnnnnnnnnnnnnnnnattagggtttaattatgaaattagttattaattctcaattattaatttatgatga

SEQ ID NO: 32495 - DNA, 1608 bp, Cannabis sativa
  modified_base (1004)..(1004): a, c, t, g, unknown or other
  modified_base (1104)..(1112): a, c, t, g, unknown or other
ctcattgattcctctttcaccttaagaatccatttgtactcgataatcttctcgttctccggcttcggcatgactactcaagtctaatccatctcctcatccatggtctaaagttatttagacttgtttccacctgaaattgcttcttcatagctttcgagctcttcaatttcaatttgttcaactttgccacgtgtatacttgtgtacattgtgacagtctactttggcactaacataccaacgtggacagaaggagcatagagcaaaacgattttgtaaattggggggttcagtcctaactatttctgtctaggagattgatcgtgccaaacttcaaaatttagagagtttgaccgtaaattatcttatattatgatatcatatttatattatttttgttcttattattaaatatttagccagaatctttaaacaccggtgacttttatcttgtaatttgacgctcaatcacaatatgtagtagtttgctaatagtctttctcttttctctatatttcattacagtcaagctgattggactattggagtgtcttcgactttgagtggcaccaccctagtgttccaaagcttttcaagtactattttctttattctacaaattgttggtgcaacgaatcgatattcacaatcataaagaaaatagtacgaataatatcgattgattgtgaattttagcttccaacacatcatatcatagcacgaataataaatacatatgattttggtataacaattttaacatataaaatgtaaaacataagagattgatgatcataagaatataaaatttgtgtgattatattaattttttaagagttttttacaactaaactctgttaactattattccatttgaatttaatctttcaagctcaaattttggtggtaaaactttctaaattattaaattgttagaaaatttaaggtgccactgccatctatttttcacaattaagtaccaacatggactgcttatgtgtncactcttgtacacgtgacatatttatattagtatacttaatattattatttaaaaattataaaaaattatttcaactttataatattttttattttttannnnnnnnnttttatttaattttaaaataataataataggtgtatcaatataaacgtgtcacatgtataagagtgtacacattaaccgtccatggaggcagttaaccaaatgacaccttaaatttgctaacagttcaataatttggacgtttcgatgctaaaatttgagcttgggggattaagtacaagtaaaacaagagttaggagggtttaaccgccaaaaactttttttttaatagaaatagacaaacaaagaaccctaatatatttttaacaagtagtgttatttcactcgagagcgagctcaaagttggtaaaagaaaaaatagattatatgtgtagtcatcttttgttacaaaaccctatgaaaaaaaataaattctctagactcattctcgagctagagaattttacttaatccagttaacaattcgatccaatccaacccgatgtaccacataagcccacaatttgttcaaagcatcctcactcttgagggataaaa

SEQ ID NO: 32496 - DNA, 1997 bp, Cannabis sativa
ccccccaaagaactttgattgacatagagaagaccaggacttccaatgagctttagaatgattcccaaaagagccccaccaaaactgtgccatgagtttctcaattttgtgacagatagaggcagggagtttatagcaggacatggtataagagggtatagcttggataacagactttaagagaacttcttttccagctttcgagaagaacttatgactccaaaccctgagattggaactgacacggtcaagaatgaagctgaaactgttctttttagacctaccaaaacactgggggactccaagatactttgacatgaatggtctattagaaatcccaagagtatgatagaaatgattcgagatatgagaggaggtattttggggagaaaagaatggaggatttactaaagttaacacattgacctgtggcttgattataaagctggagggctgcttgaagagcattacaagaagagtaggtagccttggcaaaaatgagtgtgtcatcagcaaagagtaagtgggaaacagcaggggcagatctagctattgaaatgccatcaaaattcccaagctgtttttggatgcaaagggcagcagcaagatcctcagagcacaacaagaaaagatagggagaaagaggatctccttgcctcaaaccgcgagaaggaaagatttccttagtaatattcccattaatactaaacttgatagacacagaggaaaggcactgatgaatgagagtgacaattttgttaggaaaattaagatggttaaggattgctgaaaggaaattccattccacacggtcaaatgctttctccatatcaagcttgatgcccacccacctaattttccctgttttcctgtgattgatggcatgaatcatttcctgagcaatgaggatgttgtcaaaaataagacggccagagaggaatgcactttgagtgggagaaattacatcctccatgatagacttgagcctattagcaatagttttggaaacaattttatagagggttgtacagaggctaataggacggaagtcttttaaagacgaagcattttgctttttgggaataagtacgatgagagttttgttgatagaatccatgctagcattattattgagaacattcaggattgcatcacataagtcattccctaaagtgctccagtttttttgataaaaatatgcattcaacccatcagagccaggagctttgtccctagagagttgaaataaagcagactttacttcctccacagtgaaaggggcatcaagaaaggcaaactgttgagaagtaagccttgaattgacagtggagaggagcagattaacaacatcaatactgctgccttgagattgaaagagattagagaaaaaacggcagacttcagcttcaatggcagaactattggagatgatggtgccatcttcaagggtgagcttcctaataaagttggttttctttctagaggaagctttctgatggaaaaacttggtgtttttatcaccagctcgaagccaatggactttggatcgctgcttccagagaatctcctacttatagagaaggctatcaagttgggattgaaggttagaaatctcaagcaactgctcaggggaggcaggaagagaggaagaaaggctgctgagctgaccatcaatttcattaatcctataagataaacttttgtaggatttgttccaagtcttaatggcatggatgcagttgctctgattattaagaaaattcgacatagggtcagtcctaggattggaattgaaagaagaccaggaattagcaaccatggagtaaaaagagggctcggtgagccaatggttttcaaaaagaaaccttttatttttaactttatgcatactttcatcagacagaacaatctttagaaccctatggtccgaaccataaaaaccaaggtggtggaggagagcctgagtgtaacgccctaatgctaaggcacgctacagt

SEQ ID NO: 32497 - DNA, 1329 bp, Cannabis sativa
tgctttgaaagagcagcaataacaacaccttttgaatcccgaataatagcgcccactccgattacacctctgctggaatccacggcagcatcaacatttaacttaaaaaaattgaagtctggtggtcgccaaagctgtgctgcagggactacctgcaatgaaggccgaggattcgaactgggaggtgaaactgttgtaaccgtggcctggtgtgcttgctggtgcgcagttgcagcagttgttgcagctgtaccatgtctctgttgtgcattgcgataattggagaggtaagttgcagcataggaagccaaaccagcagcaggccgtgcttgttgaccatgaacaacacgattgcgctcattccaaatcgtccagagtgtacagaaaagttgctccatctcagcctttgaaagaattgatgaaaggtgaaaaatataatcacctttctgcattgtagcagccagatgccaatcaaaactcagactagaattacgccaaacagctcgagcgtaccgacaatgaaaaagtgcatgtccaacggtctcccaagcttgcttacagaccgagcaagtagagtcagtaatcacttttcttttgaccagcagagttgcaacaggaagagcatcatggacagctttccaagcaaaaattttaactttcggcgggagttgcaatgaccaaaaaaatttccaccaagaagattgaacacaagaacttgaactttgatccatggtatcaagatcagaagcaagatgatagcccgaactaaccgtgtacaaaccggtgctatggtggtgccaaattagagtgtcatgaccactgaagtaactcaaggggatagttaaaattctgtccacatccgcaggagagaaaaactgatgtaagaggggaacattccactgccgttcatcagaaataaggttagcaacaacaccattggatggacccttgtaaagaaaaggcaaaaaagtattgtgcccaggaatccaaggatcataacccgactgaatatgtcttccatcaccaactttccagcgtaagcccttgagaagaagctctctagcccaatgaattccttgccaagtgagagacggagagtgacccaaagaagcttccaaaaaggtgttatgtggaaagtacctgctcttaaggacacgactgagaagtgaatccggattgtcatagattcgccatgcttgcttagcaagaagtgcctgattgaagtgaatgaaggaacgaaatcccatgccgccctctaattttgatttacaaagaaggttccaagagcgccaatgaatttttgatccattttcagtcaagccccaccag

SEQ ID NO: 32498 - DNA, 6529 bp, Cannabis sativa
ggttgattggacgggttggtattattttcaacccgctcaatataaaaattgggcgggttatatttttgtcgagttattcggtttgcattattcgtcaggttatgtctgtttggtttgggcgggtattcggtttgggcggttaacaaaaacttatgtacatccctagtcaaaatatataattcacctcaaatttgggaatcgaaaacaaaaagtaagagagagggtgcacatttaccgtttacacccgaaaacccacccacttggcaaactcactcggcccgaaactcgaaaaaaaatggatttcaattttagtagatcgggtataagtgtaacttgattttgtattaggtcgagttcagatttaatatttttgaaaattcaaaattcggttagcattttttactattttttttattttttatgtatatatcatataattatattatatatatttttaattataaatttgtagagtgtgttaaattattaatgtgttagtttatgtaatatgtatatataataatatattgtataattatattattttgtagttttttgttaaaaaattgttatttttttaaggaaaaaaaaaaagcttagtctaacctgaaacccgacctaacccacccaaacacgtcccaacccaaatccaatccacccagtcctgaaacttgaaaaacatggtctctataccggcgagttcggtctcaaaattctaaaactcgaacctaaaaaacccaaaacccattaaaatccactcgtgcatccctatccaatgtagatggtaaattcacttcttcaatgaaaatgaacttttggaaactaaaacaatttatattaggagattaggagaacaacttagatgagaaaatgacaaagcttttaaaaatctaacaaagtaatttgagcagctaatgtaaaaactagtaaatattgattgagtgaaattcaagcaagaaaaataaggaattgtcaaaattccgagtcaaaatacaaaaaaaaattatttaaattgattatataaaactctagatcccattcgcaacaaactgttgatctcatttaaattagatagtatatgataacttttgataactatgagatagtttagacatactgaatgatcgaattactacatagtataattgttatctcaaattttggcctatatgacgtgcaattaaaattgtaacatgtagcaagacaggttatcataagattgtatcttgtcgacatattaagattgtacaaagaggtattttccttaagggcaagttgtcgtctggtcgataggaagacaacagtctgataaagaagcttgttggatgtttatattgaagaagcgatatatatgattgaccagtatatttatattttttgacaaagtaaatagttcagcgcggcagttgtttctttagttcacacaaccctgatgatgacatgcttaatctagatccactattagttcaagtttgcacaagattcagttttttataatgttcttttcaattttgagattaattttaattaattaaatgatttaaatttttatgataatatattaattgaacttgttaatatgggaaaactcttatataatttttctttttttgaaatttcataatacaaataatcttctcaagatactttattctgaacagagttgacaaagcttgagtatactttaagtaatacttctcgcgtccttccattagtattgggtgaagcaaacacaagacactatcacagtatgaaaattccgagatgaatcatgctgggaatgtgacccttagtctcttagcatactcgcgaatatgtaagtcagtgagctgtaagttctgtaaataattcattatctaccatttccaagaattgccattctgttgtgtattttatatttcttgagatgaaccttctaagttgatcgttcatctcgacaatcttatcaatcggtagttattattcataactcgcccttatctttaaaaggatgagtttgaacatttctactacatgtattttgtgaggcgagtttattgaatacattaattgttttataacacgacctgatttctttacacgtgtcaacaccacgaaatatgggtataacaaagataaaaaaaaaacttattttattttgttgttagttacgtgaaaaggaattaaattttttaagtaattatattaaaaagtagtaattaataatccaaaataaccgattcaatagaaaaaataacattatatacccactttattttacttgttttaatttttatctttatttctatattctttaagatatgcctatttttataaatgatgtccccattataccctttaagttaatataaattatgtgctagacttaagtgggtgataaaggtatattggacaactcactcataaaaatagataatatttaatgaaatttaatatgagagtattttttattaatagatataaaatatatatatatatatattccttaatttattctgattcaatatatgttggccattaatggttggagaattggatcaaggtcatatccttaatagttagttggtcctgtgactcatgtccaacaatcatggagacttgcgaatccaacttctttctgagtcaatcaaaggtttagatcaacccactacacctttttgacaagcaatgatagcagcaataatttatgatatttcaaccaactaaggataaatcgataaattattaagctattattgcatgtcctgattcactaattattaatactttacaacagatagttagagatggcagtggcatgtacctatctcagtctaaatgtatatatgatctcttggttaagttgcatcttgatggagctaaaccaagtctaaatgtatatatgatctcttggttaagttgcatcttgatggagctaaaccaagtccatcacccactaatgcttctcataaactgtcattaaattgttgagaaccatttaaggatcatagtctttaccaagcacatttggggcgcttcaatacttgacattaacaaggccagatgtagcctttatcatcaatagattaagtcaatttattcacgttcctacaacaattcattgggaaccttgcaagagactttttcggtatctaaaaggaactgtaaatgaggggcttcatatcagaccagcagccagactatatatgtttacaagcttattctaatgcggaatgggctagctgccctgatgagaggcgttctacgggaggctatgcaatttactttggaggcaatttgatctcgtggtccaccaaaaagtaacaagttgttgcccgctcaagcactgaaagtgaattcagagtgcttgccaacactgcctctgagatcaaatggttgtgctttgtactgaaataacttaatatttacttaccctcttcaccaataatttgggtagataaccaagatgctgcctcccttgctgcaaacccaatttttcacgcccgctctaaacatattgagatagacctccatttcattcgggaccagattttggcaaagcaacttgaagtgcgctatgttccttcaattgatcaagttgctgacatcttgaccaagccattgtcgactgacaggttcaattatctcaagaacaagcttcaagtgtgtgtaccaccctttcgcttgaggggggatgatagtgtaactaattctgctacttagcctgtgtagtgagttgtagttttcagttgtaataacggttcttgttttttttttttatttttctattatttcaattgtattctctattacttcttcggggtttttttccctataaataaaggctcatatcaaagactctgtagcttttacaagtctgtttttcactctcatagattgattactggtaggactttgtatagatgagctcattcactgtaccaattgaattttatcataataatgatgatgatgataacaatgatgaaacctcaaacgtccaaatgtacagtacaatagactcgggcttaatccagtttagccgaacagttccaagaatgtattcgggcaactcttcctcttcttttgcctgcaccacatcatgaaatatcatcttgctatttaaaactaccaacttaaatgtattatagacaaactgatgcttatggttaaccaaccaaatgtttagagatgctccttcctaagcaaatagttgcaaaagatgcatacatacagtaatcttttgtttccttttttttttacctaagctaacaattataagtaactcgaacatcagatctagtaggagcaccatttgaattatccctattgaaagaataaaaaagagaaacatatctcagaactccactgccttgacttgtcaccaagcttcctctctataacatatttctatcctaattgtccactacagagaactatgatagttaaaatagtagatggtggactgaaatggaataattaatagaagatcacaggaaatacagaagtgcaagttgagaaacggaaaacattagtattaaggcaaaacctctatcaaaattgtcaggtcaaccacaccaagcttgtgacatatccaaagacaaggccaatgacatatcccaaggaggcatgaaagtcattttacttcagcagcaacagggccaaagtaaatgtttctataaacttaacacttctctagtttatgtaaaaataatcaagaaataaataacacttcacataatatacctccataaaattctcttgtttaaaatatttgcaagtgactgctttccctagtaagtaagcttttgcttcctacagcacgctagcttgaccatccaatatcccttactgttaggagtattagttagttatatctgttactaagaattagttaattctgttagtggttaaatgtttgctctaactaattttgtaatctctaactaactctcctttgtataatcattggctatatagtgccaatactcattcattgaatgataagattgctctttgattcaatctctctctttctctgtctttctcttcgtgctctgtttctcttttcttttggttctttcatggtgaagagatttaacatggtatcagagctctttcctccattgtcagctaacatggcaaacgttggagccaacacaaatgtcacacataacaattcaaacaccaacatacctatcaatcaactaaatggagcttcaaatcctaatctatcaagaaacaactcagatgagttcaatccagtttatttcaatcataacatatctattaggctaaatgatcacaattttcttttgtggaaacaacaggtctttgctgcaattcgaggaaacaggttgcaagggttcatccaagatcgagctcctccacctcaattcttgaatgatgttgatcaagcatcgaacaccttcaacccagattttctcgattgggaggttcaagataaactcttagtctcctggttactatcttcgatgacagaaagcattctcacacgcatggttgaatacaatacaataagaaaaatgtggaatgccattgaaatgcactttactcttcaagtttcctccaagatcttaaagtttcgaaccaaattgcaaaaaattcgaaaaggctccatgtcactgaatgaatacctattgagaatcaagcaacatgttgatctttttgcctcagttggggatgtcctgagtgacagggatcatattgctgctatcttcaaaggactacccactgaatatgatgcattcatcatctcgaccaatactcatattgaagagtattcagttgttgagatcgaagctctcctattagcttcaaaatctcgaatagaaaagactaatcaagaactagaaactaaactaagtgcgaatcttgctacaacagatctggatcaatcctctaaagccaacactgcctatcagaattatccaaatcgcaccagcagattctataatcaaagtcgaattcccccttcctcatcatatggttcatcttcaagaggagttggtcgtggattcaacaattgaggagctcacattggaggtaatcatgcttcccttccccctttcgctaatactaatggtcatggtggcttcaatttcagcagcagaggtggtaggtttcccactccttcgaatcgtattcagtgtcagttttgccacaagcttggacacactgttcttgactctttctatcgattcgacaaaagctttataggagtgttcaacaattccacttcccaaaatgctcaagctaatgttgcttaaacaacacaaatggatgacaccagctcgtatcctgattctggtgcattgaatcactgcactccaaatttgcagaaccttaacactagtgtcgaatatgaaggagaagagcaactctttgtacgagatggttcatgattacgcccaaacttgtcttgacaaagcggtcattgtagtgtagtatgggcggtcgtgtccacagagagatatcttatcaaaaagtgattagtagaactttaagcgcaaaaagtaaataaatcgtt

SEQ ID NO: 32499 - DNA, 2050 bp, Cannabis sativa
  modified_base (2022)..(2024): a, c, t, g, unknown or other
tacttatgccgctatttacctttttttttttatttgccatctctatttaaccatcgataatatttatatagataatttatactaatgcaactaatttacaaacatatatatatatattcgaaaacagcaaatcttatacaaaataaaattttataattgaattaaccacaataatatgagattcaatcaaatatagctatataactaacatgtaatgtgataaaacaataatgaaacatattcaattaatactagcacgaattaataaaaaaatagatataaatcttaaaattatggtggcaatccttctggttagggcaatgatagatggatttggatcttaaaaagtaatgggtgattctcgtgtaaatcggcttatttaactcaagctttggaaagagctcctcactgcgaggtggctccgtcgctttggaatagcaaaattttggagtgccataagattttttggtggtgtatcctatctaatgcgctccctattagagcagtaatcaaaagcaggtttcagattgaggatacaagctgtctgatgtgtgggttgagggaggaatctattgaacacttatttctatatgtgatatgacgtttcatctttggagatcttcgccttggggcatttaccctgtttgtgatactggtattcgtatgtgggactgggttaaattcatatagaatcttgaggacaggggtatacgagttgaggatgtttttctttatgcttcaattattgttgacaccatctggaggacacgcaacgatatggtacacaataattgttcgactgatgttaagaaatgtattgactctgcttgtaattcttttgcagatttacatgctactttcttgccttgtcctacgccaatcttgcgagagtcttgggctcctcctcctcaggattggattaaacttaattgtgatgttagagtgggcctggagagtatgtgttctgcagttgtagcaaggaatcaccttggtagggtgattcaagtccactcggctcggttggatttttcggatgcactttgtggagaagctgcggcctgctgtttggctgtatcggtggcgttggaactaggatctaagtttgtaattgtggagaatgactcgagactagttatcgattctctcaatgggaaggagtcgcattgggctcttgagaactatgtctcattttgtattaagtcttctccctcttttattagctgtaatttttctaatgttagtaggtcctgtaattttgttggccataatgtggttaagtgggcttttacccaccagttgtacagatctattccaatttcttccttactggagaacttattttgtaataaccgtgaggtctaacagtttcattttatgatatttacgcttttattaaaaaaaattaggagtgtacgttggtcggtttgattagtttacgctatattttattcaacccaacgtaaaaattgagttacaaaaatctaagtacaacccacccaattaagaaaaaataaaacttcaacccgcccaataaattggtcagtttggtcaggttaatccgtccaaaccgagcactaatatttatttgttttcacattcaattgttatattttaattaattgtgataatagggtaaatataaaaattgaattcaaagtttaaattaaccaccataaaagaaatatagtagtttgaattttttattttttttttttataaatatgtatataaattatattatctatagattatatttaatatacatctatatataaaaacctcataatcgggttggtcgagtaagttcaggttgattggacgggttggtattattttcaatccgcccaatataaagattgggcaagttatattttcgtcaggtttttcggttagtatttttcgtcgagttatttggtttggtttggatgagttgttcaggttcggctgtaaagaccgcttagtttaatttggaaattagttgttaattatgtttaattttgaaaattatttatagatatttannnaattatttatgctgttattattgaat

SEQ ID NO: 32500 - DNA, 1257 bp, Cannabis sativa
  modified_base (614)..(616): a, c, t, g, unknown or other
tggttcgaggaggttccagcgctggtggcgggcgtgggcatcgtaaattcatgagtgattctaatcacttgataaaaaaaaaatatgaatagttttttagtaaatcgaattgctaaaataattagaaggttttagtattggttatgatgttggtattccaacccatctatataaataagaaagaattaagtcgaattagattgtgattatattaattaattttaattagattatattgactataagtatgattttaatttcactataaatagatacataaaataatatacctttattgcataaattatcaatgtgaggatttcgtcatcaatgggagatagaggacattaataatgaattgaaattttttaatttgactttatcctagaggatgctaaaataaatggacaataaagcttaataaatatgagttttattattttatattgtatcgaaagatactaatatgaataactatatatagtattagaaaaacattaagatatacattattattttcctctcacatctatctatcttaatactactagtagtatattataatttaattaaaatgcaattaactccaatagtcaaataatagtgtttatccnnntggtaatgtcaatcaagaaagcttagatttttccaaagttatttttgaaagatcttcatcaaacaaggcagtcaacttctatgattgatataatagaaatggatcaagtggtagttgtttcattatacatatatggtagggtttatgtttcattactttttactaaattacatactataatttattttagatgatatggtcttagtaagagatagtgactttaggaaggttatgaagtagagtgctataattcagttgctactagccaaaggataatcccttttggctagttctagtaatttttagtagggttcttgttgcttagttcttgttgtttggtagattctggtcaatttgataattttctaatctctggggacttaattgttataaaaatatttattatttactttacattaaaattataattattttgtgggggctctttactattttgttgtataattattggagtaaataaaagatatttaatttttttaacactaacttttttttttactaggggctagccgtcgcactatcattagtgtgtccgtccgtgcctaagagggatcctatggcgtcggttattataaaataactgataccatagaaccctagctatgtcatcggttattata

SEQ ID NO: 32501 - DNA, 1760 bp, Cannabis sativa
gtgacatttcttgtagtgcaaataactttttgttgtgaccaaaagtcacatttagtcagaaaaaatttatgttatgactaaaagattatcactaaaagtagtctttttttgcagtggctaagccctattcataagataaaattttgaactgttttagctcttctattatgctttttgatatttttttaactcttaactataattttgcattagctattgtgagagcactcacaacaagtgaggtatatataaagctaaaaggtaaaataaaatacctaaaagtttaaaattcagctctatcaaatgctttaaactcttagctattatacatatttctaaactccaagaaactcttctctacatatagctgaatgaatagtagagaggtaaatatattttataactctttttctcttttttgtttctttaattaattttttattcttctttttactcatttgtgtatgtttttttatttttattaataaaatatatgtggggatataatatttaaatgatatagagaaaaatataaagaagttggtgtataatgtaatgtaaatgtgtgaggtaaaatgtattttaaagaatagagtagagaagctgttgtgagtgctctgagtgctctaagaacatccccatattagatgctttataatagttaagagctaaaaaaatagctgaggttaaaattcatttccatcaattgctctaaatctttaagtagatgtacatagctaagctttaattttccctatttattattttaatttttttttacttaattgtcttcacctctcctaatttagcatttgattattattatttcttatttttgatttcttaactttaattattataaaatataataattaaatgatgtgatcaaataaaatataaagaagtagatgttgtaatgtagatatatatatgagataaaattaaaaaaaataaaataaaattttagtgaagtattttaaatgaagtaaaagtacgtgctccaaatgaacaaacaaattgagcttataactcatctatcgcgcatgtattttggacatattgttttttaactcttagttatatttttatttttgtagctattttacattagaattagttattgagagtattgtagtttggttctagtttcatgaataaactatcctaaacttaaggtcattgaagaggcccagaactttgatgagaaggctcacaccgaagccagagcgaatctagaggaggggttaagaagagaagaaatcttttggcggcaaaagtcgagagtggcctggctaaaaaatggagaccgctcaacgaaattcttcatggctagtaccgtaacaaggagacgacgtaactatattcaatgtctaaagaatgaccagggggagtggattgaaaatatgaaagacatagctcagttattcattgacaaattcacaagtactttctccaagaatggctcacgactcaagtttaatgctgaggagtggactcatttgaagatcgacgacattgctagggttgatatgctggatgctccttctgaggaggaagttttgaaagctttagcctccatgggcatcgacaaggcccccggaccggatggtttcccagtggcctactttcgttctcattgggacaccataagaatggactttatcaaattcatcaatcacttctttgcaacggcagaattaccccaatatatcaattatactaatatagtattagtcccgaagaaggactgtccatctatg

SEQ ID NO: 32502 - DNA, 1781 bp, Cannabis sativa
tcaaagccatactcttagcagtcacgattggggtgattgttactagaataaaagacttacaataatgcttatcttttgatattctacgacgttaaattgctaatcaatgaacatctattagggatgaatctcattaaaacaaaaactatgtagaatcaacaatgaagatcgaatgtccttatatttaaagctcattatttttttttaaaaaaaatgtatttttattaattatttattttaatctatatagtttaataataaaaattacttaatttaagttggtctaaaattaatgaaaaaattaattttcaactttaatttaatttttaaggtaaattttgaaaatcaatatatataaaatattatatataatttcgaaattaaataaaatataatattataaatacctgaaaataatctaagttgttttaaaataagtaaatttttgacataaataattttcaaaaatttaattaaataaaaaattaagtatcttgaactaatcaaattaatttgaaaaatatcccaatttaagttgatataaaattaattgaaattaattttcaacttaaatatttttttcaaaaaacatcagaataactaattttctagaaaaatctacttaattattaatttcaaaaatattctaatttaagttggtctaagattaatttaaaaaattaatttttaacttaaatatattttctaagaaaattcaaataattaagtatcaagaaaaatttaattagctataacttctttatttaattaaatattagataaatacatatagcttatcttgaattaatttcattaaattcagtgagtttctcttaaatcaatttcaaaataatcttcatatattttaaaaattaattatgtttccaatcaattttaattaggttaaactaatataattaggctaatacaatcatttaaataaggcaaatgggtcttcatagttagggttgttcatgtgagggagggttgggttcaatatgtcgtacccactaccaatggccccctaactcgcacacaaggcccaaaagagagaaatttaaccttaattaaacaattgttattaattgaataagctcaatactaattgagtctaattaaaaactattaaagtgatattttattttaacaatctagtccatttaattatcaaaatcaaatggactcctgatatgcatctggtccaaaagcaaacatataggctcaagtaaacacaatgatttggatggatcctatcatgttactatgtttgtacacagatgaaagaagattacaaaatttacctattacaaattatttaatgatcaattgacaattggactatggttagatcattggatctatcaacaagttaaccatagcaatttagatcaaataataataagttttaaaaaatagtttgaataaacaataaataaaacacatgtaacaatattggatagttggttataggatttatttaacttatattaaaataattaattaattttcaaaaatcttaaataaaataaatatttattttgagattaactaaaaatcaaacctataatttaaaaattaggtttataacaaccctaaatatcttttttaaattatcaactaactttttaaattcatgttatttaaaaaatataaaattaaatatttagtaaaataaaatgataaataaatatcattttttttaattttacaatttaattaaatttttaaaaataaccaacttttaaaagttgataatatcgggttttgtgccctaaataaaa

SEQ ID NO: 32503 - DNA, 2434 bp, Cannabis sativa
tgatcttccaacctgaggacgaggaaacatttgtttttgtggatccgtttagggaccctggattctagtgatttcagtattaatagctagagaattgttgaaagacggatgtttagggtttttggccatggtattacatacgacacggcctgagacagtttggccagaggacatcagggtggttcgggaatttttagatgtttttcttgatgaacttccacgtttaccaccgtaaagggaaattgatttcatcatcgatctagcaactggagcagaacttatttctaaggcaccttacagaatggctccagcagaacataaagaattgaaaattcaactttaggggttgcttgacctggggtttacagggcctagtgtgtcactctaagggagctcccgtattgtttgttttaagaagaaagacagagatttacgcatgtgtattgactactgggaattaaataagctgactgtcaagaaaagtatccttacctaggatcgatgatctttttaatcaccttcaggggaaaacagtcttctcaaagattgatctccaatcgggctatcatcagttgagaatctgagaggaggacattccaaggacttctttccgcactaggtaagggcactatgaaaatctggttagaagatgagatccttgtgtactctcaatcagaagatgagcataaacaaaatctctagattgttctacatcagttatgagaacataagttgtatgctaaatttaagaggtgtgaattttggctatctcaagtgtcttttcttggacacattgtcagtaaggatgggatcaaagtggatccaaggaaggttgaatccgtcaaggattggccgagacaaaatacaatcatcgaagttagaagtttcctgggtctggctgggtattatcgttggtttgttgagggattttctaaaatctcaacacctttaaccgaacttaccaaaaagaattagcagtttttatcgacaaacaaatgcgaagcaagtttttaggagcttaaaaagagattagtcacagctccagtattagccctaccttctgataaggaaaagttcgtagtctattgcgatgcatccagacagggtctagggtgtgtactgatgcagaccgatcaggtcatctcctatgcctctcgtcagttgaaagaatatgaacaatgatactcgactcaagatttagaacttactacggtggggttttctttgaagatttggcggcattatctctatgaagagaaatgtgagatttactgaccataagagcgtcaagtacttctttactcaaaaggatttgatatgagacaaaggcattggttagagttggttaaggattatgactgtgaaatcctgtaccatcttgggaaggccaatgttatggctgatgccctgagcagaaagggtcccagacagataactaatatgataaagattctaccttggttaacagaagacatggtcaaatcaagcattaaatttgttataggcaaacttcataatttgacactgcaatctaatctgttagaacgaattaaagctgctcagttaactaatcctgaattaatgaagatttgagacgagtgctcatctagtcaaaccaaagatttcatggtgtcaaatagtgggatgttgttgtttaagaccagtgtttgtgttccaagtagtgcggaacttagaaatgagatcctcgaggaagctcgtaccactccataatcattaaaccctacttctagtggtgcaggatgaagaaggatgtggtagaatttgtatcccgatgcttaacttgccattaaatcaagtctgagcatcagagaccggcaagtttattgcaaccactaacactacctgagtggaagttggaggctatcatcatggactttgtggttgggttacctagaaccacgggaatgtaggattcaatttgggttgttgtagatcgattcacgaagtttgtacattttctacaggtaaaaataacctttttagtagatcagtatccagatttatatgtgaaagagatagtgaggttacatggtgctccaaagtctattatatcggatcgagattcgaagtttacttcgaagttctagcagagtctttagcaagctatgggtaccaaacaggaattcagtatagcttcccatcgtcagactgatggacagtctgaaagcacaatttataaactagaagacatgttacgagcctgtgtaatggattttgaaggctcctagagcaagtacctgccacctataaaattctcgtacaataacagctaccagagtacaataggaatggctccctatcagttgttgtatggcaggaagtgccgatctcccattcactgggatgaaatgggagaaaagaaatacctagctccagaattagtgcaacagactagtgaatccatagaaaagat

SEQ ID NO: 32504 - DNA, 1553 bp, Cannabis sativa
taatgcagtttaaagatccaagttcgtatgttgctttatataattgatggaaaagctatgctgatccaaggtgtagagatattaaattccaagttcggaactttatctttcttcaagtggtttcaatgagaggaactcggaaattgggaagaaagggaagttaagttctaggttaatcagttcgtttgagtttcacgaaaggagaggttaggtagcttattagctagccatactccctgccttacttggagttcataatttgtaattcaatgttgagaagtgtgaggtagatacgattcctatactgagttacgaaaatatggaattttgaatagaattttcatatgagaaatagtcgatttaggtttatgaacgagaaaaggaaaaagtactgcaaaacaaagactatatcgttagctaaatcgctgtagataagcagcaagattaaaggcgacttggaaattaaagtcgcagctgtgggaacggtgttctgaattgtttggataaagatagttgtaatatcccaaaaaattattatgattattaattgggcatattttagtaaatacgtgattaagtgggtattagattaggattataatactacttaagataattatgagttaattagtgaaatatgagtaaatgaataaatgaagcataatttattaattacggagattttatcggactatgagggtatcgtggatactatttttgaaagaaattattttcgagttcggcggccgtggagactcggcaaagtggtcagagatgttatgataataaaagatggattgaatttgatttataccggagtagtttagaattttaagttgtcggtttgacaaattaattagaatgaccaaaatacccctaggatggattttaggttttaaggatttatgaggggcaatttagtcttttccctaaggatgggatttttgtctttttgtgatttatttgggttgaaaaagggtaaatgtaatttaattatatgtttaagtattagttttttttggaagaaacctagaaaactaaggcaattgcataacaccattactctccttctcctcctccttcgaaacctagaaaatcagctgctgcaagggatttttctttgagttttggctgagttgatcaaggaggtatgtcttctaagctttaaggtaattttccccttcttttcctttgattttctagagttgtaggttaggtttgaatggggattctaatgaatttggagctgtgaagttagtctaggactagagcttgtcctaggtttaattttagttttgtgtaggttctactttgatgagcttcatggttgattggtttggaattaagaactttagttatgaatttttgaaaataaaaaaaaaaatcagggtggcatcacccaccctacgcgcgcggatggccttatttttctcggctgcacgcgctcagacaagcatatgaccgagaaacctcgatctagacatgctgggttatctgaagaccacatgggtgcgcggagaggctgcatgcagcctcctgcgccgtgtcctctc

SEQ ID NO: 32505 - DNA, 1207 bp, Cannabis sativa
  modified_base (180)..(189): a, c, t, g, unknown or other
  modified_base (339)..(340): a, c, t, g, unknown or other
tttttgcacatattttgtaattaattaaaataatgtatacaaaattgtaaaatgccctatttttaaaagtaaatttctgtttttttaattaaaaaaataaaagtacattctaaaattacgtaattgtgttttttattttttttattcataattaaaatttaggggaattacctcatatannnnnnnnnnttaattttttttaaatttacggtttggatttctaaagtggttgtagcgctagttgcaatagagatttctgtacaattttttgttgcaatttaggttatagggttagttgcaataggagtttctaggtagaattccgtaaaaatgtaaaannaaaaaaaaaactgttttaaagtgtcaaaatgaaaaaatccctaaatttattagaattttaaaaatagatttttgttgattttaaaatttttaaaaacacttttttttttctctctgtggctagtcttcctcctctccttattgtgcgatgatcatccatatggcttagcaggtaaagcaaaactccctccatctctgtctatctctatgtgttctctctctctttctatatatatatatatatctgtgtatatatatatatatatctcagatctattttatcattcattcgttcttatatccggagtgttgtttttgaggtccaccatgctagatcgtcactaaccttcattatcggcggctgagtttatctttttcgttgagttcagcataataatagttcccatgtaccataagttaatagaaacttcactgatctaatttgggtgtttatctggttaatttccaagtacgacaatgtttattcatattctctatgaaccataaatttatttatgtatatactattttaggtctcatctatatgggtgattggaattattaaaaacttccataaatttatttgggagtaatacatttccaacctatttttgttccataaatattttctttcttcaatttcaagtttgtgtttttggttaatttgttttataatcttaagaagtgcaaaccccattttcataatcacaaaataatatttcattcttgtgtttcttatatggtgttgtgattggagcattgggtaataatagattcattaatgaagttgagcttgttcactcatacttgatgtaacgccataatgctaaggcacgctacagtgctttttcaattattgtgcaatctt

SEQ ID NO: 32506 - DNA, 1281 bp, Cannabis sativa
aatatgttccaagattgatagaatcttagccaatcaagagtggttggataaatacccaaatgctgaggcaatgtacttgaacgaagggacttttgatcacagtccagctgttttatctttgcacccgagatggaaaagtgggagaaaactttttaagtattttaggatgtggtcatctcatcctaaatatattgaaaaggtttcgaaagtatggcaaaaggaaaagagagggactaggatgtatcatttgatgagcaaattgaaggagttgaaggctacttttaaagagattaatagagaaggtttttcggatgttcaggctcagtttgaacaatcaaaagctgatctaaatgacctgcaagataagctacaacaagacccgttgaatgctgattttcatgaagcagaatcaaatgcccgggagaagtataacactgctgtgaagaattatctctcctttctccagcagaaggccaaggctcttggatacaaaaaggggacagtaacttagctctttttcatgcgagcatcaaacagagacagaggcaaaaccagattttatctattgttaagagaagacggagtacgtgttactgagcctaatcaaattactgaggagttcattaactactatcagtccttgcttgggtctcagatgaacaacagaacgaaaatctacaatagggtcattcttgaaggaccggttctagatcatgcacaagcagctatgctagtcagtacttttaccagagaagaagttaaaaaggcagtatttgagatacctggagataaagcccccggaccagatggctattctagtttctttttccaagataattgggaccttgtgggagatgatgtgtacaatgcagttacttcattcttggaaacagggaagatcctcaaggagattaattccactatcctgacaatggttcctaaggttaaatgtccttctttagccaaagattttaggccaattgcttgttgcaatgtaatatacaaagttgcaacgaagcttttgtgctctagaattcggcttgttcttcctagtttgatttctcaaaaccaaggagggttcattcaagggcgattcatcggccacaacataatgatttttcaggatttggtgaagcactatgggaggaaaaccaaaaaggctaattgtttgatcaagctggatctacagaaggcttatgatactatagaatgggactttgtggaagaaatgttgaggcacttaactttccattatccttcactcagttgattatgaactgt

SEQ ID NO: 32507 - DNA, 3081 bp, Cannabis sativa
ttattattttttttattaaaaaattaatataataataaaaaatattttttagtgtaatttttggtgttgtggttggagtaaaaatattttttgatgctaaatttagtgatagtacaacaccaaatttggtgtgtctttggagatgctcttagtgattaaaacttaattagctatgattaaaatgttgcttggtagatttttggatagtgctatattatatacataaatatatgtatacacaaatatatatattatataaaatatgattatgtaatataattttaaatttaacaacgtttgttggttttctatgttaactttaaccgaatatgcatgctattaattaacagaatatttttttattacttttataatattattatatatatgtaaaaataaatattatgtagatattttaaatatgaaaattttaattttaatttaaaatacttaaaatattatagatatttttaactgtacaattttaattttattggtttaattttgaattaaaataaaagacaattctgctcaaggcacactacgaatcaccacgatatttcacttgagttttattgtacatataaaatatgtatatatataattacattcaaggcatactaatgtagccgcaatagttaaaaaaaattatcaaaaatcaaaatctcaaactctattttaaaaattaaaaaaaatacattactaattataaattaaaaaaataataaatatatatgtattgcacctaatatcacttaattaagcctaaaattaaaaaaaaaaaaaattattacataacaacaacttaatatataattataatgatgcaatttagtggatatatatgtggaacaatattaggatcaaaatttgaatttacattataataaaatatatatatttttggtaaaattataataaatgtattgtatcaaacatatataattaacacttataaatattaaaaataaaacatatagataattaacctataatatataataattggtatttaagtaatttaaaaaaaaaaattaaagaaaaagtctagaagggaaggcgatggatttggcaagtattatttgaaagaatcacgtggaatccacaagaaggcattattgggtaaggtagatgaccaaatcaccatttggagatgaattaccttgaaattaaagcaacaataattgatcaattttcttagataaaaatttaatttaatttattagcggatgggtttcgattaaaacaacaattggtgaattttgtgaagatgtcaccaattatagtgaggcacatgccactttcattaaaactagaagaaaatataagtatttatatataatattcaaagactttatattgaagcagtcacaaacaagctagcccactgtcatgtcaatgcgtcacaatttgaccttgccctcttgttttctttctattatatatatttttaatccttcaataatattaacttaataatttgaatctatattagttaattatggtttttgctatctaagtgcatattattaggccccaaaagataaataaatctatgtatatactatagtcgtatatatatatatatattaaaagtttattagtgcaatattaattaaaagaaaattaattgctatagaggctgacttgagttgatgtgaaaaggataaaaatcaaaagaaggggaataaattaaacaaattggtggtcgattttcattctgtttagatttgtctttggattcttttcaagtttcaactctgatagtcatcacatttataatataaatgaatattaattttgtgcacaagtaaataaagttcatgtgaaaaaggaagtacacaaacttttcaacaaggaaagaaggaattggtctacgtggtgggccatcaccaacctctagcttcctctctttctaaattatgtatgttgttttcattctttttatgtgtgattttttgtacctatatgggctttgaaatagtctttttttgactcaagtgttaaaaagcgaatacagctgaaggccaccattatcttctcaaggtgtttttgtttccaaatatataaatatatttatgcatgaattttttgaaagtggaaggagaaactgtcattcataatatgtactactcattataatgggattgaacaaatctactcatcatatcataatgaaacaatcatatgatttataggctttttgcatggtctcaagtactctctaggagaaaaaagaatcatcccaatcaaatatttcttatcataataatgctacttgggcagatatgcatataaatatatacattataattatccaaaaataatttatatatatataaatgatagtttgagaataaatttgtattggtactaaacaggtggatatgtggttaatggtttgttgtggtaatgtagtgaagtagtgaagtagtgatgtttatgagtagttgttgatttagtatatgaaattagtttggcttgaaagagaaaattgtatgtaaagtagtaagctcttattgatagtttagaacttttggctagcctttgggtgttggttgttacactagctcctcaatccaagcttggtatttatagggagctaagattgatactacaactttctagattcttattttgaattacaatttaactttctaagaaattctagaattttttaagtttcttagcttacaaatatagtttctaggtaattatagttttttctaaaaaaatttagctttgtgtagctaatattagaattttctaaataagaaaagtgtagaattgtgtagcacttatcatcactcctccttggtacacatttcggtaactccaattgtgtctcacagtagctcaaacttgcctcttggtagtgcctttgtgaatatgtctgctacctgctcttcagtcttgcagtgcttgagctcaatttctttatttgcttctgcttctctgatgaaatggtacttgatgctaatatgcatgcttagttctactgtgaaatactggattttgtgccattgctatagctgatttgttatcgtaatagatctttgtagcttcttcttgtaattctcc

SEQ ID NO: 32508 - DNA, 1655 bp, Cannabis sativa
aagcagccatcagccacgacacagtcattagagccgacatagccatcacattcgggagacgattgtggtgaggatgatgtgtattcgaaagattgggaggttccttatactccaacggatgccattatagttgtcgttggtgatacacagtctcaggatgtgcaagagttggatgggccacctgctggagtggaattctcgagggttagggaaaaacgaaagccaattttcttgaaggactacacaaaggggaagaagaaataacgaactgggtcagttgaagtagacactgaggccaacagacccacgggtgtacaaattttaacaaaagtggatcacttacttgagggacaacggtcgtccaagggatgtttacattggcctagccaattaatcttggttcgtgaaagtgatagtgcaaggagaatggctcgatgatgctgtaagttatttcttaactgttcaaatttggtgtttaaacttttgtgcgacatatatttatatttatgtgttttctatgtaatttgtgtacgattactatacaattttactatgtatttaatttctttgacatgtatgtgatttttatgcgatgtctatgcgatttatgtgtgatataaaactctaaaaattagtgctatctttgcgcaacttctgtgcattttatttatttatttgtgtgatttatgtctagcttagttggggatgctgaggcagatgaagctgatgggattgaatttgttgatgacctggccaacaatcacagtgaagatgaagctggtggctcagatgcaaaggtggaatacaatccacatacaaaaatagatgacttcaagtttgacattgacatggaatttggcagtgtggacattttaagaaatgtgttaagagaacacttcatctatcttgacaaggagtatgaactgattgcaaatgacaaagaaagattaagggcaaagtgcaaagtagaaggatgtaaatggaaagtatatgcatatgttaaagaacatgggaagactttcaaagtcaagactctcaaccctaaacatcaatatgggattgtgttggacaatagatatttttaaattattgttatttttcaatgctacactataaaaattatttgtggtttttttatcttatggattgcatactttcattaatcttgcaggcacataaatgttaactggctcagcaaatatttcctggactagttcagactctacccaaatattcactatagtgctttcaaggagatgacagagaacactaagttctctaaagtcagttcatggcagttctatagggctaaaaatattgcaatgaaagtgcttgagggatctgtagtagaacaatttgcaatactggatgattactacaagcagatcttgtccacaaatccaggaagtacttccaagatgagttgagggatggacagaggacatttcaaagatactatgtttgtctagcagtttgcaaagaggggttttacagaggttgcaggccattcataggtctagatggttattttttgaagggctattgcaaaggagtgttattggctgctattggagtagatggagctaattcaatttaccacatagtctatgcagttgttgagaaagaaactgaaaaaccgtgtttttgcaaatgtc

SEQ ID NO: 32509 - DNA, 1168 bp, Cannabis sativa
aaccactttggacacaatcttgtatagcacattgcataacgcaatgggtcttaaatcccccatatccataggctgcttctttttagggattaagatcaaagtggttttgttaaggtctgtaggaaaagaaccattatgaaaaaactgcttaaccatattgatgacatcatctttaataatcggccagcacttctgaaaaaaaacccggtatcattccatcaggccctgggaatttatccggatgcatttggaacaaagctttccgaacttcttcatctgaaaccggaagcaacagcttagcattctgttgggatgataaacgagtttgcacgttgctggtgacttctctccagttggtttgggaagcggaaaaaagcttgtgggaataagaaaccataagatcatccaaaccactatcccaatcaacccatgcacccgaatgatctttaagtttagccataaaattattccttcgtctcgtagtttcagaagcttgaaaatacttgctattattatctccttcttgcaaccacaattgcttcgatctttgatgccagaaaacttcccattgcacataacattcggccaaatgcttctttgcttgtttgtaattggccatagagacttcatcccgacccaattttcacttctgcacttcatttttacactattttaacctttctttaaaattgccagtaacctccttaccctaaacggccagcttatcccctcaaaactgaattttaagcataaacatcatcagactcacaaatctcccagctatcctttacaatctgataacaaagaggctcccttagccacgcattttcaaactgaaaccgcttaacagaatgatgacccgcaattgggatcataaccataagaatcggagcatggtctgaagttgagattttaagattatgtagctttgccatagtgaacatattcaaccaagcgagattagcatgccctctatccaaccgtacttcaatccaatgactagttcctcgcccacgctaccaagtaaatggatacccacataattccatatcttgaagcccactgtcaatcaaggattgttgaaaaccttggatcaaaaaatcaggatacctattaccgcctcttttatcatcatgagataaaacattgttaagatcacccatcacac

SEQ ID NO: 32510 - DNA, 1664 bp, Cannabis sativa
  modified_base (158)..(161): a, c, t, g, unknown or other
  modified_base (261)..(264): a, c, t, g, unknown or other
atggcattaatacttatgtgatatgttaagtatgattattgatactttatactgtcttgctgggcttggctcacaggtgctctactgtgcaggatagggtttatctttctctgattagccatgagtgtgagagctgggcgatgtatgtacatgttcgnnnnacactagaccaagcgggttggggtttaccagtgataaatttttgtacctcaattttctgcttacgtcagctattcagaaaagacttgtaatattttgtannnnatttttgggatcccaaaacatataattttggttgtaaagttaaagttattacaagtttttattttaattcaattattgtttaaagtttaaagttcccgcgcttttctgtatagtaatcacgtttaggggattagggttcttaatcaccttgggtagcatgcctatttgttagggcattacattacgtgtttatttagtttctaaaagtcttgataaagaacaagtctttgggtaatcagtggaaaaacccacctttgagggctatcataccgttcttctgtataatcatttgaagttggtgcatccatttcaaggacaaatgcaatttatttgcttcccaactggtagcttggtgaaaaaagtcccacactggaattggaccattaagaacatgctttaatgggaccaaagggggctcagagatcccttcatctttcttcgaacttttcttgctccctgagcaaaccttttttccttgttcttcactatacttggacaaaatctctcgataaaaggagtaaaacttgtgagcattgagctcttaaaggccctaaacagttaaccccttataccacattaaaaaaataaagattgaaatgggagtcctctaactgccaataagaggcccccacttgataccaaaaacaaagatatatttgcacagggtatcgggtgccaaacacatcgcttctgaaaatgaaaatataatgtaaggaggcgaagagagaaaatgacgggctctccacaaaaatgaaacaaaccaaataaataaataaagaaatatcaattgagtgcatacaatgaaaattttctagaatttcaacataaaatggccaaacgcacaagtcatgaccccctaaaccagaagttttcaaaaaatcccctactcttcgcatgcattcctagaatgaagaagttttctagaaaaaaaaaaaagaaagtatacaacagatttaatcacaaataagcctaatacttacaaaattaggtccaaaatattgaggatggcgcgatagaacaatgataatagtactttgcctagcagcatcagagtacaacaaaagaatatttggcgagctcaaagatttttcaagtttgtacactcaaagaaaatggtaaaagaaataaaattataaagaggtagaaggcaagtggtatttatacccttcagcccttgttcctagcacttttgatcctacaaatcctttcaaattctaattagcatattgtaatcaaccagttgggaatgagcatgaagaaacacatttatgagggaatgtttgaagtgattgagtatgcaattatttgcatgaaattattgcatgtcttttgattttgttccaaagaaagaatcaacatcaccagaaccgaggaggaaatgcatgcagcactaagagcca

SEQ ID NO: 32511 - DNA, 2824 bp, Cannabis sativa
  modified_base (2684)..(2709): a, c, t, g, unknown or other
ttctgccaattctggctcgatactttcacagaccatcaatattggtaaatgggccacgacattataacattgcctggcctcaccctgattgcccctcacggtccccactacagcctcttgggtggggaattttaggcataagtgctggatagacgtaattgtgccaaaatcaaccagggccggtcggccgaggattgcgttgtatgtagttgggcagtctaccaccacaaatgtggagtacttgaaagtactctggggtgtgtccgtgcacaaggtgactggcaacctcacttttcccatcgggataagcgtggttctgttgaatcccgtgagctgggagctgcttggtgatagatctcggtccgtgaggcctattgctgtgaaggcttctttaaatatcaaattcacggaactcccactgtcgatcaatactctagccacgatcttattggcaatgggagtctctatgaccaggggatcatggtgagggaacctcaccagccttgcgtcttctttcgtgaaagtaattggctgatccatgagtcgtggcctttgagctggaacctgagtgacttcccatacctcgtcatgtttaatggccccagaatagcgctttaattcttttcgagtggtccccccaatatggggcccaccagagatcatagcaactcttctgttgttacttggtggcaggtcaggggtctgctgagggattggtcctcccgagggtacagttggtgccaacacttcgggcgcacttccaagtgtcccttgggatggaccccctgccggaaccgggttgagatggggcagccggttcttaatccactcatagagttgacccaattcgatcaagttttcgatctcatatttcagatttttgcactcattggtgtgtccaatgtcgttgtggtattcgcatcttttgttgggatcccttcgctaactatctctgtacaaaggaggcggcctcttgtagtgcgtattttgcctcgtggcgaaatacacacgctcttatgtgtcggtcagctctgtgtactgggtatattggggagtataccctctttttttgcgcttgtcctccgtccggtggcttcctttcgaggacctcttgctccggaagccttgagaaggtctggccaggctcgtagcaggagcggagtgagacgaaacttgtaagcttatccctgaggggttcccgtaatgcgaagatgcgggagccaaggcttggctctgattgtatcctggagtagcggagaactgtatacaactcatttgtggagtagctggaggtagggttcccgagagttgaactccgggtacataccctgccactccggtggatagtatcctccgtaggccactatttgagcttcttccaagttgatgtacttttggactctcttctggaaatcttggaggttagcagctccttcttgttgtaattcgttccagaacggggttcttgtacggatcctagcttgaagaagtgcaagctgttatccgtcatcaactttcttggtttttgaggcttcttccttgaacctctttataaaatttttcaatgtttttgtgggtagttgcttgatgttagtcagggcgctaactttgagattaatctttctcacggtgacaaactatctccggaaactaacttgcaatttgttccagcaatccacagatcctggttccaactttttgaaccattcttccgcaaaaccgcttaatgttagcggaaagcataaacacttggcatcattactgtctctcataacgtcattactcggttaaaccaagacaaatgatcgctggggtctgagtcccctatgtaggctgccatttcgggcatcttaaatttttggggagttctgcctccaaaatgtgccaggcacacggctcccggtccttgcaatcagagttagagtcatcacctttttgtctcctggagacttgagcaatgtctttacgcagtatcgcgagctcagccatgattccctcattcagcgtccctggggagatcgtcggtatgcgtttctttttgtccaagtgatctcgcaaatcaccgtgcttctcgttgatttggtgtcttaagtcgacggggggtatcgccggctcccccttcctttttccccgagttcctggtgcacagaaacactctttcggtcctctcgatcctgaggacaaagactccctttttggagtttgcccctttgcggacctttccgttttggaaaatctaagcgaacctttcacggatcctgcacctttttcttttttcctgggatggaagtagggtttctctattgatttccttcagagggatatcgtatagggctaagttcccgggacttatgcttctgagtgcttggagagaactctttcagcatttcctcgagtcctgctgggatggccttagggtgtatatggatccgtgctgtccatggctttttgcattgcgaccatcacctcttgcatctttttattttgttctttttgggttgcgatctcagcttcatgatcagcagcctttttattttgactctcgaagccacttcttcgtcttcaggattttgagcgtcttgaggaggacggggctgacgtgtgttgcaagtttcgaccattgttgcttaatgaaacttttaaggatgttgtctgtttgaagacgcttccttcagctctcaatnnnnnnnnnnnnnnnnnnnnnnnnnntttcggcaaccaattaaataatatgtataagaaagttgtaggaagcttaatgcattgaatttttacgtggttggggcattaacgagccttagtccacgagtctttgttatttatg

SEQ ID NO: 32512 - DNA, 1409 bp, Cannabis sativa
  modified_base (1278)..(1279): a, c, t, g, unknown or other
tacgactcagacgaggagctcgagctgtaccacccagatatcatgaatactccttttcccctaggatttaaaaacccacatctctcatcgtataatggaaccaccaatctggtctcgcatttgaagaacttcaacacaataatgcgagccattaatgtgacaaacaatttactttgtattttgtttcccacctcgctagttggagcagcaagcagctggttcaacaagtttactcaccattccataacttcctgggaaaagctatccagggattttaagaaacagttgtaggctgcaagggatagacgacccgaggtggcctcgctaaccattataaagcaacaacccagcaaaccacttaaggaatacttaagtcgttttagtacggctgctggaagggttagaaatttggatgatagtacacaacttatagcccttcaggcggggatttttactgatccactaaccgctgggggcaaactatgggacgacctacagggtcgtctagtatagaacatcactgagttcaatgaaagggcttaggtgtttgtctgaaaagaggaagctcaaaaagagatgaatttgttgaaaacaggctcgggaggcaagcccaataatgtttcagcaagtgatgtctcaactagagttgataacttaggggcctcttgctcaaagagaaaggaagattttaaggaatcgtcaaaggaaaaaaaagaaacataagaagcacgataagtacgtgccagtgtatactatttatactgagcttaatgaaactcagtaaaaaatatttaccttgcacatgagcagaaggttaccttcggcaaccccgagcccatgaggcatgcaaggcacaaaagagatcctaccaggtattgaaaataccataaggacattggggacacagccaatgaatgccatcagttgaaagatgagatagaaagtctcatcgctcgtggccacttcaaacagcttgtgaagaagaagggcaacggacacagccagcccaatctgcccaacaacccaaacaaccaggggttacagcctcctcctgttgaaggagaggacatcctggctatttcgggagggccacatatcgcaggggagagcaacgacgcccaaaaaagttatgtgaaagaaataaaaaatgagcagtcagtatttgctccaaaaccttttaagaaggtaaaaacttaagaacctccaatcacattcacgaaagaagatgagaagaacgtgagatatcctcacgtcgatccattggtgattactattcanntcgccaataaaaggataaagagggtgttaatagataacgagagctcagtgaacatcctttataagaaaacattgaggaagatggggctcaaaaaagccaaatcgagctcgcattaaccttgggcgaggca

SEQ ID NO: 32513 - DNA, 3594 bp, Cannabis sativa
aaaaaagcaacaacatatataatacataagtaattatctagtatatataataataataacatattataaataaaaatatatttgcattgattacacatatacatatgttgatcatcgtaataaatgaataacttaataaatatgaatgtatactgtctactgtctactgtctcgtgagtctctcacgaatatgaagagtccttttgtttgaatatgattaaaaaaatagaataatattaattaagtattgacaagtgttaagccgaccaatagtctttttttataaaatatgaatagtgttttttttttctaaatgtgattaataagtaattaagtattattaacttttttttaaaaaaaaaaggttcgggttacgggttacaacccgacgaaaaaaactacttatccacactcgaacccaaaacccgtttggaggttttttcgagttcaacccgacccgactacacaggtttttaggtgatcggtttttttggcagcgggtcgggcaggtggctgggtttttttggtttgcgggtctaaatgtgcagccctaatctggagacttttctgtctcgatgctaagttgggtcgaggcttgtttcttattggcagtagttttagttctttttgaagactcctttgtggatcccgaggcatctcttgttgaagttgctcgcttcttggattttttgacgaagggagtgggactacgcaacatgtattcgagatccaaattcatatctgtgaggcaaaatatatatatatacatcaacacttgttcaaaataaacaaagaaaatagggagagatagcctcccactaagaaaaattaccataatcatcatctgatgatgaagaagaactataataacaactaaactccctagaactagtgatcatgaaaatattaaaggtgtttaggggagacaagtcccaatctggatggctcgccctatcaaagttagttctatattattcggtaatccccaaaattagaactatttaacagcttaattgtacgtgatgctcgagataccaactatcgaacctatggacaatacgatctacacaattccagatgtaaaagctgtactggctatccttaaagttaataaaggtagtgcgctcagccctaagtacgataggagaccatccacaaataccaaaattattacctcgggaggcaacttttccggcttcccgaggggttacattcttcaagtagtgggagtgagcaacataatccttctcttcctcgtcagtaggaactggaacctactgccagtttgagtattttgagactttaaagttgtaggtagcctagtcgctgccgagaagattggaggtcttcaagttattctcgtgtaataagaaatcaacaactcgtagatcgaaaggaagaccaagaagaatcctatgtcttctttcaatttttggagtcacaatgggcctccttgtaatcgttgttaatacaacataaacaaaataagtaaatgcctacaattattaaattgaaaactcaaaaccaagcttttgagatgaggtaatacttacgtctaatgcgaaacatatttgtattgatagggatgaggccagacatctaaaagaagtcatccttgaattcggtcttattgggcagcctcagaatgatcctttgatcatttgtgtgggtctcgagaaagtagaaaccacctgctccttgcctcctcgcgggacaggcttttacagaataaaaatataaaatttatagtggggttgggcactcccactttagaatttaatataaaactttcaagcttggaatcagctaaaagggagaaatttcgaggtaattgcagaactttttgtagtattctttaagagggactactgatccatcttttatgtgttcgaggctccaagcgcctattctagatggctcgctagtactataactttcttctcgaatcacacgttcaggaggaaaacaactgaattctcttagagcgacagacctaactcggcatcctcactcatacttgataccacacgacttcatacctccccaacataagctcctatggatctaactttagactcaatgagctctgccttgaaggtaatagtggggtcttaaggggtcttggatttttgagctttcgaggccacgatttcaaaatctaagtcacctggtcaaaaagtaacagtgactggaggtacaaacaaaggtctcgctaaaggaatattagttaaattttggggttcaggcaagtgcttctcaccaaaaatgacatttaccctcagttatttcttgcaaaaattacctataacttccaaaaatctcgtcttgattggttttaataagatgttccctaatttttgcatcatttatcttaagaaaggttgtaggtatatgtgttttgggtttgaatggaaatgctaaaattttaggacaattcgtttcttggtattctgggattgtgttttctagattaaattgggtcatacttttatgaacagtactatcctaatttttggaaaaactaaactcgacttaacccaaaaatctatgaatcaaataacctaaaattttccttagcgttagaactatccagacaaacaaaatcaaaattacctaaaatgaccaaacaatgttgataaggaaacatcaatcaagaaaaagagattacgagtacaaaaagaaaaatcagtaaaaagaagagagtgaatcacttactgttttgactgtaatttctgggcagagagaaactcgatgattgaagttctaaaggatgtaaacctgggttttaaaggcctttggaaaaatagatgaagtcgactgaaatacgcaggaagtatgagaaagataacgagggcatgcaaatctagaagaggaagtaaccatgattttcaaaaagcttggaggcttgaaataacaaaattggcgaaatagatgtcgtgcatcaatttatacccaattgttaattaccgttcgatcataagaaataagttctaacagatggaagtattagaaaataagaatggtcagagcattaaatgctaatggtgtacctcgaagtcttgaatcgtcaaaactcaaagcatgcatttttcaaaagggattaatatgattatatccctgtaatcatttagaaagttctttttaattaaaaagtactttttagggggcaattgttatacctgaaattcgactatgtaccagaagctgacacgtgtcctactgaaagaacgtgaatcaactcaatgtatataataatgacgttgcattattaaataactcgtttcaattaaatacaagtttgatagaaatgttcaaactcgttgattgcttagtcttatgcgagacaagaataatatctattaaattggtattgacgagacatatgtctgcctcgggataaactcagttaaatatacaaagagagaatattctcccgcatgagcagaataaaagtagtgacactcaaccacctcgcgttactcataatgtggagatcacctcgcatcactaatataaataaagagatacaacgagatgaagtgtttccaacacttagcattttttctatttagatggataagaaggagaactcat

SEQ ID NO: 32514 - DNA, 1563 bp, Cannabis sativa
gtgaagacagaagcactccaagataggttcacaaactgttagaacccggaagacttgtacaagcttgactagtgcttgtttgttgaggtagtgctactgggtcgcgaaacaaacgcgttgattacagtcgacatacttagatatgtcgaagatctagagttcttcttttggattccttgggggaagcactcattcgccagacttatgcactcgcttcaaaaggacatggtgaaatagaaggccaactacgagaagaagttgaatttgaaagtttagcatgagtgcaaatacacagcttatggcttcgcacctgcagtacaatattgggcttatgaggccattttagaggttgggaagaggtatggcacgaatcatgggatttggtttctcaggatgcttaactggacgagcaagggtgatatagcgaagaaggacctcactacattattttctagacgggtatgagttactcttatgtttatagtaattattttaagattaatgcttgtaataaatgctaaattatttttctcttatatatttagaatcttaaacagcatcttgaagggatgaaggggttacttccacgcgcaaaagaggaggaatatgtgaggaccatctcttacgatggtgtggagaacctgattggtggggtggatgccacataggctgaggaggacacccaagatccagccatttttagaagacaagcaaaaaaagcagcagaattattgaaaatgctcctttgcccaagacagatactcaggtacttttttttaactttttttttatgattattgattggcattagttgtgatttattagttagttgtaatttactttgttagttgttgtaaattatataagttgtaatttacttggttagttgtgtttgttgtgttaattcaacttgatgtcaatatgatatcaacatgatcgcgataggttatcgacaactatgtttgtcattttttctgctattgtattaagtgttgtcgatatgatatcgacgtgttgtcgacattgtttggtttttagtttcaatatgatgtcaacatgtatgttgatatgatatcgacataatgtcgatatgatgtcgaaacctgtgtatccaaacatttcattgtgttatttgtttcattgtcgatgacatatcgacattttgtcgacatgatgttgatatctatgtaattgattttttatattaccgtatgcttactgtatttttctaggatatattttttgaggccactacttcagaccctcagcccagtgcatcatcttcatcaggccttggtggtgccgagtacagggaattagtggggaggttggataggatcgaggctgagcagaagggtctgtacgcttgtcatgtcgagctgaatgaggcatatcagaatagccatatagagctgaagggtggttagaacctgattatggagcagctcaaaactatattgagcatgttgcatcgtacaccaacgacaactccaacaccggagcccctagcagatgcatcacccccactagcagctgcatcacctgttggggattatttactag

SEQ ID NO: 32515 - DNA, 3937 bp, Cannabis sativa
  modified_base (2908)..(2908): a, c, t, g, unknown or other
tattgatgaaaatgaaaggtctattattaattactagccactgcctgagtctctctaaggaaatgctaagtttagatttatggatgtcctaatcatgaacttaagaaaagctagaactattaacttaagtttgcatgtttgataggtattctaaagtaattaggggtggaccatggtttggtcattaagagaaagtgtttgtttcaacaaatactacttttctaagaatgtgactaaatctaaacgtaaagtagagtagatattttttttctattctaaagtgttttatcatcttattctatataagatggtctcaccgcctctattatattgacacaaccgatgaggttaataccactaatgttcctagatagaaagtcacggtatctcgtcgtagtgggagggtttcaaggaacccagcctgttattacttggaagacacttgtgataaaaatctacttttagttgacaagtaatggatattcagaataaggaacgaagaagcaatgccaagtgaactatggttaaaaccattcatatggagtaaccaaaagttttctattacaaggataagaagggaaatttctataataagtctattcaacggagttaacaaaacttctcgatccttgtatcataggtttgggattatctaagcctatggcttgtggtataccttgtaatttacttactctagtgcaggtaacttactttagtaagatgctagagcatttttctaatggctaactctaaaggaagtcttttggctattagacatagattttatctaaggaacagtttcaactattctagaaaagttaaaggccaacaaaagaattccttaagcatcaagaatgagaggtctcatgtatgatcttgtatgcattagaccagacacctactgttgggtgggagttatgagtaagtattaatttaatccatgaaaggaacattggaagacaatcaaataaatcttaatatcaaaagaggaactatatgttagtcaataagggtggtattttaatactcttaggctacaccaaatcaggtttttagatttgtgttaatgctagaaagtctaattatgagatggtgattactttagggatggagtagtgatttttggagaagtgtaaaaacctatctagagtctctaactctaccagtgagattgaatgataaagtggcccagaagggtactaggtaacacatacatagttgccaaacagtaaagaatccagtaccttaagaggagtaaacatataaaaaggaatttcataatatcaaggattttgtgactaaggagatgtaatggtggtaaaagttgtatagatacaacctgtccgatcctattacaaagattatactacatactacacttgatctagatatcaaggtgttgagattaattgaaatacacttttagttttatattagtgcaagtgggtgtttgttgggatttttcaccctatataaaattcatttcaatatcatcagatttactaattataaaaaagattagatatcattttatgttgcatggttcacatgatttctttcatgattatatctttaatatatgaattcttttaaatccaaaacatatagttattcatgattatagtgttgcatacacagtggaaaataatcatgattatatcttttaatgtttaagtccaatgacttgttagtacactagatttacactaacatgataatcagcgataaagttttcttacacctgggataattggtatgtcctttctagggtattggcaaagtgtgctagtatcgatatatggagtatacatcagagtggaccgatattaacattagataagatatcataaacttaccattatatcattctggatcaatatcacttagttgatcttaggtcaatagatcttaatcctgagatggttaggttttggcttaaatgtattatttgtgttctttgacttgttcagtaaaagctgaccaattggatcggctcaatacttacatcttggcaacatagtagtataattaagttggaacgctaactgtagatctgaaatctataacatatataactattagaagtgacacgatgattttctttgagctttgcttaatgcgataaatgattgagccctcatttcagtgtttatattagtttattgaaatatcatttacaattagttaagtgtttcaaggataaaatacattgaagggtagaatagtaaatttgtccttactgtatgtagattatctatagaggatctttgactaattggattgaaacaatgggtaattcaaattgcatctatttttggtaatagagcgttctatgtaattaagagtgcaattctaaatctttagtggtgttaggagaaattaataagttagaaaatttacttggtaaattttaggagtgattacaaaaatactggatattggacaaaaatttacaattttaccgtggggcagaattttttacaaaaatactgcctttttataaaacaactgtaaaacaacaaaacagaacaattaaaataatggtggaacaactaaaaaacaaccgtggaacaactgtgaaaacttaacactgtacatagtataaaacttacacagtattttttataaaaaattctgtcctacagtaaaaagtaaaaaagtttaaaattttagtatgtggtgtaaaaacttctaaattttagatctacttattggaagcttgattacataaggccatggtccctacactaactgtgataatatttttttgtagtcttgtttgtgaattttcaccatggaaggacttaattgacaagaaaagagaattcaaggtttatttattaattaagagaccttggaaggtctaattagtaaatatatttaaagagtaattttatttaataattanttataattattaaatagatagagttagtatttaaataactagagcaaaagaatggtattactgaaaaaaaaaaaataagtttgtttcattaaggaaacaaaataataccaaaattctaactcatgggcttcattaaagggtttggctatgaggtgaattctaagccattggatctttctaatcagcctatttagctctaaccctaaagctaatgaatccctataaatagaatgttaacgcagatttttgttaacgataataagcctatttttgtgataattttgcacagaaataatagaaaataaaaaagaaaatataacacaaagctttttacgtagtttttcagttaaaattctgcatagtccatgagtcaatcttattcagattattaggattcttttctcttaaggattttttgtccattttttagtacattctgcccctatttatagtatcatagggtggcagttaattataatcagatacgaatccaacaataatatttccctgaaatcgtgggccttaattacgtcccacgtaaataaatacggttattatttgaaaatcacacagctgtgatttatccgcttttatagagtcaatgcgaacgtggatttaaatatgttgcaaagtgtatttcgttggggcatctcattgggaacttggatagcaacaataaccctggcagcgagctggagattttcctacgtctttctgaggttgataatgtaaattccgtcgtttttgcgattaaagacataatgctccatctgacagtcgtagttcttggtgacaatgtgaacttcagtaaccaatatcatttgaatgtctacctctatctgagaaagctgactcgacgtagcagtggatctcgttgaaagatttttggagctgattagtgaaggtactaggagtatgccttcctatagcgacatggatgcctcgctattcaccacttaggttctttcagatgttatacttgttgggttttgtgccctaaataaaactcaattcaatataatcagattt

SEQ ID NO: 32516 - DNA, 5582 bp, Cannabis sativa
aaagcttataagctttgtgattttgttaatatgaatcagtgtaattacaatttagagagaaggtatatataggtagtaatgagttgagttagttatgaaaataactaacttggctcttaatagaatttgaacagaaccaagaaggttccaatgtaacagtcgtgaagacacccaagaacatggaacaagggtaatatcgtaatacagagaaactaccaaagcagtatcgattaggtatgcccaatagacaaggggtaagtgagattgaaagcacaatgctcttgcaatgttaagtatgtgttgatgttttctttccacaactgatttttttgtgggcattcaacacaagaatggtagtaagtaatgcttttggaagcataaaaggatgacattgctagttctttggcattgtcagattgaatagctttaattggtgtagaatattgagtgcaaaccatgctgtaaaacatgggaatcacagtgtggagatctgctttagttttaagcataaatgtccaagtaaaccaagatgtatcatccacaattgtgagaaaatatctatatccttctatgcttgtaacatggaatccatatgtcgaaatggataagatcaaatgcatgtttagcgaagttgttattggatataaagggtagtttcttttttcttgcaaggtgacaaatgtgacaatattgattcaaattaatggaaaaaccagaattaatttttttattgaatgtattaaagatgtgtgtatgccattggtctacattattatgtaaagaaaagaaacaagaatttggcaaaaaaaaaaaaaaaaaccagattagaactactgtcaagaaatgcaatgattaaaaaaaggtttatcttgaaagtgggaacaaatagcacattatgaagtgtgatgtgtttgtttatttggacaatactaatgcccttgactggtatgttagtgccataaattggggaaaatcattattagaaaaatataggaaacaagatctggtggcacacatgtgatatgtggctccactgtcaatgatttaagaatgagtttgagatgaaaagtgtttaccaaccatgttggatgctccaagggtgttgtttgtgtcatcacgaggagtggcttcgctaagtttctggctgagaagtgatataagctgttggcattgggcagaaaagtctacatgggttaagtttccaggggccatgtccaagatggtgctgacttggttagcatttgttttggatttttttgatttctttttgtcaccataccctggaggaaagccatggataaagtagcatttatccacattgtgccatggttttccacaattggtgcatgagggccttggtttctttgatcttgggggaggattattggaagaggagggtcgaatagatgttgccagagaagaagtatctgaggagccaagagttcgttgcctctcttcttgaacaatcatagcaaataccctcgaaatattaggaatgggttcattgagaagaatttgggcatgaactgaggcataagactcattcaaaccagtgacaaattgtaacacttggttttggtcgtaatattcaagaaacagtttcatggcaccacatgtgcaagtagtattaggttgaaattcttctaactcatcccaaatggatttgagttttgtaatgaagtatgaggtgacagacttatcaccttgctgcaagcatgttagttgtgtttgaagatgaaagatctgaggtccattaccctcattaaatctttcgtctagatcatgccacatatcgaaatgcatgatactttgtgctatctctgaagaaaaagaattgacaagccaagacattactatgttattacaatgaatccaagaatgaaggaggggattaccagtagctggttgaggaggagagccgtcaatgaacgcatagttgttttttgcagtgagggccattgtaattccttgtttccaagacttgtatttggaaccattaaggacggtggaaaccaggactaatccaggataatctgcagtgttgaggaagaaaggactcgagacgtcttcatgagccaatcgatcgagtggcgaagaacgacgagtgtgaacaggtggttgggaatatcagcaactggatcaggagaagagtgagcttgtttaagattatcttgttcattctgggattgtggtcttgaattgggattttgtcaaggttcgggcatcattgacatgaggtgcagaagcagcatcaagattggactccgattgattgtgctcagttgtggatgggggaacaccatcttgagaacgagtatagggtctcgccattgatgcagtggccaaagtttctgctgataccatctcataatagagtgttgaaagaaagcttataagctttgtgattttattgatatgaatcactgtaattacaattaagagagaaggtacatataggtagtagtgagctgagttagttatgaaataactaacttggctcttaacataatttgaacaaccaagaaggttccaatgtaacagtcatgaagacacctaagaacatggaacagaataatatcgtaatacggagaaactactactgcaacccaaaccgtaaatttaaaaaaaaaaaaaaaaaagttagaaaataatacatgaggtaattttttaataataataaaaaaaaatcaattttttggaaaccaactcatactcatacgcatggggtgttaataatatcaattattttttttacaacattaaaaagcttactgatgtcttcggttagcgtgatttttttaattagagctgggcatatatttttttcaagctggacatgaaatggatacgaaaaaaatattaataaatttatatataacatttcacgtttttatattttttatgttcaataatgtttgacataattttttttatatccaataatactagagatgaaaattccttaaaacctttttatgtcctactctaattttgttggacattaaaaaagaatattaaaaaaaaaatttgttgaagtgttgggtaattgtatgatggagtggctattgttgtaagaaaaaattaaaatcaaatttactcttgaaaatataggccgtaaataaaagtaatgcatttatttgttcttcatcaataagttatttccatacaatacaataaaattatttacggccaggtccgccatatgtcataacatatccaaaacagggtttgtttccccaattttcaacttgataaaagttaatattagtagaatttttttttgtattttcagcatcttctaacttgtgggccttatttatataattctgcacaatatgcatcataacgagcatcatgttttaaaaataaatcagaatccattggaggaccaggtttgtcaattggactataagtttctcctccccattcaatataggtagccaaattattcaagtcagtaaatatgcttgatggccaatacccaatttgaatatctccaaactaaagccaccaatttccagtaacttgatcctacatataaagtgaaatgagtacaaaataaacacaatagtaagttaattaacttatatgaaagattattttattgaagaaaaaaaatacttgattgttaaattaaaaggaagaagtaagataattaacataaatatttcatttcctttacctgagaaatagtgagttggaattctattactggagaagtacccggatgagcttcctttaaagtataatcagcgatagcacggggactagttaaaacaaaaccaggacacattgtattaaaacaagataattagctagcctataaaaatatcaacacataagtttcacaaaacaacgcaatgaatataaagaacctttaaaaatgaatataaatatagaagacttacttgaaaaaatgtgaattcttgaggtttactgtccccatataatgtaggatttacctattatgatagtataaatattattaaatgaataaatattcgaagtaatttataattacctaaaaacttgacttgtattattttaatacaataataaatttaataaaaaaatcatttaaagatgaaactcactgtccaactatcaactccattttgtaatttcattcgaccagaagtatattacgagccagtaacattatataatgtgtagtagcttacacttgtccttcctccattgtactttttgttaggatcagattttgctcgaacaattgcatgttgttattcaatttcaaacacaaattttacttcaaaaattaaaattaatttgtaagaaaagaaaaagtcaaatttaaaatatgcttacatgaaaactagcattttcaggagccagggaactagttctggcagaataagattttgtaaataatttgactctaataagatcttccttagtatttcttcttattggaactattccagatggacatgttttgccattcaacatgctatctattgatacttattctacattatttcaaggcttttcattcttcatcaccttattaggaagtgaagaaggtctcatctacaataaatatttgtactcttatataaatttatgtaaattataatatcatgtcaatcttattcaaatttaattaaataaaaaaaaaaaggaaacagtataacttattagagaaacatatgtcaaaaaacaaaccttaaaatcataattgtggttctttagcaaatgatgatcaaatactggttgtttataaaattcattacaatcatatatatctctattgcgcgtctatgcaagaaaccaagtcatattataaatataaatgttaagaacgtacaccttaaataggagataaagatttaaaaaaatatacttttatactcttgacggatgacttgttcaatcgctcaagtcggttatctatttcaagctcttcatcttttgataattgctttagttgctcttcacctttgcaatgatacaaaagtgtacacaatattatagcaaccaccataaaatgtgcccttgtatccatatctatgtatatagatttgatctacgataaaatatcaatattaatattagcgccaaaaaatttataatcttaataataatatacatgaagtaatttgtatttatatagtaatcgaaaggaatggagatttaatttgatagggttatactacaaaagggaaaaaatgtaatattaatgtatttatagagttttgctaaaaaatatatataatttgtgcaatttatttatttttaaaacttattgcagtgaatattttattttattaaaaatagttataacatattacgtccaataaaaaacataaaaagttatcaatctgttaagtttgttagaattagttttggttagttattagttagttgtaggattgagtgttggttataacagctgtaatcaacatcagctactataagtagcttaactgtatctgtaattttctttgagcattattgaataacagattcagttcttctcttctattctctctgtattctttctgttatggatttgtgaaatggtatcagagccgccattgttggttgggcttcatcttcat

SEQ ID NO: 32517 - DNA, 2279 bp, Cannabis sativa
  modified_base (536)..(536): a, c, t, g, unknown or other
  modified_base (807)..(809): a, c, t, g, unknown or other
  modified_base (1551)..(1565): a, c, t, g, unknown or other
tgacaaatataccctctgtaatcattaaaagcactttttcttaaaaagaactttgtaaggggcaattgttatacccgaaatttggctagcacttcaaaagaggacatgtgtcaaactaggagaatatgaatcaacaaatataatgataattatatttgaaaatgaaataactcattaaatgcagaactgtcagagtatatttatattttgctgactctaaggtcttaagcaagataaagatatatgaactgttgcctcgtgcgttaacgagataccatacaacatcagtagtgcaagacgaggcatcaacctcgctatgcatgaagagacatagacgagacatgatgactgttaagacacttagtgtataatacccattatacaaactaagcataacaaccgaacgaatccaaaactacgaatagcgaggcacccatctcgctataggaaggcacactcatggtaccttcactaatcagctccagacatgtttcaatgagatccacagctttatcgagtcagctctctcagatagnagctgacattcaaatgatgttgactgttgaagttcaccttgtcaccaagaactgagattgttagatggagcgttatgtcttcaatcgcggaaacgataagatttacattatcaacctcaaaaagacatgggaaaagctatggctcgctaccagggttattattgcgatgctccttgcgagatttcccagaacaatacgccttacaacgtatttaatacacgtatgcattgacccaataaaagcggaccaatcacagctgtgtgattttcannnaataaccgcatttattttacgtgagatgtaatcaaatcccacaatttcaggggattattgttgtaagatatcagtctaatttgtcattaactgctctcctatgtaactataaataggagcaggttacactgaaaaatggacagattatccttaagagaaaaagccctagaattgtatcagaaatatctaataagatatactcgtggactatgaaaaattttaactgcaaaaccacgtaaaaaaagctttgcattcttatttttttttcttttactgcttttattttctgtgcaaatctatcacgatttaggctttaatatagttaacaaaaatctgcgttaacagttttctcgtcaatacgtgacttaatagtttgtacatctatgtctcgctcaagacttttcagtcaacaagttgcagatatactctaccagttcagtatctaatgagttattctattttaacatcttttaagataattactattatatttgttgattcatattctcccaagttgacacatgtcctactctgaattgccagccgaattttggtataacagtatgtttagttatgcatatgaatatttagataaattactgttaattaaattgaattatttgaattattacataaaaaatataaattgacactttatttataaaaatacctccataatgtgtggacaacatttatactttttatgtgtttttaattaccaaaatacctcttacactatcannnnnnnnnnnnnnngatggttgcatggtggttggctgaaggttgcatcagacaaaggttttaatttgatgaaggttgctgggtggttggtcgaaggttgcatcagacgaatgttgctgggtggttgactgaatgttgcattagatgaaggttgttgggtggttgaccgaaggttgcatcacacgaaggtttttatcccaggaagcagggatcgtggattgttgttgaaattgtaatgcaacatttatatctattgcgagccaactaacatgcaacttaattgcaactaaaaatgtaaaaatgtcaatgtgtatatgtaagaaactatttgttagtattttttgtcactgatcgataattacttgtaccttaatagtaatatgtggagaaataactgctagcaaaatatttatgcaactgtaatgcaattgttatgaaacattaaaaatcataacaatgtttctacgtacgtaactctatctacatgtctctacgtgatttaatatgaacaaattcaccattagaaatttggaacaataaaaatatgtcaagataaatattttactatagtattgatgtaatttttttagattatacttgagttggattgtttgggaactccaattcaacttttagagatctgcatatcatggatctaaaaattgaagtgaggacagtaattttatgcaaattaaactggatttcttgttgaattttagtttcgtagta

SEQ ID NO: 32518 - DNA, 1282 bp, Cannabis sativa
ttaggggccatgcaatacaggattatgaaattaaagcatctacacttatacctgattaggcaatgtgatgtaataaatttggttacttcatgaggtaacacatatatataatttatatgattaaatgaatatgaattctattattggtataatggttttcaattaccaagtacttgtatactgatgtttatttatgatagatgcagtagtgatttggatttcatcctatgaacaatgtgtgacggttttattctgattgtgtataaatgatagtattcgaatgataaactatatgataattattattacttttcttgctgattctttatgactcatgggtgctatgtggtgctggtaaagccaaagaaaagctacattaaccatgaggtgacagtcttctccagcaatgtacatttgacctcaccagcctacgagccaagttgccaggagttgttttgggtcggttgtatctgctgcgtattttgattttgtgtttaaattgttctcatatatatttatttagcaaaattttttataatagggattcctaaacacgctttttatgccgttataatgtccgtttttagtgttttctttaagtcaagtttttaatattatcatggtttttaataaatagttagtctattagcatcaaactagtttataaaatcacatctgtggcgtccctatagattagggcattacaacttggtatcagagcagccatggttttaaaggtcctgaagattggtcaaatatgtacatttgctgggaggacatgttaacacatggtataataagtatttatattattttctattagattacctgcctaggctattataaagtatgttgggaaaagtagcatagtgataattttaagaatatgtgtgtaatatcccgataagcgtaatggtaaataattaaggtttatatttatactatgggttaattaggtaataagtgggattatgatcttactaaactatttcagtataaaatataaatttgttattgagtaaataagcataatttataaattacggagatttatatagcatgtgtgaatgtaatatgaactatatgatgaataaaaatattttcaggttcggcgaccctaaaaacctaataagtggataaataagcgtaatttgttaattacagagatttatttcaaatacgtagatataatatgagttatttgtgaaataaaaatattttcaagttcggcgaccgtagagacctgattagtggccataaatgtcacaacagttttagttag

SEQ ID NO: 32519 - DNA, 2734 bp, Cannabis sativa
  modified_base (2591)..(2610): a, c, t, g, unknown or other
ggtttctatattaaattattgtttttgttatcatacctaactgactctaaggtttagttttttacttggttaatctacacaaccgatttctcggtctcatatttttaattagctgatagatattattgatttctctttgtcaaattgcaagatccaagtccggcaacagctccaacgttcaacattagtgacaatttcgatgtctatctacaatgacttttcggtagcgataacttttccaatgataatagcgcaattctgttgaatattctcattttattttatacttttcttgcagctatttttttaattttagtggatagaaattgttttgtgtagtgactttgatggtcgagtcttggaacttctgataaatttgtaactggttttaattttggtcttgtgttggtcagtttaactgttaagaaactcatttttaaatatgtaaaattattaattgatttattattttattaccttaataaaaatatttttgtattgtatcagtttaataaaaaaaaacaacaacttctatagtaaaaaaaaaactaagtttcagtttctgttttttttttttttttgaaaaaaaacatcttctgagattatttttttttttatttcaatgtttcattttctaagaaggacaaaaggaaaagaaaaaaaaaacacaattttaaagttttttatgtcattattctttatataatatgaatttttctcatattgttatattttttctaaaaaatgccatatttaatataattaagtttttatgccatatatataaaagctaatctcttttttcccatatttttgtaaatagcccttttaattttcaagtaactacattttccatcattttatctttcttatatattaactcagttattctcactcaatcattctacacttcttctactttaataataatttcagtagccaatagccaaatttatagtataatactataattattatataaatattaattaaataatcaataatgtatatataaaatataaattataaaattatataacattaacaaaagtcaagaacggagaaacatatctcggcagttagcgagcaatgagtaggcagacacgggcggacaccagtggggccaccggcgaacacgggcggtcaaattttggaaaaacaaaagaggacagaggaggctttggatgttagggatgaagctcaccggattgagccggccgctgggatgagaccccagtggagaagaagcagccaccattgctgagagtttctttaattcttcgaaggctttttggtcgaatgaatattgattagttatagtgtacagtacagtgaaagtgcatatgattattttttaattttaagttttaaatgttaataattaacattattattttttaatgtaataaaaaattatttttaatgttttatttactattgttcgggttacgggttagaatccaactaaaaaagtatacatttttaaaacccgaacccgaaatccgtgtgaggtattttcgggttggacccgacccgaccacacgagttttcaatttttcaatttttttggcagcagaccggggcgggtggtccggtttttcgggtttgcatgtctaaatgtttagccctagttgaagggttggacactttgaaaaaggcttcttgtttctatgaattgcttgcaagttgtgtggatgtcctttcaaagtaggatatggaaaattttcttatgttggagaatttggtatcatcgcaatacttttgttcatgacaagaagattctatctgatgagttggttagtcaatgggatttgagttttctttggcgttatcaagatgctcaatctaatttggatctagatgctcatatgaagccgacaggagactgtggttgggctctctaatggtttgattgagactttgaggttaggtgatttcaatctatttgcggatgcgggtatcaatgaggacaataattgtatgggtctcgaggcgacgatgatagactgtaacaggctggttttgtgttcttcaagtggtccattggcaacctcctttcatcctcatgtggcggaggcatcaactatcttaagtgggttgctactgtgtcgtcgtttggggtacaactccattactactttctcaaattatcttcgtcttatccaagctattaataacaataataaatatcaaaccgagtttgttattattgttatgatattttatatgtttggttttctttttcttttatttctcttgctcattgtaaaaagactcaaaatgttacgactcattctcttgcatgcttggctttatcccttgactcttctcagatttggtagcttggtttaccgccttgcccttaatccttaattattgtgtagtgtccttaattttggctttttgccttcgattaaaaaaaatcagtacgaagagaaaaaattaataaaatcaaaaagatcacaaaaattgagtcgtacacatataacaaaatagttcaactaattaaataaaacttttaggactcgtttggtacactgtattgtattgtgttggattgtgttggattatattgtattagtattatttannnnnnnnnnnnnnnnnnnnttgacttgtattaatagattgtgttgtattgtattagtattatttaatctgggtccgaattcgggtcctgagtccgggtttggggttcgggtccagttttagggtccgggttcaggtccgggtc

SEQ ID NO: 32520 - DNA, 1923 bp, Cannabis sativa
  modified_base (1385)..(1387): a, c, t, g, unknown or other
  modified_base (1814)..(1815): a, c, t, g, unknown or other
cacgtatatttagttttatgttaggtatttttttattttatttaatacaataaataattgaagaaaaaatattgttagttattatttaaaataattttttatgtataattaattaatctaaataatggtgttataaattaaagtaaatactgaatgcaatatattagtgtttaaaaaatcttgataatctaactacaaattgttcttaaattaatttcaaaataaactaaaaattaatgttgaataataaagcaaacacaacttaaaattatgttaagtatacaaaatattaaaaaataatctctaaattattgataattaaacaattttattattattatcacgaaagttagatggtgtgcttagcttcccctcaaaggataatgattattaaaaaaattataaattcaaaattataaactatgatataatgtagtgcacaatattgaatgactcaaccactacgttaaataggattgattcttgggtgattattttactcgagcatcacagtgaacaaaaccttgattgatgccaacccccaaaaccccaattacattagtacgtgcatcaactttcaaagctaatcaaatttctaaaatggctcttccaaagaaatccacatccaatattcccaccaaaatgcttgtcttcgcctataaatatatactgaatttaataaattaattatattactctaataataacattttaattatataagtagattgttcaaatagaaaagcgtaaaagtacagattgttcaacaaatataataaataaaacatccaaagttcatgacaagttctggtagaataaatctactccccatctctggcggaagagcggcatatggtcatcatctactccatcgaatggtcgatccaataacttatgctcaatatgctctatgacatacattccgcaatcgccactgcaatggtaggtaaatgcaaaagttaataaatcatagagaataataataaattttttatgttaattagtaaacatattctcaaaaatgcatttaaattacctcgattttgtctgaggtacaactttattgtccatcatttcccagtcgaattttctgacctagctttcggaggctgtcatttgagggaccatcaccatgtaatgagtgtcacatacaccacactggtccaccaatttggataataaaaggcaccaagcatccatcagcgtcttcagttcgtctttcgttagagatccaagactcgaatcgaagacaaatagcttccacaactcaagattcgcctctatagcgatccaatgtttctggttgtccaagaagatggccatgtatatgcactccatacccttccaagaaggcaagaattggtttggatccccacgaacgagtnnnaagagggactcatcccagacaaagccagcatggtcagtattggtcttccaagcgtcccaccgatccttcaacgatgaagaaaaccaagatggcatgacagtacacttacgtgggtacaactctgggaagaagtgttgcctcctcctcatcatatggaaagccacatccaaatgttgcacaacacatacaaataagtcagcacaaccacattacaacattaaaaaaaaataaaacaaataacaacggtaaatagcagtaaataacaacggtaaatagcagtaaataacaacatataataaacttacatcatcagaaagctattctccgagtagcttctggaaccaagccacgccatatacaccggtgaagacgtccctcgaatacttgtttccgatggttcttactaaccaatttcgaaaactatgtnntagcttctcatcaacgggccgaagtgggtcaacattcacattggttgttgatggcttcatcttcttcttcatttcggtgtactcgtcaaaccaccttggccttttctt

SEQ ID NO: 32521 - DNA, 1226 bp, Cannabis sativa
tttaattaaatcacaattttctctaaactgttagtttattattataaactaatttataaaattacacacgtggcacccctacatgttagaacattacaccgaatgatttagatatctagttatcacggtcacttgattgtgtgggttggatgatgtatatgtttatctcggatagtaaaatctgttaggcttgagtcgatcaatgttaatttgaatatctcaattttgggttgtttcggtacataaactgtttgatgtatattcctaacttggttgccaagtatggcacacttaagctgggttaaaaacgtctcttttctcagatttgttgtggtctggcttacgttttggctcttttatgaatttatcttggatgccgccatccgtggtattaaacactcaagagccactgctttatttaatatcgtcagtttttgcacactagattttcatttttttttaataaaataggatttgtcctcattaggcccatgggacagtttctccctcaacataactccgaacgagaatttaatttactttacgagtctttacagttgctattgtacacgtatgtttagtattcaataggaatctatttttctttctagattctcgagttttgtcagaggttctatcccttatcatcatttgaatttcaaaatccttctgtcatctacatttttgggaacatgaaatgtgtaaggtctaacattgtaatgaccgctaaactttattatgagaattagcagataattatgacttattttcagaagtaggcttttaattattatttcacaattatagagatttagttaaattttaagtgtattaattatgatatatgtgaaattttatgttttttataatttatgtcggtaacagtgtaacacaatgtttggcctatgtagtcaattagatatgatttagtacttttgagctagtggggtaaataacatagttagacatttagaatgtcaagaatttttgaaattgtagttttagaccattttacctaaattgtttagattacttaatgtgtaagcaaaatgggtaaattgtctttttaccttagttttttcttttagtggactttctagtaaactaagttaattaagtttaatttttgtttagctgaatttaattaattaacctatttcattttagttaaaaggaaaaatcgagataaataattctctctcactctctctctttcttcttgctcg

SEQ ID NO: 32522 - DNA, 4879 bp, Cannabis sativa
ttttttttttttgaaaaggaaaaaaaaaacaaaacaaaaccaaatatataaagataatgtgttgatcatttgccaaatatatttggttttgttgacagtgacattatttccttaaagataacaaaatgtgtacatgaacaaaggaaacaaaagatcctccaaatatattgtcctaaacaacatacacttctaatttgaaaatatataaccagaataatcgtatgttgctttgcatatttactatatttataaataaacaatcaattgaaaaatagtaattacatttgtactataaatatttaagtttaattcttaattacagataaatatttaagtttattttttaattgtaataatacataagttaaatttctaaaatttttataaataccctaaccgttaaatgtcaagttattattatttttctttgttaaatatcaaattattatctacatattattttcttattagtatatttaaattaattttaaataaaaaataaataaaatttaatgaccaagaacaatcaaatactgtcacgtgactgttaatttacacttaacagttaaatacctacaaaaattctatgaatataatttatgtattattatcattaaaaattaaactaaatatttatttgcaaccacaaattaaactaaaatatttatgccgcaaattactcgttaaaaaactacaactttatcgagaaagattacttttttagaccaaaaatttgatagcgaaatctcaaatcaagttattagtcttatggtaaatctatatttgtttataaactcttccggttgggtaactccttagagccaaaaaaaaaaaaaaagaatgaatagatcacaccccattgtgtattattatataaaaatattattttaagatagaaaaacaaaagaaatcaataaatattcataagaatgttaataatgtaagacattatttatatatataaataaagtaggatggatataattttattaatacatagagggccatgtaccctaacaactcttcttattccttttcaataattaaataaacaagcaaaaagggagttggggagtaaaagccttcctataataatctcttctttcctctcccaaaaacaatttataaataattcaattacatccccccaattgcctcacttaactcatcaaattacaaatcaaagaattaactcaaagatcatatcatcatccattttgcctatccacacgcaaaatccacctcactagacagtagtagtaggtactttttaaatatatatattttattttttttcataccattttcgatctttctatcattcctcttcctcctcggtgaccaagaacgagaaaggttggaacttgtaaccgtctccttcgtaaaacttgttttggaactcgacccagtgaagacgaagtgcgtgtaggaaagcgctaagagtttccatcactagcaataccccgactgttgcgaagacgaacaccacgatccctattatgaggatgaagacattgttgaacctgtgcataatattcaagaaagaataagagggcattcgaaaatcgtgtattagaaatttggaaaggaaaggagaattaaggaatgatctacttacccccaagcaagaagcagaaccttgtcgtagaagacactagacaactctgagtgagcaagactgaggaaaggggaaaaggcaaagttaatgtcgtcgattggcccataaatatactgataataaggttcgtaaagactaacctcagtgcccaaagacgaaggtatgaagcggtgtttgagacggcaccaagtacaaactcgattgtgtgtataagttgatggacaaaaacttcactgaactcgaactcttcgccatgaccaccatgtgaatcattagctgattctacttgcaagctctcctctgtggtctcgagtaaggcgtaggattcaccttggtgcctctgcagtgacaaaaattaggaattatagaaataaattgaaagagaagtttttatggtggaaattaaaaagagattttacgacgtacagcttcatgttgcttcttcaagagaaaaggcttcggaataagcatccaaggtacggcaacaagagccaaaaacaacagcacaagctagaataaaaggcatggaatgtgagttattagtcaaataattttcttctcaaatatatatttcgaagtgcgaaataggtgtgcaagacattaaacaatacctggactagtttctgcccagggaagagctgattttcacctaaatcatctgtagggctcaggaacatgtatatcattacatggtataaatcagcttgtgagccggtacaccacttcataacaataagaacagagagatagccgaaaagactgtttaaaaatatcagctggggaataaattggaacctgtaatattgggcagctccaatcagttcaagataaaattatatttctacagtttcagaaacatattggcccctatggcagtggcgaagaagtttgaattctaaaagcaacacttcagagtaagatggcttaccaaacatttatactgttcttgaagtacagggcattaaaatagcttattacgattccaaggttcatttgagtcaccccaatgagaatagacattttcatcttcaaagagttgagaaatggcagttcactgcgggtaccatgccatacagggtcaagcccaaatggatatgtagggcgcactttgatcaaacccattgtagtagaatctctacaaaagaagcatacacaaaaaaattagagagagaggagagggatcatatggtggggataaatagtataaatgaacaaacttcaaataacatacccgcaagaaagatcacggcaagcatatgccgagcgaccaaacagttccaatgggacagagaagaactcattgtaaatcaaacctgtgtagatcgagaaaatcgacatcatcaaaatgacatatctaccaccaaaggtcatctccgtgatgtctccaagcttctgtaaacccataatcacatttttattagattccatcgaagagaaagtgattctaacgatataaaataagtcatgaacttgcatagtaacaaattacagcaacacactatcctagtccagaaccgtcaaggcatgaccttgatgaggaaaaatgaatgtgattattattacaagcaacagtaatcccagtaatgtgatgaagcaattaaacattgccacgcgttctaagtgaagaacagacatgatccaggattaatatacaagtactaaagccaattcaaaaccacaaaattattacctgactagaaagtttcttttccctgattataaaatacagtgttgccagtaacaagcatattccatggccccaatcaccgaacatgaccgcaaaaagaaatggaaatgtaacaattgtatatacaccgggatttgcttcttggtactttgccaccctgcaatgacattacatagtgatgttcaggaaatcgggtgacttggacaaaatacagataagagcaacaaggactctttcaagtcatagcactattaaaattttacaaaccttacaaatacaatctaacaaacctaaaattattttatttctatgcacgcacatcccagagatcataagggaagacaattaatagttcaccatgtcaaaggaagtaattttggtaaagtcaagactacaagaagaatggctgggatgaacataatactgtctatacaaatcctactccagaattatgacaaaggcatggatgttagttctttctcaaatcaaatcttttgaactttttttttctttttctaaaaaagaagtgattactgaacatgtgatagcatatctggattgaagaaatttagtagtttgggatcttgtgtactataattttggttacaggctacttttacttaatcaaagcaactaagccacattttagctagctttcccaattcctcttgttaaaggaagttggctgcagatttttcatgaatcatcatccatataaaagaacgtaatgtggggtttatacagacatcaaaagactttgagggtctcctcttaacagccagcattacttttcctcaaatagtaataaagaagaaaataattgtcaatgttcagagcaaaactgacccgtatgcatcaacgatttcctgaaaagcagtagtgaacttgtttgtgcgaaaataagttggcggtgactcttttgtatgcaaaacctggaatatagctccgacttgtgagttggagtcataggcaccccgctctaatgcatcttggatctgcaattatcaactccaagctataagaattccaaatatatatttcacttgtaccatcacagctaagaactataattcatctatgttttctgtgttgaaattgtaaaagcagctggaaaaagaatattacctgctttgtggcaaatattggactccacccctctgcgacaagacatttttttgttacatcaaggctgagcatgtttagagtgtgatatatggatttctccttcctcaccttcacaagttcaagaatccccattaaacaggtaagcattgtagcaacatagcaaaagaaaccaaatttaagatcaaattgaagtctataaaatgaagaatcttaaacagaccacaaggttccaccgctcaaattgatctccaatagtctgtaataaattgccacgatgcagcagtccagcatctatagtagtcttcagctctgagagtcttgctgaaacctgaaatttgagcaaatgatttatgaggaagaagagaggtaaacggcactttgcagagaacaagtgatattgacagtgatgaaccaattacaaacaataatttgcggtgtttatattacac

SEQ ID NO: 32523 - DNA, 3401 bp, Cannabis sativa
  modified_base (118)..(122): a, c, t, g, unknown or other
gtaatgggttttatttagggcacaaaacccaacagaacctatctagaagaactctaacaacttttctaacaagaacagattcatcaagctttttaccaagagcaaaatattcattagnnnnntcagacagtctttcataaaactcaattagggtttcattttcagacatcctaagatcgtcaaatttggtctgaagcataataaacctagaacgcttaacatcagacgttccttcaaactcagttccttcaaactgagtttgaaggatctgccaagcatccttaacatattcacaagaagatataagcttaatataatattcacctactccattaaatatagcatgcaaagctttgctattgtaaccagacaatttatcatcttcaataaaccattcaagttcaaattttattttagaattaccttcaaaatctaccacaacagggcgagaccatcatgaaagaaccatcctccatgctttctcatcttgagacttgataaaagcccccattctaactttccaataaggataattagaatcattgagcaacggtggacgagaaatggaactcctttttgcaaaaaaaagacatattacacaaaaacacacaaaaatttaaaggaccacactaagagtttagtgatccgctctgataccaattgaaaaaccgtgtttttgcaaaagctaataatttttttacaaaataacagtaaaaacacaactataacagtctgcagcagaagaatgtaattatgtcactgcaggacacagttttacagaaacaacctagaaccagaaataaaataccagcagaaaataaaatcacttaacacaagaacactgctagtccatggggcaacgcttagagaaagaaatcaattagtaaagtctcaaataattacaaagacaattgacttaaacaagtttagactccctcttaatctttgccgcaatcctttgtaattcacttcacaaatctaatttctgaaataccatcaaacagcgaacttccttcgtctttgatgtgtgagtgcttacttcctctcaaagtaaggtttgaataagtcttctcccgaaaacctttctcttgttcagtcaagttgttcaaaccgatcctaagacgagactaagaataaaaacaaaaacactattacctacttgaacaactaggttctcacaaaaagaaccctctcctcacaagaaactatgcaaaagtgaaaactagaagagctaaactgattggctgctacctaggttttgtttataaaaaataacaaccttagagacagccacaaaatcgattccatagctgtacaaactttcctaaaaaaatcctaatttgcagcattagagtcggatttctggagcaacaaatcagactagaaagaaaacttgccaaataagtgcccgatcatgaacatggacttcatacctgccaaaaacagtgtgcgatcttactaagacagaatcgaaaacatcaaagagaaagagcaaggtcaaagttttcaaataaaatcaactttccataagagaattcattctcttacaagagtttccaaaacaagaaaatggacagctgaaaaagaaatttttcatttgaaagaaaagagtaataaatacacaaaatcaaagtgaacaaatcgatctaattgcacaagaaaattatataataaataaaaaatattttgacacttaaattgtcaaaaaaaactttacagaaacatcatgatgtattgtatctaaacttatatttttttcgtatctaatcatgttcgtgtctctgaaactcgtgtcgatttcatgctgcattaaaaaaaaaataatccgaccaatatttaaaatactaatccatattgagatggtttaaggtaggaaacgggaagtttcctttagttttgaaaggtgtatttacgaagaatctgtgtccgggtgcagtcaaaagagttgattctgagtcacaaggccctcactttcaccggcatttgaaatcattgccatccccaaaatccaagagatccttagaaaagacaccaagacacttgtccttttttcactagctattcaacttgactaaaaagttgattacttataataatatacaataatagtatcctttttcggcatcattataataatttagtagtcaatctttattacttagtatctgtatgtgtattgcagctgttctccttaattatttgtgttttggtaattggtccaaattaaaatatatattttcaattaagatgattaaaatattttacagcacccctttaaaataaatacatatgcacttttatttatttttgatatctaagataacgttttagttaaattttttctcataatcatgtacgttataattatttaagacatccaacgaaatttgaagaaatttaaaaaaatttaacacgctgaaaatagagtttaaaaagtatattgcacacataattatttattttatacgcgtgtgaaatagactatttgaacgctatttttttatgttgtaaattactctaaatttcttataattttgtaaaatatcttaaataactataacgtaaacgaatatataaaaaaaaatagactaaaaaattcttctgaatactgaaataaataaacgatgcatcaatatatctctttttaaagagtacatcgcataatcacccaaaacaatattattattaataaatagtgaagaagtcacgtgcttcacatgtgactccaactcacattcttttttatatatttttttgcaaagtacttgcattctttatgggtagaaatttcacattattttattatgttattgaacatatttttttttttagaataatcaataattttgtcacctgaattttcgacaatactaatttcgcttcttaaaatatactacttgttaaaaatcattcctgaacttttatatttatagaaatttagtcctgctgttaggtaccatcctattattccgtttaaatgataatgtatctttgtaaattagtaattttaccccctaaactttgacaactatcaaatcatacaccctcaaaataaaaatgagaaagattaaatatttttttttagtaaatataaaatataatttatgtcttaaaaaatcattttgaatgattacgaaaattaaaatttttgaaactaaataagcgatttaaaaaattagtttttttattaaaaatttcatttagatacaaaaaaaaaactatattaaaaatttaatttttttaaaaactatctaattttttttctccaaaaatctagatttgtttaaataaacctaataattttttttatttaatttctaacttttttttttcaaaataattttatattttttattgaatttttattattttttaaaatatgattttataaatataaataa

SEQ ID NO: 32524 - DNA, 2546 bp, Cannabis sativa
  modified_base (374)..(375): a, c, t, g, unknown or other
aatatatatacaatgaattaaatttatataccaccattatataataaaatagtaactaattaaatattatttaaaataaattatatatcatacaattaaaatatataaaaataataattaaatatgtaacatgtcaataaaattatatacatacattaaaatatatgtattatgctaacaaagttatatatcactattatacatagcaaataaaaaataaatatctaataatataccatataataaaacagaaatatacagtgcaacaaaatctacataccaacaacccacaacaacctattaaaaattaaaaaaatcaacgtgccttaaaataaaaaagattttaacaaaactaatatagatataccacaatnnttaagtaatttgcttctaattataaaaaaaaaatatataaaaaaaattatttttttatatggcaaaatacaatataaataataaatagtataaaatggtcatttctctacaaattttgaaatgaaaacatttacttacataatactataattttgggtcattatctataattttccaaactataatgtttaaggcttggtctgaatgtgacttatcaaataaatactgagaaaaataaagtaattaattaataataaataagaatattacaaaagactccacaatagtgtcctataagcaactccaacatgactttaaatttggggttatagtagaaaagtctttccaatgtagtattattttcattatatgcagtggtagctacattgaactgtgtggcatactccccatgatattattattctaaagtttatttctgatcataagctctaattatctactagtttgtttaataaaattaagcggtcattataattatcatcccgttaaaaggatttcgttctcaaaatctaacccgaacaactctaaatattaagtcctcatatcagactctaactctcaggtggcttcctccatcttactgattctctagagtatcttatataaccaatgttatagtcttattttgaaggacttatctttcttatcgagggtctgcacgagttgcttctcataagacaagtctggctaaagttctagggcttcataactcaagatatgagtcgagtctcaaacatatttttttagcattgaaacatgaaataagttgtgtactactaacaatgctggaggcaaggttagacaataagccactaacccaactttcttgagaatttcaaaatgccatgtaaacctagggcataacttaccctttttcccgaagcattttacccctttcgttggggacacctgtaggaagacatgattccctacctaaaattctatgtttctgtgcttcagatctgcataatttttttgcctgctttgggaaacaagtattttaccttgatcttctctatagcctctctggtccactaaaatgacttcgaacctaagtattttctttctccggtctcttcttagtgaattggagattgacactttcttccatacaacattttatagggagctatcactatcatactctgataaccgttattgtatgaaaactctgcagatacttgttccatgagccttcaaaacccatcacacagactcgtaacatatcctctaatatttgaattattctctcagattggccatccttctaggggtggaaagctgtactaaatttcagcttcgtacccatggccctttagagacttttccaaaaattagaggtgaacttcagattcctgtccgatataatagactttgaagccccatgaagacgtactatttgttttacatataactctgcatattgatctactgtataagttgttttcacaggtagatagtgggctgacttagtaaactgatccataattacccatacgaaatcaaacatacccgtggttctaggcaatccaaccaggaaattcatagtgacattctcccatttccattcaggaaatttcaaagactacaacaaccctgtaggtctttgatgttcagtcttaatctgttggcaagttaagcatatgtatacataatctaccacatccttcttcatattgcaccatcagaaatagaatttcaaatcttggtacatattagtggtaccaggatgtaaggaatagggagtggtatgtgtttcatctatgatctcctttttaagctcagcattgctttgaacacaaaatcgagttttatatagtaacattcccctgtctgctaccaagaaatctttagcctggccagctaagacttcttctcgagtttttactaaatcagaactaccaactgagcacttttgattctttctaacaagactaattgaggtgtcaaattattaagcctaccaaccacaaactcaattcttgacctgaccatgtcaaccgttaatcgagaagaaatcaaaacctgcccgggacctttcatgcttagggcattcgccactacatttgccttcccgagatgatagagaattttccagttgtaatctttaactagctccaaccatcgtctatgcctcatattcaaatctt

SEQ ID NO: 32525 - DNA, 1541 bp, Cannabis sativa
tttttccttttttttttgttttatggataaagactcactgataaaatgcattctatcagctcctgcaaatggttttctattttagaaatcaaattttttgctctaaatgcataaaagctttaaagtttcttaatttgtttttttagtcatttccttctctttttctctttatttattattttttttatatttttttattagtttatttaattaatgtaaaaattagagatattcatataatctgcaatctgtgattccgaaccctaaccaatttagaccaaacgcatttgagattgaaccaaataaatctggtttgaatgatttggtctttttggaccgttttgaatcttctaggttgatcacggttttagaaatctcgataacaattcaaaccacaccaattcttataattattttacatatacttaatatatatattttttggataaaatattaatatttgagaataattttgggtagaatattgatattaatttgttatgataataatttttttataattatttattatgtattataaatttattaaaagtaaaaaaaaaattactaaaaaataatgtatacattaaaataattacgaaatacaaattatgattttgaatcaaactaatttatttttgagtgaattattttggtttcatcatttaattggtctgatatgatttttaatttttaaaaaaaatgtaatagtgagttgatttgaaaaaattaaaaatttaaatcaaactaatctttaattaccctaaatttaaaaataaataaaaatattatatataagtaatttaaagaaaataatagagaagctgttgtgacttgtgaggtgtgatgtgctgtaaaacgttgcagtaaaattaaaaggaaataaaaaaggtaaattttgatgattttttttttaaacataaaagttaaaaaaaaaaaaaaaacagaagtgggggattttatacatttaagcacatggctctaatattaaaatttctaagcctatggctttgtctaatgcttggcgtgacgaaactctctcttttccccctttacgtgtttttggctagtttttctctcttgattgatctggctgcgtgacacaagcatttcatgttttgtatttattatgatttttatttaaataagctacgtgttgtttatcatgtggattataatttatagacccacctaaattcctgtatttgattcttttctaaatattgccactttttcaagcatctcattttattaatgtcaaatgtcaagtgtgtttaaaacattttaggaattaatttctttccctatacagtatttgggttgtgtttatatggaaagatatcaattataataacttaataaatagaatatgttaccaatttaatgtcgaatttaatacaccgtcgagaaaagaaattatcggtaggtaccagagattccttttatatatatttctcttttataatttaatgtctaactaaaatttggaggaagtttggggattccaacttaaatcgtcccttaaaattattccttaggaa

SEQ ID NO: 32526 - DNA, 2844 bp, Cannabis sativa
  modified_base (832)..(840): a, c, t, g, unknown or other
  modified_base (1738)..(1753): a, c, t, g, unknown or other
  modified_base (2767)..(2768): a, c, t, g, unknown or other
agatgtgtagggagatattttaagagaatactaaacgagtgtgaaagtaagaaaaaatcttgttaaaatttacattgaaaaagaagaatatttacaatttttgaatttggggctattttgaaaaaatttaacacgaaataaatctttatattcacgtcttagtagtacgaattcattgtgactagtggtgataaatattctgagattggtccgcgccacatttcagaaagggctaccactataagaaaagtgagattttcactattttgattaaactgattgttagtacttggaaaatactttttctgtcaacgtgtctaataaaaaagtaatgcacaacagtcttggctttcgtccctgtggaatttaacaattttttgagatgtgaagggtgagatttttaagagaacactaacgagtgtaagagtaaagaaaaaacttagtaaaatttaacctaaaaggaagaatattttaaatttttgaattagagggccattttgaccaaagttaacgcgaaacaaatcttcatattcatgtcttagtagtacgaattcactgtgactactagagaaaagtattattggatgggtccggaacacatttcacaaaagtttacctctataagaattgtgatatttttactattttgattaaaatgattgttagagcttgaaaaatactttttctttcaacgtgtccaatgtaaaggtgattcaaaaaaactttagcttcgccactgtaacatttcatgattttttgagatgtgtagggagagattttaggagaacagaaacaagtttaagagtaagaaaaaaacttgttaaaatttacnnnnnnnnnaagaatatttttaatttttgaattagggggccattttgaccaattttaatgcgaaataaatctttatattcacgtcttagtgttatgaattcattttgactagtgctaaaaaatattcttacatgggtccgggccacattttgcaaaagggtaccactatcagaaatgtgaaatttttacttcgattaaattgattgttagtacctaaaagctacttttcctctcaacttgttcaatagaaaagtgatgcacaacagtcttggcttcgtcttcttgaaatttaacaattttttaagatgtgtagggtgagattttaagagaacacgtatgagtgtaagagtagggaaaaaacttgttaaaatttaccctaaaaagaagattatttttaatttattaactagatggtcattttgaccaaatttaacgcgaaacaaatcttcatatttatgtcttagtagtatgaattaattttgactagtgggaaaaaatatttcgagatgggtccaggccacatttgacaaaggggtacaactattgttaaaatttactctgaaaagaagaatgttttcaatttttgaattatggggccattttgaccaaatttaatgcaaaataaatcttcatattcacgtcgtattggtaagaattcattgtgattagttgtaaaaaatattccgagatgggttcgggccacattttacaaagggatcgactgaactatatcaaaaatgtgaaatttttactatttcgattacactgattttttgtacctaaaaattactttctctctcaacatgttcaatagaaaattattgcacaatggtcttggcttcgtccctataaaatttaatgattttttaagatgtgtagggtgagattttaagagaacactaacgannnnnnnnnnnnnnnnaaaacttgttaaaatttaccctaaaaagaagaatatttttaatttttgaattagagggtcattatgacaaaatttaacgcaaaacaaatcttcatatttatatcttagtagtatgaattcattgtgactagtgggaaaaaatattccgagataagtccgggccacatttcacaaaagggcacaactatcagaaatttgagattttcactatttcaattaaaatggttgttagtgcttgagaactactttttctctcaacgtgtccaatagaaaagttatgcacaacggacttggcttcgttcctgtgaaagttcatgattttttaagatgtacagggtgagattttaagagaacactgacgagtgtaagagtgaggaaaaacttgttaaaatttaccgtgaaaaaaagaatattttctatatttaagttagggtgcaattttaaccaaatttaatgtggaaacaatcttcatatttacatattagcagtacaaattcattgtgacttgtggggaaaaatatttcaagatgggtccgggtcacatttcataatgggttacaactatcagaaatgtgagatttttactattttaattaaaacgattgttagtgcttgaaaactacattttctctcaacatgcccaatagaaaagtgatgcacaacggtattggctttttgtcgctgtgaaatttcacaatttttagagatgtgtttattttaagagaacaccaacgactataagagtaagaaaaaaaatttgttaaaatttaacctgaaaagaagagaaaattcaatttttgaattaggggggccattttgacaaaatttaacgtaaaacaaatcttcaaattcacgtcttacagtaaaaattcattgtgactagtggtgaaaaatattttgagatggatgcgagccacatttcacgaaggggtgccactatcagaaacatcaagttttcactattttgattaaaatgtttgttagtgcttgaaactactttttctctcaacgtgnncaatagaaaagtgatgcacaacattcttggcttcttcacagtgaaagttctcaattttttgagatgtgtagggaga

SEQ ID NO: 32527 - DNA, 2200 bp, Cannabis sativa
taaataatttgtaacaggtaaaatttgtacttctttcatctgtgtaaacctagaaacatgatatggcccatccaaatcaattttaatcataggtcagatgcttagatcaatttgagtgcatgggtcatcacgaaggggtcgattctaaccatatctccatgtgaccatgcgaacaggtccaggttttcccttagaaattctgtcaagactgacttgatttctagagccaaaccctcaccgatcttcagtcttcttgttgggcgagtgggatcaacttcctgctcttccaacttttctacaggtctgaagcttcttgcagaattcccaaagtgaggatctatgtctgtgtccctgccttaggctagacttcattgccccttgcagggctcatcttctagacttctggcaggcagcttctccttttccttggataaggccaagttgtaaccgtgacaggaagactgttggtctcccctcacgcatgccactccattcatttttgggaatgtaaggcataagtggtaaacagacatcaccgctttcaggtcgttgagggctgcctgaccaatcatggcgttgaaagccgaggggatgtcgtcacgatgaactgcgccatcagtgtccttgtggttggattttctccaactatgaggggtaattttgatatacctgacaggtgcgatgccttggccaaaaaagccatacatcacttagttgcatggtgccaggatggtgagttggagccccatcttttcatatgttgatttgaaaagaatgttggagaaggctctgtcatccaccatacatctagacacagtcatattcccaattggcatagtaatgaccaggggatcattatgcgggaaactgaccggtgctgcatcttctttagcaaaggagatcatgggctctatgggcttttgttgcttagagctccggtctctgacagctaggatgtcgcctttgggctcaagtcaaagcgtctgagcatatcacttcctacctttgttagtttcgccagaaatgtaaggtcctgatgacccctagatgtcctgccacgggttgcagcatggaatctccattttggcccccttgcacctgggtctagtcgtcttgtacataacgatgtaggtggggattgttacgccttatcaggtactcaatctccctcttcagattttgacactcattagtgtcgtggctgaagtcgttgtgatatctatagaactttgacatgtccctcttgcccatctctcttctgataggaaagggctttcggtatgggaccgttccttgagtggccatgaagatggcctcaggcttctctattaggagggtgaagcaagtatacttctcctccttgttcttctgtggagtgggagaagtgttaaacttcccctttttaccattgttcctcccagagttgttggtgcaacactagtttctagtgtttttaccactagaggtctgggcagcattgttgttgtttgcctgtgcgcctggtgggtcatgaggccggtgggtgccttgtgactgcctactattcacatgtcctgcttgggcctgtcgtatggcttcttcgagtttgataaagccatctgttctattgaggaactccttcatgttgttggtggatattctctggatatctttccaaaagtcacttagtgggagtatgcccccagtatggccgtatatcggccttcttcagtaaggcctttgactttggtagctcagccataaatctgtgaatataatcttttaaaggttccccttgtcgcagtttgacttcgacaaggtcttccagctgtgatgctgtgatggttcaagtctccaagtctcactcaaggatgagaattgtgtgtagaattctcgtgagaactcatcccaggagatgaatctccccatggtgagtttaaagtaccattgttgggctgtctccaatagtgtggctagaaatatgcgacaacgcacatcaccagcgaccttttggaggtcgagctgcatctcgaagtatttgatgtgagtcaacgggtcttctcgtatgggctacagattttgaaaagataggggctggctggccataccttgggagagtgtatggtgaagatcatccatgccctgaagaccctggctagccattcctaggtatgggagttagcctaggtcgatcagatttacactcagctattgtgtttga

SEQ ID NO: 32528 - DNA, 1747 bp, Cannabis sativa
atcaagtgttgtcttgttttggtattcccttgaaatttcgcaattggatatcccagtgcgtcgccaccactactctcaacatctgccttaatggggggcaagtgggatcgattaacccttcctgtggcctccgccaaggggatcctctgtctccttacttgttcatttggaccgctaagattctatctagactcctaaattgtgccctagataggaacaatattaaaggtatgagactgagtagaggaggtccggttctatctcatatattctttgctgatgacttaatcttagtggggagagctaacttggatgaagtcagaggttataggcagtgtctggagagtttttgctcttggtatgggcaacaggttaataaactcaaaacctccatcttcttcagtaagaatacgccaaggggcctgagacaggagattaaagagatgttgggtattggatctccggaaggaaatgttaaataccttggattacccctcttcagatctcgtcaaaaggatgccgacttcaacttcatttaggataatctctctacaaagcttcaaggttggaaagttaaaaccctctccaaagctggccgggcgactctcattaagtcggtaggcctgtccatgccgatgtatgccatgcaaactactaagctatctaatagaatggcatccagaaatgatagtatggtgagtgacttctggtagggttttgagaaggacaaccacgggctctatcttaaagcttgggacaagttatgtctttcgaaatttttgggaggtttggggtttaggaaatcgagagaaatgaatcaagcttttattgccaagtgggggtggaatatcttgaatggaagccaatctctgtgttgcagagtgcttactgctaaataccttagaggaaaagagtttcttaattgtgattccaagagttctgattcctagttttggaaaattgtcattaaaactaggaacatactaaggaaaggtgcttgcaagatggtgggggatggaagggatactcgaatctgggaggatccttggattccccacttaaaggacttcagaccaaagcctcgctctttaaatgttggagatcacacttttgtggctgatctaatctcagatggccgatgggatgttcataaacttaatagcctgtttgatcatgtgactgtgtcggctattttgagaggaggagttccatctggtttggggcaggacaagtgggtttggactcttgaaaaggatggacatttctcctggaaatttgcctatctctctcaagcgttggagagagctccccagtgtgttgtggctccttctatgttgaacaaactctggaatagtaaagtgatggaacgacacaaggttctctggtggtgcattctctccaatgctctctctctcttagatctgtttttaaaaagcgatttcatattgaggaggtgagataccctctttatgggagggaggaagaaactgtggaacatctattccttacatgtgatattgctcttcatgtctggcgctcttctccttggggtatttaccccactcaagataacggaattagactgtgggattgggtcaaattcatctgggatctgtctcacaagggattaaatggggaagaggttttcctttatgcttctattgtggtcgacaatttatggcgtactcgaaatgagaaggtccacaataatattactttgaatataacaaattgcattgattctatt

SEQ ID NO: 32529 - DNA, 3147 bp, Cannabis sativa
ttgccttttagtacaacctttgagttaacttaacaagttttgatattagctcaagtaggtcatcaactttttggattaagctgcatattcacccaggacatgacctatgactagttaagagtcatggtgtatgtctaggtgttcagtttgcgcttcgtgtgctagcttgaggccagcaattggagtttcatattcaacctcattgttagaagctttgagtctgacctttgttgcctcatgtagccattgcccccaggtgctctgagagtcagacctgcattaggcgagtggtcaatgtaccttttaggttgagttgtctgctcttgctcttgcttcttctctggctcttgcttttctcccaaaccttgagagatttggggagatatgcttctatttttagctatgaagctggtaagagcttggcctttgatggccatgtttggttgacagggggccttaaaatggccaagtctttgtggttcacttgagtggttggccaggtgcttcaggttttggtgacacctgtcgccatggccgattagcatgcattgctttgggtgttttggtaggagagtgaagcatgtgcacttctcctccttctcccttagacttcatggcataagggaatcgttgaattggcctttatgttggtcagagccattgttgttgcacttgcctccaatattctcattgttggagaatcaacaaagatcgtctgtgctgatcgacacataagacaacacttggggcaatatgatgccctgtgtctgttcaacaccgacttgccctattgtttgggcttaccgaacaacttcttctaactttatgaagccatcaacttcctcaaggaactccttcatgtttctcatagagatccttctgatatctttccagaattcattcagcaataggatgcctctgagtatggctgtatatcggtcttcttctgtcacgcctttgaccttggtgacctcagccatgaacctttgaatatagtctttcaaaggctcatctcatctttgctttattttgacaagatcctccagttgtgaaggtatttctcttgaagcaaacatagttgtatgtgatgattttgagactatgggtatgggattacatagttgttggggacttgaatggattgattgggagtacctatattaacaaagtgcatcttgtttttcggtagcccatcccgaaagaactccacggttaagtttccttgacctagggtgatttcattcaggaagttttcccaagaagcatgcgagtgaggacaaagaatgctagaaacactcgtgctggtctgtagggccagtcgttagtccatgaagcagccagagtgatgtactcgtgtataagagccctcattccgtgggtgtaagggcccaatggaggcttgaagtagggacgttacaaaggtaacgtataacagaacgttagaaagagtagtggtatccataaggtaaagaagattacatgaattactgatggtgatacggtaatgatggagaatacttttatatttgaccaggtggtcaatctggtatatgagttgaccattgaaattctgagaaaagattaccttattaagcaataatgaaaaggtatatacactcacccaaaatgggaaaatcttataaactgagatgcaatttgatgggcatgtattcaagtagttggtgaatattggatcacaaagtatgttgtttgttaaacaatgaactatataattcaatgtaaaaaaagttttacagtggttaatcaagtatgaagatagtgatgattgcaagtgagcaatagtagcatatgaactatagagtaaaaccttagtagtaatgacgagaaaataatatgagagtcttagatgttgatgaatcagcaccatcaacgggagactcactataagttggtatggtagttcatactaagggttattgaataaaataaggaatacacttgaggtatatatatatatttgatgtgtttgaaaggattattaagatttataccaaacatagaaaagaaactttaggatcaaggatgatctttaattaattgttatcagttgagaattcaagaaatggacatttccaatttagttattggtgcccagtatgagcaatattgcctctactatatgggttacattaattcactttataacggtggttaactgtaagtgattggggaatttaaaagttgtgtcagttcaaggaaaattgatacaagtcaaaataggtggagatgaacaagattcaagttgacaataaaatagaaatccttcaagttttaatgaataataaactgatgaggaattgtaagatgctaatgaagtgagtgatggaaattacatttaattaatgaaagaattaaagtaagaaatacaattaagaatgacaaagaagcatctactttctgataacccaccatgagcttaccttagagttaagcatacttaacttggggtaatctcaagataggaaatcttctagggagtcatctaggatagcatacaagtgaggacaaagtacgctagaaagatttgtattaggatgcaaaataagctgtcattctagaaattatcaagaggaaaggatgtcttaataagtaaagatttacaaggcatcgagatgagtatatattagtggatggaagtaaggaatgctataatagaatatctattagaaatgaatacttagcttgttaatgagttaaattagtacatcgacttaggagatcccattggaggaatgaaaggcataattatgaattatgtactgtaggatcttatgattttgactaagcagtaacagttggacatacaaagttaataggatatctatcagtacagacaatttatacaataaatgaggatatggagttcatacgaagaaatagtgtactctaatgaaatcccaaaaatgatatctttggctatgatgttaagaattaaagaaggttaatgagaaccatggagattaaagcaaaaatagtataatattttattcctaaaagacaggtaacctgagaggatcaatggaatattagaaacatgttgtgggcatattttataaaggttagattattttggaataatctcttcccctgatggagtatttatataaaagtgagaattaaatgtac

SEQ ID NO: 32530 - DNA, 3636 bp, Cannabis sativa
agttcctggtaaaataacttccaacagctttcaccaacataatgggcaatagaagtaatcttagattgaaaaaaatccagcctcaaattttactaatgggttttggggtttcctagatttactttcttttgaaggagccataacctggaagtcaaaacatctggtgaaaaagaaacaataatgaggtaaaaataaaggtttggccaatggatactttatcagatgaggcaggttggaccaagccacttctcgcaaataacgacgcttaccctcaattatttcatctataaagtgtatatggcgagcaaaaatatcagttcgatttaacctatcagcatgttcctttattctctcatcgttcttgtctaattttgtttttaaaaatttgggttttggttcaaagggtaaaataggtaaaaattaaatttcttgcactaaaaatgatgagttttcacattcaaaattagacgaagacattttatctaaaaaatttcgttaggttctataaaaattgaaactaaattcagagtaataagtgtcaagtaatctcaatatctactgagttaaaaaaaaacttgtaaaacgattataaaaataatttcaaaaaagaaagtgttgatacttaccgactcttggaataaaagtcagtcttgaagaatttctcagtaggaacctacaatactagggatttggtatgtagcgtgatctcagttttaaaaaaatagtggcagaaactcgaacaaagtataagagaggcaatgatggcgtgcaaaaaatatagaatttcaaaaagattgctggattccttttatctaaagatggtgaaaaataggaaagaagatgaataagggtagaaatgatgaaaagatgaaaaatgtctactaataagttgcctcgcgagcaccatttgatcatcaatgatgattaatcaatagtgattaactcacaaattaattgaaaagacggctttaattgcccttagggattttctcaaaaaataaaaatcaccaaagtaaaagcttaattactcaatatgcataaaggaaaacccactcctcaagagaatgagtaaaaagtcttttcgcattaaaaagaattttttagggagtaattgttatacccatatttagggcagtaaataaagggtttagttgcataacacgtgtacaccgaaggcaataaattaactcaattaattaaagaatcaagatataagtaacctcctcgcaatatgaaacccatgcacgatcttctcagagtaagatgatatttacaaacattaaatgcaagatgctcaacacactcctaatatgaaactgaagatgctaagcttattaaggaatttaggaacattcttggccttgatattgttaatgttaagagacttaatttgctcaaagttaattcctaatagttgcctgggaaggtttgtgatctaaaccaagtctgtttacgagaagtctacatttaatatacacctccttcaacgagttctccatgaagataaatccttgcacaaaacatatttgttgataacatgttatgacttagtcaaagataacggttatctcttttattttatatacaaaaaattatgtatatttcccgcctattaattaaatatatgaaatatgggaaatacctacattccataactgttgtacgaattagatcaaaaataaatgttatcttactcctataaatagcagagtaaacattgtaaaagggcatgaccaaatttttgacttagaaaaatcctgccaaattgtaatgtcaacccaaaacaatttacaaataatatagattcatagagtatgtagattttaactataaaacttcataaaaactcctatctttccttttataatttatagaataatatatatcatttattacttatttaattatgagcattaattatcaagtctcgtttatgttaacgaaattttgagtttacacacatgctttccctgtagcattgtacgatggaatgcctaaaccttgacaaaacattcatcaatatgaaactaaaaatagactttgtctctagcaaattttgacacacttaaaagatttttagttatagcaagaacatgtagcatattgttaagcacaagaggatgaataagattttgagtagataataaagaataaccaatagtttgaattgataaacctgtaccatctcgaacatatagtttcttaggtccattgtattctgatgtggtcatgatgttgttgggtctggtgtacaatggttggtggccctaaaattaggataccagttaggatcccatccaaaagtagttgttgccatgttggcttgtgtatgcattaagtttcctaaagagcttcttggactattaaaggaggatggatgtgcacttcttaagattttgtcaaacttgtaagagtaatcaagagttttgttccaatcttttggcacacttggcaccgaggcttgttattagagtaggaaaatcgacctctattgctagtgtaactgcctcaaagattgtccatgtcaggatatggaggttgatagtttaggccattgccacgaggaaatagtcttttgtagggaccaaattgaaaggaagggaaagcggaaaactaacctcctccattattggttcttggtggcatattttgcttgaaattttgtgaagtagttccaaagttggcttcaagatattcttcattagccatagctacttgagcactcatatctacatctttgtcaagttttccgattcttgattcgaaagcaaggagaagagctttaatttttacaattgtgtagcttttgatttgagtgttcgtggagataacaaatgtgtcataccttcttagaagccctttgaagatagatgtcatatgatcacgagtgttgagaactactccaactgaagcaatgagatttacaatttgtttcaccttgagaagatattcaatgagactcaaggagcctttcttgagattctgaggttttatgcaaaactggagaatctttgttgaaacttggagcatgaaatacttctcaagagtgagccaaatatgactagaggtgttgcaaccaaccattcgtcttagtaaacttttagacatggatgacaagagccatgaaactaggagctgatcttggacatcccaatctaaataaggaagaatgatattgtgagctacaggatctccttttgttagaaatggtggaggagttgaaccttattatagatatggctgaagacaatttcctcgaactgtcgcaagcacctgttgtttctacaaaaagtagttgtgatcatttgattttatagaaagattgtgattgaagaaaattggagattaattttcatattctctatttcacaatcgttagttcgagaattctataatatagatttgttgggtttgaggtatttgaatttggaggattagtaagattggtagagtttattacggtattagccatcaatagcagaaatcttactttgataccatattaaatcttctcgacatgtttagttaataagaaagtgaaagaaaataaaagaatgaagacaaagaaaagttttacttattagaatatttctatttaaagaaataaaatagataattgattttgtgataaatgaa

SEQ ID NO: 32531 - DNA, 2034 bp, Cannabis sativa
  modified_base (141)..(148): a, c, t, g, unknown or other
  modified_base (758)..(763): a, c, t, g, unknown or other
taaaaacgcttaagattaagtaatcattatagataccattaaacatttcataaggattaggtattttgcctatgtcattcgaaagacttaacaaaatttcctatcttatcctttttgttctaataagttatttctatccannnnnnnngttagatttactttctcagttttattctaaagttcatatcatgatcataacatagtaagctatcactagtgtcatccaaataataatgggctagaattttaaaattcgcccactaagataaggtaatgtgatactatgtccaagaacttcattggtatcaatttctattactacagtaacaagttaattggaacaaattataggatcaagaataagctctataaatctgctaattggtttattatactatatccatgtctaatcaaaatatgtgtgtcatagagatactgtggtgtattgagaaacggtgtgagcaacaaatatcaataactacttccacccctaagtgttatagagatcatgtggagttttaaatatagtctagagttcaaaagatataaaagatcgttgaactggatatattacttcttaacatctccacccctatcaaatcaaaagatctttttattaaacaaaatcttaataattgcttaagaattaacaattataaacattgaattaaaagttccaagtgtttatgtggtattatctctttgcaacgactaatataccatagatttttgtatcaataataaaacacaaaacacannnnnnatgataaacatataaatataatacagtattggcatacaagttaaagaaatatgaagctcaatttaataaaagcaattcataataaaaatctcttaaagagaaaattatattaataatctcaaagatgtcataaatatgaaatagggaataaaattccaaactaataattgaaactaaattgttcataaactaaaacaattagttcaaaattaaggaagataacgagcttcatcttcaacttggacaatctccacccttttatccaaccattcgactcaactcgctaggatagcaatccaagtttaattagttgtagctgaaataagaagaaaataaacatggttagtagatctagaattaataacccaagggaataataattctctaaaacacatggaattataacaaaaatagaaatacattttttctttgccaaaaacttaggacattggggtttcctgtcccttttcgttgcaatagaagcactttcctttttgctttgcttttgaatcggcagcctttttattcttattagatgtgctaagagctttaagaggcttcttgctattcttccacttcttcttcttgctgggtttcaaagtagaggcaatgtttgcctcagccttagccgtaccattagtagtgccagaactaggagctttgtttcctcctttctgttgtcctccaatcaaattctcaaatgtctgaaggttgttgattaactcgtggaagtcgaaagtcaacttattcatgacataatttgaggtgaagggcagaaaagctggagtgaaactatttaagatcaaactcacctaagtttcctgatctataatatctccatgattctcaactttcaggaagtaactggccatctggagcaggtgatcacgcatgttcagatgaggcttcatcggtgcattgatgaaattcttggtcgcctcaaaacaagcttgatctgacgtcatccccaatagttcagttaactggttcatgatatatgcaactgtgagagtgctggcaaaccttgtctttaaggtgtcgaccatgctagacagcataaagtatcaagctttattgttagcattctgccaacgctcaaacttttccttgactgccttggttgcattctcacctggctactcaggagcctcttcagtcaacacaaacagggcattttcacctatgagagcaatattaatgttctatttccatttgaaaaagttagctacagagagcttgttgtcagccaacagtgacaccatgggattgtt

SEQ ID NO: 32532 - DNA, 1265 bp, Cannabis sativa
  modified_base (1231)..(1240): a, c, t, g, unknown or other
gaaatggattagaatttgaacctcctttatatgaagaaaaatgtgaaactattagactatacttatgacgacatctcttactgtatagtgttatcatactcacattatttttggtgattttatttttttgtttatatatatatatattgctacacttaaataataagctttaactatatatcttaaatagagaatataatattaaatttcttccttaattgataaataattttatttatttactatattatagtggaaaagtaattatataatgaattttatattttgttttagagttagatttagagagaatttaagactttttaagactttttagctattttatttattttttgcttaaaaaacaattaattttgactaataaacaattacatgatacatgttttttataataatgttagtgtttataatgtttgtgtaacgtacatatagaagtcaatattatatatgatgagagaaatatagtatactaatcaagagggttttttagtaaattattattagaggacgaaagtttttatggtttttattgtagttatagatgaatgcatatgagatgattcaagctcgttgtaattattcaataattaaaaaaaaatactaacaaattaaattcatacataaacattgttttaatatttttctttcatcatgaatgcactaaatatatcttagagtactacactataaactttcttaagcggatcacaaaatttctcctaattttaatttatttacttattttttctaacaagaagagaaaaaaaaataatcatacatgaatacttattcatatgtataagggtatattaagaaatttttactaatgatagcagtaaatgtttctcttatctcaatttttacccacctgatttggtatgtttaagtagtcaatatcagcgccacatgacactacaactcactaacaaaaagatcaagttatctactcagcacttcaaccaacgggaagtcctggcactcaaacgggacaacgaatgacgaaccaaccacctcaaggaggctggcgggccctatggccagcataggcgtgccagcttctggacaacacaaggctggccaacctgcattttctagatgcatggcttgatgggaatattttactaggatttagatttactaacaagtatgttgaattaacatcctaattatgaatgctctaaaaatatgaaattaaacacataagggtttnnnnnnnnnntacattgattgcagcagaatataat

SEQ ID NO: 32533 - DNA, 4419 bp, Cannabis sativa
ggttttgaagaaaggaagtacatgcacaaagagaaaaatagagttagatctaatagttgaaaagagaagaaaagaaaactataaaagtgaagcaatcgagtcttacctgatcaaatcttgtgacaggaagcttcacaagttgtaaatcgtcattgttgaaagtggatatcaagctaaatctctgagatgagcttgacagagatgttgccttgatttttggggtgaaatctgaaataatttctggtgttttctctccttttctcactttattttgtgtgtctctgtaaagatcctaggattctaacatatgatcgagcaagttcttctcaaacaacttgctctgctagggtttcgagggcttggtttcagtgttgtgtgagttgcgtttgatgatttagggcctcgagactcttcttgaaaggtctcagtgtcttagtagcaaacgacacttgttttgtggtcatattgttgctattgttgccgttttagtctaaagttcttttacacaaaggaactctccttcattgacaaactctccttcatgcatacatataccattaaattaaataatttcaatttttatggaaaaaatgaattattttttttttaattttaaataaaaaacaaataatttagaggaggtgacatatatataacagaaaatattattaccctaaaatatttagattttatatgtaagaataataatcactatccaacatattgaatcaaattaattatgagtagcagcattggtgtcccttctaagatgagaaacaaactgacctgtaaaaataaataaataaataaaatcaacaattaaatctagaaatgaaaaattgtttacgagtggttcattcaaagaagggaaacttacaaaaatactgaaatttgagttaactttttgaaaaatactatcacacggaaatgttttcaaaaatactgtgtttttataaaacaccagtagaacacagaacaaaacaactcaaaacaacaatagaacaactataaaacactagtagaacactagtgaaaacttaacacagtatactacagtatgaaactttataaaaaaacatatttaaaaaccaaaaaataccgtatggcagtatttttataaaaaaaaatggcaaaaattagtataccatataaatttccctccaaagaaagcatcattttcaatatatagagatagaattgataatgtgtgaaatgaaaaagcaattaataacgttttagccaaataagcttgtccaaataatatgtaagcggttcttcagaattttgatatctaagaattggaatataaatcttctgtctctttattactcgatacaagaattgtattagtatactgtatatatacacctctttattcctctccttctcgatatattatatatatatataattcatctcttattattatctctattcatctctctccatcgatctcttattaagatctttttcgttctctctgtctctctctaaactataatagttttccatagccatggccaagcaagtcaacgtgaacaacagcaatggcgagaataatcaagatcttatactactagatctaattaattctccaacactctcttctccatatacacctcctcctccacaaccacattacaaacctctctcaatccaagaagagattgagttcaccactcttaaactcgcactcccctcatcccataattcccatcattatcctcaaccatactactaccctacaatcatgagtcaagaacaacaacaagaagagaataatacactcgatctcatcaactctcctactctaactctccatataattccaaacaaaactcgaattatatccaagaagaagacatgaacctcggcttgaccactctcacactcggctttccttgttaccataaagatcatttgatcagtactactcctcaagattctcatcctttgtatccttgggctagggcacaaccatgcaaagtttacagcttcaattacctgatgactaataagataatggtgataaaggggagagtggaatgcaacatctgtaggcgtgaattcgtaaaggagttggatttgcaagatgagtttcataatattgggatgggcttgatccgagagatgactaggaatatgaaagaaaatagatcaggccatcgtgatggtgctgtagtccctcggccatacgctactcttggttgcaaggtgtgtgggcataaagattcggtgaggccaatagtactggatgataatgatattgatgatttttacgatatcaattggctcttcttgatgttgtctcaactcttggggtggtgtacgtgtgttcagctcatgcatttttgttcaactaataagattccttattcaaataaggcatacaaaaatcgactcctatttcttacttacatggatctttggagacagttctctggacctaattaattttcaaccttataatagtaagtaattgatccacatatgtatacactctccactcttcctatagtgttcattcatgatcaagcattagagtactttagttctttattttgttctttttcaatcttgttggatttctttgcaaacagatttctatattttgttgacttttcttttaaatttcttttgatgtattctttatggtatcgaaccaaataatatgaagttgcttgttttttacttttttgatattatgatgatgttactttttcatactgattaatagtcatgcaattgtgaaattaaatagcattttttatacatatctattttaattgtagttattccattaacattccagttaattacgtctctgaaataagatagagggagtgaaaaaatttctataaagctctcaaaaaaaaaaaaaaccagaattatacccatatattattttttttttaatttttttttttttcaatttcacggtttgggtttgtaaaccgcgctaattgcaataagagtttctatacgattttttattgcaatttaagttgcagatacatatagaattctgtaaaaatataaaattgttttaaagtgtaaaaataaaaaattcaaaaaaaaatccataaagttagtgtatcctacactacattgattgccttataattaattataagtttttcatcttaattattaaattaaaatatatagaatccttaaactaattaataacacgatcacaattaaaaaaattataatttaacaatattacatctcttgtatattagtactcaaatattataatagtgctgcaaaaatgacttaaaaaatgacaaacaaatataatgaacgacaattactaataaataccaactaactaatttatacactgttgaagtgatgagcaaatcttttgatttttgttcctttttttttttttatggtgtgtgttgaagtgtaggataatgttcaggctttcatattgtttaattaataaagttagtttttttttttattatttaatgttaactaggtttcaataatataatttatataaaaaaaattctaacttatatattttaagattttcatttagattttttcttaagaaataaaaaagatttattatctaattatattgtcaagaaaatatttattatctaattttatataaaattctgttaatattgtaaatgatcacgtcgatttgtgggatttatattgtgtgattgaaatttatttaataataaaaaatgcttacaagttacaacaaaaggttttgaataaaaaaaaaatatttaaaagaaaaatcagaaggaaaagataaatataagtttaaataatattaaaaatgcatccttgaaaataaaaatggaacgatggtgtgaagggagatatatgatataaaaaaattcgaaagggaaggagaagaaggtggaaaaaatatctcattttttttaaaataaaaattgcataataataatgcttcaaaaagaattttataatttaaataaaattttaaatttaaaaaaaaaatcaaaataacttttaaacgaaaaagaagaagatgataattaatataactttcaaaaataaaagatattttgtatacaagtaacctaaatatatatattattaagataactaatattctcattatatatttctttctctatatatatgtaatacattctcttcctcaactacgatttgccaatattcatagtcatggccattctacttgaaatggatgtagataacaatggagaggaagaagagataattggtacttctcgtacagtggtaaataataacaacaataatagtaataatcccattctactcaatctcatcgacttccccactatcacttctccacctttccaacaaaataactatcactataaaccactctccgaggaagaagagatcaagttaaccactctcacactcggctttcct

SEQ ID NO: 32534 - DNA, 2355 bp, Cannabis sativa
  modified_base (34)..(37): a, c, t, g, unknown or other
gagctgcacaatatgtttaaaaatcacgtaatannnntatgttagttagggtgttacacagctataccaacatccttggccggccaaaagcagcctacatgttggtcagggtgagcctataggctggctaggatctgtacacaaggtgttcggccaagaagtgacaattagaccaagggagcttctgttcgaccaagggaacctggcctctacaaggaaacggtgtacaaagctatcctcaacttgcaaaaggctggcctccacatccaaaggttggcctcctcttggttgagctatggtgacatgccaggtcctgcagccttggctggcccaacctcatcttgtaggccttagccggcaagacctcattttccaggcgttgggtggctagacctcccctgtaggtctatgggcggctaggattaactcggtaaaactctatgtacagcccaaaaatgtggccaacaagctacctgtgaattgggcccttaacggtcgaacaaactagtggagcatatctagttttgaggggcagtttagtcttttgcatttaaccaatttaatatgtaaatatctaggggtttcattgtaaattagggttttaggcttcctacataaaggccttaactctaacctagaaaacctgcgtcacttagccttcaaatcactctcagtcaagaaccctagtctctctttctctctctctgctacactccccaaagggatctttcttctcttcatctctctcacacgcgtctaagactatatcactctctcattagagatttgcctactgattaatgttgtgtatccttatagagagctatatcaaatcccacctatggtgatctgaataatattatctctaggtatcaatacaacaaaaaagggagtaggtcattacccgctatcacatgggggtcgaacctctataacaaatttgtgtgttttatactttttcattctgtttgtgtaacatgtggcaagcatcagatccatatgaccccgctataagttgatcactttttgaggtaaacagtttggtgctttcattgagagtgtggatatcatatctgatcaaatgtcatggtttacacgagaacaacaccagtcgcaccatctgcatcttcgtgtctccctcaagacccacaaactgcagatcccgatgttcatggtccaacctcaactagaatttccatgaacacagtagatgtggtcaatcttgcccccatagaaggccccacatatctggccactatagttggcaaggatgatacaagcatcccaatggaactgtagtcgaccctgtctccaaggaaggaccatccataggtgcctccaactgaaggaagaatccttagggcaccccctaagaacaacaaccgggtttcgccccaagtattatgcaggataaacaagaccaggttttgagccccacatggacttgggagaagatctcaagttagccagacttagagaggtatttactcagcagagacacaaattttttaaagaaccatgcactgctgattatgatgtactcgctcagcagagatgcatattcctgagatggatggatgaccaagagtacatccttcgatctcaccaagcagagttagattgccacaacaaagtgcccagtaatttgataaggcatttcaacaagagaaccgatagaagaggttaggatctcattagagatccacttcaaggaagacttgttgatagatcagggacggtttatccacatgttgactagccgaattcctcaggaactaggatagatcttccctttcctgagggaggatagacctttcctcaaaggttaaacaatgaaaactactagatcctagcaaccaacgacatcatgagctggccagggatcccaggctaaacaatggccccctctatccatcatattatcggctaacccccagcaagagtccccatggccgtctagacttctctaaaagtctctatggctggcctaactcctctagaagtcccctggttggccaaactccttcaagagtccctattgctggccaaagaagagaactccctccccaaggggagcgagtcacccaaagatcaattttcaaccgacaaggatcgagaaacaaaaatttgaggagtgaatttaatcacttcagtctgttggatccactaaactgcaacaattagtgtgatctaccatatgtcaatgcacaagctccactagccagtcagagaaatgtgggcgaccaggccctacccaacttatggctgactggccatgtacaagcaccaaactcacggatggccggcctcgagtatatcctctcctaaggtatgaccggctaggctctggccaat

SEQ ID NO: 32535 - DNA, 6542 bp, Cannabis sativa
  modified_base (5701)..(5701): a, c, t, g, unknown or other
atgtaaaaaaattaatttctccaataatagatgttgcgaattgtatatgtaagaataattctcttttaacagtagatgctgcaagttgtatatacatcttatcatgtggcaattgaatttttcgttacttctttgtatatatacatatgtaatatatgattttaatgcaaggtgtgatgtgaggtagcactttctaggagttttctatcttattttttaaattccccagtttctttatttttctcattatacaataatctattaataattaatgttagtataaactcttatttatttcttttctttcaattttgttctttattttctcaattataagtgtaccattacaaaccagttaatttagtatatttatatgcatataaatatttcagttataaaattaaattaatatatatgacattattactcttcttttaattttatcatcatttttttcacaatttgaatgtacacaaaaaatacactgaatttgattttatcattctccatattattgaagatagatcaatatatgtgtgctttctctttgaagttattatgagggtacactaaaatctcaaaattaatatatagtttttttcttttctaaattcatttgcttaaaatattattatattgtcgtacatgtactatatgttcaatgttatatacgtgattaaatgaagtttgttaattattaatttttatattgtctaaaaaatgtttaattatttcattataatatcgagcctatttgttttttttttttttttttaaataaagtagtctttcacatattatcttggaatattaagtttgaactttcataactcaatcatctttttttcgtatctccatgaaagaatacaagtgagaggattgacagagccacttattagcctcactcccctatttttgaactcctccgaagagctctaaaatattaatgattggagttgtctcgtttgccattatttacgctcatctacgccttcattttgttcctatatgcttttgacattgatagagttaagtgtatttttttaataatcagattcaactgtatctatctcacttatctccttctacattttgtctattttttttgagtattatatgttatttcattttatcaatgtgaaagagaatttctattaaaaatctaactgagaattactttaatattatatttatggtctattatcgtttatgtatttgattctcatttagtgtagatgtatatttgttgcatttttaaattaaattttgtattcaaaaagagaaaaaagaaaaagagaaacatgtgaattattgtgatataatttattggttttttattaatgatacaatttaaagtgtttttagtccacaattagtgaactccataatagaacactctaatacataatttttcttgaatctaaaatattacttagcaattgtaatcaaaatatatagctataaacttatgaaaataaataaatgataagaaaaaaattgagtcatataagattaagaaaattttaacaagaaattcttgatatgagtaatattaataattataatagaaatgttctagcaaattttttcactttacattaacaattcagtatgtttattatttaaacaaataaaaataaataaacttttgattattaaaattattttatttattacatttttttattatattttttggaatttctaagaaaattgagaacataaaggactcaaatgccttttaacattatatcattttaaacaagaccatctaggagcttgtaatgcgaacctattcaattgcttctctcaattttttaaattttattagcttctcattttatttttcgcatttaattagctttaactttactaaaaaaaaaataataagtaaccggccaataaatatactaataattaattcattaactaatgactctctattgctctttaaaattttaatttcattaaattacttttgtcataatattcttttatattcattttttgttactttactttttagtgagaaagttacaaattattaatatatgattcaatgagttaaatttaaaagtgctattcaagtgatgtataataaatatgtagtcttttacgtttatacaagaattttttaagttgaatttcaaaatgtataatttatgtgtttaatagtgattaatacactattttaatgtgtataaaatatattaaaatgatcgagtttacaaatgtaatgtttaaaatatgttagagagaaatatttgtaataaaagaaattttttgacatttcttttattgattatgtgatcatgatattcatctttagtattaaaaaattaactaaacaataataattaatctccaaaaagattgttaaaaaaaatactctcaaaagtggaaaaataatgatagtatagaaatgtgagatgatactttatttttctaacaacttatttattattatttttttttataatttatgataatttcaatttttaatttcacattataaatcatatgtataattgatttgtctaataataataataataataaaaagtgaagttacataattattcaacttatcatatttatttaaaaacaaatacaacaataacatgataacattccctcacaaaaaaaaaaaaagtggcggtatattctttttctctaatctctccatttttgtggtaattttaactaattaattaatttatttaaaaactaattaattaagtagttgcatgtttattgttaaaaaaattaagtaataattgatattaacacaattacaacttatttgaaagttcaaataacagtttatatatatatatttttatcaattgacgtaaaaaaatatgtgtattattagtgattattattattattattatttttttttgaaaaatagtgattattaatttctaagaaaaaaaatatacctcaacaatttttctcaaaatatattttaataaattaattgttaaaaataaaaaaaaaagtaaatttttatatttaagactaagaatgataagattgatcatatattttcaatacatttttattattttttggaaactttaatttttttaatgatctaactttataaaaatttcacatttaaaaaatattataattttttatatgtaaactgtaataaaaattttatttgtctaataattaattagtatttaactgatttaatattttttaaaaacgtaaattatttttaataatgtatatagtttaggattttttaacaccgttttgtttcctagtaaaaaataaaaaggacaaatccatgaaaaacaaaaaaataaaaagaaggaaaaaatagtatacaaacgtaggagaggaagagagactccacccgctctaacacgcaattatacttaattcaacctataaaattataaatgattgccttctacctcatccacttctgatttcaattttttaattattattttaaattgctgaaatctaattcgattatcccgtatttgatttcataacatcgttctaagtttgatttccatgccgagaaagggcttttgctatatagattttggtagctttctgtagcaaaattctttcagattttagtcaatggacagggatagttatctgaattctacggttgacgtcaatgaaactcaggccttggcttctagggtttcccatctctcggtgagcgaggaaatcctcgaccaggatcatggttatctgccggtaatctttcctctttattcttattgtttctgtgattcttactttatcgggcaatatatgtgggggtggggttcctgatattattggttatttgattttctaggaagaactgagtattcagtatttgtagaaagaaatagttattttattcttctttccttcggttcgaaagaaaagtctggttgggaagtaaaattcttgaaacatatgatgtgtgtgttattttttgatattttttttttttaaggagggaggagaggagaggagaggtgtagtaccaatatatgcttataattaatattttaggattaaagatcgtttcttagatagtgttaatactagctctttaaattgacagaatcacgaggagcgtgaaaattgtaatgaccatgcagcagctaatggatttcataacagaccaatgaacgaatcaaggtcaagggaatatggttcagatttataccgaggcttcacagaggagaatgatgctgggcgtgagtctgaaactttatgtggagagcagaggaagtgcttttactatgatgctccgctttctgaagatactggagtttggatacctgtttctgttcctcctatgttggaaacagagcgtgaagagtgggatagaggtttccactttcatgggggttatttccctgatggtgagatagggtggagccacttcactgaagaagataaagagatgactatgtgggatgtcatggtggaaatgttacttgctgctcgtggaaaagttaactctttagcttctggtgatattagtacatctaagttttcatggatatcaaatcatgtacttgagcaggcttggcaagaaatggctcaaactctcacagatgatgttgccaatgtgagggagatcattgaggcagacccaccaatatggttggttgatagtgctgcatctgcttgtatgttatgtggtgtgcggtttcatccaatcatgtgttctagacatcattgccggttttgtggaggaatattttgtggtgagtgctctaagggaaggagcttgatgcctgccaaatttcgcactgcagatcctcagcgcgtttgtgatgtgtgttttgtgcggcttcagtctgtccagccttacttaatggaccaagtaagtcatgctgctcagcttccaacaaatgatctcacagaccttagcactcttagatcgtggctcaatattccttggggacagtctatggaatatgagatatataaggcagctaatacaatccgagcatataacatggtatgggctcacctttgaatttcctccgtgtatttttcgtgtctaaaattttatggaagtcaaatggcagtattttcaacgttaccttaagaatgctgttcttaaaagtttctgctccaataatgtttttttctctctcagcaaccgtataactgtggtgaatgaattttttgtccttttccaaataattgcagtggttatcactttttgactagtacatgctaaacgttttgggattttttaacgtatgataagtttcaattctggtatcaacacatgttttagtcatttttcatgcttatttattaacttcgccaagacattgttttcaggtctcttccttgatgccggataagtcaattccagatgccattctacggcaagcaaaaggccttgcaataattactgctgtaaaagttggagtcatgtttacctataatataggtacaggaattgtggttgctcgaagagaagatggctcatggtctcccccatcagctgtttccacatgtggtgttggttggggagctcaggtgaagaacttagtaaaagatattctacataatacatatattgtccacaccagggttgactccctttactggaatcgtattttaggggaagaaaaattgaatttccataataggattgaaaatttagaacaaaaaattgagcaatcttttttttttttaaaaaaanatatatatatataataaaattaaacttaaataattatgaatatattcacaaaagtctcgtatgaaaattaagattttttttcctctatcctttctgaagaaatgttttcttgggaaaattcaagatccaaacaaagtccaactgtgacattttttgttttcaggctggaggagagttgactgactttattatagttctgagaacaagtgatgcagtaaagacatttagcggtaatgtgcatctatcagtaggagctggcgtgagtgcagctgttggtgttgttggcagagcggttgaagctgattttcgagctggagatggtggctatgctgcttgttatacttatagctgcagtaaaggtacgttttgtaactaaacaaagtcacaattgctttaactgaaatcaaattttcttgtttcaaaaatagcagggctcgaattttgaatttcctttcatttccctattttataatatatttgcatagtagttgctcaattgttaaataccccagctggggtttcaatgtacatgtaagcacttaaactggactcaagtggcatggagcttctcgatctcattatgggacatcattctaggaaaggcatatcatttccttgaaattaggcccagagtcataacttgctagttaaaactgttttccttacctctgacttgggcttaattttctgtcgtgcttatttgagacttctgtgcattacggccaattagtgatacccgtccccagcagaatatctatggcagttctttccagaacgttttatatggaaaatttgattttctatacttaaaaaacttaattttttttttaaaccaatacat

SEQ ID NO: 32536 - DNA, 2136 bp, Cannabis sativa
cttgtagataggtgtatgtgcgcctaaatacaagtctgtaatatgttatgtgttatatgcttttcttactgagtctattaacttgcagattttgtttaacgtgttggtaaagaaaggctaaggctgaagaccagtaagttcaaagctcggggatgattgtacatgtcgttagacctggagagtttgttctcaagacgacttgggctatatttttgtagtcgttgtgcgatatgtttataaagtgtattttgggtataaatgtaaattttaaatatgggatcccggcattttatatggatatatataattataaaggtttaaagtttaattaaaagtttaaatttgacacgattttgtagaaaacttttgattagtaaatgaatgcactgtaagtagaaaatcactgtagcgtgcctagaaattagggcatcacaattttagtatcaaagccgtcatgttgtttaccgaagaccgtcaagatatgtacaatcatcgttagagacaagctcaactcatggtttcgtaagcctttacttgtttagtaaattatgtgactagataagcatgatggaagcatgttagtaatatgttagtcatttaaatgcattgcctaaaatccatgaattcggtgtttggattatatgtgattgatgtctaacctacctaacttatgggttcgcaggccaagtcctatataatatggatgcccaacaaaacacgaggagttaatgtaatatggtcgagcccaaaggcaagaaatcaccccaaggccaagaagaacaaagctagccccaagtccaaggacaagaaggctaaaggcaagtgtttccattgtggcgtattaggacactggaagaaaaactgtaacaagtatctctcagagcttaagaaagataaatatgatttatttgttcttgaagttaatttagtggaagatgataaatccttatggattgttgattcttgagccactaatcatatttattcttctatgcaaatacttgaatagtcaagggaactaattgatggggaggtgactatgcgcgtggggaatggagcacaagtgtctttcaaaggtgttgttaaagtccatttgaaattcaataataaatttttgttattgaaaaatatttattttattcctgaatgtatcaggaacattatttctttatctcttttacatgatcaatttttcaatattgattttattaaatattgagattattattttcaagagcggtacgcctatttgttctgcaaaacatagtaacaaactttatgttctcaagccaagtgagcaattaattttaaataatgaattgtttagagtagcattgtcttaatcgaataagacgcaaaaagttttcgttgatgatgaaatatatctctggcatctacgtttaggtcatataagcctagacagataactagttaacaaaggatggtcctttgagagaactaaaaattggaacgcttctggtatgcaaatcttgtctagaaggcaagatggcaaaaatacctttttctgcaaaaggcaatagagtcaaagaacaacttgagcttatacacactgatgtgtgcggacctattaacattcaagcttgaggaggttataaatacttcatctcttttattgacgattattctagatacggtcatacttacctaatggccaagaagtctgaaactttttgaaagtttaaagacttcaaggctatggctgaaaagcaattaggtaaatcattaaagaaacttcgatcagatcgtggtagagagtatttggattccaaactcaaagactatttgctggaagaagggatcttatctcaactcatagcacctggaacacctcagaagaatggtgttgcgaagagaaaaaaccaaaccttgttagacatggttagatcgatgatgtgttactcatcactgccactgaacttttagggatacgcacttttggtggccacttacattctgaatgtagtatcctcgaagagcataagcaatactccaatggaattatgaaatgggacaaaactcggtttgaaacatttctatatttggggttgtcctgcccatgttcttaaatcaaagtctgtgaagcttgctccgaagactgaagtgtatatttgtagg

SEQ ID NO: 32537 - DNA, 4108 bp, Cannabis sativa
  modified_base (256)..(260): a, c, t, g, unknown or other
  modified_base (365)..(390): a, c, t, g, unknown or other
  modified_base (485)..(488): a, c, t, g, unknown or other
ataatgggaatatgacctgggaatatgacctataaaatatgacctataaaattgacctataaaattgggtataaattaaagagtagtaaaataaaagtaaaaattaaaatagaaagtaaaaaatgggtaaaaaatgtaattttctcttgaaaattgaaagaagatgctcttagtgccatcaatttttttgttggaaaattttatttacactccaaaattttttaaacacacctaattttaataatttttattttannnnnaatttatatctttaattgtattaagttttttttataacttttttttccgaatttatattcttaaaaaatatacatattacacaaaaataaattatattttaaatnnnnnnnnnnnnnnnnnnnnnnnnnnaattatatgaaattttcttagaaataattaaaaaaatatatatacatgagctagaaaaaattataaaaattaaatcaaaataagtattgaaattnnnntaaaataatgtgaggaaaaaatttaaaaaaaaaatttagaaataatttttaaaaattatttaagtttatatatttttttttaataatggaatgtatttatgtgtgcaaatagacttttttttttttggaataaagacttcctacttccttctatctcacaaggagaaactgataatgcagttctattgggtctccaatcatagggcccaaacccaccaggcccaatgaaagggccttgtctgccacttttattagattagcttaacgtgataaattttgggaaatttacatagtatactaacttttgtcattttttataaaaatattgccgcacggtattttttacttttttactgtatttttttgtaagtttcatactgcaatatactgtgttaagttttcactggtgttctactagtattttttagttgctctactgttgttttgagttgttctgctttgtgttttactggtgttttacaaaaacacagtacttttgaaaatatttttgtgtgataatatttttgtaaaagttaatcaaaattccagtatttttgtaagttttcctaaatttaaactaaattcttataaacataaacaaaaacatatttccacaaacttataggtagtaccggaaataaatttctaaaatatggaatattcatcaattatgaaaaaaaaattatatattaatatagtggtaaccagttactaccgtatcatgaaaatgaaataaataatatttttgatagtgataaacaattaccagtacatcactgaaattattaaactatttttttttattaacactgaaaatattaaactaatttcatagtgatagctcattactaataaactatcaaattaatagtgatagatcatacacgtccctgccacatcaaaaaaataattattttaatagtgataactagttgttatcatgtcaattttgaaaatggaaaaataaattataatatgaaatagatcaatcgagtgtaatacaaatatatgggtgaagagagattattgttacttaaaaagttattattctttcaagcaatagtgtaggactgcaaaaataaaaaaaaatctctctagtgaagggagaagatattaatatatttgggcctagcccatcatatctgttaggacacaaattttgtgactttttataagaagatttgtgtataaaggtttttttgctattaaatttttaatttatgacttcagtattcatatacttttttttttctttacacaatttagtttaatctataattattttttagtagttactaatttattcaatatttttaaatttttcaataaaaaaatccatagaatttggaaaaagaattctttatacatttgcaaactataaatgtaaaagtcgtataattgaaaatattatctaattagctacgagagtgagttgaaaaaaaagagtgtaagctgcaatttatatatatatttgagataaaatgctattaaattaaactaagaagttataatacaataggcaaagaggtagaggcattttttccaaccatgaatatttagtatctgccgaaagaacaaacttgaccaacaaatgaacagtattatttgtagatctgtacacatgagagatttgagctccaaagaaattggacactaaaagagaaatattatttaacaaataataaaaatcaaaaactagttcttgggtagattgcaatcctttaaccactaaaagagaatcagtctcaatataatgaagccattacaaactatgcataagagccaaagcttctataacttttcgtttaaagcatcatcgaaagggaaccgacatggtatcaataatatctcttgtacaatttcgtaagatatcaccgaatccagaagtatgattcattgtgtcaactgcagtatctgtgttaagtttcaggcaccccgaaaggggtttcaaccattgagaatcccgtgctacagaccttgcagaagaaacattacctgaacctccattgttcatgacatttcgagcagaaaaaaattcatccaaataagagatagcaaagtaaagaagcacatcaggtggttttagtttggtactatatttctcgttgtttctttcactctagatgctccaaagtatggttgcaaattgctccagctgcaaagagaaccatactttgaaacgtgaagcaattcccttaggttcgtatggttcgataataacccatcaagagaaaaagaagagagttgccacactcgtcgaagtcgtttacgaaaaaagagtgcatgagatattctctcattctcacaattacacaaagaacaggttgccgaatcactaatatgtcctgtgtggagtatatcagctactgaaaggcaatcataaatagcacgctagagaaaaaaaacgaatctttgaaggtattgacagtgcccagaactttttccaccattgatgtgtttgaatgacgcttgctgaaggttgttgatcttccataagagtagccaaagcataaccagatttaacggtgtacattccatttgactcatgatgccacattagtttgtcttgctgatcaaataaagttagaggaatactctgaatttttctaacatctgaatttaaaaataaagtctttaaaagagaatgatcccattaatagggttcaaaatagtatttaccctaatttatgcaaaaatatatagttgtttcttcaacaaagttatttcataggaaaaattcaaaaaaagttaaaaaaaaatgagaaaaataggatcaggtaactcgttaccctaagagaaattccaataagaatgtattatcccaaagtttgttcatttgacgtggtccttccacgtggcaaaaataaaaatatacgttggagataggtcaacactaacctgccaggactattgccctgtagcttcttaacctttaagatttcatgttatacggtacacacaagaaaaatgagatgtacaaccctgccagcgaagtcctgaccagacctataactggccagccaggagtgacaacttccaagcactgggtaacctttagtagggctggtcggccaagtacataggaacttgccaacacttgtatttttctcacgagccttccaactcaccctcaacatttccacgacttaagaaaagttcaaactgcccacaaagatagggactctccgtcaacaaataataaccttattctttaggaattaattattatttactttgtaattcaaatatacgttttaacttttctatttgctcgggatatctctatgtgtagcttgtaagctttactactataaaaaagggcaatatacacactcaaaacttatgaggcaagtacgcttaaaagcactatcggaacaagtcctctctcttttctcatacttctcacctgccaaacatattgtaatactaaagagagcttagctagaaattacaaggtttcagcctgtaatctgtttagttttatctcaagagtgaatacaactaaaaggagagtaggtcattacataaacaaaatgagttgaacctctataaattctagtcttttttacatttattattgttccacacgtggcagtcataagcgagatccaatcctaatt

SEQ ID NO: 32538 - DNA, 1755 bp, Cannabis sativa
tctaactcaaccctaactgagctggttctaaccaagtcaatcttaaataaactctaattcaagcctagaaacttattctaacttcagtttaataccgtaatcccgaaatcacaaaaaccctaacttatatctaacttgaaacttgaataaaactaggagaaaagggtgaaaaacttaccttcaagcttggaaaaaccctagaacttgttaattctaccaagaaattgaagaaaaagttataaaaatcccttcagtgcagctggtctcctaggctcgtgcaagagggtagaagagaaggaacttgtgttgactttttcttaagttttctaagttgtatctatatttatcaacacataagacttaaaataaactataaacctattattagtaatatctcagcctagaaaaaggcactaaaagacaaaagcttcaccttacaaaaaaactattctaccccttcccttaacacttaaactttagaaaatcctaggggtattttagtcattccttaattaatccacctaaccgataacttaaaaattctaaactagactggtataaaaattcaattcaattcatcttttattgtcgtgacatttctgacctccccgtcaagttccacagttgccagacccgaaattattttattcaaattatggtatctacgatacccacatattctaatataatctccataattaataaattatatgctttaattattcatatttccctaatccactcataattattttaagtaggattataattctactttaatgcccacttaatcacatatttaataaaatatgtccaattaaaatatcaatatattttttaggatattacagctgtggccttggagatcgagagtgaagcatgcatagtcgtttgagcgaggaagatcaacgtggtttggaaggttcagatgtggtttggagaaatttatgctagttaaaatgccaacaatagatgtagttcttgttaaagagaaactataggagaagaagaaagctatggtttaaagatgaagaaggaggaaaattgagtgggtcgggttcgggattaatgatatgttttagttttaatttttggataaagtttcttaattttaataaaagaaaagagaaaattacaaggaattattaaagtttttaacttttaattatttaaactgttttactttataaataatttattttaaattaaaaatatgatttggaccaataaattgttgacacatggcatttttaattagtaaacggatctgttagaaagagggaccaacataattacagaaaacgtgaccttgaggactattacaaccaatttttcaggttggggactaaactgtatcaactcatatttttggagacttttgccacaattatccgttttcagaattaattgtcaaaatattctaataattaattgtggcagagatcttgatggaaggtctcacctatataaatatagggtctcggtccccgagctcactacttattttgtgaaacacagtaaatctaagtaaagagagtagagagagcttagaagtttgattacgcacactaatcagtttccttttcttctttatattcaaaaatggtgtgggactaaagcttaaataatcaatgacttatataatcgtccatatgtttcatctattctgcaatgccctaatctatagggatgccacgtccgtgattttataaactagtttaatactaatagaataattaattattaaaaaccgtg

SEQ ID NO: 32539 - DNA, 3258 bp, Cannabis sativa
aggacctatcgctatgattcatatgtctattatgtaatgaggaacattgagttttaaagtggtaaattaatttaaatactgacaagtgagagaatattagaatattttgtttatatgtataacaaatcaaatatttatttgatatgatttataaaatataattaattaaaatattctaattatggtcatatttaattacttaatatttattgaaattataacaattaaggaaaaccctctgaaaaaagaaaatatttttggtcttgtctagtgacatggtgagttaatttgtttcgaatgtgagtgagttagatcatttgttgacggtagccttggcaattttttttgtttgttcattttttgattcgttctttggtgttcttctctctttcacgatggaggaacaatatgcggcattttcgattcatgatgaagatgaagagggccttatttttgagtcaggggatgatggtttagctgaaattgatgacagatggttgctagtaggacgcttcttgaccaactgatctattgattttcaggctatgcaaaataaaatcgccactctttggcaaccaggaagaggtttgtatgtgaaagaacttgattcgaatttattcttatttcaattttatcatgaagttgacatagaacgagttattgaggagagtccttggacttttgatcgtgcacccctaatctttgaatgagtgaagcatggtgagaatcctcgtaatatccctctgctgaaactagatttatgggtacaactacacaatatgacagtcagatttatgtcggatagagtgattcaaggggttggaaactacatcggaacctttgtaaagtcagatcctaacaatttctcaggcgtgtggcgtgactacttacgtattcgggtgaagcttagagtggacaatcctttgaagaagaaaaagaagttagaaatcagaggtggcccaacttgtcacatattatttaagtatgaagatttgccaaccttttgttttatttgcggagtgcttggacacaccgagaaattctgcgaaaagctttttgaagtcccaaaagagcaaattattcaggagtatagccttgagatgaaagttgccccaagaagaaggaactacgccgatgggtcatggtggttacgatcaggtcttgcggtccaaaacagaatggacgatggtccagaagctagaaattccagcaatggcagccggagtaatcaagctgcaccagtcatgggaagacagaggttgatggcggctagaaatcagggatccccattaattcatcctgattctcgtgatactaatgaagtgccagatatgaggacggttgacaatgtaattggatcatcaattaataaggaacaacccttaattttaggaaaagtaaatgaggagttagttctggggccagccgaatctgatatgaatattgggctgacttttattgataacaaaagaagaagaatgggcttagaaaaagaggttgggctcaatgaaactaaaaatttggagatgggtcgtgtaataagcaaccagaatcaggaggttaaaaacatggacatttcagaaaacaatgattttgcagtccaagatgaagtctcaaaaaacttattagaggcgggtgctggttcccaagcccgccatgcattatgaatgttttgagctggaattgtcgggggcttgggaaccaacagaccattcaattcctaaaagaagcccgattttatatttttatgtgaaacaaagtgtcataaatcaaaagtagtgggcctggcccaggctttgaattttgatggtgtatttgttgtggatgctaatggggcttcgggtgggttggctatgctctggaaaagtattgattcgggatattttttgggttactctatgaatcatattgatttagaaatttccatatctcctacttctccgacttggcgtcttaccgaattttatggcgaacctaatcgaaatagaagacatgattcctggacattactcaaaagcttaaaggacaagtcatcactaccttggtgtgtcattggggacattaataacattgtgaggcaggaggataagagaggtggacgcccatatccccagtggctgttaactgggttccaacaaagcttgctgcattgtggtttggatgatcttgagctacaaggtcaccaatacacttgggaaaaaggaagagcaactaatgcgtggattgaggtacgtcttgatagagctcttgtttctgcaacttggaatcaattatttcattcggctagcctctctaatttgggtccagctacttcggatcattctcctttgttccttgaaccggttgtggtaaataattttgctcctagtcgcagattccgctttgaaaattcttggttgaaggagcctctgtgttttgaaataattcgtgatgtttggactcaggaacaacaagtaagtatatccaggataattaatatgtgtgctgaaaagttatctagttggggtaaggaattaactagtactctaaatcatcgtattaaaaattataagaatgacttgaagaagctccatggtttgagagatactgattctgtacaaagatatgccgaaatcaagaagaaactttatgatgcgtttgatcaacgggagagtttttagaaacaaaggacaaagcaattttggcttcgggagggggatcataatagtagttactttcataaggctgctagtagtaggaaaaaaaacaatcagcttacttaattgagggatacacatgataattgggtctcatgggagtcgagtttgcctttggtggtgtctaattattttcaagatctatttcaagcttcggtcagtgagtatgaggaagttattgattgtgttcctagggtggtgactgatttaatgaattctgaactatgtcaacctgttgaagaggaagaagttagaaaagtagttttccaaatgcatcctgataagagcccggggccagacggaatgactcatgctttctttcaaaagtgctggccaattgtgggagatgaagttgtcaaaaatgtgcgttctgtttttgaaggtggattacttgatgatgggtgtggagatgctaatgtggtgcttattccaaagaagagaaacccagaacatatgacggatctacgtcctattgcattatgcaacgttctgttcaaaattataacgaaagtcatggtgaatagaatgaaaccttacatggactcaattatatctgaaaatc

SEQ ID NO: 32540 - DNA, 4109 bp, Cannabis sativa
  modified_base (324)..(326): a, c, t, g, unknown or other
gaatccacctagtggatactataaagtctgccgaaggtagcagggtaccaaaccacgaagcataaatatcacatggtttatggaaactttcaattactcaactcaacacataagaatgagtagctcctgagtcaaacaatacagtataagaatagccatttatagacaattaacctgtcaccaatgatggactagcattagcgtcagcctgagtcatggtaaaaaagtcgtcctgcgttctgagtagtattcttcttaggctcctctttcttggcctgaggacaatctttgatgaagtagcccaccatgccacactggaaacannncttggcccgacattcaccctaatggtgttttttacatttaggacactcaggataagatcgaaatgaagatccgtggccctaacgaccacctttcctaaactttctattgccccctgatgtttcagaagcatcatccttccgtttgtgatcaaggttaccactgtcggtccgcttacaaatattaccactagcaggagggttcgatgccgtgacggcatcctttgcagtctgcgaaaggaacaaaataattaagagcttctcgttagtctcaaggcctcagacaaatggacatgtagaagctgttaataaaaccttgaaggatactatcaaaaagaagttggacgctgcaaaaggttgatgggtagatgaactaccacaagtactttaggctcaccgaatgactgagaaaatagatacagggcatactccattcttgctggcatttagctcggaggcaatactgccaatagaagttgatattgcgacccacagatgagatttctccaatcaagaagaaaaccaagaactcttgaaattgtccttggatatacttgaagaaaaaggtattgagtcgcaaattataaatgtagcataccaacaccgagttacgagatatttgaataagaaagtgaagaaaaggctttttaacgtcagttacttagtgctaagacgagtatttgcaaacacgagagatgcatctgcaagagtatttaattcaaactaggaaggtccttatgtaattgagacaatagttggaatcagggtttataaactagctcagcttaatggctcattaataatgaaccattggaatgttgagcattgagcatttgcgaccctactatcagtaaactcacaaaaatgctgtaatctctctttctgatgtaatttttaaatttcaattattaataataaagttgaagtactattcaagtaattacaaagttttattcttttaaattactttagggggcatatatatgtgtatgattaactaaaatccatctgaaattacatgatatattgcaaacccactccactttaaaaaaaaattccaaattgattaaagttatttatggacaatataaagtcgaaaggaaaatcaaaatgtagcagttgtaaatgagacttaactcataaaaacaacattaagctacatgcgaatttgaatatctaatgactcacattttataggaatgtattaaatgaggtaccaagattgccttgaaaaaatacttaacctaaggtgtgaatagaaagcctaactattcacacgtgcaatcaaaaatatacaaagtaattcacgagatgagttattcaaagtatgtttaagtttgcttaaatcagattatgactgtttacgcaaagtagaactgataaattgcttgcgaatagaatgcatagcagatgacaactgctcgcatacatagtagattattaactacttaagcaatattaaaggaaaaacgagactgatggaaatgcttagttaaagtatttaaagtttgatcaaaatataattatgaataaaaatgcaaacaagcaaataaattaagttcaagaataaagatgtgaggcaataaatgaaaaggtaaaataaaagcagagttggccatccaagaatacaaatttgtctttacaataaaaaatgccacaaggggcaaaccattgtctcgtcaacatggccactttcctaaataaataaataaaaagggttaaaaaccaagcctacattgtaggtaacttggataactcttcttgctccacctcaacctcaccgtcttcaccaagctcttccttcctagtcttctcgcatagggcaagcatggcttcatctccttcacctaaaaagctgaagtctttctcagggttagccaactaggcctgataaatggtcctcctagcaatattattgaccttgtctttggtctcagttttcgcctctttgagcttcttgtcatggtcggcttggagagattttagagaatcctcgagctccttattcctcttctagttgacctagcatcgcttttctgcctcctcctttgcgcgagacacctcggcgacagagtcattccattttttggccaaggtgtccctgtgctcccttatttggcgaagctcagcctcatacatttcaacccgctgagacgacctatgctgggtagcaaaggagagaagaaatgcctgcaagaagaaagcatattaaaagaagtaaagataataaaatgaggaaaagtgagaataaggaaaacaggaaactaaagttcataactcctttttgctagatcttcagagctgcctcgcgtgagaagctcctagtcgctagacccaagagtctggaagtgacgccaaccattggtaacgtgcaacgagcatagttgtgaaccttcgttcccggcctcgaggggtaagagacaggaaggcttgagcataaccatcttaggacgagagccagagaacttcacttggtgcactaacctagtggggtgttcattggcactcgtcgcagctgggacatccttctctggggactaggctggctctatggttagttggcgtgattatttcttcttgttggccgtggttttggtccttttaaatcgaggcatcaccaacttgggtagctttcttcttagacttcttgtcgactgagggaggactattgaacatgttctctaaatccaaatccatatcggcgaagcaagggaagtacattagtacataagcaaaataaaatgagggaaatggggaataaactcccacgtgagaaagttactgtaatttttagaaggtgacgagggaggactataatattcactaaattccctagatcctgttatcataaatatatcgtaagggtttcgtggatctaaatcccaacttgaatctatatgacctgatatatccaacatagtcccatactgctcggcaatcccatagtaggaactagtacatctattatgaacatggaattctgggtaccaactatcaaacctttgtgttatgcgatcattgagaaagggattccaagtgtaagaactgtatcgactatctcagattgatactagggtgttacgttcggtcgtgaccacccacattgattaccttaggattttccttcttcagcttcctgaggggcaactctctagagataatgtgcgcaagccacgtagtcaacgctctcttcgtcggctggaactgagaccttttgccatgaagaatacttgggtactttgtagtcacaagtaaattaatctaaggcaagaaggccaacactctttagattaatctcattgcataagaagtctgtcgagctcagcccgaatgaaagattcaacaagattatttgatgctcgaccatctcaagagtaggaactggtctccgaggaaccgctcaaaacaaataaaagctttataagcgaccacgaaaatataaatcaagactattcaaagtagatattcaaaaagaagtagtacttacgtatgatacgaaatgcggttgtattagagaggcccgtcgtcaagaagaagtcttgtttactcagtcttgttgggcaaccttatgatgatcatgcgagcattcgtgtgagtgctgagttagtaaaagcctcctgtagctcgcaggaaccgcctgaacttagtaaaaatagactatctccaaaggagtagggtactcccatcctcaaatatggtatgggaccttcaagcttccaaggatcctatatgagatggggttcatatggaagggggcaacccgagatagttgcagaactccttaaa

SEQ ID NO: 32541 - DNA, 3942 bp, Cannabis sativa
  modified_base (3908)..(3917): a, c, t, g, unknown or other
aaacctaagttgcctctaagccagaaacttgctcctaactctaagtgtctgttaaactctctctcttcctcacttcctctctctcacatgcctaccctagcacatctcaacacttgagttttgccagtatcgattcataccttgtaatcctaagggtaccatatcagatcccacctatagcgatttggattgtatttccctcggtataaatacatttaaaaggggcgcagttcattacttgctatcacaagggggccgaacctatataacaaatcttgttatttattgctttttattgttattcgtgcaaacacgtggcaagcatcagatcggtacgaccccactgtcagttgatcagtttttgaggtcagcagtttggtactttcattgagagggtggatatcgtaatctgattaaatgccatggtgagcacaagaagaattcatgtcgcaccatctacctcttcaggtctccctcaagaaccgcagatagttgatccaggcactcaggttccagtcacaactggaatctctatgaatactacagatgtggtgaatcttgtcaccacaacaagcgctacaagtctggccactacagttggcccaactgacacgagcaccccagtggatccaagtggtaggcccgtgcctctgagagtagacccaccattggcaccaaatatgaggtcaacatttgggtgctacggatactaaaaaattattgaaaagattcgatctcgtacgctcgcttcacaatgtagacagaaaatctacgtcgatccgaagcatatggatattgaatttcaagtgggagactatatttctctgagtatcacatatgaaagggatgcgtagatttgggatgaaagggaagttgatccctagatttatcgatcctttggagatactggatcgaataggctaggtggcctatcggttaggtttaccacccgtattgtctagtctacataatgtctttcatatctctacgatgacattgaactctaggcatacctatcttatgaagaatagtatgttcagattctagactgaaaagagaaagtactctggaataaaatgatcctcctagttaaagtactgtggaggaacagtaaagttgaggaagtgacttgggaattagagttgtcgatgcaagaactgtatctcgaattattcaggtaaattttgaagacaaaatttctataaggaatgcatggctgtagtatcccgataagcctagtggtaaataattagggtttaatatatatatattatgggctaatcaggttatgagtgagattagatcctactaatctatttcaacataaatcctaagttttgtcataagtagataaataagtgtaatttattaattatagagatttatatagcatgtgtgaatataatatgacctatttctggaataaattattttttaggtttggtgaccttggagactcgattgggagccaaaaatatcataacaatgttaaattagtgacttttatgggagtattatgataaattgatgctatatttatctgggtaatcagaggtatttggaatttgacctagtacccttaaagtagcgatttcttagtggctaagaaattgtaaaataagttttatgaataaagtgttttttttattattattattaaaaagtttttatacttatcagattatatatattaagttttaaaaacttaagaaacacagaacaaaaccctcccctatcctccgtaggacaaaaccctcacctccaccatctatttttcttcaattttcaactagaaacttagtgattcaagccctgatagtaattggatagtcaaccattgaagagggagagcttaaggtaatgattgattttcatttaaagttgaaaaagtttggttctatatgttgactttgtgttttagagtagttatgggatctgtgacttcatgactttgtttatgagttgctatgggattagttttgatgttcacttgctgaatttgaggtaaaatcgagtttgagctttaaagctttaatagaatttttcatttaaggactctgttttattttatgttacgttaggactgttgtatggatgatatatatgtgtcctgtgatgtttagaatgatttggataggtttcggaagttgcaaaatttgagattcccatttcctacagaaaatgatccaccgtttggagcaaacggttaaccatttcctgccaggaaaccctgggaaaaaaggttaaccatttcccaaacagcagactgcttttgatggtgattttgaaccccatttttcatattttctagaagtttgaggtagggatagcctagtgacctttggggatccttgggaattcatttttggacctggaataggttagattacttggttaattattcttttattgttatgacttagggctcaagatcattgatcgttctccaagtaggtcggccaacatacttgaaccaaaacttgaggtaagaaaagtataatgtaccacatggcatggcaagtttcttgattgttaattttttaattaggtaatggcaatgtgatatacgggcttgcctgattatgcgatgtgatatataggtgccagattttagcacaggcttgcttgattaggtaatgtgatatatgaatgtcaggttatggcaagggctcacctaattaggtgataaaatatatgggtgccaagttatggttaaggttttcctgattaggcaatgcaatatatggttaccgaattaaaacattgacttgcctgatcaggcaatatgatataatgaagatggttacttctcatttccatacatatggttgattatattatataatctttggaatgttattgtttaattattttatgatggtaaaataaataattaattattaaatgtatttcctttattacttttcttgttgagtccttatgactcacgagtggtctgtggtgcacgtaagggcaaggaaaagttagaggatccagtaggcgacgatcttcttcagaaaatgtacatattgacccttttggcctatgtgccaaggtacccgaagttgtttctggttgtatcagttgtttgacttattactgtttataagtacttttgtaaaacttttataatagagatccccagaacaaggttttagtattgttatgttgttcattactaggattttatttcagtgaagtttttaatatcatcacaaattttaacaattaattaatctattattactaaactagtttataaaatcacacacgtggagtccctatagattaaggcattacaaatagcttcgaacttttccttgccaaagtcttggggaagaagagcacttcaacaagtcttctcctctttctaagtttcttcttcgaagaagaagaagcagcagggataccttcaataacctccctgactggaggttcggtctcctttggcaccagaatcgtcctctttgatttcgaacaagatgctatagcaaccaagaagctcatgttgtctagaaagaaaaaatacaagttgttagtacaacaaaataaaagcaaaacaacgaagtaccactacgaagcatgaagcgtcagcgacctgctaattccccaaccttttctggagcggatcgagtggagataacttctccaggttcttggtctaagaacataaatattctccctgaatattctttgtcatttcgaactaagctctcatcctccgacactatcctaaacaagatgacagttgcactctgagcattgtcttcatcttgttcgattggcatcatccaagaatcatcaaaaaagtgagtatcaacatacacttgctgacaagatattaccagaaatacttttcaaagattcttagtggtaaataaggtcctccctgttgggttttatgcccnnnnnnnnnntccatttcaatgtaatccattttat

SEQ ID NO: 32542 - DNA, 2105 bp, Cannabis sativa
agttgggtgtaatatgtttacaataatcgtccccaaaattatgggatttgattacatatcacgtagtgtaaatgcagtttatgatttgaaaatcatgtagctgtgattttcctatttttactggggctattttttcttccgaggttgtcaatgcatgtcttgtgacgaccgtggttcttaaatatttctttggggctcatttgaatgctatcttctgactcgccagtgttgtaagtctcactaatgtcaactggatgaagctataggaagtcttcccgtagcgagacgggcacctcgcttgcatggtcttgagccgaaacgactgttgcacttagtttgtacactaagggctttcgcaattgatatgtgttgctttcgtcttcctatgcgtattgtccttgatgtctcgctattcacattcaacgacataggatttctcactaatatactaagtgccagtttgtagactgattcctcgcctaagaccttacagtcagtgggttacaaatgtattctgatacttacgtaattaataagttattccataaaaagtgattgcatcgattcacattccctttatcctgacacgtgtcctccattgagatggcagcccaatttcgggtataacaatttctccttaaaaagttttttttttaataaaaagagatttttaataattacagagggtatcttcgccaagatcccttcttggaaaaaacatgtcctttgattctggtagttgtatagtttcgagggtcattatgaattgtctcttcatattctgcccgactcccaaccgttagattccccaatctttagctttcttgtcactagattttgtgtataaaagagcggctcaagcttgtcatttttcacatacctctggcttttagtgagatttgttttcagaatggatcatctctttcttgaaataatttcccttctgagttcagaagttcactctcccaaactcataataccatgatgcaccaaccattttccattcgttcccaagaattttaagtctcaattggaaccggaaacgatggattccaaagttgaggagcttccgaccaatccaaaccaggggaaccccgtatcctactatgggagatcctcacaaacgatctttgaaggcgagtatcattctctatgaatggagatttgagtcagtttatacatatcattaactttgtatgttttttgttgctccattgaacctttttttttcttcgtctccacagggatagacagagatcttatgagtgatcttagtggtcctactatgattgacgaggaatcctggaagaaggttggcatggttttagattttcccaggagagaagttggcgtggtttctatcaaagaatccagccaattcaaggcctgcaccagaggacttttgcgccagtctctttctggtatggaggaatttcctgaggctgggaaagagatctctacttcaggaaaggggatcttctaatgatgaggagaaaaaggtctgtgcagagatcaatgatctctacatgtagctggtctttttcgagctatgtgtagtcagtctttctccgagctacgtgcagacggtctttcttaggctatatgaagacggtctttctcgagtttatcaacttcccctctcatcctttgtttaggaagattatgacttaatttaatggaatggtttgccctgcccctagcattttttttgtaaaagacaagtttgtaacccaatttaggtttttcttatcttaaacgccttgtacaattttcattccaacttaatacaattgtgttttcttgggtttttattcacaatgtaaacaactatattttgatcaaatgtatagtacttttgggtttttccattgctctgaatcttcctatttaagtagttagtgatctaccaaagtttttgattttcgagcagttgtcaattttgcctctctataacagttataatctgccttaagcaaactaaaatatactgcaatgaattcatcacttgcatatttttgattttctcatatgaatagttatattatctatccattttctaggttcaagtacttttatcaaggcgttgcgatgcctcgtttagtact

SEQ ID NO: 32543 - DNA, 2246 bp, Cannabis sativa
  modified_base (2205)..(2205): a, c, t, g, unknown or other
cagaggggcaaactccaaaaagggagtcttggccctcaggatcgagaagaccgaaagagcgtttctgtgcaccaagaacccagagaaagaggaagagggaaccgaagacaccctcccgttgatttaagacatcaaatcagcgaaaaacacggtgacttgcgagatcacctagacaaaaagaagcatataccagcggtctccgcaggaacgttaaacgaaggaattttagtagagttggcgtcactgcgtaaagacatcgctcgagtctcccggaggcaaaaaggggatgactcggactccgactgtgaagaccaggagccatgcgcccgacatattttggaagcggaactccccaaaaattttaagatgctcgagatggcagcatacaccggggactcagaccccaacgatcatttgtctcgattcaaccgagtaatgacggttatgagggtcagtaatgatgccaaatgtttatgctttccactaacattgaggggttccgcggaggaatggtttaaaaagttggaaccaggatctgtggattgctggagcaagttgcaagttagtttccggagatagtttgtcacggcgagaaagatcaatctcgaagtcagcgccttaactaacatcaaccaactacccaaagagaccttgaagaattttataaagaggttcaaggaaaaagcgtcgaaaaccaagaaagttgatgacggacagcagcttgcacttcttcaagccggaatccgtacaggaacctcattctgtaacgaattgcaacaagagggagctgctaacctctaggatttccagaagagggttcaaaagtacatcaacttggaagaagcccaaatagtggcttacggaggatactatccaaccgggcaggatatgcactggagttcagctctcgggaacccttcctcctgttaatccactaatgagcggtatacagttctccgctaccccaggatacaatcaaagcccagccttggctcccacatcttcgcattatgggaaaccctcagggatgagtggacaagtcccgtctcactccgctcctgctgcgagccttaccggacctcctcagagctcccggagcaagaggtcctcaaaaggcagcaattggacggaggacaagcaccaaaaaaggaggtatactccccaatatacccagtacacagagttgacggacacgcaagagcgtgtgtatctcgccacaaggcaaaatatgcactaccggaggcctcctcccctgtacagggacagttctcgaagggatccaagcaagagatgcgaataccacaacgacattggacacagtaccaatgagtgcaagaatctaaaagatgagatcggaaacttgatccaattgggtcacctgtatgagtggatcaaaaaccggctgtctcatctcaacctggttccagcagggggtccattgcctcaagggacaccaggaggtgcgcccagagcgttggcactagctgtgccctccgggggtgcgatccttcagcaaacccatggcctgccaccaagacccaacgaaagagtggccatgatctctggtgggccccatattggggggactacccgaaaagaattaaaacgctgcgccgaggccatcaaacatgacgaagtatgggaagtcacccagcttccagctcaaaggccccgactcatggatcagccaattactttcacggaggaagacacgaaactggtgcgtttccctcatcatgaccccctggtcatagagactcccattgccaacaagattctggttagaatattgatcgataatgggagttccgtgaacttgttatttaaagaagccttcacaacaataggcctcatggaccgggatttatcgctgagcggttcccaactcacatgattcaatggaaccacgcctatcccaatgggaaaagtgaggttgccagtcaccttgtgccaggatacaccccagagcactttcaagtactgcacatttgtggtggtagactgcccaaccgcatacaacgcaatccttggccgaccggccttggttgattttggcgcaattacgtcaatatggcacttgtgtctgaaattccctacccaggaggccggggtggggacagtgagaggcaatcaaggagaggccagacaatgctataatgtcgtggcccacttaccggtgttaatggtccatgagaatattgagcnaggattggtagaagaagatgagttggatccccgtgtgggat

SEQ ID NO: 32544 - DNA, 2448 bp, Cannabis sativa
ttttattttcttggaaggttctggagcaaatgcagaatgctcgctcttcacttttttcacgtacctcttttgggtgtttttgctctctcctgcaatatgtggccttcacgaaataaccaggatatcctctccttcaacaggaggaggttgtgtttcctgattccttaggttgttggccggattgggtttgttatgttcactgccctacctcttcacatattgcatgaagtggcctcgcgcgatgagactctctatctcatctttcaactgaggacattcttctgttgtgtgcccgatgtctttatggtacttacaatatcttgttggatctcttttatgcctcgcgtgcctcatgggcttaggttaccgaatgcaatcttgtgctcatgcgtgaggtagatattctctcgagtttcattaagcttaatatagatggtataaaccagcacgtatttgttgtgcttcttttgtttcttgttgtctttaaatgacaccttagagtcatcttttctctttgagccaaaggcccgcgggttatcagctttagtcgagatagtacttgttgaaatagtgttgggtttgcttcctgagccagttttgaacaagttcatctattttcgagcttcttcctttcgtacaaacacctgagccctctcgttgaactcagtgatgtttttaactggacgaccctggtaggtcatcccacagtttacctctgggtagtggagagatcagtggtgatccccgcttgaagggcagtaagctgggtaataaaacgacttaagtatgccttaagcgtatcattaggcagttgctttatgttggtgagtgaggacgctaccggttgcctatacctcacggcctggaactgctttttaaagtctttagacagctgttcccaagaagtgatggagtgatgagtaaatttgttgaactagctactcattgccccaactaatgaagtgggaaacaaaaatacaacgtagattgtttgtgacaatacaagctcacattatagtattaaaattgtttaaatgcgagactcgatcagtggtcccatcatatgatgagacgtgggggtttttgaatctttggggaaaaggagtattcatgatgtctagatggtatggctccagttcctcatctgagtcaaatcgagattgttttccttgctccctgacttgatacctcctgaacttatcctctgactcatctattcgcaattggagtggatccccttgctttggaccgagttgttggcgaagatcaggttttttttggctcaagtgttctcgcagatcctgttggttaaaattgctgaaggtcctcattctactcacagactatgtcctgcgtatgaatcttgtcctgctcatggagctcgtccttgagtgacttgcattcttactcgtgcctgtgctttatcaatcattgttgcgacgagtactttctcctcctcgcattgattggttgtgggttcttgtcaaccccaaggtaacacttgcctcttcacgccccgttcttctccccagggcatggttcgtagtgttccccccgctagggtttgtatgagccccctccctatgggtttgggaagaatgctgggggttcctcgctggcgacctacgtgttccaggttgtgtcccaagacttccctcatttccatgaggaatttcctgttccctggtttctggccgccttctattctcatttctatgagatggttccagttgatcatatggttgttcatttttagggggaacctcaatttcctcaggttgttcttcctgagcgtttgaaggttcccttgagctgtctcctgcctcctggtttatgagccacgaggtctgcctcgtgttcttcttactcgagagtcaggttggttttgagtagtattcccctgtgccaccctggctgtagttgccttatgctctaactcagcgttttgccagtttgcctcctccaggcggcacatgagatggaaattttccaacccgactagaggaatgtaccttgtaggatcataagcaccatcatccatgggctgagtagagccaagattgggttcttcatcccctactctaggaatttggccatcttcatgttgagttctccttgaacatgtggtccgtgtacttgggccaccctcaggttgggtcctcctggagcgagtggtctgtgtacttggggcaccctcaggttgggtcctcctggagggagtggtgcgtgtacttgggccacactcaagttgggtcctcttggagcgagtagttcgtttagattgcatgttggaaggcctccgggagcccattggcgcctttccaggacggtgagtgttttctttatgaggcgtgttaacgttttctccgttgccagccctggagaaaatcgttgtttttttgtatgtaaggagggtttttctgagcttttttcacaaaggctctcaat

SEQ ID NO: 32545 - DNA, 2395 bp, Cannabis sativa
  modified_base (243)..(245): a, c, t, g, unknown or other
tggttttggcaccaacatggggtttgcaacccatacggagtagaaagcttcacaaataaaattaatggctaaaagcttgcttacttcctctttcaaggccgcaactctaacctcatcaagtaatctccttttttttcatttggcgggcacgtccttgtttaggttcagaacgtgggtgattacattttgacttatacctaccatatcggaatgtacacaagaaaatacttcttggttgtcacnnnggaactgaataacagccttcttaatctccttatttaagtgcttcccaactttcgtggttttggtctgttcatttaggttaagagcaatttctttaagttcctcaatggaacccaggttaacacagtcatctcccacgctagggtctatctcttcaatattagaaatttctcttgcttccctatttccacttcattatcattatttacgaccaacatctgggcccctggtcgggtttgtcccctcatagccacattgtagcattcacgtgcagctagttaatctcctttgactattccattcctggtagcagttggaaactttaaggccagatacttgattgatgtgactgcccccagcgtgtacaatgtcggtctacctaaaatggcattgtaggcagatggcaggtctaccacaacaaactctttcattcgggtgactgtttttggggtcgcctcgagtgtcaacgggagagtgattcttcctgtgctggctacgctatctccagtaaatccaacaaaattggtagtacatggttgtaggtcttgcacacttaaccccattttctaaaaggttatcttatataacaagttcacgctactaccgttatcgaccaagactctccttaccctcctgttggcgatttgagatattatcaccagtggatcattatgcggactttgtacatgatgagaatcctcattacaaaatgttatggtttggtcttccatttggcttcgcttgggagcacgttgttctagtgtgaaaggattcttatctgagttcttgagctcattagtatatctcttttgagccctattagtggtccttgcaaagtgtggtcctcctcatatgaccaacacgtcctctccttccacaagtggaggaatgtccgggttatgtcccggttgtcccctttgtggttgtgttggtgggttaggagcatagtttctgggtgccatgtgttgttgcacattggcatgtggggctgtaggttgttgagcattcaccctttgtttgttgtattgcctattccttgcatagttagcaagagggcgattacgtataagagtctctatcacatccctcaagtctcaacacttgttggtggtatagccaatgtctttatggtattgtaattacttggatggatccttcttcgcacgacttgctggttctggtatccgaaaggccacccgatgtttgtttgccacatatatggtttcttgtgtctccacaagtttggagtatattgtgaacatgggttggtaacctttactctttttgtgatctcctccattgtcgccctttctcttattattgtgcccagagttattggtggatggagggtgggcagttgttgcctttggattgatggaagttgttgttgtagtagctgaagcaggttgtgttgagggaagaggtaggttattggctaacctggcctcttcaatgtttatataattttgggcccttttcataaattcgtcaatagtgggggcacctctcccttggaggctatcccgtagtaaatatccatgagttacgcctgccccaaggccatgagtctcctaatgtcataaacattcttcaccttggccgcctcgatgttgaacctattaatataggcctttagactctcaccgagttgctgttttaggttggccaaggaagagcattgtgattttcaagacatggtggcacgaaattcttttttaaaatcactagacaattgtcccaagaggtgattgaatgcttcttgaatttaatgaaccatgtttttgatgctcatgtcaaggtcaccgggaataacatgcacttcagatggccactcacttggcttgtcctcattaatgtgttgaaatcactaatgtgggctcccaggtcagtacttccatcatattttgtcatggtaggcatcttgaacccttggggggagtggcaatgccaagatatgcggagcaaaaggctcaggttcctcattagattcgtatcgcctgactctcccttgggcattcaataactgctgaatttgtgattctaatgctgtaattcgtgggtcatttatcacaggagcaggagtattggaccggatggtggaggagcgttcacattaagctggggtgcatattctccttgttgtgaaggaatg

SEQ ID NO: 32546 - DNA, 1451 bp, Cannabis sativa
ccaaaaattatatacttgacttccaataaagccacataacgccacatggtgtagagctacgtaccctagtaataataatgtgtgtacgagacgtcagaaaaatatattgtactgaaataaaagaaaacattacatggaatgaaatgacagaaaaagttatgcttttagtagaaaatcaaaaacccaaaagttgaatattgtcctttgattacctttgtgataagctccatgaaaaagtgaacatctttagtgtaaaatgtaaaactcagctgataaacttgtaacaacatcatggaaatcttgggtataatgagtttgattcatttttactaatagagaacttttgggacataatctctttaatatggcgcttagtctctctccataacaaaaattaacaaaaaaaatcataacaactataaatttaagagaaacttaaatgaaatatttttatcataattttacttaaattttagcaacataacgactataattgaatatttttaaaaatttaagctattaataacaacaacaaaaaatctcaaacaagataaaacaagtgataatgactttgtatcgcaccattgtcgaacggaccttctcttagtctgaaagttagcttttggaccgccagcttgtgcctagatcctggccggtcatataagctcatcctagccggcctgtagaatcccactggtcggccagatatggtggtatgcatattgacggatcgcttaacttgtttcgcttgttacttgacgattttgtcatgccttgtagagagactttatcttactattggcaagactatattctacgtatactttgtcttggcttacgtggacatgccaagtcaggtaaacaaaatgtaaaaataaaaatatatatatatgtttgctttgctgaaagagaagcttatatgtgtgtatatatatatttatatatatatatatattatttgttcataaaaataggagaatggaataatgcagaggtcatgggtcatgagtgtacaactgcttccaaagtgcaatcaagtttttttttggaaaaaaatagaattgagggcagcgtatggagaagaagagtcgaagaccccttgccctaagaaattggggcttgggctgaatactaattggctccttttttttcaaaaaaaaaaaagaaaaaagaaactgagataatcatattatgctttttattattgtttttgttttttttttttttttgcaaaaaaacaataaaataatatataaaaataaattgattatatttttgttttgaaatgtatattaatcatgatttgatttatttcaaaagaaaatatatatttagttgatataatgaaaataaatgagtaataaaaaaaataagaaaataagaaaagaaacgcatatatttaagatattaaaattacatataattgaaatctttatgggcgactataaaca

SEQ ID NO: 32547 - DNA, 2859 bp, Cannabis sativa
ttttttttttagtttcatcggtacttatagttttaaacaggatacatataaaatcttgattctagattacttagtttagacgaaaatatatgcagtatcaattatttttaattttttttttaataaatttaaaacggagtctataaatttttttcataaaaaaattataattttataaacattgagtaattatgctattaagaaaatcatttaatttatatcacttacaaacttaaaattttaagtaattataccgctatttatccatttaaatattgatcatgaatgcaggttcacacttccaagaaagcatgtgtttctgtttacccaagtactgtgcagaatggcattgtatggttttggccaaatgcagatcccaagtacaaaaatattattacaaaacaaaaaccaccttatattgcagaaatggatgattcatcattttctcaaacaatattaaatagagaatttcattatgggtaagccattaagattttaataattagattacattttatgtaaaattatttatattattattattatatcattttgtgtatatttttagatatgaggtgatgattgagaatcttatggaccctgcacatgttccatatgctcattatggattaatgcaaactcgcatacctggtaattattataattaattaacaccttttgttttgttaattttcataagtttactcttcacatttaaataaaaaatattactaacattctattttataattacttttacaattatcaaaataatttatcaaatgtgaagttgtaaataaaatatttgaattgtatataacaaaagctgatcaatcagaaaagagtattttttttaatgaaaaataaactaaatgctcttacaaagttatgaataactatattaacttaccgtttaacaaaaaggaaaaccaaaatgttttgtaacttgaaaataattgttttacaattttggataacatgaccaattaaaataatatagaaaatatatataaaggttttcagattttctctattgaggacatgtttagagaataaaatttattagaataatacgaaacaattacaaaaacaacttgattttatacaaattaaaacaccttagatttaaaatgtaaaagaaaatatttaaacataaaagtgtaatatttttttaccaaaaacaataatttgtgtaaattttcctatcctttaaggaaattgtgcataattttgaccaatcctttttaactgaacagttaaaaacactaaaaagaattaatcaaaaaaatctattggaaaattaagagtaaggtgatacaatataagaccaagacacactcaaacacagagaaatgttaaaaggtagtatattggtgcaacacagagaaatgttaaaaggtagtatattggtgcttagtacatattgtttggtgtctgttattgttcggtatcatgtcttatataatttaaaaaaataatttttaaataatatcactaaccaattataagacgccatcaataaaagatactgaatattattggtacctaataacaatgcgcaattaagaactacatgatcagtttcatgataaaatttttctatatgcctactaatttttttattttatttttaattaattttttatttatttttaaatatgaactaattatgtattaatatttttctaaataggtaaggctgatagagaaggtggtatacctctaaaaatgactctggaaaatttcaacattaatggttttactggaatgggtgatcctggtttcaaccaattttttgcaccatttgttttctatagctgtgtgccccttaatctaaaagaaggtaataatgagaatagtaagaaaagggctttagcatttatatgtgttccaattagtcctggtagaagcagattgataataagtgaatcaagatgtgatgattggattaacaaaatatctccaagatggatatttcatgttctcttaaatgctgttttggattcagatgcatatctccttcatcttgaggtaataataataataattattacttttttatacttgcatatatactactaaatactaatatacttccacaacttatattacatgctaattaatccctaattagatgcaatttttataaataattttcataataattcaaaaaaaaaattacacttctaactgttgttttcacacaagaacattatttatgttgtttgcaattaatgcttttatatttatattatattgttttctaattactaataggtaaaaaaaaaaaaatagtaaaaatatatgtcattttaagtatgtgtaaaaatttattttatatatattcatgtataatgctagtaacttattgtgcaagaaattagtaggggatccagaaattttatttacaagaatgtagaaaagtaaaatatataaatttagggtataaatgtcaaaataatatatatctactctcaattctaaaatttagggagacataaaaatcaaactatacatatttattgtaacactaaattgcaaaaatacatagactaaacttttttaattagaaaaataaagagagggcaacaacactctcatatacttggatcgatcaacacatgaaattatatgaaaaacagaaacgctcctaccaatatgagaaaaaaatgatactcgtaactaatattgcttgttgtgttgaatgtaatgtaggagcttaaaataatggaagctggaattggaaaatggaataaagcatgttttgtgccaacaaaatcagatgctcatattgttgcatttagaaaagggaaatttgataaattatgcttaaagattagaggtggtgtttaattatac

SEQ ID NO: 32548 - DNA, 1386 bp, Cannabis sativa
catgttttgatcgatgttttttcgtacatagatggaatagtgtatacaactccatagtcatagataatttaatttttttactatggtgaataaaattgtacagaggtattgttgtgtcttattaataatatataatggtcccaaaagaatttgtcatgagttattagctatacctatgaacaataacatattttcaattcacttttaggcaataggagaaagagtgagtcccccaaaaataaaacaaaaggagtgactgtagtacataatcacctcttaattcttattatcttgacttagtgtatcttgaagacatggtcaaactgagtactaatcccataatgcaaaatcattcagtcatgtaattttctattattacgaaataattttttttgggtgatttttgttactttaggtttgatctaaaagagattgatacttgtttacaattagtattttatatttcgaaactgtattaacttgtcctcatgaatttaattaaaatttaattatttaattatatattactaaaaaaagttttatgtactaaatatgtttttcgagtaaatgcaaatgagtatatatacataaataaatatgggcacacatgcattactaataatttagaagagactggttagaatttgtactaaatacataggtatgaacaatagtcatgaaaatagatatggttatttttatctctcttttacaatggtattttgaatagggtgtcagagtatattagatatatatattatgtaaaatgtaaaatcatatctccatttatcaaagaaaaaaaaaagtcatttcgccagtaatgtgtattttaatagaattatttaacaggtacatcagaaatgagtggggggagctcttcgagtgaaatgaagcttagtcttaattttactcttctagtggtgcttatagcaacctatgcttcttctacttacagcagcagcagcagcttctgatgagaattagttggatcttggaattgtactactgtgtgtgtggtgtggcctatcctattattactttattttctactttaaattatatgttgtcatctggatctacttatatgtaagtgttggtcttgtttaatttctgttttgtgtgagataggtttctttaattaatgtactcaaatattctcactggagatatacgtatcaatgtaatcaataaaataaagatttgcttaattacaaatgttgccgccctaaaaattatatttgttgtataattatatgttaaatttgcagtaataattcaacgtattcgctttaccgttttaaattagagattttcttgtttgaagctaaacaaaataaacgtgattagtactttaaaaactaaagggaaatttgttgaaggtaggga

SEQ ID NO: 32549 - DNA, 1750 bp, Cannabis sativa
cttcttttctctctctgaaatactctatcctaacatggtatcagatgaaataaactgaagcttcaagcagtccacttcgagcttcaagaatcaagatcttccttctccgatcatggtgcgtactcgagccaccagttctgcaacaacgtctgacgatccttccagagttgaagcaccaatggctcctccaccatcaaccacttctgctgacaaccctccacaaacaaaccaatcaattcttgctctgcgtcgatctactccagtcgacagaccagcttatgaagacattagatcaccctactacatcagcacagctgatcatccgggcctctctcttgtcactccagttctctcggacaagaatttccaatcttggaaaagagatttcaagctctccattggagcaaggaacaagactccattcttggaaggtactctccttcaaccccctgcaaatgactctctttttgatcattggactcgttgtaatcaacttgttatgtcatggattttacattcggtttcacccgaaatcaagagtagcatcatgtactttgatactgctcatgaaatgtggaccgtgttaaacaatcgctttaaccaagctaatggtcccagaattttcgaattaaatgagacactaacctatctcaatcaaggagatgattcggttagtgcctattttaccaaacttacagctatatgggatgaaattcatcaattgagaccatgcattccatgtacttgtgctgctgctgcacaacacttggctcatcaaaatcatgaccaagtattacaattccttaagggcctcaatgatacatatcaggctgtgcgagatcagatcctacttcttgatccttgtcctgccttgaacaaggttttctctatggtaatcaaccaagaaagacaaaggtctcttggccatcgatttcttccccctttggctgctgcttcaagttcttccaacccacaagattctgcacctactgccaatgcagtctcgaagaacaaaagaccacggccacattgcacaaattgccaaaagccaggccattataaagataaatgttacttcctaatcggttttccacctggttatggcaacaaaaaatcagattctacttctactaaaaaatctgatttgaacaccaacaacccgcaagcttctcaagtcacatcttcaacacctgatttcacccacacaacttaacaccagcacaatgccaacagttgatctcaatgttagcacaacaactcccaacaacagatgcatctacatctgacaaagctatgatcaacaatatctcaggtattcttgaccctttcttgtggataatggatagtggtgcaacacaccatgtatgttgccacctagaatgtttttcttctattgaatctatccctactgacctttctgtccatttacctactggttcaaaagccaagatccataaaattggtactgtggttctcaactctcatatcactcttaaaaatgtattatttgtacccgatttcaagtataatttgatttctgttagtgccctcacacacaacacaaatcttgctgcaatttttaaatctaacagctgccatatacaggaatctacaatgacatcgaagattgggatagctaagagaattggcaacctatactaccttcaacaattagacaatgaggacaaatattcagtccaaacttgtaatactcaattgaataatctccaatggcatacacgccttggac

SEQ ID NO: 32550 - DNA, 4526 bp, Cannabis sativa
  modified_base (645)..(652): a, c, t, g, unknown or other
tttggtcttgaggataagttataatgccacagcaaaataaaaaatacaacttaaattatacaacaatatttcggatttgctttactttcttagagttagtttttgtatacttggcttgattttgttggtggttcttattttttttttgaaaaatagttggtggtggttcttattaatgtggtgatgttcaaccttagcattgtcttccaatattagtattagtttattgcattagcaggtaaaaagctttatgccaaacttcttatcaagctaacctttttaataatatattttggaaagttttatgaagcactcaaatggatgtagttataattttaatatttttatattacagtgtatattatagaaatttacgatattttgctgttatttaattttattttttaaaaaaaaagttgtacaataatttatagcacggaaaattaaatttaaataattttctatacacgctttcttgttttattatatttctcgtttgtgaaataaactgtttcaattctatttttacactataataaatttgtgactaaaagtgaaaaaattgtaactagttataaatcataattcttatgttgtgactaaaaggtccgtagttaaaagtatattagtcacaaaaattacaannnnnnnngactaaatatatttttagttacaatatttgttataactataattaaattagtgacaatttgtaactaaatactatgtttaatttagtcacatataacattttattgtgactaaaagttacatttagtcacaaaaaagttatgttgtgattaaaaggttgttactaaaaataacaatttttttgtagtgttattataaattaatttttggtgaaatttgttaaatatcttaagtaattataacattgtaatatttaaattcaaggaacattcatttttaggagtacacagataaaaccctatattatatatataaatttcctttttcttgattttggttacatgatataactggaaaaatatattcactcttaaaagacagaaccctgccgcagtatcccagcaagcttaattatgatcactttctatttacaagtttcaacctcacagtttattttattatctaaatatattacaaagttatacttatgtataatttagacagtttctttctatttacttatatatgtataatttacaaagttgtacctttcacaacagatttggattaggtatccaagaacggagtaccatataattaacatataaaataatcgaaattgatcaataatatacttatgttctcttattgttcttatatttatgtatatatatcattattacttttgttttgcttctttcatctcatactataaatttcagaaatatatcatttttgttcatttaattttattagttaatcaatataacaaacttaaatttcattttttttagaaaaaaaaaaatctaatcataattcattatattgccaaaatcaaacgaaactaataatcataattttttttttttcattttcttaatatcaccattttaaccgtcatttcaaggggaaaaatagttttgtgtataaatgctgtaaaacaaaatggttagcattatagagagttaatctagtttattaaaatcaagagagctataagctatacttttctttcataatttgtctattataatatatatatacatatataatttataagttatctaatatatatgtaacaaatagattaggtattccatcaaaaaataaataaataaaaaatagattaggtatctaagaaaataagaaccaagtaataccttaattaacacattaaactatatagtagaatggaataatattgataacttcatattgattctccttgttcttgtattaatgtcattactaaatttgttttacttctattatgacattgataaattacattctcccactaagaaatgttttgttaaatttaaatcctgccaatgaatgattataagtacaaaaggtaataatattgttaatgtattttttctgacattagcaagtgtgggaagaatcaatacatacatccacagaaagaaataaagcaaatggtagaagaaaaaaaataatgaaaaaatataaaattactcaaactatagctttagtctgtacaaaaagatgcactcaatcacacttggaagattggaaatggatcatcttccctttaatatattccttgggaatcacttgtcactgtcagaaaaagcctcatgtaaaatttgcattacaacttttttagtttatattattattatttttgaaaatttctctttcttctaagttttcagtgctgaggaaaaatcttctatacttgcaacctctttgttttacttggtagttactaaccatatggccttacttgtcataacacaccaatcactttcttataccaaattacagtaaaacaagtagtttgtatattttttcttgaattgaaaacaaaacaacaaaagagggaaaaaaaaaacgaaagaaaacgagaaactctgtcatgagaatctcttaaagtatgtgaaatgtacatttttcagtcatcaatcactttctgttatggaagttttattttgcccttgaattcaaaacaaaagggggagaagaagaagaagaattaagcatgagaaaaattaataaagatggtaagaatctctaaaagcagtcatcaaatgtaaatatttagttttgaattttactatgctaaacatttgggacagaactatctaatacaagtactagttagaaagaatatggggcacagtcgttcaaaacttgttcatttgaaaattttcaatgtatatgtatccacatttttatatatatttgaaaatagaagatcaatttatattattataacattaattgtgaaaaaatcatcaattaaaagtaatcccatcagaagtaatatgtactacatgaggattttgtttctattctacttaacaatatatattctcttgaagaagctgagggcccagctgctatagtgtaactctgttcttctttaacttttcttttttgatctttatgaaatttattcttctctttttttttttttaaaaaaaaagataaaccaagtttttcacattaatttaagtagattagatcaatcttgtcatcaatacgtgcgacatatacatgaaggaagtaataaaaaaaaaatgtcacaaagcatgaataaggctatgtttggtaaaaatggttgaagataagaatgaattagaaatatatttttgagataaagatgaattcgaataaaactttattaaaattattataatttttttttccttattatttcctttgaaaattattcctaccatatagtaatcatcgtagctacacaccaccaaatccatccaaaaatagttctcacatctctctctttcctcccatttttttcttcctagctaccaaacacaccctaaaggtcaccatatgatttaataaattgtatgcatatcttcaaacccaggtttcccccaaggccaaaactactcagaagaacatagtttttaagccaaattgtataattcatcgacttttccaacacacacgaaagatgagttacaataatactatatatatatatatgtgtgtgtatacgtactcgcgtaattatcaagcgaagatagagaggtaataatgcaactatttgggttatatgaatggagtggtcagatccattgaacaattttctttttcacatttggtatacagagatctcgatcatatatgaatgatgtataatatatatacgtaattatagatggatgatgataattataaaagactcatatagtacaattaccctttggaggcatttgaaaaacattacttaaaagggaatgaagtccattattatacagcctagaaatgacttcatttacaacaatcattagcacatgacaagggtgttaggaaaaacaaaactctttaatgatacaaggaaaatctcataggtgggctttcattgatttcttttgcacatgaaagtgttaatagaagttgtcatgtaattacatcatcaatattcacactacgagatttgagctaacctagcccaacaacttgttcaattaataatattttagtagagaattaagtaaaccttttttttttttctttttcttttttcatttactaatgttacttcataattttaaaactgtggattttaatcttttagagtgacatatgtgtaagtttctctattatgtacaatttcactttaaaatatacccattgtccagctctatatctctaattataggggtttgtgataagtacaagaaatatgtgatcaagttgcctattattgagttgcattgacaagcatatgagatcagctggctgccctagcatacatatataaatataaataatagggatttttatatgatataaaaaattttattttttttatgtaaaggtaactaattggttttgttgattatggttacaagtttcgtcatccgggaagctagttg

SEQ ID NO: 32551 - DNA, 1228 bp, Cannabis sativa
tgtttgcaatccctgtggagacgatcttacttatcactttattacttgtgtgactgcgtatacttgcgtatataattttcacaacaagaggggacactcaatttgatggaaatgttgaaagaagacctcctccaagacaatttacttgtgaggagatattagaacaagtcaatgctctcaaaccacaaatttgaggatatcatcaagattttaggagcgtaaaatatagaagagttgcggaagatggtaattagaggaagaaaagtattttctacgagcttgagtattggggaacaaacattttaaagcacaaaatagatgtcatgcatcttgagaagaatgtgtgtgacagtctccttggcaccatcttagataatgataaatctaaggacatgcaagacatgatttaaaaaagatgggtgtcagagaatcgttgtggatttatgaagataggaatggaaggttaatgcaacttattaaggttatttttatgaattttttagagtccaatttagggagtgttgtaggaaaaatgtttggagatcttcaattgtagtaattttagtgttcatcaagtctttttgagtaaaaaagagaatatctattgaagaaaagaaacttcttttagcttggagtaatttcctatttcttaaaatgggtgaaagattgcattttcagcccttattttcgtggtcaagagtcaatagtgaccactttctaaaaataaattaaaatttctatgttttggatgttcaacatgctccttttgtgtttgaaaataaagtctgaaacttcaagctaatttttcactatgatccattaacttttaggaaaaactttcataatgaaagttctagatctctcttttatctttctaaaacttctttaatcgtctaattcctagttatattgagagagttatgaccaaaatactattagtcgtcacagtaagaaattgaaaatgggaaattgcaaaaattagtgcagaaaatgggaaattgcaagcaaggttgcggccttagtgagaaaaaaatgagaaacttcaatttttggctcaatttaaagggggttgatggcaaagctttgataccattcaaaaattaagaggactctgagtgtagaaggagagcaaggaatagaaggcaccggtggaggactccaaacaatgttctttctcttccatctctatcttttatgcttttttattgaatttcttttgttttagaat

SEQ ID NO: 32552 - DNA, 4238 bp, Cannabis sativa
  modified_base (419)..(420): a, c, t, g, unknown or other
  modified_base (1557)..(1562): a, c, t, g, unknown or other
taaaatccattcatctttgaatttagttgtagtaatgtaaacttctcaactctcatagcaatcacttagattcacttcatgcttatttcccttttgctttgagaattaattttctccctgatttgagtcactatcgctaccatatgttcttcctttgttacttcttttccaaaaataacagtctcttttgaaatgccccagtttaccacagtgatagtagccattaggatctttctgtcctcttgatggagacatcccctttccatgtcttccacccttgtaagagtctctgttgttactccttcccctattgtactccaaggcttcttttgtttaggccttcctatactcaagtttagcttaccattagagctcctcaactttacattcttcatctctaagtccatagactttagtgnngagatgacttcatctagggtaataaaatttctttcatacttgattactatctttacttccttgtaggattctagtaatgagttgagaatgatgattgcctggttttcatcactcaatgcttctccttctcccgagttagccaaatctatatgcgtcttcagaaattcatctaagttgtcttccagactttaagatctcttcatcttgtagccgaagatcctttccttgagaaaaatcttgtttgttagtgacttctgttggaatcgctccttcaacttcgtccatatctttgttggagtttcttctttatcaaccaacctaatgattgccatcacaggttgaatatgataatctgagtagctgtttcaagatactcttcttgttgtatcttagatgttccatctagccattcaatgggttcttcaaagaccctcaacaaattctgttgtgccagtaaagatcttatcttcctcctccatattctgtagtcacctgatccatcaaacttatcaatatcagttttaagactacctatattgtatttgctaaaaattaaatcagataaaggtttagaattttttataggatcactcaacgaaatgtcctccaaatctccaatatctaattcttcctatcaattgtcatcttcatgttcttgaagataaaattcctcatgttcttgattttcgatatcttccagacttgcttcttgaatatattaatttgaatctttatttgcaaaaattaatttgctttgataccactgttggaattttaccaaaatctgcagtttttatcccaacacaactttaaagacacaaattaatacaagaattgcaaaaaaggtatttttctaaactttacctttgttgtgcatccacaacaaaattagtattatttaaaaaatggataattacataagggaccatgtaaaaaaaaaaaaaaattacatttttgcgttcaaagaatttttttcttttttacatttttacggctttttatagaaacaacacgaaaacaaccaaaaaactacataaaagtaacatgaaaataacatcaaaatgacaacaaaagataacatacatataacaaaaaataaacaaaaaattaacaagagtacaacataaaaagaccgtnnnnnntgtaaataaaatcaaaaaaaccgtaaaaccgtaaaaaataaaaaatattttaaaattctgtgaaaccgtatttttgttaatttttttattgtttttgtgtatttgtgaaataatccctttgaaaacacacacacaatgcaaccttttggtttcaggcccaacacaaatcaagagctcaacaatcaaactttatacactatagtgaaccacaaatggttcggtcagaatctcatacacgaccctaagaagttgagtcaccaaagagtcaaacaagaccctcatctttaatcaaacaagttcggtcaaagcaaaaaagagtcaaaaacaagactcatcttttcaaaaatggtggtcggacccaacaaaagaaatgcaacgcaaagagacaccaagaaaccctaataagccaaaccctaatatatatatatggtatctttctctaaccctaatacttcggcagtcacaatacttcttcaccgaaaattcaaactttttcaaacttcttctctcttcaatagaaatagcaactagggttttctcttaagggttatgaaaatattctattcttcttctcctatttcttttctccttttacgtccggacctagagttgtaagatttcttcaagctctcttcttcttattctaatgatagcaagatttctaaatgggttttctacgatttcaaaaaattatttttttcttagttacagccacacttcttaatagggttagggttctaagattttccttgttcttctctacatgttctaccaaaaacactaatcctagaaaaatcaagtcttggtctaaacacactaaacccgaaagaaaccaacctagaaatctctccctttaatcttggccaaaactcaccacacaaaaacccaaaaaaccaagagcacaaacacacacaaatatcagaaaaataaagagattaagatgagaaatacaaatagaaatggtaaagatggagacaccaatttaatctcggagttcacccaatgttactggctacttctccgtcaagctacctcggagcttgaatccattcatcaacaacaggttacaacctttttgatttacaacttttgatttctttcttattttctctcgttgaaactaacagatatctctcttttgtttttccttacatgaacacacaaaggagctatgcaaagctctctaggaggaactctctcaactaaagcactctctcaaaaattggctctctcttttccttaatgaaaagaaaaatgtatcctttgaatagactatgttttgtgactattgatctagggagggcagagccctagttacttatgttgcatttgttgcaactgtttttgtttctttgatttgatctgtttctgttgtaagaagtgggtaaagttgtaattttgtaacccaatcaataacaaaactgttccaatagtaactttagatactaaaataatactcaaagataatttagttagggcaataaaatacaagctatggaaaaaatagcattcggaaaccaattaattgcatatattttaaaaccaaatactaaatgcacaaactagttactagcatatatatattttttaaattccacatgtcaaagcaatcaccatcatattatatcaagttaaggttcaaggaaaatgtgattttactattaacctacttgccaaaacatgcacatgcagaaagattcaagaagatgaaatccaatgtagacataaaataggaatttttgcaaaaagaggaatataaacttgtcactatattgttgactactacaaaatagcaataattaaagcaacatatgctacaattatacatcctctacaaaatgaaaatgaatggaaattacctgaaagtttacaaaagattatactaccaccaaaatcatagaatctaataagaagacctaataaaaaaatagagtgccaaaattggtaatgacatgctcaagatgtagatagatcgaatacaacaaagagacaaacaacaaaaatactactcatttcaaaaaaaaaaaaaacaaagactacatacaattcatagaaactagtcactttgctataatcataattgataaatttcgtttcaactttcttaaaaattaaatactttgtactaatgacatttgatatattttgatacttaaatttaattgcttgttactattatgtagatacatactactacaaaattaccatatggcttcggtgttgataaaattcacaattgaaggcattccaagagaagtaaaaggggttaaaaacaaaaaggcaaaagaaatcttatggtttcgattatttggctaataaccaaagtcagaagaccgtatatgctgatatacatccctatggctttatggcttcagttgttagccaaataactgaagtcattggtaactttttttttatagtttatatatatttttatttatttccagcccaagaaaaaatgattaatattgagaaagaaagattgatttaacacaaataactcagaatgatattaacaacccataattatattaacacaaaaaaaaattaaaaaaaaaaataagagaaccacccataaacaagaaaaaaaatggtgagatcacagaaaaatacaaagagagagaaatatatatataaatcttctacggtcaccagctgggctaagagacaccgaga

SEQ ID NO: 32553 - DNA, 6905 bp, Cannabis sativa
  modified_base (1262)..(1266): a, c, t, g, unknown or other
  modified_base (6207)..(6217): a, c, t, g, unknown or other
  modified_base (6299)..(6301): a, c, t, g, unknown or other
gctcttccatctatatatatatagatatatatctaggtgtcaatcgatatatacatatatatatatatatacatgatttacatataattactgacttttacaaactcccattggtggccagattagaaggggagtcaacacacattcaccacatccagattcagatgagcaatctccatactcagttatcttcgggttcccaggcaccgttggatcgcagatttcgccacattttttagtcgcctttataaatccatccacatggttattattgtctaaatctgatgagtaaagatgaagaagattatcattgttattcatgaaggctcgcggcccagctgcataactagtagtgaataacaatgataaaacacatatcatcatcatcgtaataactgagatgatgatgatattgacttcttattattcttactaattgtatactccattattttttatttggtaggatattttctatcacactttcactttactatttatagcacttgaaattataataagtaagacacaagttatattatattattactagttattagggttacacaaaatacaataaatacatgtagtataaagtgtaactactttcattattattttcttaatatgtgtgcactcaaatataattttgtgattgaggtgtcattttttatttatcaatttaacacttacacaaaatacataataagttacctttaatgatattttttagtcaaaacttaaattttttgtgatgaaatgtgaattttggttaaaataaaaagttatttgtgactaaaacatagtatttaaatacaagttcttactaatttagttgtagtcacaataaatattgtgactacaaataaattttaatcacaacaaacttgtgactaataccttacgacacaggtacttttagtcacaaaataagaataataatgatttataattagtcacaacttttttacttatagttacttgctgtgactaaaggtaaaaaattttgtaatgacttactaattaaaaaaaaaagagcacttatattaatttaagtaaacaaacattataatttaaatacaatttcttcgtgattatttcatcaataattactgtctaataatatcatagatttgtaaagtgaataaatggagacatatttttgtaaagagcattgctattaggcaccaatggcgcttaacactttctcgacatgtcgcgttgcgattggctagcgatattccttaaaagttattatattnnnnnatatgggacccgatacttagttgacccaataccgattttgacatatagaagggtgttaggcaccactagtgccctttaacatttctcttttgtaaaatctggtttcctaagatacaattttttagaggtaaaacatactaaaattataattgaaatgaaggttttttttttttttgtaaagataattgaaatgaagtgttgaagtacataatatataaatacttaaactacttagtgttggaatttgcaaatatattaatgaccacctaggaaatatatatgaaataaatatgtatgtgactcagaggtatatgttaagaattaaaacattcatatttatcatgtacatatcctcactatatcgattttatatatatatatataaacattaattaaaatttgtcatactaaaaatatgtatagtacacatctttattaagctttttacactactagtgaacctttaaaaatacttaataaggtagacatattagtttttaaaaagtatcgctaatcaatttcaaagcaaaatgtttagaatatgtactagaacatccagcatcaatgcttattatttgattatccgtttcataaaataaaaaactgtaataatttaatatatattaaataataatatataaattattttaataatatttaaatatgcttattattagagcattttcagaataaagattgctataaacagagaaaataatatatattatattttgagattatttgaacattttcttttggagatgctcatcaagtttttgctagaaaggattttaacatgccatatattatgcttcaactttggttattataaacactttcttttcgcttggataagtttcaattccaatatttgtgaaaattgaagagatacaaacaagaaaaaagaatttatttttgcatgcatttgacattattgcatcaattatattatgctacatttattgcatttcacatatcaatgttgcatttattctttgttgtttcaatgtttacaagggttcctaactttttatccacaaattttataaaatatggctatgtattgtatttttttttattttttatattaactttagcagaatatctcaattacttaacagaatattgcatagcttgtacatattttgttaacaaaatacatagagctgattcatccaaaaaaaaaaaaagttgcaattattcttcattgtgttaatgtcattggcatttacgagggttcctaactactatatccacaatttgccataaaagtgatccttacaaatagttagcaatattctataaaaattattaaattaaattgtatagaatccgatacttaattataatactaagaatataacattttaggtagtgctaaacaccattagacgtacgtctttttgaatttctcgtttattaattactaaaaaattggtaacaaaaatacctatcaagtagatttatttttaacagtacttaaatacaacaaatgaaacttgtttagccactgttatctttatttttaattaaacatatttatataatttgtacatgtttaataaatactttaagcagtgtgaacatttatatatgatttaaagtatgttcaattcaatagaaacttatatatatatatatatatatatataatttccttcaagtatatatattggaatttaatgtcacaattagtgtttaggtcttattgttataattaaagtcaaattactagaaaaggactcttaacactaataattaggagagggttaggtttgagctcaaaattattaaatgagactagagaaaacctatataaatagttaaaatatgtgcatatgacttcattatattcattctctacttgatcttttctatagttatttagcagttgcttaattaatttctctttcctttatacacgtagttatataagtcaaaattttctttattaaagctattatgttatctctcaaaaatccgacgtaaatatacatgaattttgttcaagatatcaaggaagttagtaaacgaaatggatatcgtgaagacatggtactacaggggaagaagcatcactatgagtaaggccaaccctactactagctagtagggttgatggccctacgtaccaccacaagaaaggccgatcttgcatgaccatggacatggccaactcttgtgatgggacatgctctcgtaacgggacacgttgtcgtgatgagacacgtgtctgagacgagatacaacttcattaattatgagacaaacctccgtgataagacaagactgaccctctgtgacagataccacaagagccaaccctccgtgaccagccacaaggtcgagcctttgtcatgagcgacagtgccaaccctggtggttcaccacctacactaggtgctcgtggacatgacgctggcgagatacactcacgtgctaggtcacgactcacgtgtcactaggcggcttacgaaatattctagatgcatctccaaatttattatttgttataagatatctattttaaatattaattatattttttattataattgaacttataaccctagttaagtaaaacatgtatttggttaaaataacccctaagccatgctattatatgttagcctataaataggtcactcaatcaattgtaagaggagactctttctttctcactctgaaataactctgaaaaatagtcacttaagaataaaattttcaatgaacataattctagagaattattcttaatcatatattgagattaataaaattataagtggactaatctattaccattgaaattggatgcgaaccactataagattcaatgttcgtcattgtcaattttctttctacaacgatttatattttttaatttgtttatcttacttatttacgattttttttaaatcagttaataaaaaatcgcattattgaattccataaaaaataaaaacttgatgataatgcaatatactttgaggagaaaatcattaattacctaagtaaattgtatagagtttccattattcattctcttgagagacaattacctaccaaacaaaaataagatcatatatatatgatctctttcttaattaattgttaatttttttctaatacataaacatgtagtccttttcctttatttagtgtaaaaaaaagtaaataatattaatcaaataataaacgcattctttatctgttgtggtatacgaatagggctattcttcttatccaaccaaattcctgtggcttttgtttccaaaataggctgcacacacacatacatatatacataaatataaatatattatataaaaaaaataattaaatattagacatgatcatgatgaaaataattttatattcacttacatatagtataagaaatttctagacccctaaaaagtcgttctggtagattctttattttttagactaattgtttttttagggaaattacttcatatataattttgttaactttagttttatcaaatttacggtttggatttctaaagtagtttctccggtagtttctatgtgggttgtcatacggattttagttgcgatttataagttgctccggcagttgcaatagaggtttctatgtagaatttcgtaaaaataatacaaaaaaaaaattgttttgaagtgtaaaaatgaaaaagcccttttttttatgatcgcaaacattgtagctatttaaaatcacttgtaaatttttaaaaaaatttgaataatttacagtgcaaaaaataaagtttaaacagttatataccacacgtattagaaaagcagtcgcagttgcaataaaatatgtaaattttattttcagcattgtaaactatttttaatttttttaaaaattcacaagtggtactaaataactataacgtacataaatatttaaaaaaattgactaaaaatttctcttgtataccgaaacagattaaggatctgccaaaacacttctttaaaaaagtgcagtgtatacttaccctataccctatagtaagcataatttttatactcatatcttttagaaatatataaacctagctagtaatctattttggtataaataaatatatatatatatttatacctcataattgggaagcttgacaattttgtgctcaaagtatacacgagcagctgaaattctagagacccttaccttcaccacaaatttatctccactctaacacaaaacacaaaattaattatatgattaataataataataatagattagacacatgcatgctcaattattattatattaattaggtaattaattaattagacatactcttaaaggtgaaatgaatttgattgacaaatctgaggtggctaatgtttctccattgcgagcaactgaatcacagcttataccaattacacttgccataaactcatgagtacctataattatatatataattatcatgtgtagcaaatcacaaagctagggcatgcacatagtacgtaatacaaataaactttatatatacatatagtggtgaactagacctgtgcttaaggctcacctaattaactcagagtaaaaaataaaaattgtccacttttaaaattgtatttttttttctaaatgagggctcaaattttttttttctatggcccattatatttcaagatcgatgtacatgtactacaaatcatttatatacatagtagaagagccagaataaaacattaaaataaggctataatataagttttttacggctaaatcctctcaattattattctatttgcataaggttaaattttggtagtaaaaccctctaaactactgaactgttagcaaatttaagtgtcatttattcttcacagttaactgagatggactacttatgtgtatactcttgtacatgtgacatatttatattagtacacctaatnnnnnnnnnnnaaaattataaaaattattttaaatattttttatttataaatattttaatttttatttatataattttatttaattttaaaannnattttgaaataataatattagatgtaccaatataaatatgtgtttagtattttgaaaggttttaccgccaaaatttaaacttagaagattaagtgtcattgaaacgataactgagaatatttagtcaccaaaaactccgaatgcattgacagtatataatatttagaataagcaaacatttattctacatagttattttttttatataaatttcaaattgtatactttaaagaaaaagcataggcccgcaagagcctcacctccttcattggatctgccaccaatgacggaggcacacgtgaagactgggggcctagccttccctaagtcaaatttttgtttttatatatattcatgtataataaatgcaacaaaatatatataggtattaacaattagcccccctaaactagttttctcacaatttgcccccccataacacaatttctctctccatcattgtttatcacgtagcatgagtaaacctagggcctgtaaactagggttgcgtgtgtgggagatgaatatatgggatcgaatctcaagtgtgtataactcaaaagatataaaatataaagacgcttctataaaaaaaaaaaaaaaa

SEQ ID NO: 32554 - DNA, 4938 bp, Cannabis sativa
  modified_base (4490)..(4499): a, c, t, g, unknown or other
agcccttcctgttggaaaggctccaatcaagtcaattctccacatggcgaaaggccactggctggtcatgcttgtgagtttggctttgggatgcttgcagtagctagcatgcttttatcacattttattacgaatgccatcgcatctctctctagtctaggccaatagtatccttgttttaataccttccttgacattgaataccctcctgcgtggttaccgcattctccttcatatatctcgaacaacactcattgcgcctcactttcttttatgcagcgcaggagcggcgtggagtatcctctcttatatagaactccattcattaggacatacctagcagttttatactagattcttcgagcctccttcttatctgtaggcaacctcccctcttggatgtactcaatgtatggcgtcatccaagaggtgcttcctcttgcactcgcaacaccaggtcacactcaatagttggttgggctaagaattccactagtatgcattctagaacatcgacttcccgagttgatgcaagcttagctaaggcgtcgacgttggcattgatttcccttgggatttcctcaatcgtgaaatgttgtagctattctagataactcctaaccttggccaagtatgacaccatctttggcccttttgcttggtattctcccctcaattggaaaaccactagctgcaagttgttaaagattcgtagccgcgtggccttcaattctttggtgagccttaatccaggtagcattgcttcatactcagcttcgttattggaggccttgaaacaaaaccttattgtgcaatgcattttgatttccccaggtgctgtcattacgaccccagcacctgctccactatcgttcgaggctctgtccacatgcaattcccaaatggactctccttctgcatcagttttgactcttcaccgatctttcccttggtcattctcatctggatgataggtgaattctgctatgaaatctgccatcacttgtctacggattgacactctcgagggttgtaagatatgtcgaattgacttagctctatcgaccatttgagtaagaactcgaggttttgggtttgtgcagcacttgccttaaagggtgattggtcaacactacgatcacatgcacgtgaaaagtatggcttcaacttttgtgatgccacaataagagcgtaagccaacttctcgatctttggataacgagtctcggcatccacaaaacgcttattgatgtagtacacaggatgttgttgcttcccttcccctcttacgggggcggcacttagagcgtgttcggaaactgccagatatatgtacaacttctcaccttttctagtttagccaacaaaggtggatttcccaggtgttcctttaagcttgtgaaggccttcttgcaatttttgccccaataaaattgtttatttcctttgagggtatcaaagaatgagagagatttatcgttggacctcgaaataaacctattcaaggtagcaactctcccggttagacactgcacctccttcctgttcttggatgactccatatctattaatgcatttatctgttcagggtttgcttctatgcctctctcgttgaccatgaatcccaggaattttctagaggacacaccatataagcacttcagtggattcaacttcattcgatatttgcagagggtggcgaatatctcgcttagatcctgaattaaatccttggctttcttggtcttactaacatgtcgtcgacatatacctccatgttgcggccaatttggctagcaaacatcttgctgacaagtcactgatacgtcgccccagcattcttgagtccgaaaggcatgacccggtaacaatataggcctcgatccacaatgaatgaggtgtgctcctcatcagcagggttcatgggtatttgattataccctgtgtatgcatccataaagcaaagcaattcatgccctgcctatcgcatccactagctggtctatctgcagcggcgagaagctatcttttgggcaggccttgttaaaaattgtgaagtcaatgcatactctccattttcatttggtttgggaaccaacacggggttcgatacccatttagggtaatattcttctctgattaatttgatcatgttaagtcggttgacttcaacctttaaagcttcgtacttctcaaaatttaaggccctccactattgccttactggctttgcattcagatctatgttgagatggtagcacaatccttccatatcttcatgcccccaaggtacgtctagattattttccaaaaactccttcgattccctcttaagggttttgagaagctcttttctaattttaaggatcttgggaaggctctccgagattactatttctcctaactcctctactgactccactcgcacttcctcacaaatttaagggtctagctgtgatgaaactttgtcgctctggctgggccccccatgggcgatcatcgtcgttggttctcgaggcttcatgataattttgagcgacatattatagcattttttagcttcattctgatcccctttgaatgtagcgatgcccctaggggttggaaatttcatggttaagtggtacatcaagatgaccgatttcaaccggatgagcgatggtcttcccaggacaacgttgttagccgacagacaatccactacaaagaaggtggccatcaccatggaatgttggtgtgtcctccccaccgttagcgtcagttctatcgtccctcgtagttggattagttcttcagtgaacctgtatattggtgatgtgcagggtttgagatccccaaggcccaatcccatctccctcagggcggtgtagtataagatatctactgagcttccatcgttaagtaatgtccagtgcaccaggtgttagccatctgcaccgtacgcaccagtgggtcattgtgtgggagatgtattcctcttgcgtcctcttctgtaaaggtgactgaggtgttctccctcttcaaattcttcagaggcctccgctctaaattccaggagtgaggttctcgccttacctctctggtgtatctgtctctcccccttcgagttttgcctcctacacaaggccctcctatgattattttgacatcttccaccgctttggggactctactgggcactctttgtgggttcgctttgtctgttcatgccttgttgatgttcgcatctcctttgctgacgatggatggcggcaggtcttgtttcggtgcaaccaattgttctttgtcaaggtgagtttttgtatactgacggcgacgagagtgtctggtcatcttgtatcgattgtgtgaagaagaatgacttggcttgagcttgtcgttcccacagacggcgccaaactattgacagtgagaactcgtcaactaagttagtggtttgaaaatacaaagttacccagaaatgtgataaagatgaagacagagataaaggtgaaaatgcaccttaatattgatttctctctctattgaattcaagatctgagttacaccaaatgtttttccaacccctttcacatctgagatgtggggcatttataggctctaatggcatggtgtacaaagtgatcccatggggacaaaagtcattttcccactacatgctgcaggtgctggaggtagcctggcatctcatacccttatttagtatgagatggtctccaattgcaggttatagctaagtgaatggtctccgggtacatgcacgtggtcctcggttgcacacagggtggtccctgagtacaggttgtaggagagtggttgcagcgtacccttgcttgggtcgtcaagccttgccgttctattatcgccgctacttgtacctccttgtttttagtcttcagaaggcgtggttgtatgcacttccacgccttgtcctttgattcctttataatatcattcttatcgtcatgcattctctctttcccatatcctcgcaccccctcctcaaaacatacacactccacgcacaccacggcttgcatgcgagcccccccatggacttgcatgcaagtccccatctcttccccttcacatgctcgtgtgtgagccccacatgggctcgcatgcgagcctccatcctccgcacaaggggtggcaaaatgtatcatcgtatcgtgttcgtatcatattttatgtgacccgtttttatatttcgtatcaagtatgtcgactcattttttgactcgtgtctaattatctcaaccctaacccaaactgtaaaaaatcgtgtcgtgttcatgtcgacccactgtcacccgttttgctattattgaagctagaattatagagaaaaataatatatttaagctctattagaaaacttatatacatttatgtatatatagtttattatatatatataataaaaataaaaaaaaattaaaataattttaatttcatgttgaagaaaattaaatttaaaatattttaannnnnnnnnnaatcactaaatatatatttttatataattatattattattatttttttatttattatatttaaaaaaatcgtatcaaacgtgtcatattcgtgttaagcgggttatgtcgtgtttgacttgtttttattttatgtaaagtcgtgtagatccgttttcgacccgcatctaatttttccaaccctaacctgtaaaattcgtgtcgtgtgccatgtcgaaacctatttttccactgctacttcgcaccatgttagctctcatcttctcccaccgtgccaactctcatcaccccaagactaacgctcaccacaccaaacacactctcaaggttcgcatgcgagcccccatgctcccgtaccaagattcacactcacaacacacaacacccacttgcacggctctacaccacgcacccccgactcacatgcgagcccccatgcc

SEQ ID NO: 32555 - DNA, 1948 bp, Cannabis sativa
cttaatttttggattatcacggttggctagtttggtctcacaaatatcaatagattttctgatgtagttgttgtccaaaacatccttcttcttctcctttatcatatttacaatttcagataaagatttatcttctagttctctgccagtgagttccactgcagaggtcaaaaatgcattcccgtaatacccttcaggcaaaggagggtctatgagctttctcaaacctgtagcgaaatacaaacatgtttttccatcatgattgagctctaaggctctcagtctggctttccaaacaaaggctgcaagtatttcaaaggtagtaacattactgggagaaccaccactaattatctcatctttgagtctcttcatggtatcactctttaagtaaaagatctcatctacaatgtcagaagagggcatgtatggtgacgtagcaggatgacacatgctaagcttgagagactctttgttgggtgttcccacaagtctctctctttcccataccggcttcactgagagctctttgcctttggaaagctcagccaaggccttgaagatctgagcagccccaaaaccatcggagaccatgtgagatattccaaacccaatggtaaaacctccacaagagaatcgagtgacttgtaggacgaaagggcaatcgcttgtaggagaagggaagacaaagttcttgcccatctcgaaatcaatatcatccaagtaattaagcgaggaaagacaacagttggccgtggcgaccaaatagggaacaccagtagcgtcgcaagtgagttgaagccttccatcgtggtctagccgtttgagtctcccggctagagggtagtaatagacgagagcatcagagacagcttgcttgatcatctcagttggatcgacgccattagtgtgatcatgttgggccttgtatacgtagatggctttggagaagcattcaaggttggcctcattgtcaagagtggacaaagagagaacttccgaaggtgtggctttggatggcttcacaagctcaacttcctcctttacaaccaaaaattcagtagtgttgagttgaggagacatggcaataatattgaaatgtttcgatgaaattagaaataagcttaagaagtataatatccaatatgggctatatattgtggtatatagtgaatggtagagtagtaagtagaagtgatgatttcgaatatggggaattatctctcttatttatactatatatcagctgcatgctttccctagtgcaaatgtgcgtgtcttttaactttgcatggttggtgggtctgcttagtttggtgtgctatcttcattttttgacttgaccaatatactcatcatatgtttatattatttatccaattggagtgtaaagtttttaaaaattatattttggtcaagaatggttggaccatggaacattataacatatatggttaattatagatgctgtaatttctgggaaagtgcatggcttctaacttgaatcttgaataaagatgagaggtggattttaaaataaaaaaaaaaaaaaaaagaatccaagtcattattataattccacactaaccatctccgtacgtagcgttctgacaaaacaaggtaacgacatacaaatatctaacagttctttgccggcgctatattcacagagttgttattaaatccttccattacactattttaagttctaatggtctttacgcttgcaaaaatgctaaaagctaccagtagtctaagtatcggattttatataatttaacataataatgttaagagattatcgttagccaatcgcaaagcaacataaaacatgagatcatgtgggggagcatgaccccactcaactttttaaaatttatttttttgtatgtatcatatatatatatatatatttttaccccataattaatttttcattttagttttg

SEQ ID NO: 32556 - DNA, 1801 bp, Cannabis sativa
  modified_base (1596)..(1608): a, c, t, g, unknown or other
tgaaaaaactaaaaattcttcaggaacacgatcggacccgaaagaatatttatgaaattaaagtctacattttacgtgtttttgatgcttgaaaccaatatggatctcttaatttcttcatttagatcattttagaatcaatttcatatattttagacgtcgggagtgagttttacagtcggatttttgattgggtccgaagaaccagtgtgtagaaaatcgggtcataacgacccgaattgaggttgaagacagctcaaaacgacatagcatttttggtacatcaagagaaaatgacacgtcgtttgtcgaagattcgaaatcattttgagataaaaaataacatattgtttttcctatatgatggaaaacgacatgtcgtttttaagggacagctttcaaaaaaaaaaggaaaattaagaaaaatttaaattctgaaaatttattagtttgatttattttgaaaattttattttatttccttatttttgttaatttagtcaattaaattatatttatttaaattttctatttttatttaaaacatgttttcatatatgttatttagtaaggaataatgataaaaataatttaatttggtaaattaattacatgttttatttttacatgtaattataataattgtaatattttaagaatgtgaatatatatctgaatattctacaattaagtgtgaaattattatatttatttatcaattaagtaatttattggttgaattaattgataatctgccattaagtatattatttaatttttgcatttaattcattttatataattaaattgtactaatttctgtatttatcttatttatacaaatttattttttggtacaaatatttaagatattatatggttataaatgcataattaattatatattatggattgatcatttaatttattatcatacaatgattgtattaatttgtatttattttgcaaatttattattagtacaattaatttagatttgtatgatttaaatgttatactacatttcatatatagtgctagatatatttagaaaatattaaaatattaagataggttgaatatattatttagcacattaagtttcataaaattttcataaaatattcataaaacattcttaaaatgaataaaatatgaataaaacgtaagtaattttgtagtttgacataagaaaacatgaacctaggataaatgctcatatttagaacagtttttaatgatcttcggacgaccacactaggagcattaatctcaataattgtctattatgttaataatgaaattatttttaggtagagcccaatacctaatgtcatagtaaatatatattttatataattagggagtaaccacaacatccttattataaaattgtatattaaataaaactcaccttaatgaacataacttgtaattaattatataagtgtaataactttactctacaaggattttattatatttatataattaattaggataatatattaaattaaattctcttaatttaccctacaagaagttatggggatttaatttaatagtgttatcacaaatttaaataagatagataannnnnnnnnnnnnttcctaaactaattgtttaattaaatctatcataaggttaatctaaactttcatcttcagtttatactttggtgtctagtgaaccatataaactttaataattaaggagcagcaacaacatctttaattacataaaattatattatattaaatggatcaagatcacataatggacatgaattataattaatta

SEQ ID NO: 32557 - DNA, 1280 bp, Cannabis sativa
gcaaagctattattgccatttacagatgacccagtacccggcccatgctcagtccttcttcaatactgccaatgttgtcactggtgtacgaaacttccctcgttgtagtgcaacgatagttggtatcatgaaggtactagtaacttaagtattttatttctttggctatgtttgtatttgtttctttagaagattttttcttttttgtttcttttgttgggagaactagttaagtgaatttattgtattatatttttaatccaatttgctattggaatagaaaaggtcttcatttgctttgatttctctactttgaaatcatatatttattcaccctacccaactcataacgattttaactgtcttttgtaagataaagcttatagtccatattaagattggactccatgttataaaggaaaatttaaaaataaagaagaaagatagagtaatgaagagcatttgaaaataattaataattagcagaaaaatatatttatatatataaagtcaaattctagatggctggattaattaatgaaaaatacgtgtatatatatatatatatgaaatccaatcaattcaattttgtgccttttttaagctgtgtatttttaacacatcaattatgtataatttcctttcccacattgatttttatgactaacaagtttttttttttaaaaaaaaattacataatcatacatagaaacaagttttttcaataaaaatttatatatgttactatgtaaaattcaatttcattgatatatgtaactggtttttatattttattgtgtcatttttatttgtacatgactttcgttgtatttgttcttgacttattttaattgtagtttatgatatgagattttaacatttagtttttgttatgatttgtatgagtttacaagttttgttattgtttcacaggttttgttatcattttgcatagggtcaaaactagtttcacagggttaacaactttcagattcgtttcattgattcgaaactagtttcaccgagttcaacggttcgaaactgatttctctgggttcacaagttcgaaacagatttcacatgtttttattttaagtttccttttgatcattttgtttctagattcgaaatttgttcacatttatattttatttttagatttttgttatacattctgtattgttttgattatatttgtgattaatatttttttgtatgtgtgtgtgtgagagtctatctttcttcatttttttgcctgatgatattggttacagttaact

SEQ ID NO: 32558 - DNA, 1731 bp, Cannabis sativa
  modified_base (26)..(50): a, c, t, g, unknown or other
  modified_base (117)..(120): a, c, t, g, unknown or other
  modified_base (619)..(620): a, c, t, g, unknown or other
  modified_base (1501)..(1502): a, c, t, g, unknown or other
cttagttggttatcttatttttaaannnnnnnnnnnnnnnnnnnnnnnnnaatttaaggtcaaatattttatattttaaattattttattaattataaaatgaccttatttaaaatnnnnaataagattattttaatctagaaattttaaaatataaccagatattttgctaactttcaaattatgttattttatttaaattaaattataaaattaaataaatgatatttatttatcactttattttattgaatatttaattttattttaataacatgaaatttgaaaagttgttagcatcttttttgaatagatatttaggtttgttaaaaacctaattttttaaatttataggtttaatttaattatataatttcgaaagtaatattttattatttagaatttttgaaaattatttaattaatttaaattaaataaatcctatatcaacctatccaatttgttgcatgtgtgtgttttatatattgtttattattaaactttttttttaataagacctattattgtttgatctaaattgctatggttaacctgttgacagatccaatgatctgattttaaccaatggttcagttgtcaataggtcaaataaataatnngtaacaggtaaattttacaatcttttttcatctgtgtataaacctagtaacatgataggatccattcaaatcaatgtgcttgtgtgagccaatatgtaacgccttaactattaggcacgttacccaagatacttaagaaaccctaatcccctaaatgagattactaacaaaattagcgcggaaattaaattttaattgcaattggaagaaaagtaaatttgtaataatttaaactttataaactaaaagtttcatgtatcaggatcccaaaaatattttacaaaataatattacaagttcattttcactagccgacctaggtggcaaaacagagtcacaaaatacatcactggtagaccccaacccactcggtctagtgtacaccgtccaactcccatactcatggctgatcagaaacatctttaccctttcctgcacaatagaggacccgtgagcgaagcccaacaagacagtataaaatatcaataacatattatcacactatataaacattactgccattctcatatgcatgtgtgacatagacctgcatgttacactcacaggcctatttatgtctatataacatagacctacgtgttgcgctcacacgtctaaatacaataaggccttagaacggttcatctcagttttagttaccgagtccaacctggtcatgtcttgaatacataaccctaaatctcaatatactcatatattcaacatggcatagcatttacacaacatgtatcactaggttaataaccctaggctattaaaccgctcatgttagggtgacaaccctaatcccggttactaattactcacatatatcatgtccaatataagcaccactgcacataactctacgtgctaactanngtcttacctgatgtcccacaataatagagattccaaatccccgggtgctcctgacaaggtgccggtaatcctagtcataaattctgggattttcacaaatagggttaacccttaattccacattcatagaatatatacatggcatttaaaatacagataatcacatagagctcggaatgagatttccaatgatatatagaactcccaaaacggagttcggatcacaaag

SEQ ID NO: 32559 - DNA, 8986 bp, Cannabis sativa
  modified_base (1732)..(1737): a, c, t, g, unknown or other
taattattaaataaatagttgtggcatttatagggttgaagtttcaaaaagtggtacttgtgaaaaatagaaaaaaattattgagaaaaatggcaaaaatcaaactaatgtagggcccatcatatggccgacaattaggttcctattttactctcattttgtcaattttttattcttaataattcaaccctaaccctattgaaaattagtgtgaaaggaaggttatggtctcattatccaacgaatgcctccaaagctaaaaacctagttttctctctatgtttatgagacctcttccttacttctcttaatttcgaaatccatagctattcttcacaaaccaatattcagccattagtgattgagtgcatgcccacacacagcaagtgagtcctcaatcatagtatgtaagactctgaagaatccaaacaacaagaaggagaatcgggctcagatcttggggatactctgctacataatggatacaagggttagaaatctcagtggaatgagtcatttaattctgctgccaccactgtaaggtttctcataccttttatgtgtttattttcttagttttagaaatttatattaggatgttaaaaacataattgttagtaaatctagatcctggtaaaatacattccaacattacacaaatgaaagtaattacaaaatttacctgttaaaaattatttataagatctattaacaattggactatgattaaaatcagatcattcgatctgtcaacatgttaattatagcaatttagatcaaatagataatagattggttatattaagaaataaaattcttgaaaattgaatttagggtcctatttttaccattttggaaaatatagggtctattttataatttgatagaatagaggctcaaatttgttacttttacaaagcataaggtccaaaatagtatttacctcttaaccaatttattttagatgcggtagaagtctattttttgttaaaaaaagaaagaggttttattgtaaatattataatcaaatagtttgaatattaaaaaaattataataaagatttaaatgtaaaaaaaaaaattatttataaatatgaattacttaaaaaactcaattaaatatattaattaattattattttttaagtatatagttaatcataattactttaattatataaaaggaatgttaaattgttagtaacgtgttattaaaggtaaaagaaaatataaccgtcatggttatattaaaaatataacatagtcacccatatatatatattttaataagcgtatacatatattaatcaaataagcagttagacctcgcagtcattacaaaatagattctccggtaaagaggagatcaggatagagccgtacaattggtgggtaaaagcccacttagccacattatggggaatattgttacaagtcctgctaatattagaaaaattacaactaataaaataaggagatgacttcatacaaaaagagacatagttttcaagagcccaatggagcacctttccattgagcgcattgatagctatcctggagtcactctccacaataacatacttataccctaaatctatagccgatgaaacagccaagtagcaagccgcagcttctccacataaagcctccaagaaatccaaccgagccgtgtgaatttgaaccatcctacttagatgattccttgctacaacagctgtgcacatactctctnnnnnnactctaacatcacaattcagttttatccaatcctaaggaggaggagtccaagtctccttcaagatcggtgtaggacttggcaaaagagaagcatgtaactctgcaaaagaagtacaaatatggtcaatacatttcagcacatccgaaggagaattattgtgtcccatgtcattgcgcgtcctctagatggtgtcaacaacaattgatgcataaagaaatatatcctcaactcagatccccctgtttctaagatcccatatgaattcgacccaatcccaaacccgaatacccgtatcataataaggataaatgccccaaggcgaagatcgcgaaaagtgtaacgccacctcacatgaaagaaataaatgttcaatagattcctccctcacacataaaggatagcttgtattctcaatctgaaattttcatccaagctctactctaattaggagcggattagaaaggatgcaccaccaaagaatcttatgacgctccagaattttgttgttccatagcttattccaaggcaacggagcaacctcacagtgtgaggctttttccaaagcctaggtcaggtaagctgatttagacaagaacagtccattactttccaaggtccaaatgctagtatctctgccatcggacaccaatttacaggtccctttccttaaaattgcattggctttcacttcattttttcaaaacaaagaattagagtctttatatctacaactgagaaaatccttctcttttggatactttgcctccaatatcttacaacacaaagattgacagccattcaaaattttccgccccgacttggccagaatagtgatattcatttctcttgtttttttgaaaacccagcccaccaacatacttaggaaggcacaatttatcccaagatttcagatgaagaatgtggttccctttctcgaatccccaccaaaaatcctgaaccaaaccatcgatctgattcacaaggcgattagagacttttgtagtttgccattgcatagataggcatacacaaacccacagacttaatgagggtagcctgacctgcctttgacaacgtttttgccttccagccctacaacttagaagtgagattgtcgaggatgaagtggaaatcaacatccttttgtcttgatctgaatagtggcaatcccaggtacttaacaacaccttttggagaatcaatacccagggcatcctttatcctctttgcatgccattcggggtgtttctgctatagaagatagtagttttgagcttattaacttgttggccagaccaagcgcaaaatctctcaaggcaattccaaaacctattaacttcgttcaaattggcgcgaccaacaaggataaggtcttctacaaagaataaatgggacaagaccgaaccgccttaactcagtctaatacccttaatattcccctctcgaagggcctcctccaagagtcttgataaaacttcagctgcacatatgaagaggtagggggaaagtgggtcgccttgaccaaggccataaggtggcacaattttgcccacttgacccccattaaggcagatgttgagagttgtggtagaaatgcattgagtaacccaattccagaacttctgggggaacccaaaacaatcaagcacacaatcaatgaatctctaacttagtctatcataggctttaacaagatcaatttttatggcaaagtacccctctttgcctttcctcctgttgaaagagtggataatctcttgaacaatcacattattatcttgaatattcctactcgcaacgaaagcagcttgggtttggtagatgagagaaggatggataggtttaattctatgtacaactattttggatattaccttgtacatcacattgcaaagggatatgggcctgaaatgattaggtcttttcgggttctcgtttttagggatgagcacaatgctcatagtatttatactatagcctttaacaaaaaaaaatttagaaactgcatcacaaaaatcgtcaccaacagactcccaataatgcttaaagtaaagcactgacattccattcggcccaggagcgttgtggttgctcatggcaaaaagagtacgtccaatttcataaggggaagggcatagaatgattccctccctgtcatcctgggtgatcctctctaagaacaactgactacaatcaatagcccggccaacatcggacccgaaaaatatacttttgaagaagtcaatgaagtcaatgattccctccacaaggttagatatttcaaataactttttcgtataattttagaaaagttaaaaaaaaaatgaaatactctgcagccctcctagttttgtcactctatctatttcaagtagaatttagtctatagttataagtaaatattaatctaacatcccgccggaggaaagacttactactacaaaggctggtgccaaccaataaaaaggggacgaaacaaagacatctcatggcctagacattgcccttaacccatgccacctaggagactgggactcgagatgtttggcacacagaacacaattgaggaaatattcttgtgagactaagtataaaatatttctgagattatattgggcgtttaccaaaaatcataattaaaatggaaaatataaattaaatgatgtaaatatatattatgtatctatacatatataacatcagccatataattcttatattgaccttttttttttttgtttttttgaaacagattcttatattgaccttaataatcttattaatttatattcccaaatgttcacctattttttttttttttttttgttggctacactttcatccgcttaataagtacatgacaatgtggcttgtgttgctttttggagcaacaaccgttgattttctttgacaagctacaaataaattcactttacgtgttgactagctaaagagccaaacatactatttctatttttatataataatgtatacattattccttctctacacatgtttttatttagatctcaatgtggatatacatataacttttacttttccctaaagaaaatatacatgatctagcttttaatttgtccaatttcatccgtaaattcctactgtaacaatattcttatgtctaatgccaaaatatattccgaagaccgacctttatcgatcttattttcccaccattcttctttttgagagacactcttctttcatcttttaacgtacattgtttagaatatatatatataaaaaattataactaatgctaaaacgtagaagaatattctggtataaattctttttcacttcatttcccttagtttcttttctccctttatgtgattcagtggactgctgtatgtattttcaattaagtaacaagaaattgagctatgttctagcatgccctcttttattataccaagttatatattaatactttttgcaaatcatctttgtaatattgagatcgatttagaaaactaaaaataatgtataagagttttctatcaaattgtcctctatttattatggcaattcttatcttaaatgctgagccaatcaccggagtacatgacagaatatatcaaaccgtggaggataaattctatatatttatatataatatgggatttgatttggatagctgtggactttatagttgagatatttcagtgacgtatccgtcggtgggtcggttcttactccattaattttaatggtattataaagataaaaattaatgacaaaaaattatgtaaaaattgtattataaggatgaaaatttttatgcagatttgcaatgaattacagtcacgcgatctctgtgagaattgattctaattgcattgtgtaattacaactctgttatatagtgtgaatttttttagaaactcgagatcaagctcctgtaaagatgacaagtagactcactgtcctcgaggattgttgagctgtcaaaaggagaccactcggggataaatctcacctgaaccaaactcagcgagatgatgtgaccttgacagagccaaggcgcattattatgcatcgcatgatgcaggaccaagaaggtcgtgttcaagactcgcatagaccaagatatatgtggtgtccataaaaatttctcctgcaaattagtaaagatcgattcattacttagcaagctggtccgaatgacctaacgtgctcgatgacccaataaggaatcacatgtcctaagttatcaacgctaacaaggtatccgtacacgcaactcgaataggacgcagatatcttaacacaaattaagactcattagtcctacacgcaccctaggctcacgagcttgtgcgagaatattaacagaaaactcgcactatagaggtcgtgtacgttgctgtatttagtaaatcggatcgaaactattcgtcatttattccattaacgttttttcttaatttaatgttgatattcaatgtaaaactgttcaataattaagttttgtgtaatataagggacacttgctttgtatataaagaagtgatccaatatgaaaacgacaagatagaaatccttgcaatagttgtctatgtagattgtgatctgactgaaccactatacttctcttatgttaattgtgtgtatcagtgtttctagtttgtctgtgtaacccctttaaatactcgtcgttctaggttgagtactcgtgccttttattaaataattatattttcatctttatttgatgttgtcaaaattcctccaacaacatttgacgccgtctgtgggaaagattattactgttgatttcggaggaaaattgaaatgactagaaataagacgaatgaaaaacaacaatacaagctctttcaatgttggaacaatgaatgttccactccaaagcaatggagcgaatctagttgacataattaattggggtgtgggacggactatggtcactcccctcaatttgtttcttgaaagtgctggtcatgccggagaaactttaacactagcagccaccgtgggacatttccaacctattacaccgatcgtggtatcagaaggaatcatctagttaagtacaacccagtatacgaccttgcaagagcaaatgtgggctttacagacctatgtttatagaaatgtcaggacccaacgtccacctcaagttcctaacacgcgttcagaaaacccctaggtaacagctactaggcgacaaactgaacgtattagtaacaatcgtgttagcaggcaacaggaaaatgaacacgaggattctgacttaaagcagcctatgcataattctatgaacaatagagaaccagttgctcgtaccaccagtcgtgctagagagtaagtaccacaggaggaagataacgtaacccgtgaagtcgggctcaaccacgagttgaggtaaacaatgttgagtcgcactcctcttccactaacagtcattctccaagtgcttataccaagtcaggatcagtcgagatgcgacgaggcggaagatattatgttcataggggtgatctatgcaatcacctcaatggcacaatcctaaatggcaaggaataacaataacaacgaggcatgtgatccccaggtaggcgatcaaggcacacaaaatataaacaacctgaccaatatagtttgcacaaaccaatcctgttctaccagtaggcgtagacaaagaaagcctcctgcgagcgttgagggtgatcaaccaacagagaaagccaatttacaaactccatgggaccttgcctttcaccggtgaagtgtgacaagctcgactcctgaaaggcttcaggctatccgagtcacttaaatacaaaggtactactaatcccattgattatttagataaatttaacacaattatggaagtagaccaggtactgcaaccagcaaagtgtcgaatactcgtagtaaccctagagcaaaacgctcacgattggttcaaccaactacgcgaagcttccatatcaacttgggaaaccttcgtggatctgttcttaattcactttcaggccacaatgacgtacaagtcgtcgtacacaacattagcaaacattaagcaagaagttggtgagtctttacaagattattttaaatgttttgacacagaaataaccaaagtggagaaggcccccgagtctcgttagtttgcatgttaataataggagtttttccaaggactgacttctggaaggagttgcaagcttgaagactagagtcatttgtagaattcgttgcaatggatgagctgcataagagaattgagaactcttttgctgaattagaaagagggaaggaaagcgcgagtcacctatgccacgatcacactctcgaagccctaaaggaaagaattccaaaggacgaagccctacaagaggcaatccacaaaggcaaaaaagtccaaaacatgctaaatccccttcacaaaaggagatatctccggaaagaaaaggaggtccacgttttatcaactatacaaagtggcagttcctcgagatcacatctacctgattaaagagcaagactgggtatttagaaagcctccaccaatcaacaagagggatccaaagaagttctgcaaatatcataaggatttcggccatacaactctggagtgttggttctttcatgatgaaatcgaggaattgatcaaatgacgaaagcttagcaaatataaaaagaatggagaaaatcatccgcaagcagatgagaatgacactatgaataatgttagtggccctcgagctcctcataatattctaaccattatcttaggcccacatgttggtggagatttccaaaagtcataagagcgctatgccaaggaggcaaaagaaaaaccattcacaatgttaaaaatctgagtgagcatccagaaaagttgttcaagaaggaatatgatgatctaactttcacggaaagtgatgcaaggtgggtacatcatccccacaccgatgaacttgtgatagtggcaaacattggaggggataatattcatcgagccttggtaggcaatcgatgttctgtgaatcgtctctactttcaggcctttaagcaaatgcgatcgcatgagaaagaattgcgaccagtgactttaagtgtctatggttttactggagatacaatcgcattaaaggaaagatcaagttacctattgttgggttttatgccctaaataaaactctttttcaatggaataaattttgttccttatcaataaagaaacagaagtat

SEQ ID NO: 32560 - DNA, 5430 bp, Cannabis sativa
atatttttaagctaatattgaaatttaggtgtgtaattggatatccaattataaaatcgatccaatccaattagtaattggattcgattggattttgaggtctcattggattggatcggatgatgattttctaaatccaattactaattagattgaatcggatgagaaaaaaaaaattggattggatcgatgctcacccctaataaaatctacatgtagcaataaatttaacaatttaatatttttttaaaatatatatataataaataatagagttttatttacatctaaattttttttattttttataaaatatatatttttttaattatattaattttttctcccatatttccaacggatgagatgtcggttagattgtaggttttattttagtttattactattaataaattgatacgagttattaaaaaataggagttttttattttttttatttttacagaattttatataaaaacctctattacaactcgtactgtaatttaaattgcaacaaaaaattgtataaaaactcctattgcaactagcgctacaaacactttagaaacccaacccataaaatataaattatattttaagtattataaaaaaattaaaataaaaattatatgaaattttattaaaaaaaaaaaatgtatcatatctataaaaataaaattaaagcaagtattaaaattaacactattaaaaaaatactaaaagtaatttttatattattttaatcttatttatttgtatatattggggtcacattttttattttatatatataatgattaaaattattagtaaatttattatgtaaatatccgcaatcagcacttaactcaagatagtttattatctaagtacaaagcatgcattgtgggtggcgataaacaagcttcagttctctgaccctcttatcggggaagcggcggcctgtatgttagctttggagacgacggtcacaatgcaacacccttttgttatggtagagagtgattttaagatggtaatcaagaacctaaagggtgtcgaatctttttggcggcttgagaactacactcgacaatgcaagcatctctctactttttttcactagttgtaattttttttatgtttctagaaactgtaattttgcgactcataatgtggctaaataggcttttgccaacaatatttttgatatagtaaatactactactattctgaatattatcttttgtgaagaccgtgaggtctgactgctatgttctttgttaattattctaatatataaacgctttatttcaaaaaaagaaaaaaaaaattattatctactactaaaattcttaacggaaaacaaaactattttgctaaaaatatttttccattttctcttcggcccctcaatttttcccattttgcccaaagcaccccccgaccacccattaaccgggcacgaccgccccttctcccacaccagtaaactcccaaccacccagatctaccgaggagaacctcaactcgaccggctgagacaggcgcaagaagaaccactgacgacagactctcctgcgccgccgtggagaaccgcagagaccaagagcaaccaaaaccttgtcagaccggatcggaagcacgcacagacaccgcggccaagcccagtgaaacggtagcaaggctctgaccgaggggaagaaaatgcgaaatctgaaaatgcactctgtgcggcgctaggctatttgccaagagaaaaggtttgaacagttatagtaaaaagggaaagcatgcatatgaatttacgaaagtctcaatactaaactactctagaagctaacactgaaaatcatgttcaaaatggagtcctcatcaacttcaactcaccaactctctgctcacaacatcggagacctcatcgattccgtcgatgcttttctcttcgactgcgatggtcctatttcctactaactttttcttaatcctttctataaaaaaattgaattgattttgatttatattattaataataataatactcaggtgtcatttggaagggcgacttcctcatttatggcgtccgccacacacttgactggcttcgatcaaaggcaatctttctcattcttatttttccattgttatatttctttctcaatttatgtatttaactcattttgggtttaattacagggaaagaagctcgtgtttgttaccaacaactccacaaaatcaagaagccaatacgccaaaaagttccaatccctcggcatttcagtcagccaggttctttttcatttctttcaaaaattaatgagaaaaggaataatgggtttttcagtccatattcaatatacttagttcctgatttgtaaattaagaatcattttttccctctatatttgtaggatgagatattctcgtcctcatttgcagccgctatgttcttgaaagtccataaatttccccaagataagaaggtttggaacttaatttactccattaaagcatggaattataaaaaataataaagcatggaatattgaaaatggggtaatgaatgttttaagttatccaaactgaatactcatattgatattatatgtgttgtaggtctatgttataggcggagaagggatattagaagagttgcagctagctggatttacaggttttggtggcccagtaagttcgtcatttattgctttctaaattgacaaacaatgagccctgtttttagttaattgtcattttttatacaatcttctgcccaataagagaaatgtaggactcaacctatcctatatgttgtcactggcagttagttgttttattttcattttattgttttgaaatgttcctaagacaatattgtattgcaggaagatgatgaaaagttagcagagttgaaaccaaattctctctttgaacacgataagagtgtaaagtaacagcttcactattttatatatgtgtttacttgttatttctgctagctattgagaacatttgaacaggcgattcctgttttcaggtaggagcagttgtagttggattggacccacgtatcaactattacaagcttcagtaagaattacttttcttactttctggaaaaacatcatttttgtttactttcagactatctgattgcctattaaaagtacattgtatctatcctgtaatgattgatgtattataatgttaactggactgtagatatggaacactatgcattcgtgagaatccaggatgcgtgttcatcgccacaaaccgagactcggtggggcatatgactaatttacaagaatggccaggtttgcttctttgtttctgatattttatttgaagaaattcagcaatttattgaagttatttcagagtttgctttgggttttaggtgccgggtgcatggttgcagccatatgtggatcaactcagaaggagcctattgtagttgggaaaccctctactttcatgatggactttttgctagaaaggtaggcatatctgttccttttccccctgctgcacttctccttgtcaaaccaaaaggcatgaagatacatctaaaagagggaacataattgcactgcaccaaagctttgttttctgctgcaagattattgaccaaaacattggaataatttttattattgttttattttcagatataatataaggtgctccagaatgtgtatggtcggtgacagattagacactgatattttgtttgggcggaatgctggctgcaaaactctccttgttctttcaggtttttttttctttgtaatgcaatttttatttcatgtaactctgaccacaaggagttaatacttttcatcgctgaggcttgtattttgtcatgacaggtgtgacaaccctccctacccttgaagatccttcaaatactatccaaccagattattatactagcaaggtgtctgacatttttgacttgatggcgtcattggcatcaataaggttggagcatgtggttctacacaatgaaacggaaccaacacagaaaagtaaactcaaatggagcaaggaagcaactacacttttgataagtgcatggttaaatacatctaaggataacattgtggggaatgatcaaatttctcgaagattctgggatcggatcgcaaaatatttcaacaccaactgtaaaggtgaggaacgaagatctggaaagcaatgcaaagaccattggaacaagatgaatcaaaaggtggtacgttttaatagctgttataaacgagtacagcaagcacatcatagtgattggtctggtgagcaaattattgaaaatgctcatgaaatgtataaatctgaaaataacaactcaaactttttgttgatgcactgttggagattgctaaaagatgaatcgaaatggaatacagtctaccaaccacaaggtggtaagagaacaaaggtgtcagaatcaggggaatatacttcatcgtccaatgcagacattagtgaccacgaagtttctgaagtgcgccagaaggcggcaaagagaaaggaaaaggaaaatcatgagcaacatgctacattttatgacattagtgaacggaaagcagaagcattggagaaattgttggcaatagagaaggaaaagacaatgacaaaatatatggactatctcctcatggacacatcgcatatgactccagaacaaaaaaaagatcatgaaaaattgtgtattcatattaagactaatattttaaaatattaatttatatgtatttgtctcaatgttatgcattattttatttaaatgaattatcttttattataacatttatattccaattgctatattttggaggatatattttaaggcctatatgttagttgccacgctataaatactaatgctcaatcttcctctcactttattatcccgttcatctaaaatttccaaatcaaatatcatctaactcaaagttcatcaatggattggacaagctctccataacataattaggatgaaagagatgcatattagctctattttaattatgataaaggctccacttacacaccaacgataaagtatgtcatggacttaattttaattttccaaactatgctttaaagaaatactaaaatttgtgacaaaaacatttatccattgaacatatatggtctaaatttgggaattattttaattagtattttttttttaattatgatagattgattagttgtgttaaatttggacatcattttttttttttgaatggacatcattttaattagcctcataattcttctttattagtcttgagtctggatcgggtctagggtcaggtttggggtttaggatctaggatctgagactagggtctagggttgagtttggggtatactctagggacgagtcttggtgaggaccgatcctgagttaatttgggctctagaaaaaacaat

SEQ ID NO: 32561 - DNA, 1484 bp, Cannabis sativa
atccagctcaaaaagatcctgatgtggcactgatcagccaagaggccgaacaggctcatacatccatgcaagcacagttggatgaactgaaaaatatgttccaagcacacctgagatcaatgttctagaactacccctcaagttcaagatgctgacctggaagatgtatacagggaaagaggatcccttatcacatctcaagtattttgaaatgcaaattgatttgcaaagggtacgaggagatgtgcgttgcatagcttttcctgccacactttcagaatccgcacaacaatggtacttcaagtagacacctggaaggttcaactcttggaaagccttctcctcagagtttcatgcacaattctcttcttctcacaaactcccattacatttagaagacctggtcgaagtgaagcaaagaccaagagagcctctctgagcttacataagtagattcatgacataggccacaaaagaagcgtgtttaactaaagaagggaagttagctgccatactggggggcatcgagattcttggagagctatggaaagacatcacgaagagcggtcctgtagactttatgagtgatttcctcgaccgagtagatggtttcatcaagcctgatgaagccattccgcgggcagatgttgagcctagaccgggccaaccacaagctccttcggctgcaatgaccatctaaaacccctagtaccctagtagtgcaaatttgggcggtaaaagatctaataacaacgacagacaaggcaattgaaaagaaacctgctcccatgaaaaaggacataagtaagcgggacatgttcaaattttgcaattttcatggagattatggccatgacactaatgaatgcaaaaatttaaagcaggaaattgaattcgtgataagaaaaaataactgccatgtgcaaaaatatgtcaaggccaaccagaatcagtgggccgcccaagaaaacaataaccaagacctgttactgcccccactagtggatggacatttacatgtcatcatcgagggcccacatatagctggagattcaggcaaagctcgagagaggtatgctcgaaccttacaacacgagaaaaaagaagtggtcctggccgtagaggaaaggaagcctaaaatgccacgggtaggggaacccactataacattcaatgaagaagatgctgtcaatgttcgcttcccgcacaatgatccattagtcgtggaagtacagatagccaacataacagtggcctgaactatgatagataatggagcctcataaaatttcctatttaaaacaccatacaaaaaaatggggctccaactcaaagatctgatcccctgtctccagcccgtatatggtttctctgggcagagtgttgcacctttagggcaaatttgcctacccctcactgttgggaaagctccaaagagcataaatgtggtggcacaatttctggtacttgatgttccatcagcc

SEQ ID NO: 32562 - DNA, 1256 bp, Cannabis sativa
ctaatatttgatcacggacaaaatataaatcaagttcaatatgttttgaacgcgcatgaaacaccagattcgctgcaagagcagctgcgctttgattatccacccatataatcggaaaatgttgaagtggaatatgaagttcagacaacagtgacgctatccatttgagttcagcagccgtattggcaagggccctgaactcactttccgtgctcgaacgtgcgacaacttgctgcttttttgtagtccatgatatcagatttccccctagaaaaacaacataccctccagtcgattttcgatcatcaatgctacttgcccagtcggcatcagagtagctgtgaagtgtcatatctgatgtaggtcgaagcactaaaccctcagtgatagtcccttttagatatcgtaaaagtctcttacaagcattccagtgacacacggtgggagccttgataaactgactgagtttattgacaatatatgctatgtcaggtcttgttaaagacaggtaatgtaatacaccgatagagcttctgtacaaagtcgaatcacagaagggttcaccatcattgaggaacagtttggtggaagcactagagggattgtgaatacttttagctccttccatattaagccttgtaagtagatcggtgatgtattttgtttgagaaagatacattcccgatgaatctctgaagatttccacccccaaaaagtaatagacttcacctaaatcgtttagagagaagtcatgatttagatcagagatgagtttgttgatgagggagttacttgagcctgtaactagtatatcatcaacgtaaaccagtaatatgataaagtcttgtgcagaatgataagtgaacaatgatgtatctactttggatgccacaaaaccccaatttaaaagactgtttttcaacttgtcgttccatgcacggggggcttgtttaagtccataaatggacttgtgtaggagacatacatgttcaggtttgctggaatcgaggaagccaggtggatgtttcatgtatacggtttcagttagagtgccattgagaaaggcattactaacatcaagttgtttgacaacccaattcttagtgacagcaagagacaagactgtgcgaactgtaaccggtttgacaactggtgaaaaagtttcagcatagtcaatacctggggtttgtaaaaatcctttagccacaagtctcgacttgaatcgatctaatgaaccatcagcatttaatttgaga

SEQ ID NO: 32563 - DNA, 1820 bp, Cannabis sativa
gactttcaactaaatctcattgtcaattgttgtcactgtatatagctatgtagatagtcatagggtagtaaaactttgggtataaataaataaattaggacagcttcaaagtaagcttaaagcatgttatcattttttaacttataacgtcacacgcttaattaacttttacaccaaacatgcattagtttaaggtttcaacattaattatttatagtcttatttaagttgttttgcatcaataagataattatttgaactcacaccctaagatattatataatataagataatcgagcataatttttggtcgcgggttgagtgtgtttatttttgatacttgtagaaattataattcaaattattttatatgataatatatattatattcataataagtattcgataatttttgaaaaattttaataatttatggtactaaaaaataagatttaaactttaaacatatttatttttcactacacacgtgttattaattattctaaactttatttttagtatgataaattatttagaaaatttcaaaaatcaacatgagacctaccataattataatatatattattatataaaaaattagatcattttctaaacacggaaaatagagatgcatttatatattatatataaaagctatatttttcattataaattaactaaaatttacaaaatttatacatattttaagtctttagacaaagtatatataaaaagaaaatgtgaaagtgcatgaaaaaaaaaaactatgtataatgtttggtgtggaaccatataaagaattaatggggatttttttttaataaaaaagtattaaaaataaattaatgatttgttaaaaaaaaattatagtctataataagcactttatctgtaataaactttatttccttaaactatttgcatttacgaattttattaaaaaatgttttcttattttagaaattttattgacataaattgttttcttattgggatttgttaattaataactatttttctatttatgaaatttcttttcaaagatcaatttaaaaattatttaagagcatgatgccatttaaagattgttttgtaccatgagttaggtagtttatttttaggataattgacgaagaaattttttatgtttcaatttttatttaattaggagtgtgcataaatcaatccaatctaattacaactaatcactaaacattagatatctaattgtgaatggatcgaatatgacattattttttaatattttattgaattggattagatgttggatggggtatccaaaaatctaataaattcaatatccaattgaactcagtagtattttcatttagtttgaataagtaattaaattttatgttgttatacttaatatatatatatatatatatgtgcatttataaaaattaagattaaaattttactttttttacttagattggatccaatctgataaatattggatctaaaaatttgatgaaactgatatgatccaaaaaatattaggtctaaaatattagataaatctaaattaatgcaataaatatacatgaaatacatccaatagatagaacgatctagtcgatccaatggatattgaatcaatgaaatgactaaaattaattggatcgaatcgaatgataaaatctaacatcctatatataatttgatcatatccagcctaaaaatattgaatgtggttcaatgaacactgttacacttaaccaccgttagatataaactgagattgtcgctatgtacacatgttacgaaaattatgattactacgcaagtatacgcaa

SEQ ID NO: 32564 - DNA, 1431 bp, Cannabis sativa
gtcaagcggttgttgcaaaataataattagatgtaatttttaaaaattaattaagtattcaaaaatttattttaaaaagggtagaggcctaaattttgtaaaaaaatagaattttattgtaaatattaaagttaaatggtttaaatgttaaaaatattataatgggatacttaaatttaaaaataaaattatttataaatatttattgtaaaaaaggtcttattaaatatttaaattataataattgttttagaaaaattattaattatgattaatttaattttaagaaaagaatttttacttattagtaacctgctattagaggtcacaaaaaaaaatgtaactatcatagtcacaataaaaatgtaaccattgaggaatcaccttttccaatgtagtggtgcttcggaaaaatggatgagttgagttgagttgagttggggtaggaggaagcactataagcaaaagtagtagtagtaaactcattggtatttaatatggtaagatgtcaattctcatctcattaatctttacgaaggagtaggaatctgtttaatcttaattattcttttccgcctaaatggctgggagtacctccttcttctagtctctaacttttatttgtaccttacaaaatttaaaattataaatgttcttcaatattaaaaagaaaaaaaaaatactttttttaaaaaatttcctttttacactaatttgtgataatttcaaaatacttactttaatttattttcataattttttattttactatttctaataaaatttcatgtaaataaaaattacacgaattctcaaagtgtgtacataataatttttgcttgggaatgttataaagaaaattaagagcataataaatatagattgtagcttacttggcttaaaccagaaattggctgagaaaggcttatttttgcgcttgactcagtagaagtgttgttgtagcggtaagtggcttgttggttgtagccattgtttgtattggttgttcttgattaatgaatttttttctttcgtcaaaaaaataaaaaaattacatgaaccccataagggtgagagtgaggagtgtcatttccatctttgtccgttcgacatttgagaatgaaaaagtatcccgtctccctctaataggggcaatggtggaaccaactgcttatcttggggaggcaacgaaatagtgttcttctttgaaatagaatataaatgaaaaatattaattttgtttgataaaaatttataaattttacagtgataaaaaaaattatatatgagaatataaatgaataatatactttttatgaagataaatataaaaagaatatgtgagaataacaataaaaaaatttatagaaacaataataataaaaaaaaaaatatgagggcaaaatcaaaattactaaaaattttctatac

SEQ ID NO: 32565 - DNA, 2908 bp, Cannabis sativa
aggatgttaatgaaacatacatggtagttagatcctggtaaaatatttccaacatatatatcttttctgtgatatgatatattaaggaataggtaataaagaataaactcttgctactacaatattagagtaagattttagtgtttttattttgcactatggtatatatttattctgtgataggatatattaagaaataggaaataaagaataaactcctgctactataatattatattaagattttggtatatttatatagctcagaggtatatctttttaatgggttatcgtatatacaaacaatttaattttattacgtataaaaaattactttgatttctttgttttaggaacaaacaacaattgtggaggaacaaaaatcacaggagaatattgaaatgtaggtataaaaagaaacatttaaattatttgtgtatattatgatttaaatttttggcatatttgatatggtatattaaggaataggtaataaaaaataaactcttgctactataatattacattaagatttaagtatttttattttacactatggtatatatttattccatgataggatatattaagaaataggaaataaagaattaactcctgctactatataatattagattaagattttggtatatttatatagctcagaggtatatcttttttatggattatcgtatatacaaacaatttaattttattacatataaaaaattactatggtttctttgttttaggaacaaacaactattgtaaatgaacaaaaaacacaggagcatgatgaaatgcaggtataaaaaggaacatttaaattatttgtgtatattacgattttagttttttcgtatatttattttacactatagtatatattttttatgtgataggatatattaaggaataagtaataaagaataaactcttcctacattaataatattagattaagattttggtatttttattttgcactatggtatatatttattctctgataagatatattaagaaatcgggaattatggctggctgttcttttaccaaagcttgggtctgatttttaataatggggatgaggattttggtggctggtttgaagattattgtaactctcatttaactgagaatattgagaagttggcaatgatcattggagtgtttggggggcccgcaatgatttactttggaatgataaggctacttctgtggaaagagttgtttcatctgtaattacttaccttgaactttggaaatttgctcaaaataacaatggaggagctttgtcttcttcaggtcagcgtcgtgctggtgttgagcactgtattaaaccgtctttgggagagttgaaggttaattgtgatgctgctcttttttctggagaaaggagtaatggattgggatggattgccagagatcatgctgggttgtgctttgttgctgctgctgtcaaactccgaggtaaaattgaccttgttgttgctaaggcgttgtccatgaaggaggctttgagttgggttaaatcctgctggggagaaggcagggttgttgaggacttttgtcctacagcggtgatttttgagtcggattgtcttgtgttgattaatgctatcaatagcaacagccacattctttctcctctttgtcttattttttcggattgtattaatcttatacggtccttttctaatttttatatttcagttcagtttgttaaatgatctgggaactaagcggctaactggttagctcgttcttctagtttatgtccttatcgtatttccagtacgggttctgtcccttctggtttggaagctattttgttagctgatttgctttaataaaagttgcaatctttgtttcaaaaaagaaatagggaattaagtataaactcttgctactataatagtagattaagattttagtaaatttatatagctcagaatcttttcaataaggtatggtatatacaaacaatttatttttattacatatcaaaattactataatggcattgtttgttaggaacaaacaacaattgtggaggaacaaaaatcataggaaaatattaaaatgcatgtataaaaggaaaatctagctcatttttgtatattatgattccttcttagtatatttattttgcactatagtatatatttattatgtgctacgatatattcagaaaaaagattaaaaataaactcttaatataatattatattaagtttggagtatattcatattgttctaaggtatatcgtttctatggcatgttgtatataccaacaatataattttattaaatattaaaaattactacaattgccttgattgttagaaacaaacaataattgtggaggaacaaaaagcacaggaaaatgttaagatgcaggtataaaaataaatatttagatcaaaaagtatatgatgatttaagtttggtatatttatgttgcactatggtatatatttattgtgtgataagatatattaagaaataagtaaaaaaataatcaatggttgtatatcattttaaatttatggtatatttattgtgtgctaaggtatattattttttggccagggaaaattgatcgtatattaattttttactatggtatatctgtttaggtttgtgtaaatggattttgtatgctacggttattatttattttatgttgctttcagtaattattgaaatataaagttatatacaaatatttaacatgattgattattaaatcctaagggacaacaaccatcaatttctataaaacaacaattacaagaaaatgtggctgttgaaaaacaggtataaatttgtttcttatatctaacattttcgaaatgtgtttaggtgttgtaacaccccgatttcccgagatgtcacatagga

SEQ ID NO: 32566 - DNA, 2020 bp, Cannabis sativa
ccattaacaatcgatcaccaacaacatgggctaacacagcaaagaactatccaatcaacccaagttttaataaaaccaataaaatttaatgtaagcccaaataaaagtctaacacctcattctctgatgtgaggggtggttggcatcattataacacatgacttaaagaaatacaaacatttctctttctccattattattctgaacatttctatacgttttcatatttcatctcaattctaagtgttgtgtttaaattttgattttatattgatcagatttcacctttaacaactagcactatttgaattggttggctagtcttcgtataacttgatagtttactcaattataaaggttgcaaagctggatcaaatattgtttgcaataaaattcttacccacttaaaaaaaatattgtattatttaaataatatatatatcttaacgtcatatatagtatactaagttaattaagctaaataattggagcattaaactacttcttcattaattatctctgaaaaaaaaaaaaaaaaagaaaacctatctacctcttcagtggagaaaaatacatgttatatatacatgcacatgcagaagtagtacgtagtaggaccacatgggaaatataagataaaaagagaatatatagagagagaataatataatttaacaaaaagcaaccaaacaaaccctccacatgcatatcaatgaaactaaattcccacttccatatattggcagtggagacacttggatccattatattccacactttaaaaaaactatatgatgactaaatactatgacctcattcatgatgatgtaagcactaaaatcactactatacatgtatatatatagagatatccaacactttctagacgtgtcggttttgtaattgacacgtatatgagacttaatacttaattgaaccaataacgatataaacacgtatagaaggtgttaggcactactggtactttttagcatttccgttgtgactaaatgtgtttttagtcacaatacttgttgtgactaatattaaattagtgacaacttgtatctaaatcttatgttctagtcacaagtaactttttgttatggctaaaaatcaaatttaatcacaaaaaatttatgttgtgactaaaaaaatatcactaaaagtaactatttttatagtgtcggttgtcaataaaacctctattgactaactaatcaaatatttcaaatagttaatacacgtaattgaagataaatcgaaagtaattgtgttattaggctttagtggtgcccaacaccttctgtcgcctcacgattagttagtaatattttctgtagttagtaattaaacccatatcgatattacatcaaggaagatataaacaccaataatactttttagcaattctcaataattaaagatatatatatatatatatagttggtgacattacaaactaatcaataatgtgtatgtaataaagaatttctaatattatatttgggtttcacataatttaatttaaaataattattacgaaatagagtaatttgcgccataaatacttaagttcaactctcagttataaataaatatctaagttaatttttagcgataattctgcaacttctgtaagttcctggttgttaagtgttaagtaaattatcacgtgacaatccttaattggtcaagtcattaaatttttatttttttaaaaaaataatttaaatataccaataaaaaatggcacgtggataatgacttaaaatttaatggttatgtacctatagagttccagaaatatagctgagatattattactgtcaaaaattaaaattaagtatttattaacaactgaaagtttaaactatttataaagtgtcgacaataccctaataacagcaatactaatgtgctctgattaaaaggctcgaggaagaagaatatgtaaggcccattaatcctttttgtgaaaattacattatatatctactttattttatttgtttttatt

SEQ ID NO: 32567 - DNA, 3878 bp, Cannabis sativa
gaaatattaattttttaatatttaattaatgactataaatatcaaccattagatatttaatctaatggtcaaaaataaaatatctatagatagataatatccatcaagaacatacggcatacccatatatatatatgtatatatatatattaatagaaatttataaaaaggaattgatcaaaatataaatagattggtgggaggcaatcaaagggtgatataggtgagatgtgacagggttccacagtggtatgattcatcaaaatgagacaaattaaacctttgacattaatataaaatacacaaaactatatattacctactatatatatatttatatttttgcagtttatttattttgcagccacgtatacttattggtcacatagtttttgatccaatgaaactaagaggaaattgatcccttatagcccccatcggggatcagcactaactattttttttttttttttcttttatcaaaagaagtattaacttcattaatcacaaataattacatctagcaattaaatcctacacagtcacggctcttctctatttacaacataaattttctacatattttatttcatagctattaagacttctattttttgttatttgtaatctataataaactattttttgtattccatgtacaataaataacactgtactcgaatagttattaaaaatacaattgttcttattgatccacaagctgtatatcgatcacaactgccataactgttgtgtgcactctttgcttcctgttttccttgtttagcactaaccaattcctccatccatggaattcagtcggccaagcttttgaacccagccatttgaagatcagatcagctaccctttgggagaaacatcagtcgaaaaaaagatgttggtttgcttctgctgttactccacaaacctggcacataatgcaatccaaagcaatgtgaaattgcatgaattgatcacgagttaacagctgggcattgacaactttccaaagaataaaacggtgctttgacatgtttaaggagctccaaatacccttgctgaattcgaattgaacttgaggcaaccggctactatataaccaatttgtcttaaatcttcccacagcccctgccttttatgattttaatgctagcaaatttgtctctcaagtggcataatttttttcaataccaactcgaatcatttttgagttcatacgaccaaatggagttattctttaagtaaatattgttgatccatttcacccaaagtaagtcacttttggatgaaatggcccaaataaatttagcaagaatagcttgattctatttaatcccatctttgaaacctaatcctccataggttttggtttctctcaggctaccacatgtaacttgcttctgttcccattccaccctagagaaattctctgcaaagtttttctatttccttagtgacactatgaggaagaatgaagatgctcatccagtaattacgcagaccaagtaaaactgagtgaataagttgagctcttcctgcaaaagaaaggtgtctactagcccaattgtgaagcctttgttttatgttcttaataatcactcaacaatcttcagctctccatttggtgggtctcaaagaaactcccaaatattttagagggaaattgccttccaagagggccatctctcttaagataactattttttcgctattccaacccctccaaagtaaagctaaagatttattggtattgatagcaagccctatggtagcactgaattcatctaagatttccttgagcacttgaatcgactgtatatttcctttgctaaataacatcagatcatcagcaaaacatagatttttaatttttaggctcttacacataggatggaaccagtacgtagattggcatgcagccaattgcagcctttttgttaggtactccatgatcaaaacaaataagagaggggaaagggaatcatattgtctcagacctttcttgcctttgaaacttctttgtactcttccatttatcacaataaagtaggatgtagctctcaaataggtcatcacccaagaaataaacctagctggcaggttataagcaatgaggagagcttccatgaattctcagttcacagtatcataagctttgctaatatcaactttgattgtgcatctaggggagacgcgttaactaatcttatgtggaaaggtattagttattttaatttggaatctacactgtaaccaacacctatatataaataccaagctcaactttatttattggtatcagcttagaagagttcatacatagatttagatgtgttctcttagcaagaaaacattttaagagagaagagggatgtacaactactttcatgtttttgattaaaagagctcggtgtaaggcttaatgcaatttcagtcttaaacacaatgtaattgacttttgaagagttgtaaactatatctctatactcctaatcaaagatttcaataaagactattcatccttgccattgagttaagttcttcctagtttttgttttgagttcatctttaagttttttgttttctattaattatttttatttgatcttgtacactgttagttgacataaaagtgatattcatagtgattaattcactataaatggtattagagctttaggctctaagaagaggtttcaagatccacattcaaacccttaagattcatatttgaacaattaagaactcaagaactagatggcatctccaagattcgaggtggacaagtttagtggcaccaatggcttcagtctatggaggattaagatgaaagcatccctagtgcatcatgaaatctatgaagctttagataaggaagtcatgaaccttattgaagacaagaagaagaaactagagattaaagccaaggcacacattgtcattctttttattcttggggatgaagtgttgagggaagtgtcagatgagaaaaaggaacttggattatggaataaattgccttccatctatatgaaaaaatccttagccaataagttatatctcaagaagagattccacactcttcaaatggataaaaccagggaattgagaaagtacttagatgatttcaataggatcatactagaccttaacaatcttggagtcaagattgatgatgaagatccaaccataatattttctcatttcattatcaaaaatgtatgaacattttgtagacataatcatgtataaaagagataccctaactatgatataagtgaaggctgcccttagctccaagggataagaaagaagaaagcagtggagaagagttgttgattattaaaggaaagtatctcaagaaaaatacaaggaaatcagaaaaattccaatagtttcacgggaaaccagtcaagatcaaattcaaagggtcctattgggagatcaaatttaagaggaacaacaagataacaatgctattgctgtaaaaaggaatggcacttcagagatgaatgtctagtcttgaaggctaaactaaaaagggataaccaacatacaaaaaacaagagctgtggagaagttgatggttatgggtatgttgatgtccttgttgcatcaaattctgttttaggtgaagaatatatagggcacggttttaaaccgttgccattaccctgttgtaggcgacggttttaaaccgtcaggaatgtaaaaaagagagaaaaaaatatagattttcctgccattaatggcagaaaaatctgtattttctcccattttttcctctattagttatataatttcacctaatttaaaataaaataactaattaattttgttacaataacaactaactttaaaacacattaaatttatac

SEQ ID NO: 32568 - DNA, 1380 bp, Cannabis sativa
gatggaaaaatccaatatccaataaataattggattggatcggatgggtccaaatccattggatgtgatccaatgaacacccctagatttattcaaagcaaaacagggcattaaaaacccaaagtttgtagtgacaacaagggatgccacttccctaacagaaaacatcttaaaacatttattggatgcagcccacactgcaagagagtgagctgcaccattgaggttgcgaggaatccaatagagttttaacattctcaatttgagacaagcaatccaaagtggaatcaaagacactctgagctttccactccgggcaggacccagccaacaatccgttcaccgtaacttgtcagtccgagaagatggagatggacgccaaaccagagagcagggcccgacagcacgcctgctgtatcgcaaccagcttcgccacaaagggggagctcaccacgctcttcaccgtgagcgcttcgatcaaagacccagaggcatcccatgccaaaacagcaacacttccccagttattgcacacagctgcatccatgaagaagttgtgctcagaccacaggagattactggtatgggatgaaaccagatcgatgcatctcagcccctcgggggttttagtattacagctcgccaccgaggcaagaatctcccgctgaataattaggacgtaccttcatgaaaagcctgatttcttgccccccataatttgtagcaaaggtgtatcgcatagagggaaaaagcctctctgtcgatatgattcccgaaggggatatgtgggggagacaccagccatcgcaccatcgacgtaggatcatcaaactgaagcaaatccgagcaaacatcccacagaccagatctccacagttgtttggcaaatacacaatgaaaaaataagtgaagggggaatcaacaccatcattgcaaagaacacaggtcttaccatgaccgaagatttgttgagttatgctaccaaaagggaggatatcctttgcaagcttccaaagaaagtatttcaccctctcatgcgccttgcatttccaaatcagcttccataggtcattctcaatcccacagcgctcacgaatgcaagccaagaacgcattcttgactgagaaggagtcatcaattgacgccttccaaatcaactcatcctttttatctgctaccagccgaggaatagataacacttctctgcaaacatgagggagaaaccactccccaacagcatcaacaaaccaatccccaggctcatttgcaaataaggagttgaccatcgaccctctctcccgcactcttggattgaaggaagcttcaaattgatcccaagtcagccccgggacccagggggagtgccaaatatcaatcgat

SEQ ID NO: 32569 - DNA, 2285 bp, Cannabis sativa
tgtttatgaggtggatgtacccttttgagacgtacatgaaaaaattgaagaactatgttggaaataaagctcgtcctaaagggtcgatagctgaaagctatgttgtagatgagacattgacgttttgttctatgtattttaaaggggtagaaaccagatttaaccgacttggtcgcaatgaagatgatgtgattcctaaaattcttaccatctttcaatcacaatgtcatcccttaacaaaagtaaattttatgcctcttgaccgaaagactcgtaaaaaggctgaatggttcatctttgataattcacaagaaaaacagaaaatatataaagtacccctcaactcaatgcacaaaatcaatggcagctcagcgtcatgaatttgtaagtgaattattaattcatttaataaaattataatttttaaaaaatctaacactaataacaatacagaaggagccagaaaaatatgtcttccaaacttggagagaaagtcatactagaaaaaaggacaaagcttgggtcaatgacgttgctaaagaaaaatggatgagttacaccaatattctattttttttcttaaaattatcacattgttgaattttaaacaatttttatctatagttaagacgaattgacccatgaaatggagaaagagatggccaaaagtagacttcaaaggcaatatggcaatgattctggatcctcagagctgctgtctgacatccagtacaaggttatgggcaaagtttttgaagagaggagtgactatatacgataagttgtttacaacttaggaaagaaggggaaaaatcaacatctgggtctttaagtcaaagtcaaactcaatctcaagcagggtctactctttcctaagatgttgatattatggctgagatgtttaggagattgcgtgaacacttttcactgggacacgacacttctgatttgtatgacccgcgatttgagagtttcctccaacaatatttaccaacacaatctcaaggtagtgcaacttgtccaaggctgcaataacaaccgttttagcagactcaacagttctctcctaacatgcagggaagttcctcccaatctcctcttattccaaacatgtttggatgcttctcccagtctcctcaattttactactctgatttgtttggaggatcacaatcacaacaactgatgtttggtcaatttgggagttcatctcaacagccgataatgtttgagggttcaattcagcgaccttcttcagatcaatttttcagtacacaaaattcatatatttttcctggtcagtttcaacaacaatctctgaatttttcgcaacagcaacaatctctaaattttttgcagcaacaacaatctccaaatttaccacaacaaccacagactcgacaatttgttgagattttatctttgcagcagccatattacccttcatcgctaatatcacaagctcaggataatgcacaaacaacccatttaaacttaaacactgacggttcacaatttttagataatgtgcttgatgaagacaataataattagtttaagttaattttaattatgtatggacaataattattagtttaatttttaattatatgtggatttttttttaagtttttaattatccgtagatgataattatttgtttggtatgtgggataattattaattaattatgcgtgtaataattagtttattattaatttatttttaatttaatataaaactattactgttattataattttaaatattattaatattattaatattattataaattatatattttatgaaaattatatataatattaatttatttttatttaaaatgtaataccggtggggtacccgtgctattaatgtgtcagatattaaatttgatgccataaatactagcaggtcctaccgttataggtccgccaatattattaaataatatcggctgatgtgtcagtctgtcgctattaattagtaataccgaacaagtattatcggcgggtcaataccagcgggatcccaccagtaatcacttttactggttgaaaacggtcttattactggcgaatccttctgcctctaattcttataattgatgtagcgtgatatatatatatattatatgcatctcataaataaatattctcatcacaaatatatatcatgcatcacatgttcaacatactatatactaaaactaataaaattatttcacccatgaactatactcaaataataaaattatttgtaaatttattgtacacaaaatt

SEQ ID NO: 32570 - DNA, 2132 bp, Cannabis sativa
gccgatcagagtactcccagcactcgaatcccttccacaaccaatggtcagacgacaataggagatatgatactaagattcaaaaccttcacaatgctcttggactcatgcaaagtcacactaataccttgcaccatgaccatgaagaacttcatgctgcagtaaaccttgcgttcgaagagcagaggcatcagtttattgaatggagggatagggagatggaaacgtgaaggcctagcaggcagccatcgatgaccgaacaagacagaccaccgtattgatacgcaaagcctatcaagttgctaaccaacaaccagctgctacgtccagcatcccactgggcggcatagaagaaattcccgctgagcataccgcccagactcttaacggtcagtcgtccaatccccggtcacagtttccacctgtgggccaagtaataggcggccaaaccttattcggtaattccttaggtggagttatacctaataactccatccaaactgacggttttggccaacagaccggccaaaccaaccaatcactaagacaacctagtgtttcagtattcaacagactgggtaaggctcatgatctcagggatgatttgaatagaaggaggggtatggacgaacaatatgttcaaccggtcactcagcccggtatccgcatccaagacccaactctaagagatcctgatgtgacaaaggtcggccacgaggctgaactagttcacccatctatgcaagcacggttggatgaattaaaaaatatgtttcaaggtctggccagctaaaaactcacagatctcgagttggaccgagcacgcggatcacccttcactccagagatcaacgtttggagctacccctcaagtttaagatgctgacctaaaagatgtacatagggaaggaggatcccttgtcacatcttaagtattttgaaatacaaatggatttgcaaggggtacgaggagatgtgcggtgtagagtattccctgctacactatcagagggcgcacatcagtggtatttcaaagtaccactagggaggtttaattcctagaaagcattctcctcggagctccatgcacagttcttcttctcgccaactcacgttacatttagaatacctggtcgaagtaaagcaaagaccaggagagcctcttcgagcctacataagtagattcatgacagaagctacggaagtagcacagttaactaaataagggagattggccgccatactgggggacattgaagtacttggagaattgtggaaagacatcaagaaaagtggccccgtagactctgtggcagattttctagacagaccagatgggtttattaagcttgaaaaggtcattcaacgggcagacgtcgagcctaagtcaggccaatcacaggccccctcggtaggagcgcctgctcaaaacccccagtaccctagcagttcaaatatgagcagcaaacgatctaataacaacggcagacaagacaatggaaagaaggggaagttcgcaggcaaagccgaacaaatccctagagaaaatccttccaagtttactgctttttctgtcttaattaacgacctggagacaatccagatggcaactcaatctatagtgtcgtacaaaaaacttgctcccatgaaaatggacataagcaagcgggacatgtctaaattttaccgttttcatggagactatggccacgacattaatgagtgcaacaacttgaagcaagaaattgaatttctgataaggaaaaataacccgcatgtacagatatatgtcaagaccgaccagaattaacgggtcgcccaagcagataacaaccaagacctactaatgcctccatcagtggacgagcatttacaagtcatcatcgagggcccacatattgctggagatttgggcaaagctccggacaggtatgcccgaactttacaatactaacaaaaggaagtagttctggccgtagaagaaaggaagccaaaaatgcctcaggtaggggaacccactataaccttcactgaagaagaggctatccatctttgcttcccgcataaccatccattagtcgtggaagtacagatagcaaacaaaacagtggccccgactatgatagacatgt

SEQ ID NO: 32571 - DNA, 1565 bp, Cannabis sativa
ttagggcacaaagcccaacaaggtgatccccttgaccgatcaagttcaaggtctgaaggtttcgtatcggctatgccttagatcatttccctgagttggtccaattgtgcttgcacagaaggatctgttgctttggggacttgaataattgaccctccttggggaggtagtagattctggagagacaagggcttgctagctataccctataagagggtatggtaaaggtcggccagacctgtgttgaactatagaccctagtcgaccattttgaggtacaaaactggccttggccggccaggctgacatcccgctattgtgcttggccgaccagattgggcaggatcaggccaccccattgctcttttatggccggccagacctacaaaaggtagggtctagccgcctgtgactccgcggttaactagtgttggttgtgcgttgacaggggtagatcacaccaattgttggagtttggtggatctgaatgtgtaaagtgatcagtttcacttcttgaatcaccattttgggtgtttccacccgctcccggtccttatcgattaaagattgacctttgggcacctcgctccccttggggaggaagtgttgtactttggccagccatgggtgctcctgtggctaaccggccattgtttgtacaatgggggttattgttgagccaaagatccttgggcagccccctatgctgctggttgtcgggacctggttgtttttgccgtttgacctttgaggaaaggtttgtcctccctctagtaagggaagatttgtcctagttcctgtggaattgggttgatcagcgtgctgatagaccctccctgatctatcaataagtcttccttgaagtggatctctgaggagatcctagcctcttctatcagttctctagttgaattatcttatcagattgatggcctctcggttgcggcgatctaactttgcttggtgagatcgaaggatgtactcctggtcatccatccatcttaggaatttgcatctctattgagcaaaaacatcgcaatcagcagggcatggttctttagttaggcctgcaaggcctacaacttctctaagtctagctaactcaagatcttctcataagtctatatggggctcgccaatcgcatgctcgccaactcctgggcctgcctctccagcatagaaccggagacgagatccagttgttgttctaggggctatcgtccctaggtccttccttcagtaggaggcaccaatggtggatctactcttgaaggcaaggacctgccacttggatctaccaggatgcctatatcaatctggccagctgtagtggccagacttgtggcgcctgttgtggtgacaggattcaccacgtttgtagtgttcatggggattccagctataactggaacttgagtgtttggatctgcagtctatgggtcttgagggagagccgaagatgcatatggtgcaattggagttcttcttgtgttaaccatggtgtttgatcagatacgatattcacgctctcaatgaaagcaccaaactgttgaccttaaaaagtg

SEQ ID NO: 32572 - DNA, 1324 bp, Cannabis sativa
accaccatgaccacagacccaaggacccacgtactcaatgaccaccgcagacccaatgacttctccatcaaccacgacttcattattatcagcaatgttgtcaaaggaataaattgtatgattaatgtttgttatctgtgagtagatgttagatttagggtcaaaacttgtcaaatctgagttttgggcaaaaaattggtttttttgtcaggtttgatagtggtccaatgtcttcctgtcgttaaaatgagtaaaagttgaagacagtccgatggtagccagatgatatggtcagatggggtccgatggtggcaaaatgccttcctaacgagcttaatgaatggagcttaacatctataaatgtagatatggtcggatggtggtccgatggtagtctgatggtcacctgatacaacttttttatgtacaaaaacataaaaaaataaaataaaagaaataggtagcagatatggtccgatagtggtccgatggtcacctaatgctattttttatgtacaaaaacataaaaaaaaaataataaaaatatgggtagcatcgggccaccatcggatccccatcggaccaccatcaatatagatgggaatacggagtatggatggtgaagttagaagagaagagaaaagagaaggatataatgggtatgaatgtaaagtgtgcctatattttttaattttagtaagtttgtgttcaaaaatttaatataccctaaatgtatgcatataaattcaaatttcccaaaagaagagccctcttagctcatttttcacattgagaaaactacccacaagatcagggcttctatatatctagactttctctttctagagtttggagtttctgatacttagctattgctgtaattaccatctcataagaaataaaaactcaaagtagacgtagccccattactatcgcgatataggggtgaacttctataaattgttgtgtctctcttattaattattttactactttttcattctcgctaatctagcgaacgagttggcttaaaagtctagtctagattcctgagttaacagcatttataataagaacaatttaaatattgttttaagctttcatgtttttttttttaattttatttattttaatttaaaaataaatatccatttatcaaaaatgacttttgctagcgcattaatgggcatgtaaaagtaagatattctccagtgcacatttttgttagtaaaagttagacttttttctacacgttaatccgctagtaaaattctagcttttctcagtatacatttgcgctagcataattctaatttttattagt

SEQ ID NO: 32573 - DNA, 1453 bp, Cannabis sativa
agtagggtgttacataatatgtgatgatctccatttcctcatccctttttcatttagttgcttcattgatttctctataacaaaatctgcaacttctccaactagttgaaacatgtttagagagctttctacctagttatactcagttgaatcctctccttcattgacagattttttgttgaatggtttgttgtgtatttgtagaaccaattctttcatattcttgttttgtatttgcattaatagttcaaaagaatgattttctactatatgtatagttgtctcttctatagttgtaatgcatagtgaagaatcagttactccttcctctgtctttctaagctcaatgtagaacatgcgggagttatcacttagtagctttattggtgttgttcctagtgatatttgataggatatatctatgttgtttttgttgtattttatctcggtttttatcagctcaaccaggttttctaatgaagaattagttggaattagtattacattcattgtgtagtcatcataacttgtattgtctatcaattggcccccatactcaatcacacacatggtgtgttctaaacctgtattttaaaagaaaaactaatattagaatttcagtataagctgactacaggaaccggtttctttaatgtgtctttatttttgttacatttcattatttgaactggtttttaattgttattatattgtgagaactggtttcttttggttgtggttgttgtagtcagaacccattttgttatttatggttgttatttttttggaactgattctatttattagtttggttatttttaactagctgtatattatatttttgttttactataaccaattttgttcctattttttataaccgatttgttcttattttttataattgatttcatattattgttatatataagaatgcataattattttaagtttgtttataaggatgtgcttaacttttttatttcatttgttaatttaaccagttttgttttattaatattttcggaacatttcaatacattcgtatttatatattaaaatttaaaaatcggatttcaattcaactttcagatgatatatatttacagacatcgtaggttaattaatcattatgatcatatataattttgattgttgattgtatattcctaatttgatgactttggagaactgtcgtagaagtcgttggttgtatatactcttttttgatgttgctttgagttttctttattttttggattgaaagttctgattttttggctaagcaatactataatagccgatccaatcttatttgcacgatctaattcaatccaatctgcaaagtgcggatatccacacttgtgcggatatcggattggattagattagaaaattcaaaatctgcacttatgcggattggatgttcattgacatgtaaaagtaaccgatc

SEQ ID NO: 32574 - DNA, 1582 bp, Cannabis sativa
atctttggctggacaattagcttgctgactggaagttcctctgcgtcgacgattatcataatgtgatttagatcactctctcaaaaaaataaataaataaataaaaaatagccttgttcacaccatattatttcccaatcatgagttgtcattagatcattctagatgttgtgccaattatgagttgttaggggattgttctaaaattccaaaatgctagggattcctttttttgaatttgccaatgagatagcaaaggaatattttcttgttaggatttttattccctattgctgtactataaataccttataaaaattattttttatacactgagaaaaatcaatacaaaagatatataaaaaataatccctttctctctttctttctgcttttcttttccttcgatccttttctttttgatttgatatcaaagccaatggcttctcaaggtgattcctcagtcaacaatcttaggtctcaagttgttgatgttcctattccaacttcagcacctatgcctacatcagccgcactagtgttacttgcgcccctgcttcaactgttagctccaattatcattcacctggatagagacaactacccctattggcgctcacaagttgtcccaaccgtgcatgctcatgacctagatggattcttttttggcacaagaccgtgtccacctcagtttcttgatgctcctcctgagttaatttcagacatacaacagcaggtaaacccccaactcgctgtctggattcgcacagaccaagctatattaagctggcttctaaattctatttatgaggctatgctaggccatgttctttgatgtcgtatttcccatggactctggtctcttatcgaaaatctttctaccactcaaatctcgtgctcgcatacttcaactcaagttccaacttcaatctctcaaaaaagggtccatgaccattcatgactatattcttaaaatgaaatccatagaagatggacttaactctgtaggtcaagcattcaatgatgattatttgatactttatatactgggaggtcttggttctgaatatgactctgttgtcattaaccttacatctagagcagatcaacttacactttctgaagtgcagtttctcttacaaagccacgagatgcgtattgagcaactcaactctattgctgcaccagatcgctccttcggctaattttgctgctcgaggcaaaaaaattccttctaactctggcaggtcctctggttgtcgtgtccatggtcatggcagaggtcgaggaaattaaggacgaattgtttgtcagctttgcaacaaacttggtcatcccgctctggcaagtgctactttcgttttgacaccaacttcataccttccaataattagaatcctcctcaaaacaacactgctcagcaatatggtaacaaccagcaggcttttgtagctgcctcaggctagcaccctcgacctgatgataccaattggtatgtggacagtggagcaacaattcatatcacagacaatgccaataacattcaagctcctgttgaatacaagggtaagactcgacttat

SEQ ID NO: 32575 - DNA, 1522 bp, Cannabis sativa
ccccggagaggagcgtgaagcatgtcttgactctccaggagctagaaatataacaacaccatcttcgggagtagaaggacccgttcgaacagtcatttcaaatttaatgcggcatgggagaaacgtatcagaacccccataaaaggatttgaagatggcgtaagcctcttttacggtgattacacgataatcaacaagtctagtgacgactccattataaagaatcacatcaatcaaggaaggataaagattactttcacctaatccctaagataccaacgacataggtcatgtatgtcctattttatatctgctaggaatttgtgcccctaaggggctgacacttaaatacaagtgatccctttctagtgatcctcccaaaactctacaaataccccaaaaaacataatgaaaggggatcgctggaagaattattgaatcaaagagagtaaagaagggagagaaagattcacccagaacattctctgtataagaactcttataattacaaagacttgtggactacggctcataactgcctgaaccacgtaaaaaccacttgcattaacgctttcatagctctccttattatatcgtttaattggttaccgaaaatctcggtcaacaagtatttcaaattataaggataataatatcttttaatttaaaatatatctaatattaaaatatttaatcttattattaaataatctataaatttaagaaattaacaaaattttaaaatctaatcataatttaaacaataacctatttttaattttaaacttcaaaatatcaaaaattaataataatctattaaataattaaatattattaatttaaaattttgatatttaggtttaaatgttaaaaataatattttatataaatatttagcgatttgaaaaggaaaaatcaaatttttgggtgcaaagcacccttcttgtgcacattggctgtgtgcagcctcatcctctcgctcaggttattgatggtagccttgttcgcgcaggctagaggttgtttaaagccttcgtgtgcccaggtagagtgctcgagtaagctttagacacgggtgatgggcttctgacatgggcggactgcatcaccttgtccgaatttctatgcctggtgctcgagtgacaacactcaatgaccaaaattttcaaaacaccatatctctctcgtttttcatcagaattgagttctataaaaactaaaattacttaatttttcacaaggagtccaaataaagtatttttagaatgaaaataaaattatttttcatggaaaaatacgtaattcactttcaatcaataattcacacataaaccaacatgaacacatccaaattaacaaaatcatcgttttgaaatacatatttgatgaaagtaaatcattaccatggctctgaggatggttgttggaaattattttatcatgatctagatttactagcatgtatgttgattataaagtttagaaaagcttacattaatggcagcggaatataatatctctt

SEQ ID NO: 32576 - DNA, 1132 bp, Cannabis sativa
cgaccctttttggtggtcgcgaccatgaacattacagaaaccacgagaaaaaaattggttccagtggttgcgaccagggttcgagctagtcgcgaccctttttcatggtcggtcgcgaccacagacttttccagaaggcctgaatttttcaaattcaagctagtcgcgaccagtccatgggctagtcgcgaccagctcacagaatttctataaaaatccaattttccccccattcaatcctaaaccaatttcaaattttttcaaaccttcctcagccgcctctcatctcttcttagccaaaaaaaccaacttttctcatctccattcttcaattttctcatcttctctttaatttctagatcccaatccatcccaaaacccactttcactaatcaatcctcatttttcatcaaaaaccatcccaaaaatcaccaatatttccccaaatccgaaaataacattgttcttcatcttcaacctcaagctttcaaggatattcaacaatggaggtggagtagtggcatctttgggtttgtatgtatatttctctattacatttgagaaattgaatgagaactttgagtatttttgtgaaaatagtgcttattctgaaattattggttgatagagggatttttgggtttatattgtcattggggactgtgcatgtatttgtcttgattatcttggtgtagttttgaatttttgggaagtagaaatttaaggggaggtgctgcccaatttttcttaaaattattttgaaaaaaaaaaagaagaaaaaaaaacagaaaaaaaaacagaaaaaaagaaaagaaaaaaaaagaattatttctaagataatggggccaaaaagaacaaggcatgttgaagaaggttcgtcgtcaaacccgccagctacgggtttcgatagaacccaatttgtaagtgaggaggctcaaaatcgcttcatgcggctcaaaattaggccctacattgaagatcagggtattgagttccctgagaaccccttgaggcgtcaacctaggtttgaagcaattcgagctcaaattgaaaggttgaaatggggtagttttgtggatgctcggggccgggctaatgtgactatggcatgtgaatttcttgccaattggcc

SEQ ID NO: 32577 - DNA, 3811 bp, Cannabis sativa
tagaagactccatggagtatgttcaaaagtgtgaaaaatgtcaaaagataaaaataccaagagctccacccaacgagctaacacaaatgcagagtccatggcctttcgccatatggggaattgacttgatcgattaattatctaagggcaaaggaggagtgcaatatgcggtagtagcagtcgactatttcactaagtggacagaagctgaaccactagcaaccataacatcaaagaaggtgattgactttgtaagcaagaacgttatatgtaggttcagattaccccaaaaattggtattcgacaacggtacccatttgatagtgtcatgttcacaaatttctgcattaaacatggtatagtgaagagcttctcggcggtctcacacccccattcaaacgggcaagtagaggcggtaaacaagaccttgaaggataccttaaaaaaggactcgaaaatgcaaaaggaaactggccagaacaattacccgaagtcttgtggtcgtataggacgacggaaagaacagtaactggtgatacccccgtcgcacttgcttatgggtatgacgcgatgatatcagttgagctagacccaccctcccaccgacgaacgacatacaatcaagttagtaatcaccaactaatgggggagtcactggacctattagaaagtcgtagggaggtttcacaaatacggttagcagcataccaacaaaaagtagccagatactttaattccaaagttaaggaaagaagcttcaaggtaggagacttagtactacgaagagttttgaccaatactaaagaccctacgacgagggtgctaaggccaaactgggaaggtccatacgagattacagaaattgtacccttggcacgtacaagcacgatcgctacgactctaacatgaactttataccagcaccccgatattcgaacggccaacacctccgcaaatactatcaataacggtttctcctcagcaacaactcatgctaagggtatgcccgtaagcacagttagaattgttattagtgtttagtcttttcttttaaatttattttattttaaagcagatagtaatgtaataaggcattgttgccaattttatttatcaataaaattgcaagttgttttcacataatgacgcaacttgtatgatctcaagtcataagataagtgaccaagagatgaacctacttagtcagttgggggcaaccatacctatacatagactcataagcaaaaacgcacctgcgcgtaagtagatatatatatattttttaattttaaagcgttggtgcattactcaacgttttgagcaacttatgtgtggtgaatggttgactgtaaataaatgcctaagctatgcttacacatagcatgtcacaaaccaaagaaaatttaacatgtaaagccatatataaagataaaggccatatagccaagcaaaaagattaaacgcatgattgtctcaaaaatataaagtcacgagatcaaagactgcccgaacaatcataaatctctacagagtattgttgtgcataaaaatgtaaaagtaaaagtgcatcaaaaagagccatcaagcaagtcgtcaaggagactatcatccgatgcttcaaccccaaagttgaggtaggaatcggcctgaatgcaagttgcgtgtgccttctgccttgttttcgcctcctcgcgattgcgacaataagataacatgcattccatgttcttacccaaatagctaaagtcagcttccttgttgtatagccaacatttgaagaagacatcgatggagaggttttcatcttgtttcatcttcccagctaagctctcacactctttggctatagctttattctccttggcaagcttagtgtaagcctctttttcgctagcaagctcacccttgagacgttcattctcagcagtgaccttctcaacagaagtttctaggtcatgaattttctgagagtgctctcgacggagggtgtcaagctcaagttggagtgaagatgctccatacttatcatgctcctcctgtagggcgagaactctagattgaccataggaagtaacagtcgcggcctgtcacacatcatgacatctatgttagatgatggctgaagaaaagaatttttacaagtatgagaaacttacccttatcatctctcgacacccaagggcaataatctgggcaggggtgagacactcaagtcttgacatagtcttgtccatactatccataaggccttcagtgtaagtatggaccaccgacaagcccgtagacaaggcctggcaacgaccctccaggtgcagcgctgcaagtgagtctgcccccatagacgtcgagccaatgaggttgatatcattggcggccccagatgcaaagttggaaggatgtgatcgagacgaggcaagtgagccaacaccaggggtatgaatgttaatagtcgagcgagaactagttttcctaattttgccaggaggggccataggagaggtgttcaagggagaacctcccttttcctggtaggtcacttgtcgcaacaggttgcccatacctgtaaaaacacaccaaaacaattagtaaagtatagcatgtgaattaatgaagaaatgcaataagaaagacgaatatcaattatcatcaaaagagtcgcactccctaacaggccttttccttgaaggcccagacacagtgctttttgttgtggtcgtcaaggccggcctctggggtcccaaaggttgcaggatttctcgtactccgatagagatgtaataacaaagttgaacccaaaattgtctaacgcacgagaagaggttaagatgttgatatccttcttgaagtgaggcagttgggctaatgcaagagccctctcgtacatggcagcagtgggcaaaggcttagcaaaatggttcacctgttggaatttggtgtgtttagacccaatgtcctttaccaagaagtaaagagttctgaagtcaccctcctttgacaccctatctacgccatgaaggaatctaacattcctatgcgcatgctaaaatccaaaatagctcgatcgctgctcgatgttgttcggtctcaaatcaaagagataatgtatctcatgtcccgtcggccacttttatctcatcaccttgtataaaacgaagatggcggtaagaatttgtatgaccatgggggagaactgccccggactaatggcaaaataatcgaccacatctttgaaaaaattataaaaggggagtgccccccatatgatatggcgacattttttgaaaattataattggaatatgttgtgaaatgtgaaaagtgtaataattgggaaaaatattttttgaatttttggaatgtaattctagtataggcatgaaattctcggcaccgtatcactaagtcgtcaacaactaaaccaagacacggactatacaaaaaagttcctaccgtatagtcataccgctagaaacttggaggacaaatgtttactcaaattttgacaacaatgacgtgacaagagtaacaactcgtggcatggaaataccaagactaaattaatgaaaaatatataaagccacgactgttggggtgacattaatcatgatgggtggtcataacccttggaatggaagtctaatggtcacttttacccgtagcttgagcaaagcgagtgcctcgtaaaggaaaaacggtggactaactttcataagtaggataaacaatcaccacacacctgcgagccaaattagtctagggggtatatgacactacccccaccatggacgtaatgacattctcaaaggtagatg

SEQ ID NO: 32578 - DNA, 3975 bp, Cannabis sativa
ccgccaaatcttcaacgcaaatactagtgctgcgagttttagatcgtgagcagggtacctctgctcgtactcctttaactactgagaagcataagctattacctttccagtttgcataaaaacacatcccaaaccttgtctcgaggcatcacattaaacaacaaacttttccttatctgaaggaagagttaatactggagcggtaatcaagcactactttaactcctgaaaacttttctcacattgatcagtccaaaaaaactttaaattctttcgggttagttccgttaggggtgttgcaatttttgagaaaccctcaacgaaccgacgataataaccaactaaacccaaaaaacttctaactttagtagtagatttttgtgttggcaaatcctgaacaactttgatcttggctggaacaaccatgatcccatctttatccactatgtgccctaggaaagagacacgtgataaccagaactcacacttcttaaatttagaatacaacttgtgatctcataacagttgcaatattgatctgatatgtagttcatgttcttcttcagactcagaatggaccagaatatcatcaataaacactatcacacactggtggtggtaatccttaaatacccaattcaaaagatctataaatcccgctggggcattggtgagtccaaaggacatcactagaaactcataatgtccataccaagtacggaacgcggtcttcaagctatcctcttctcaaattcttagttgatggtgacttgagtgaaggtcaatcattgaaaagaccgtcttacccttcagttgatcaaataggttgtcgatttagggtaggggatacttgttcttaatagtgagcttattcaattcccgatagtcgatacacatcaacagcgacccgtctttctttttcataaaaaacactggagcaccccatggagaataactcggtcttatgaatccaaagctaagtaactcctggagttggatctttaattctttcaattctgctggagccattcgatactgtgcctttgatactggttttgttcccagaacttacttgatcttaaagtcaatttcttgggaaggtggtaatcccggtaggtcttcaggaaatacattaaggaatttgcacaccaatctcgtattctcaggtctagatgacacaggttggctagtatccattgtagtgactagaaatcctagacaatctctgctcatcagatctttagcttttaaaagtgttattcaaggtatgtgtgacccctgaactttacccacaaacaccattggactggcactgtcgggttcaaacaccaccatcttccacttgcagtcgattgttgcccctatttagataaagaaatccattcctaggattatatcaaaatcagacaatcgtaactcaatcagtttggcggttaactcataactatcaaccccaaaacacaaagacttaatccaccgggtggatacaattaggtctcccgagggtaacagggtaccaaaccccaaagcatacacatcacatggtttatgaaaactttcaatcactctactcgacacataagagtgagtagctcctgaatcaaatataacataataagaataactctttttgcaaaactgacgtgtcaccactgacggactaccatcagcatcagcctgagtcattgtcaatagacgccccaggctttggttagtgttcttctttggctcttctttcttagcatgtgaaaaatctctgatgaagtggcccacaaagccatactgaaagcaggtcttggccaggcactcaccctgatggtgtttcttgcatttgggacactccacatacaatctaaatgtggacccacacaatgacgaccacctctattcctcgaaactttctattattccccaatgttctaaaagtttcagccttccgtttgtgatcagggttatcactgtcggtcctcttactgatattaccacccaccgtaggattcgatgccgtggcgacatcctttgtagcctactctttcatcacatgttgctctgcctcttcagctatcaaggctaattcgaccactttcttgtataaagtgccgtgagcggtggtaattttcaagtcctgacttattgttgcattcagttccataacatacttttgttttcgagtgaagtctgttggtactagatcataagcgaacataaatagccgatcacattccaaggtatattcggccacggtcattttcccttaagttaatttcacaaagtcttccctatgtgaagtccttacagcgatgttataaatttttttctcaaatagactcttaagctcttcccaagacatagcactaacgtctcgagtctgtcccataatttcccactaaatgcaggcatgatcttgtaacataaatgcaacaaaatttactcgttctgatcctgtcacccccatattatcttggatgcgggtgatagtgctcatccactagtcgaccttaataatgtcagtacctttcaaaaacgttagacgttccagcttcacaaagcgctcaaacacagaatcttgatgtggcagtataaaccctaagttacccaccactggcacaggaggtggtgataacacttgttctgcaggagctgccagtgctgattgcctcaaccgatgcaattcattttcttaacgaagtatgatacttcacatttctaaaacatttgctgccaatcggtaggtggattagcattaccaacccatgcattatccctagattccggagaggcgcaggcgatgctagtggatttgtttggtcaacacaagggtctacatgcttgccctgaggtcttgatgattctggagggtccattttcacaaataatcatataatcaacaaccccaacgagtctggcaccaatacaacacttacacacttgttgcctcaagccctaactcaaccattttatttcttattaaataaacatttaccaattaatacacaaatcatgactttcatatcacatatatactagatgctcagatactacaccaaaacgagtaaaactttccaaaacttctcattttggaagctttctttgtttttccatcttgtacacttcatattaatcatgtttaagctgatgcaaaaagaatatttcaaaaaggatgcataaaactactttttggtacatatgttgtttttgcttaaatttttgaaaaacttaccaaaaagtctcaattcttgtcatcttattgatttaagtgcatgaacacatttgttttatcatacttgaggtatgagaaaatgtttaaaatcataactatgccattatttacctatatctcttacttttaagatttttgacatatttttttttggtagattgattgtttaaacttgttttgactatatgaactttcatatttttatgcattttgaaatttctctttacctattgtgcttcattgatacaattcatatcttgtatgattaagggggagaaatattagaattgattattttggcattaatcatattatgctttcaagtattaacaagtttattgagtatatgattaaggggaagccatgtcatgttaagaaaaggtaaaaataagtatgcaaaggtcggtataaatcaatatatgcatatattaagagggagctaaactcaacttgtatcaatttacttttcatttcctttaacataatcaaatattttgatattatcaaaaagggagagaatgttgaccaaaagtcaaccactaatttattttggtgataaacaaatatttgattattatttgttactaatattttcttgaccattttgcacgcagattcacaaagtaacaatatttgctcggtaaagtcaaacgtaatcaagaaagtggattcaacaagtatatcaactacatcatacttcataagagcaaaagttttatcaagatatcaagaattcaagagcctatccaaaagag

SEQ ID NO: 32579 - DNA, 1470 bp, Cannabis sativa
  modified_base (475)..(480): a, c, t, g, unknown or other
  modified_base (510)..(515): a, c, t, g, unknown or other
  modified_base (543)..(548): a, c, t, g, unknown or other
  modified_base (1434)..(1436): a, c, t, g, unknown or other
taagatattaaaaaataataatcacttttttaaaatatattaattaatagtaacagagcaaactaatgaattttctctaatattttaaaaatgttaagaaatatttgaaattcaagatgaaatctaagatcaagatatagatttgaagatatagatttgagaatagatttgagaaatagatttgagaaatacaatttgagaaatacaatagtgaaatacaatagtgacaatagtgacgactacaagtgaactacggtaatgacaagggatgagatacaatgatgacaacaaaaaagatatggtaataaaaataagtgagatataataaaacaacaagtgggatacaataataacaatagttttgaatgatcgagatatgaaaattatacattatgaggaacaccgtaattattttctacaccagtctatttatttatttttataaaaataattttttaacaaagcaatttaaaannnnnntttaacaaagcaatttaaaatactacatannnnnnaagcaatttaaaatactacatataatannnnnnaaacttcttaataaataatttcaaataaaaattaatgtaattgtgcacttatttttgataaataaaattattaataataatattaaataagataatatatttataattttactatatattagaatgacatttttaagtaactatttattataatactaaaaataattaaatcagtcacgcaaaaagtggctatattgcctagttattatatatatttaaaaataaaaattatgttaatattttatataaaaaaattaagtttattatatatatttaaaaataaaaattatatgtatatataatcgcatttaatataaaatatatatatatatatatatttaattcttaatttaacgataaccttttgttttaaaaatgataaatgatatgcttctaataatttgtatactttattataaccacactctcctaaatacaaattaagaatattgtatttatcactatcattatttttttaaaatatatgtttagacatactatataaaatatatttatttttcaaaatatttttcaatttaatctttatatatatagagatctatataaaatacatgaaattcatttttttattgtacatataaaatacatgtatatatatatatataatcacatctaaagagcacaccaatatagtcgcaatagctaaaaaaatttcaaagattgaaattttaaatcctatctcaaaaataaaaaaataaaaaaataaaaatacattatctataattacaaaaattaaacatacatatattgtactcagcatcactacattaaatctaattaaaaaaaaaaaaactagctgtacgtgtgcagtgtatgtgacatcaacatagttctatatatctatatatgggtgcactcttaatgnnnattacccatgaatgggtaaaattagaaaattttg

SEQ ID NO: 32580 - DNA, 2827 bp, Cannabis sativa
  modified_base (484)..(486): a, c, t, g, unknown or other
  modified_base (1895)..(1900): a, c, t, g, unknown or other
  modified_base (1959)..(1960): a, c, t, g, unknown or other
atggtttttcaccattgctagaaattaatgaaatttctcaaacattacaaatatctttgcataaggtaaaatttagagtgatcgcattaagaaacgataactcatatccaccattgaatgtacatccctattcgaatatagatgaacttactttcaaggggatatagacatatttactcttcgctaaaaatgatcttgtcaaaccactatgaacaagatgaaaatgccatagatactaaaatgtggttgtggtcttttgatgaaaaaggtttagttataacagagagttcatagaatggtccaagtgtatcttggtcgcggaatactaaactcatattccatacataaacatacagtatgaatccattgatagaaaatggatattaaacaacttgtgaaagtcatactatattgtccaatgtattctaggaaaataaaatttaaaatttctatttggaatttaaaatttaaagtcaaagacttnnntttataccaaatatacatgagtaactattctagcttagaccgccactactaatctaactctaagtttaagttacctaaagtaagcaaatacaagtaggagatttctaagattgaggatttatatcattttaggatagaatgtcgggaatatagtcatctgtgccattcaatttcatatgaaaaatttgaatgacatcataagtagatgatttatgaactattcatccaatgatataacattaagaaaattctaaatgaaaaatctaagaggaaaaacttaaggataattttgaattaaataagaattcaacgatgtcgcgttcaggcgagagtcaaagttattcttattttattaatctcttcattgtttcatattgtaaacactaatctaagttgtcatctttggatgtacaattagatgttgcatttacaaatacttatttgttgagatctaacactattatgtttgtctaacggatgataatcctttgggatttgtcccattaaaaacaacaagttatgttagaccaacaacggagattccatatttatactacaacattaataagagagaacaacatgattcaatataaattcatacacaaatatgtaaaaatacaaaacaaacacatcttaaataatttctaaggtttccaacaaactaatacagtgtcccgtttgggcgagagtcaaagatatcattcattgaatagagtagtcaattcatctaaaatagataccattctagcaaccttttattcgatcgaaaagagaatctaacgttgcttcgttttgagttgagagtcaaggtcatttctttttcatgagcttccacctttgtttcataccttgtaagtcctattcttagcagccactattcggatggatattactaagaataaaacacttacaataatacttatatttcgagattctacggcgttaaattgctaatgaacgtccatctattgggaatgaatctcactaaaacaagaactgtgttgaaccaacaatggagatcgaatgtcattataactaaagctcattattttaaagagctatattttcatttgacactaattttaatctatttattttaatatatatttatttcattaaaattactaatccagatgactctaaatataaaatttaattaatatttataaaattttatcaaaggaagatctgaaaagttattttccatcctaagtattaattttccaataaatgttatgaaaattacttaatttaagttggtcaaagaataataaaataattaattttcaattcaaatttaatttttttttataaatatatatgacagaattcaaaattcaatgcattaaaatatatttttgaaattcatcgaaattaaaataaaataaaactagaaaaattattctaannnnnnttggtctaaaattaattaaattaatattcaacattaatataattttcctatttaattanntctcttaagaaaaatatcaaatatttaagtgtgtagaacaaatcaaattaaatattaattctctaatttaattaaatatatttagaaaaataccaaaagtctacctaaaaaatatctatctagataatttataaactaattattaattttctaattaaaataatatattttagtctatttattttaattaaatcattaatgaaaattacttgatttaatgttgatctaaaattatttaaaagtaattttcaacttaatctaattttttattttatgaagaaggaacaaacttcattaatcacaagcaattacaaccaaatctaagcataaaaaacaagcttagaccaaccgaaaaccttatttacaacataattgctctatgtacattctctcaagtctatctattttcttcttttttgctatattcaatctatacaaagaaacttttttaatctcctgcactatcttagccgccagccaagaatagcctctaaaaatacaattgttcctgttcatccacacattgtaaatcacaggagctaagattaccatatggatcctatgcaacttgtttcttctgtcaagaatcaaccaatttttccagccatgatactcaatcggccaattcttttttccgagctagaccccgatctgctctagcaccatttgagagtagctgcactcgaaaaaaagatgttggtttgtctcgattgtatatccacaaaccggacaattagtattgtccaacacaatgtgaaactgttggaacttgtctcgagtgataagctgagtatttaaagctttccatagaataaatctgtgttttggcatgatgaaagagccccaaacactcctgctataatccca

SEQ ID NO: 32581 - DNA, 2056 bp, Cannabis sativa
attcatatttaagatgttaattcaaatatttaagatgttaattcaacatccttgtgatgttaattcaacatccttgttagtttaattcaacatccttgttagtaaaacatccttgttagtaaatctagacatccttgttagtaaatctagatcctggtaaaatattcccaacaacatatatgttaaggaaacagtgaacactttcctctcttggccgaaacattaactttaaacattgaaggtaaaatttctttcttagaaattatcattacaaataatatatacaagttttgatctattatggtattttgtatagggtccccttgctcaaccgcgatcaaaacatgttatgtcgactgaaaaaggccctatgccttgtcaaaaattcaatggggattgtgctgatctattactcactccacatatcatggtagaaatccccaagtcgatcagatacatggttgataaattttgagaataaaagacaaaaatggtatagtccaaactccagtagtatgtggattcatagtgcctcgtacccacatcacggtaactggggatgatgtacaacaggaggcattgtgtgacttcattggagactaaagaatgttttttggaatgagtcacactttctttaacctaataaactttatatatcaatttttgctaattttttttataaaatattaacacttaataatttaatgtaggtgcatttgggaggggttaaatgatatgagacgattattcaagttttatgacctggaacttcatgcagtgcacagtaaaactgatataaagaaggatcaaaattttaagaatgtgacacaaagattgcctcattggttatcaacaataaaaagtcaataacaaatgttcttcgttccctggaatatcgggtaaccctacttaagagataattgaattttttttctttattattacttgaaattatttttacactatcttatatatatataaatatatatatatatatatatattagtgcacattgctgtttcatctagatcttatagatggccatgaaatttcccaacaaattgatgcgatgttgagaagtaataatttaattaatttttatataaaacaaatttaattagctaaattatatattaactaattaaaatataaatataattttcaatatagggtatgcgagatgttaaggggtcaaatgtgttcattggggcgtatctaaaaatattagtagcaaattacccaaaacaacctaaaaactaaaaatgtgatttttatgtattgaatatacattagtgacatcatcagacatggaaatcctagcagatactcaaccgatgtaaaagttgtaagttttaagtattaattatcttatttatttattaacaaacaatctaatatatatactaataaaaatattttttttttacagtttggggaaaaaaaaacatacgatacaaaaactgagttgttacttacaacgacagtggataaaacaattgttggggtgattcacgaaggcttttagtaattagataacttgttaacttttcccccctatttttctatgttgaattagataataacttgtaaatacttggactaattttgaaatatttgtgtaatatatttacttagaataatgtatctatacacatttttttttttttttgaataatgtgtgtgtatctatacacatttagttatatggttaatttaatttttttatatgaaatttatatttaattaaaataaatttataaaaataaaacaaaatatatatatatgtgaaaataataggttttatatgaaatttagtggttaatttagtaactatgttgaatatttcaacaggacctccatatgccatcaattattaataaccaacggtgtagggtcattttatatcgtcggttaattttctcccctacgacatcacttgtaacaacgttggtagtaaattttgccaaaagtaacattttatgtcccaaaaaactgtctctaaagcctatttttctagtagtgtaatatctccccataaactatcaccaccaagaac

SEQ ID NO: 32582 - DNA, 1938 bp, Cannabis sativa
ttccatgaggaatttcttgttcattgttcatgagcttcgggttgccttccgccttccattctcatttctatgagagggttctggccgatcattcgaatttttagggggaatctcaatttccgtaggttgttcttcctgggcattttcctctaacctggtttgcgagccacgaggtctacctcgtggtcttctcactccaagttcaggttgattttgagtgtttgtcccctgtgcttccttagctgcggctgcattgcgctctaattcggcattccaccgttgtgcctcctctaggcagcgtgtaaggtggcggttttccgtttcataagtgctctctcccatagtttgagtacctccacgattgggtccctcatcctttattcaaagattcgggtcattcccacgctgagttctccttgagcatgttgttcgcgtattaggactaacattaggttgggtcctcctcgaacccgtggtccgactgctggggctatccttaggttgagtcctcctggatcaggtggtctgtttagtctttgggttggaagaccttctggagcccatgggctctttcctagaacagtgatgagtttcttcatttagtgtattagcattttctgggttttcagccatgaaggagatggtttttctttaaagaggacagttttttttgagctttttcacaaaggctctcaatgaaagcaccaaactgttaatgcatatttttgttaaccaaatatgaccctaatagtgataaatttcacacataaaaataaaaactgtaaaggaaaaagcataaacacaaaggattttttacgtggttttgcagttgaaattctgcatagtctacgagtcaatcttattagatttctgatagtttttcagggcctcttttcttatgatttttttcttaatctaacttgcccttatttataatcacatagtaggaagttaattacagagttgactgtgatctttacaacgtttatcccctgaaattgtggggtttaattacatatcacgtagtataaatgcggttattatttgaatatcacatagctgtgacttatctgcttttacagggtcaaaatgattgtgtatttaaacacattgtaaatcataacgctctgtgatgtgccttgatagcgagctagagtttttcccttatctttccgaggttgacggcgtacgcctcgttaattctttattaaaaggcttaacgcttcattttgacaatcgcattcttatcaatagagagtacttctgcagtcatcataatctgaatgtcagcttctaactcgtcaaaacaataagtctcactgaaagatgtctaaagttgactggtgaaagtaataggggtgcaccttcctatagctagataggcgcctcgcttattaggtcttgagtccacccaactattatacttagtttgtacattttacgctaactgttttcacagtcaatatgcattgctttcgtcttcccaggtataacaaagttgatgtctcgccttacgcatacaatgacgtatgatattttgttaatacatgaagcaacggtttgtatatttttatctcgcagaattttcatttggagttatgccttctattaagaagtctgccaaggcttggctttcgatggatgtttgagggtggtatgttatgtcaaactgccccagtttgattgaccattgaccattttatattttatcaatcctccagtccagaagcatctggttttgataaaattgtctcaagggctgatccattaacacctttatggggtgtgcctgaaagtacagtcgcagcttgcaagacgcttggactaggcacaaagtgagtttttttgagagtgggatatcaagaatctgccactagtaaccttttacttacatagtgaataggtatctggtgcttaccctcttctcgcactatagct

SEQ ID NO: 32583 - DNA, 2139 bp, Cannabis sativa
  modified_base (1571)..(1573): a, c, t, g, unknown or other
accaaaacctagttgaacactttaggtttttacaaatgaaacactcttctcacaaagaaagatatgaaaatatgagactaaaagagataaaaatcatttggatgctctctaggtcctatttatagaacatagaaactctagagatagccatataaacgatttcgcagctgtacaaaacttttttaaaaaattcctgatttgcagcatcagaatcaggttttacagcagcagatcaggaccagaaaggaaacttttcaaattgaaccaagatcacgaatttggacttcaaacctaataaaggaaaaaccgaaatcatccattagaaaaaggaaaagtcaagtttcccaaacttagataactttccataagagaatttcttctcttacaagaagtttcctaaactaaaaagaggttagctaagaatgaatctttccttagaagaaaagattaattaaatgcacaaaatcaatgtaataaaaataatttaaatgcttaataaaaattcacattaattaaaaaatattttgacaactaaattaccaaaaaaggacctaacaatatcccactttggcactttagataatcaaaatatttttaattaacaaacacctacaaaacaaagttagcgaaacaaatataaaaactccccctaaaaagcacaacattaaaccaaaataaaaagctaactttgaccaaagatgaacacaaacacaaacctaaactccccctggacagttgagtatacaatcaaaattaaaatcccaaatactccccctttttgtttatctataagggccaaagataaaaagaaactaagattttccaaaaacaattaagatctgaaacaacaatcatgatcaacaaacaaataagaaacaaagaataagaaatcaaattttaagaggaaactcatcaaaaatttaccaaataaagcacatgttgatacttaccaaaagaaagacaaatgacaaaattttcttagcctaaaagtcaagtcacatgacactcttttttttttaattatcattttttttaaataaaaaaaaaacaaaaatattttattcaaaaatcaagttattctaatgcatgcatatttctaagattcataaaaaggacaaataaccatgttatgctttcaaagatcataagaatttagtaaattactaacaactcatcatattactaatattcaaattaatttatgcatgccaacaattattttttatctcaaagtaaatgtgtatttcaatgaaaatacactccataagtttaattatcaaactattcttcactaatgtaattacacacaatctaaatatcaataggattttataggtttataatgtaagactagaatgaaaggtagataagaatgttaatttaggctcaaatcacatcatagcatacatatacaaattctctcaaataattctcatttgtattctccaatcactttcctcaacaatttaatcttgtatcttttttttttttttttttcagcataacacttattattctccacacacttaaattattgcaagtattcatttattttttattgattttttttnnntttttttatgaaatacttacaacttacaaacattcattctagggattaataattttttttctcatcatcacttatgcataaccatcaatatttttccctcaaaaaaactctcacacctttacaaatacataaatcatccatatactttggtgtgaaaaatgatgaacaatggattttttttaggctcaaaaggttattgtatagggtcaaaagaaaaacaagaagtcaacatttaggctcaaattgggtaaaactatagaattcacaaatatgataggcttgaaaggctcatttgatccaaaaaaaaattgtctatgtcatatctcaaaatcatgtgtaatttattaattttgcctcaaatcattatcaaacaagttctagagtggttgagactttaaatcaaagtcaaacatgcattcatctttctaaacactagcaaatatatgtgtcgtttgataacacttttgctttctaatattttaatcacaaaatgaaagtaaaatttttgtttttaaaatttttgtttttgaaaaacaaaaatgcgttctgtaaccgcttttgttttt

SEQ ID NO: 32584 - DNA, 3141 bp, Cannabis sativa
tccagaaataaggaaactcaaaagtgttacttctatggaaggtctggacacttgcaaagattttgcaaggagtacagggaacaacaaggcttcaacaaatctcataatggagataggaaggataagcaacatcaccacaggacggattcagttgcagccgcaaaagatggtgacgactgctccacagatggagaattgtcctccatctcaaaatcttcaatgaatagagagtggatccttgattctagatgcacttatcacatgtgtccaagtcgagaatcatttttcgattatagatcaattgatggaggtaaagttctaatgggaaatgatcattcttgtagggtcattagaatcgggaaggttgccatcaaatagtatgatggcgaaatcaaggtgttgacaaatgtaaggcacatcttgaaacttagacgaaacctcatatccctaggtgcgcttgaagatgaaggatacagatacaaatccattcacgaaagcttaaggatcaccaaaggttctttggtagtgatgaaaggaaaaaaaatcaacggtttatatgttctccaatgagaaaatgttccagccggagaggcaagtatggaaaggactagaatcagatatgaagttgtggcatcacagacttggacatatcagtgaacaagacatcaaagagctgcacaaacaaggtatatagttgaaaatttaaattcttgtgccttaccattttgtgaagcttgtgttctaggggaacaacataagctgaaattcacttcggcaaggcataccactaaaaagatactcgaatcgaataatgtgcagcatgctgtgctgatcgatctttgggggccatacaaagttcctactcactccagtaagcaatattttctttcaatagttgatgagtgtgtttggacctacttgctagcaactaaggatgagtgtctagaagagtttagaaattgataaacttaggtggaaaaccaaacgaattttaaaattaagaatcttaggatggataatgggttggagtttattaattccaaatttgacaagatgtgtcaagaatttggaatcactagtgaagatcccaaagcaaaatggtgttgctgaaaggatgaaccgaaccctgttgaacaaagttaggtgtttatttgttcagttctggattagaaaaattattttggggagaagctctagcaactgcaacctaccttataaatataagcttaaaccgagttataggcttgaaaaccccttatgaaatggtacacctaacacatttaggtgtacaacatatgtacatcaatctattgataagctgaaacctagatccatcaagggaactttccttttaggaaccaatgggtatagaatttgcattttcaagaatggtagactaaagattgtgattgttagaaatgttttcaatgagttagaatatcctaacttgacatccagaaaaggtagtgtgtctccgtgtgatgtaggaaaaataagaaacaaagacattgcaagtgtggaatggagtgttaatattaaatgtcatgtgttaatattaaattgcggcataagtcttcaaaaaaattactttaatgcagataagtctccaaaaagtttactttgatgtagattagtcctaatctcgaaaaattatggttataatccctaagctcgacattctcgttagtttgtaggtacctaatttaacaactttatttatagttcttaaaattttcatgtgtcaaaagtttattggttcacaacatcaaaattatttaaaaaataatttaaataataaaaaaaattattaaaattttaatatttcttttttttcattttcttttaataaagattaaaaaacattatatatgaaaaaaacatgatttgccactcacctttctcagtggtggaggtttaccaccgaccagtgtcatccattcatttctactttcttcctcgtctcatcccacgataccatgtagaaaacctagaaaagcaatcaaaaaaaaaaaatagataaaaaaaacccaaaaacccttaaatagttgcaccttgctctgacccgctccttaaatctattctgtctgtcccaatctctggtggatggtgggttttggtgacccttttttttattttttttattttttttattttagcttctttggttcaaactttacttaaatatttttagcgactcatcttactaatacaaattggaaagttttagtagagcagatcaaaattggggatgttgggcagggagtgaactagaagaagaagaaagaaaaaaaaaaataaaaaaagaggttgattgattagtttttaaaataatttatttatttattcgtttattttaaattaattttaatttggaccaataaaaaatcatcacgtggtattttttagaacaacaaatggagtagttaaccctacaaaaaagttatttttagtcacaaccttttagcaataatataaattatttgtgactaaatattacttttagtcacaataaaaaattatttctgactaaaatataatatttaaatataagttgtcaataatttagtattagtcacaacacgtattgtgattaaaaatacatgtagtcacaataaattataatttttgtgaataatactttcagccacgaatctcttaattacaacataggaatgatgatttataactaatctcaacttttttacttttagtcacaagttttgttatgactaaaaataagtttttctttatagtgtaaattagttacatgtagactaatgagaatcttgagtatggggctgttgtcactatttttctaatattgaggatgtatctgcatcaaaatgaactttttagggattcattccgcaatttaatatcaacacgtgatattttagggagaaattaatggatctatttaaaagatgatcaacaaacttgcaaaaatcttgagtgggaattgttgcaattattttttgaggttagaaacttatctgcataaaagtaaattttttaaaaaaatttaccgcaattttcacaaaaaatatgcatacattaaaatgagttaaatgtaaaataactttgagttaaatatttactattttatctttacatttagttaattgaatatggtagtagcta

SEQ ID NO: 32585 - DNA, 1356 bp, Cannabis sativa
  modified_base (140)..(148): a, c, t, g, unknown or other
tcttttatttttaccctcttttttaaaacttatcatttttactttttttaacactttactgattttatccctgtcacatcaatatactgttcatgtgactcaaaaagatatgttttaattaaatataaaattagagatannnnnnnnnaattgataaataaaagaggtatttcttaatataccccaaagtattatcggtgtttagtactttcttcggtgtcatactgttattagtgtaatcaagtatcagatcttatataaattaagaaaataatttgtagagaatatcgctaaccaatcatagagtactacttataaaagatataaaaaggtgttgagcactaatgatacccaacaacaaatttcaaatgtataactcggatattcttgttatcttggttggcttttattgtatttttattttaatttttctgcaatgacaatttgtcagtcattaggtcaacttcccttaatgtgcttttaaatttaagatcacaaactgtttcatttataacagtgtttatgatttttgatagcttctaaagaagcatctattttgtttcatgaaaacattttttcctggctataatttttttttttttttgataagtcctggctataatttgatgtcgacaaaattgaaagattagaaaatatttaaatgttgaaatccctattttagcctctgctcattggacttgacttttcacttttcagaactattatatatgtttttagctttttattttttaatataaatggataagaattgatttaaaataggccaaataaataaaccatacttttcaattgaaaataaaaatagaaataaatatacatcctttgtttatattttcctttgtgtgactcatccagtgctttatacaataagtcaaaagattcatttcaggttcttcagtcttaaattaaagctttaagaaaatcgcaacaagtttctgattaaatattttaaagagaaattatagttgagtttttctctccttttatttctttgtttatacattgattgcaatccactatgaactcttttggactgtttaaaaagtattttttttcacatgcatcccacaacgtattttagtttacgaaaattatataggttgtagtttgtggttttcgaaatttaaaataacaaggttaagcaaaaaaaaaaaaaaaagaaaaaaagaaattcaaaataacaaagttgataatataataataaatagggtaaatactattttagaccctgtgttttccaaaagttacagattagatcctatgttttgttaagtgataaaatggaccctgtatttttcaaaattgtacaaataagaccctgaactgattttttgt

SEQ ID NO: 32586 - DNA, 3189 bp, Cannabis sativa
tatggccggagaataaaaaaaaaaagaaagataaaaagataagtgttcagacggttggagttctagggttcttttacgggtcttttgggccggtaagagctggaggatctattgtctgggcagggggcatgtcaacgttcagaccggaggtagaagtggttgcctcaaactctccataggccacttgggaagcatagtattcaagatacatgtctttggcctcacccaagtaattgaaattcgcctgagggttagccttccaaaagtcataaaaaatctcgagaccggctgttaagcccctctcttcctcatcgttaagctcctcctcctttgacttcttttctgcttccaacctgtggaaaacagctcgaagaacctccctttcttcctggaggtcggtcacttatttggacaaggaggtcatggtagcctcaagttgttcagaagcgtccaaatccttggccagctcggccactttcttctcagtagcaggaagctttttgttgacttcacccagttccatttggacggctccgagttgaaccctcgcttcatcagcgtccttcctggccaagtccactcactacaagaaaacctacttttgccggcgcatttttgcactggcaaaagtacgctaaaggcgctggtaaaactttgtcggcgcaatactacgccggcaaaacatgtctgggaatcttggtcggtaaaggaattttgaccggcgcgtagatgaaatgcgccggtaaaaggcgagaaatggcgtcgacaaagatgaatcgccggtgtaaaaggatacccttatccgctatgaacctgctttgataagcttttgccgacgcaatatagcgctggtaaaaaggttcgtcccaatcctcagattggcgccaaaagttttaccggtgctatagatgcgtcggtaaaagtggtagaaaaccctaaaattaaacgcaccgtttacattaatacttttgcaagcgcactattgcgccagcaaaagcattctcacctaccaaaatttttcacacgggaattttttccacaaatttattgtaggcagtcaagattcccaccaaaaatttagtcaattttattggcgcaaaagtgcgccggcaaaaacctaacatatgtgggaacgtcctcgccccatttggcggttcattttggattcccacaaaaaatttagttacttttaccggcgcacctatgcgccggtaaaaaccttacatacgtggaaacgtcctcacaacttttggcggttcattttggatctttcaccggcgcatatttaataatacgccgatattgtctaccttttgtcggtgcagtaacgcgccggcaaaagtaaatgccgaatcaatataaaaatttaggaatttatttattctcataacttttaccggcgcaattgaccaattgcgccagtaaaagtaggttttcttgtagtgactttcgctcacatggtgttggacatggcatcattcttggaggcaacagacttagctcgagaataagtgtaagccatcttcagactagtctacatagagaaaaaacgttagaatctgagccaagtaaagaaggattaaaggaaactgtcaggaaagactcaccctcgtaaactccttcatgactcctcccatcaacagctccaaggaaggctcgttgccagcttcggcaagctgctcattcacctcagggaccgaccgattcatgtaggtgggtgagcatctccttgcctcttatggtctctggatgcagtgatggaggtggggtacgagcccgaatctactcagattcgcccttcgactgttcgggcctgtttgagctacctccttgagagactttagacttggaagctttcgggcagaagggtccacaacggttagctctttggaaagattgataacagcttcagccggtgccctttctctagacggtgttgtctcaccgcccctacacttcttggccggaggacacgagcctgagcttcccccaactctcttcttcaaagcttcaagcatcttctgagacatgtctgcccgaaataaaagtaacatggtcaaagaaaagcactaaaactatgaaagcataataatcaagaagattaaaaataagacgaactatttttcgaagcgtttgcctgagcaagacttggaggctcatcatcacctgacacatctgttatctcgtccatgacggctttcccctttcctagtacaggagtggatggccgagcaggtagacttggccccgtaattcgaattgcgtgttcaacaggcctgtgcttggcaggaagcttcttcctccttttgagcggagtcacctgctcctcttcatcctcatcttaaggatcaaaggctcatgagcatactgtttttccccacacctcccttcaacttagcctcacgcttaagatgaatgagttcatcctcctgatgagctccctcagcccggccagtactagatttcctctttttctccttcgcgggctgggctgagggatggagggatgaaatatgaaatccttaaatcctttgggtagagcccgtactccacaaagttttcctcggaggtcaacaaagtgatatttcggtcagcacccagaagctgagcaagcctctgagctctgtccctaagagcaagtgtgaagggtgggcggtgatatacagggatctgctggaactgagtgtaggtggtgcccatgccatccaccatgaaatactcgtcaacaacatgtccaattttgctaacggccttgtccttggtgcctgtcaaccacttgtagtctcgctgagagaagtagaggtaccccgacctgccttgcttaggggtagacttcaagtcaaaaaaactagctaacctcgtggggagagggcatatcccacttctgggaggcgtagagaatgaacagggcagacagaaacttgaggccctaagaagtgaattgggtcagatagagacgaaagaagtctgccaccttcctaaaatatgggtgcaaaggtagcaacgcccctcgcttagcatgagcacccgaacaagcacacatttctctcaaggtttgtggctcgattgttataggcgggaatgtaacagtctaactcgcctaggtagacgccaggcaaggtggcgtgcatcgccacgtgagggttagatgcgttagctttccgcattatttgtttaatacgagccatc

SEQ ID NO: 32587 - DNA, 5297 bp, Cannabis sativa
  modified_base (1196)..(1198): a, c, t, g, unknown or other
ttgctttggaccatgttattggcgcaggtcaggtttctttcgattcaagtgctcttgcagatccggttgggactaattactgacaaacctcattttactcatggactttgtccttgagtgactcgcggatttactggtacccatgttttctcgatcattagctcgtcaattattttctcctcttcgagttgatcgattgtgggtccttgagcatcccgaggtcacacttgcttcttcacgctccgttctgtccccctgagtgtgatttgttgtatttgccccatcagggtctgtacgagccctctctctatgagttcaggaagaacactggtgatttctcacaggtgaccttagatctccaggatgagtcccaagatcctcctcattttcatgacgaatgtctcgttcatcagtttctggttgcctcccattctcatttccatgagagggttttggctgatcattctgattttcagggggtatctcattttccctaggttgttcttcccgggcattttcctgtctcctgggtcgcgacccacgacgcctgcctcgtggtcttctcactccaggttcaggttgattttgagtgttagtcccttgtgccgccctagtcgcaactacatcacgctctagttcagcattccgccgctgtgcctcttctaaacggcgtctaaggcaatagttttccatttcataagtatcttctcccataggctgagtgcctccacgattgggctcttcatccctcattataggcttctggccattcccacgctgagttctcctcgagcgtgttgttcgcgtactaggactaacgttaggttgggtcctctaggaatgtgttgtccaagtgctggggccaccctcaggttgagccctcctggaatggtagtccatctggactgtgggttggtagaccttctggagcttatgggatctttccctgattgattttgagtttcctcatgtggtgtattaacattttctgggttttcagccataaaggagatgatttttcttcaaaagaaaggagggctttttctgagctttttcacaaaggctctcaatgaaagcaccaaactgttaacgcaaattttcgttaaccaaaatttgagcctaatagtgataatttcacacagaaaaaatgaaagcaatgaagtaagagatatgaacacaagggattttttacgtgnnnttgcagttaaaattctgcatagtctacaagtcaatcttattagatttctgatagtttttcagggcttttttttgtatgattttttcgtcgtcttttttgatcttacttgccactatttatagtcacatagtaggaaattaattacaaagttggctgtaattttgacaacattttttccctaaaatcatggagtttaattacatatcacgcagtataattgcagttattatttgaaaatcacacaactatgattttcctgcttttacagggttaaaaatgatcgtgcaattaaacacgtctttaattgtagcgttctgggatatctcgataggaacttggttctgatggccttaatagcgagctgaagcttttctcctttatcttcctgaggtcgatgatgtacaccttgctgtctctttgtttgaagacttaatgcttcctaaccgctgctcttattaacatagagttcctcggtagacatttaaacgttagagcttctgacttgtaaatctctcacactaaaaagatgtttgaagttaactgggggaagttacaggaatgagccttcctctagcgagataggcaccttgcttattatatctcgagtccacttaactgttgtacttaatttttgcattttacactaagtgttttcacagttgatatgcgtcgcttttgtcttcccagatgtaacagagttgatgcctcgttttatgcattcaatggcatatggtttctcgttaatacgctaaacaacagtttgtatatcttttcatcgcataagaccttatagtcagggagttgcaaatatactctgctacttaagcaattaatgagttattccatctaaagtgattccatcgatccatattcccttaatctggacacgtgtcctccactgaaatggtaaccgaatttcgagtatagcaaccgatatttacaatggaaaaaatattataaacttttcgttatatcttttctaagtcaatatcacttaattgatctcaatcctaagatagttaaactttagcttaattttactatataggttcgtagatttgttcgttgcttgcttacatgtaggactagtccatacttatattttgggagctcggtagtaaaattgagtgggagcgttaatcatagatatgtaatctataacttctataaatatgtaagtcttttataaatgaaagtttccttagagcttggctaaatgagttaaatggtggagtacttattttagtaattataatctactaaaatatcatttacaaggagctaagtattataaggataaaatacattgaagggtaaaatgataaatttgtccctactcgatataaaccgtctatagatgatcattgattatttaaattgaaataatgaataattatagcgtatctgtatttggtgtagagagtattctatgtgatcaagagtacaattctgaatctatagtagagtcaagaggaattaatatgtcaagaaatttacttagtaaattttagatctacttattgggaacttgattttctaggcacatggtcctcacattatctgagataatactacattgtactcaattaattaatttaataagtcaattagaattctaaaatagacgatgtcttatttaagaaatttcactaagattggactaatttgagaaaaaaaaaaaagagaagtagtgatttatttgttaattaagacaatttatgggtctaattaataaatatatttaaattataattttatttaataattattaaacaggtaaaattaatattcaaataaatagattagataaatggtatatctagaaaaagataagaatctttcattatatgaaataaaatagcaaagattaaaagtattgggccttaagtgtattttagcctggcctttgatttaagggtccattatctttttctaaagcccatctaatctaaatcctatcctagagagttcctaaataaattatgataaaactttgacttgaaggtgaggaaagtgattttgtgaggtacaaaagccctattcctaaatggatctaaaaagtttcatctctctctagaattttccaaaatgtatctctctctctctctctcagtagtttcagtcttattagtgattgagtatcagcccactttattcaaggtggtactcaaattattatggaagactatgtagaaaggtatttgtcaattcgagaaagcgatccaagttcatacttggcaataccctgctatagaaagggaaccaaatgttgaagtaattgaatggaaagagtcatttatttctgcattcatcaatgtaaggattcttaattttttatatgttatttactactacaaaaactattattcctgtcggtcctcaaatcaatttttttcgaggactgtcgctaataaaagtaagtcatgagtgtttaaaactgtcggctatagttgactatttttggtagttttaaactgtcatttagtattctaatgatttaaaataattactaaattgaaatatggtatttttaaacagagaattcctggcaatttcaaaccgcctggaattcttgacatatatgtattgattaccttttttcattttctaacatgtccaacttactatatattataaagtataaacttcaaaatcgtactcctacacacccgcctctaaaaaaaacatatctatgcccatgatacaaagtttggtggcccatccctctctttgcctagtcggacagtcccccctctctctgccaagttcggcagcccttccctttctctatctagtctggcaactcacctctctctacgggtctttgtccatttttgtctttcgctatcacaccatcatggccagaccacccgaccttgttccagccatcctaggtcccaatggacctccacataatgttcaccactccagaaaacgtcaaccttgactttctctctctttttcgtcattgttcctccattgttaggagattgccaaagctgaagcatatggagtagatctggacgttgtggagattatttgatttaattttggatcataatttagattattgagattgttatttttgggttgagattactgagattattattgttgtagatctaagattatctaattagatttgaatattttttttaattttttttgtgtatctgatggtttgaaatcgtcagaaataacactatagccgacgattttgaactgtcgaaaattttttttgccaacttctttcaaccattgcatttctatccagttttacgatagtcaaataggtgacgattatagagcatggcaataacacattacttgattatttaaaattatcgggaaatctacttttttagtagtgatttgtcgttttaatactttcatatttttattagattatttatgtgataattaagcatacatgttagtaaattaagatacttgtaaaataaattccagcccacctaacctacaaactcctatagctccataatggcaatacaaaggggaacaagtggtacaaaaagtggaggtactaccctcacacatcaatataagttgacactgtattgctactacctcaagaccactactatttgcatctcttgtcacatgataaataccaatgtactactataaatagcctcgtaccataggatacttgtatcatagggccaatatagctcatataaatagcccctcattctaggggtgtatataaatttttgtaaactgcccaacctgaataacttgcctaaagcaaagtgagataacttgataaaaaatacaaagagaaaaatcaaacgaaaatatactgcctaattaacccgaactaactcgatcaacctaattaaatttatatatttttactacatatatttatatataatataatttatatacatgtttaaaaaaatataaagttcaaactactatgtttctttcatagtggttgatttgaactttgaattcaatatacatttatacatattagtctcattatcacaattaactaaaatataacaattaaatgtgaaaaaaaaaatatttgttcagtttgagtgaatgtatccgacggctaattagcaat

SEQ ID NO: 32588 - DNA, 1237 bp, Cannabis sativa
atcgataattacttgtaccttatagtaatatgtggagaaataactgttagcaaatatttatgcaactgtaatgtaagtgttatgaaatgttaaaaatcaaaacagtgtttccacgtacgtaactttatctatatgtctcttcgtgatttaatatgaacaaatttaccattatttgataacgaaaatacaccaggataaatgttttgctatagtattgatgtaatttttttggactatagttgagttggattgtttaggaactccagttcaactttttgagatctgcatttcatggatctaaaaattgaagttatgatattagttttatgcgaattaaattgtatttctggttgaattttagtttcgtagtagtttttttgtactttttttcattgattcgaaataacccctgttttgattgattccggtcgctttctcaggtgaagtcgctggaattaatagtggttctttctagttaaatttcgtttcggttgtgttaggttgctggatggttgcccgaaagttgtatcacataaaggtttcaatctcaggaagcataaattgtgagttgaaggtatgtgtaagtagtatttgtaaactttgatatttacaaaatcatgccccctgaactttagcatgtaccgaactgtgccccctaaattttcatccacgtcagactttctttagtaaaattggacaaaagtctttaaatccaataatttcaatagttcgagaagaatttctaacgacttgaaaagtttaaagggcatgatttggtacatgtcaaagtttagggggtaggtaaaaatctaaattagtctttatttaaaaaatatatgtatatattttatcaaggtataattattcttacatagaaatatacttttttaataagggacttaaaaaatgtgtaactaattacaatttaaaggttattcttattatgattggctcaaattgagatttattttttataataaattaaaagttattcttgaatagaatatttttatataaaaattctacttattagcatgtttaaaataaaaagttaataataaaactaaatgatttgaattttctatatatataaaatatatattgaaagaattagaagcaattccagtttgccttgttttaaattgttttatgcatagtatgacaaagagaaatgttaaaaggtattagtggtgcttagtactctcatacgtgttaatattgttatttgtttaactaa

SEQ ID NO: 32589 - DNA, 1867 bp, Cannabis sativa
  modified_base (1825)..(1827): a, c, t, g, unknown or other
ggagtctatttatgcataagtcaattactttgtatttttgagatctatccaatgagtcttatctctgggcatggctctatggactagtaacaatctggaagaattgttgaaatcacgtacaaaaaccttgtgtgattttacttttctgcactgtttgtttctctctagtttattctgaagttacaaagttgtctcctatagctacagaataactatttcagtatcagttttattatttcacatttaattaagaaattaattaaataataaactaataattttaaaatacgaatttcaaggtataaattatgatgatgacattggttttgaaagtagttggaacttgaaactacaagtgacataagatagtggctttaaatgtagtgacgaatacaagtgagatacagtgatgataacgattttaaaatcatatatgatgagttattttataaattcatcaattgtcttcttttttgttattttattaggcctctattttgtgagagttttttaatctctaatatattttttttataatgtttgaagatattaatttataaaattgagtaaaaaaattaaatttttttcataagatagttaatcgttctaataaaaaaatacattaaaagtatataaaaaaaaatgaaatatgatataactgtatgatttaattaaataaaatattaccgcatacaaaatctgatttattttctaattatatatagtgaaagactaatagaagccacaacttactcacacaagagttactaaatgctcacacaaatttcacacagaagcaaattactagttttttttttttttgctaagaaagagtaaatagcttgttgatatattactatctactgacttttttttttttgacgaataacagtatccattgaaatcaaatataaagtgcaggatacaatcacaaagctagagtagagcttgtccacagagcttcctggtcaaggcctagagctttcttagctagagaatgggccatttcatttgcccctcttggaatgtagctaatgaaagcattatgaaaatatgacagcaagctgttaatagcagttacaaatttgttgagatgaatattatgggtgtttttgttacaaatataattaactaaaactttgcaatctgagactatgctatccggagcaagggagtgactatggcaccaagaaagagcatattgcaaggcatgcgcttccataaggagaggttggtagaatcaggtccaaggcttggccaaagtgatgagtgtctctccttgactagattgaagagccataccaaagcccatttcattggctcgcacatcttgggcagcatctgtagaaagccgaagtcgataggtaggagtgcgtggctcattcacagtagtcagcaaaggtatctcttgtgttgaactaggagtagaacctcgtgtgttgcagctttggtattgatctaaatagttctcaacccattgcagaacctgtgaaggagaagtagacaacccagaatgtagccaattgttcctgcaattccaaagtttccatagcaaacacaaaaagaagtgatagtctctagcattatatgtagtggcagcgaggtaaagtaaatccaaaaaattgagagaagcatttttatcaataaactcatgaaaaatagttaaattccatacctcttggacagttgcgcatctgaaaagagcatgctccagggtctcatcatgataaaagcaccaacaacaacatgtggtatttaaaactttgcgttttaaaaggttatggctggtaggtagaattgttggaagttattttaccaggaactnnnatctactcacaagtatgttaatttaacaacctaaatatga

SEQ ID NO: 32590 - DNA, 1149 bp, Cannabis sativa
cataacttgtgtcttttattaattactaacacaactacaaaattaggctttagaggctgtttttaaggcctttgaatgtcggttttggtaaaattcacttctgacgctattccaggcgacacttaggggttaaaaacaaccaacgctgtagggaccctatggagtcgctattccagccttggcctctgcacagacctcattctcctcatcagaagatcccatttcctgcagctgagaccttattccctttcttaggaaattcctcgataccagaaagaggttggtgcaaaggtcttgtggtataggtttgggtcttgggtttgctagattctctgatagaagccacaccaaattccctcttggattcacccgaaaccatgccaactttcttccgggattccttgtcagcttgaggaggacctttaagatcgctcacaagacctatatctattcctgtggagacaaagaaaaagggtcaatagagcaacaaaaaatatataaataatccgactcaaaccaccatatataagggataatacctacccacaagaatcacttgtgaagatcgcccatagcgatctaaggggttcccctggtttggattagtcgaaagctcctcagccttggaatccatcatttccggttccaattgaggttagaagtccttgagaatgaatggagaagaaaaatggttggtgcatcctggtgatatgaattcgggaggatgaacctctgaactcagatgggacattttagcaagaaagagacaatctattatcaagatggatctatcccaaaaagccagaagtttgtgaaaaatggcaagcttgagtcgccgttttatacacaaagtccagtgacaagaaagccaaagattgggaaatctaacggttgggagtaaggcagaatatgaagaggcaattcataattaccctcgaaaccgtacaacccccaaaatcaaaggatgcatctttccaaaaagggattatgatgaaaatgccctctgtaattattaaaaagcactttttactaaaaaagaactttttaaggggcaattgttataccgaaaatttgggtgccatctcagtggaggacacgtgtcaatataaatggaatatggatcgatgaaatcgcattttatggaataac

SEQ ID NO: 32591 - DNA, 2661 bp, Cannabis sativa
atgtcaaacatacactaaaagtctcttgtttggggcactagcccaccgataaagtaatttatatgaacgatacctatctataaataataaaaatgaaagacttccaaaaaattgagagagaggctaagagccgaacttgggttaaggtgggctagacccacctagtctagagaccttaaaattattttttctttttgaaaaatataaataatttttactatttttaaaaaatatcatatattatttttttcatgagaccccaataataattttttgtcctaaagcccacaaatttcaagggccggcctagggttagcatttttagataagaattgaagtttcaacttaattagtgatgttccttcaaacaaaaaaaaaagagacttaattagtgaagtttatgttatattgttgtaataacatatgaaatacttaatttcatagtgggatttgtgatcatgtggtagctcaagaacaatattggtagaaaacttttggtcataaacaagtcaacctcattgctagtttatgggcaaacaaacttttccaaaggtccatatatacatattctctctcattttttttttctttttatctatgtaaaaaatttcatgactagtacttaatttgtctttttttggttatcatccatctaatctttacatatacattatatggaattattattatgggaatacctacatagctaccacaaatcacacatgcatgtgtcacccctcatttgtcctagttcattagacatatatatatataatgagagatagagaattagagaagacttagcttattccccaatagagttatacatgtatagctcttgtaaaaaatgagatgcccccatgttataagttatatgttccccactaacaatgaaggagatttattacacctttatatattattttatatatattagacaaagtaaattatgtgtacacatagggttaatactattgtagacatgtattttgtaagagttatcgaaaactttctattttgttaaataaaaaaatagacatttcaaaatagtacataatagtaatctaagcctaatttttgataatttttttaaataaccaacttaaagataatttttaatataaacaaataaataaaatgtatctagtcttatcataacacatctataacgagttattattaaattttattttgttaaaaaattagttcatattttgtactattttgaaaaatactcatttattaataaacagaaaatgtttaatcaataatttttataaaacacaaaattcaaaataatatttatcacatataaatgaagagatttctctagctctaaatgaaaaatgatctctctcctatacctacaacttatttatataaagactaattagaatttttattttctaaactttaacatataccaaatcataccttctgaatttttttagcttttaaaaattctccctgcactattgagatcgttagattcaaatttttttgtcaaatttcatttaattttatcaattcaattatttatgtatagatcataccatgctccccgaactttatctacaaaatcatgtccctcgaatttgacatgtaccaaattacgcttcctaaattttcatccatgttagattttttttactaaaattagacaaaagttatcaaattcaataatctcaataatttaagggaattttaaatggccttaaaaattcaatatacataatttaatacatgttaaagttcagggaaaaaaaaagttctttagctttatatataaataggaattggaaaagaccatgtatacgtgtataatatatatatacttaatgaatggaaggtagctaaggttgatcaataatgataatggttttgttggagaattaataagtacgtacgtagcttgttctttcaagtactaaatcagaataaatatgtgtacgtctatatatatatttttttggacttttattttattttgtgtcacgtggagaaattaaacaaataatatagttttttttaaaaaaattaaataatttaatgaaaataaagatttaaagagtctaatttacatgcattgcaaactaaataatgatttaatcttaataaattatttaaaaatttctcaaacactaacgggatgttcaatataacttaaatgtacattattattgcaaaaataatttagattacatttttatcacgtgaaggcgaaaacaaaacttttatatttgtcgaatagtttactactacgaaaatcacagttattttttgagataattttttaatcacaacataattttttgtgactaaatgtgatttttagtcacaataaaaaaactacttatgactaaaatatatagtatttaaatataaattgtcactaatttaattttagtcacaactgtattgtgactaaaaacacatttaatgaataattaaattaattataaactttttaattacaatataaaaaaaatttataattagtcacaacaaaagtgtgtgattttttgtattagtagttgtaggaagccaatatataagtagccctaattaactcatcgtgttgctactatatactccacaaaaagatcatatatattattagctctatatcttcacacacatgcaatatcatttatatatata

SEQ ID NO: 32592 - DNA, 1987 bp, Cannabis sativa
aatggtcaatttagtgtaattacaccttttcagagtaattctaatagtaaaaattatatataaaaaatatatttattaagaaaattactttattattactttttatttttataatttaaattgttccattaattgtaatttgtgttgctactgaattgcaatataaattacaatttaaattgagttacgatttaagttgtttcgtaaattacactataaattctgcgaaaatgtaaaaaaaattattttaaaatatataaataaaaaacccatatcttatattattatattatttaaatattaagaaaagaaaaaaaaaaacatttgtcatagctcactttttttttccctctcttatccaatttttcttccaaccaacacattaaatagttttcatacgagtataccattaatagttgtaacaaaatcagttaactgtcctttttcttggaaaataagaaacaaattattgccctcaaaagtggtttgaagcttacacataaaaatacaaacttcgaatgcttcattatttttaccttactcaaagtgaaactatatcccaatttattacaaagttttttgttttgttttttcaataatcaaacccaaatatctgaagtacaatcaccacctggatatctcatttcatgggcaagagaagggccatcaggctcagctccaaaatccacaaaaaaattcgggttgatagccaaacctcctttctcggtatcaacatcgagttgcaacatgtgagaacctttctccatgagctcgggatagaattggcgatcccatgtactgaaaagcgagtttgtaacatagagtcgcttcccgtctaagctcatctgtatcatctgtggtccgcctctcaatttatgaccctaaaattttgttaagaaaagaaaaactaccactctttaatgtcacaatttatttggtagcaagtaaatgtgttacctaaagatatggtttgtacaataaagatgtttatggatcaatttgattcatcataaaagttgtctaccactcatgccatttcataaatgtacaaaaagactcgttattagtgcaaataaatatcaggtctaacatctgctactaaattatacctgtatttgtggaacatcgaactggaaagttttaccatcttctccctcggctaataccgagcttcccttttgaatttgtcctccaacccaaacttgtcctgtcaacttgggatttttaggatcctcaatattgtactgtcttacatcaccatgaagccagttaacaaagtacaaaaaccgatcatcgagtgagattagaaaatcagtaatcagtccaggcatttcgggaagaatccagttctgcaccttcaatgctttcactgatattgcaacctgaaaaaccaacaacaagaagaagatataatgccattcttagtttaaaagaatgaaagtctgttaagttagttatcttttcaattggcctatttaaaggctttcattcttctgggtaacacattttgtaacttgagaaagtgaattgacatagctgaattgtaatgagagtgagagagatttcagaggtgttcaagggactaggctgtccaattggagaaagttcgaacctctataatctttagtgttctttgtatttgaattgtttatagttttgtactggtacacagttttgtagtttggtgtgtttgtgtgtagattagtgttgtaacaatttccaataatggaaaaacatttagatttcttatgtacaaacctcgtggctccaagagtcgtcggggttcttgaaaaacctcaccatgttacttgtcaacgcagctccaacaaacccggtatctttggaaggatcatgcaaaaaccttatctgtcaaagaacataacagaaacctcaaatatttcgtagttacaaacaaaagtattcggttattgcaaaatcaagtttatgtcagctcacctccaagggtaacatccctgtgttaccaaga

SEQ ID NO: 32593 - DNA, 3120 bp, Cannabis sativa
gatcttcactaatttcagatcaactaactaagtaactttaattcgttataacagattagattgcagcgttaggttatgaagtttgcctacaacaaactcaatgcttgatctgaccatgtcctcttctagctgaggtgaaatcttaatcataccagttacctgcctaggacccttcctgctcagggcatcagccacaatattggccttcccaggatggtaaaggatttcacagtcataatccttaaccaactccaaccaatgcctctgtctcatattaaaatctttctgagtaaagaaatatttgaggctcttatggtcggtataaatctcagattcctctctgtagagataatgccgccaaatcttcaaagcaaacactaccgcggtaagttctaaattgtgagtcggatatcgctgttcatattctttcaactgaagggaggcataagcgatgactcgatcggcctgcatcagtacacacctcagaccctgtttggatgcatcgcaataaactacaaagttttccttatcagaaggtagggctaataccggagctgtgattaatctctatttcagctcttgaaagcttacttcacacttatttgtccataagaattgctgattctttctagtgagctcaattaagggcgttgaaatcttagaaaatccctctacaaactgacggtaataaccagcaagacccaggaaagttctaatttttgtaacaatcttcgatctcagccaatccctgacagatttaatcttccctggatcaaccttgatcccatctttactgatattgtgtccaagaaaagacacctgagatagctaaacttgcatttcttgaatttggcatacaatttatgttcttgtaaccgttgtagaaccattcgaagatgttgctcatgctcctcttctgattgagagtacagaaggatatcgtcgataaatataataacatagatatcgaggaaatccttgaatactctattcatcaaatctataaatgttgcaagagcattggttagtccaaaagacataaccagaaattcatagtgcccatacctagtgcggaaagcagcctttggaatgtcctcctctcaaattcttaactaatgatatagcctgatcgaagagatatcaatctttaagaagatcgtcttcccctgaagctgataaaaaagatcatcgatcctaggtaaaggatacttgttcttaacagtcagtttattcaattcccagtagtcaatacacatgcgtaaggatccatctttcttcttaacaaacaatatgggagctccctagggtgacacactagtccgtgtaaaccctaggtcctaggtcaagcgtcaagcaaccccagaagctgaattttcaattctttaagttctgccggagccattctgtaaggtgccttagaaaatggttctgctcctggtgtcaaatcaataatgaaatcgatttctctctacggtggtaaacttggaagttcatcaggaaaaatatctaaaaattcccgaaccaccctgatgtcctttggctgaactgtctcaagtcgtgcggtatccaatactacgactagaaaccctagacattcgtcttttaacaattctttagctgttaatactgaaatcattggaatccgagatcccagaaccgatcccacaaaaataaacggttcctctccctctgattagaagatcaccatcttttgtttacagtcaatattgcctgagtacttggataagaaatccattccaagtattacatcgaaattcgctaaacccatttccattaagtgagcactcaactccctatcctcaattctgatcggcatagacctaatccaacttttggagatgactaattctccgctaggcagtagggctccaaacccttgatcataactatcatgcggtctatccaacttactaaaaattctaactgccacctaagagtgagtggccccaaagtcaaacaatacagagaagtaagagttgttgaccaagagctgacctattgtaactgaggggctagcctctgcatctaccagagttagagcaaacacccttgctggagcgggttttagagcagtcttttgttcttctttcttaagctgtgggcaatctcttttataatgccctggcaattcacactgaaagcacccttgcccactacactcacacagatgatgctttttacaattggggcattcttggtaagtgtatcgggtttcagaaccacactgacggttgcctcaaccctggttcccttagaacctcttgttctaacctgagccaccgggtgcagttggtgcttttcttttctgattagtggtcaagccactaccacccctaccataaccagaggtaggaggagtagggccccactaatgacctgagtccctcgagactcctgagtgcactccactgcgccctcaactcgtaatgccatccccaccatgtcagcataggtggtattatcgtcagtagtaataagatcatgtcttatcttcaaatttaatccatccatgtacttttctttcttactgaaattggttagcacaattcttaaggccaacctagccaatcgatcaagctaaattatgtattcagtaacactcatattctccttcagtccttctgggtcagctgggtaaattcctttcttttagcacttcttaccacttcgttatagtacttcgcgttaaataactcctgaaacttttcacaggtcatagtagtaacatcataggtcagggacaccatgtcccaccaaactaggagggcggcatcctcctgaaacaactggaatgtagcacaggccactctatcattaccagtgacgctcatgaaattcaaaattcttgtaataattgtcaactactgttcggctttcatcacatcgggacctcccagaaagactgtaggtgcctgcttgcaaaaccttacgtacagtggttccattcggttcactgcagcaactggtcttgcttgtacagtagggacaggagctacctgcatttctagagtaggcatggtaggagcaccatgctgcctcaagtgtctgatttcttcctcttgctcgttgattctagcttgcattgccgcaaacctattt

SEQ ID NO: 32594 - DNA, 2120 bp, Cannabis sativa
taattggaattatcactctagtgatgtcacttctgggagaatcttgcttatttggcaagaaaaatttgttcattttgatattttaaatgagactcagcagctggtgcattataaaatcagattcattgggcgaaaaaagggaatagtggtcacggcagtgtatggaagtaatgcaatggaagttcgtaaagaactttgggacagtctagctagcttcagtaagctgaatgagccttggattattcttggaaacttcaacacaatgtttagtttccaagatagaagctgaggtaagcctattcagaataaagatattgtggatgctaaaaaatggcttgctttgggtcaagttgaggagtttaaaagctcgagatcgtttttcacctaaacgaataagcatgaagtgagggataaaatttattctaagctagatagagtttttataaacaatatctggctgaatgattttcccaattctgatgcctgatttaaatgggaggtcatctcagaccattgttattgcttaatccgaagccatgttcagaataatgtaggaattaaaccatcccattttgggaatcattggccttcctatcctggatattatcaactagtgatggattgctggaataaaaaggatgttggaattggtctcgaaagtttaataaataggttgtttcgggtcaagcatgccctaaaagtctttcacaggtatgaagtgggagatgttgcaaaggagtacagggaggctaaggaaacttactgtggaatttaagaggaagcagctttgaaccctacaaataaggccctgcaactactggtaaaagacaagcaattattttttttacagcaaaggaaagaatggctctgaatcttcgtcaacaaagtaagatcagctggattaagtttaatgacgaaaattctaactattttcatgccagtatgaggaaaagaaggctggaaaataggatcactactttcatgaagggggatactatagtagatgattttgaggaagtggtgaaacactttgtcaagcactttgaaaattttatgggaagcaagagttcagcggttagcactattgatgagacttgtttgaagcagggtaataacttgaacttggagcaacaaataagattgattcagccattcaacaagggggatgagaagaaggctctttttagcattcattcttctaaaagccctaggttagacgggttcgggtcagaaatttataaggacctttggagcaaaatttgtgatgatgtttcttctgtaatcctcattttctttgccaatgggcggctgcctaacaccttaaaatgagactttcatctctttaattccaaaggtgacaaacccatcaccggctaaggactatagacccattgcttgttgtaacactgtctataaatgcatctcgaaaatgatctgctcaagactgtcagaagtattgccttctatagtcaacaataatcaaggtgcgtttatcaaaaatagactgttaggtcatagcataatgatatttcaagatcttttgaagggttatactagaaagaatatctctgccaggtgcatcatgaaaattgaccttagtaaggcttatgatacggttgattgggactttgtggaagactttctcaggcttctgtgttttccctctcgattcatcaaatggattatgacttgtctaaggggtactagctatcatttgcttctaaatggtcgaatcgaaggtagtttcgaaggtaaaaaaggccttcgcgaaggagatccgatgtactctttgttctgataatatggactaccttactagattgttgagctactactctagtcaaaagggttttgggtttcatcctctttgtaagcattttagcttgacaaacttgtgttttgtggacgatctagtaatcttttgcaagggtaacatcaactcagtgaggcttactcataaagccttcaccaagttctacaatgacataggtttgtcagctaatacctcaaagtctcacatttaactttggaggggttagtgaagaggtcaaagcaaagatccttgaaattgttcaaattgaagaaggtagcttccatctgaagtatctgggggtcaacct

SEQ ID NO: 32595 - DNA, 3105 bp, Cannabis sativa
aaaaaaaaaaaaaaagaagagtagcaatatagcatcgctactactgtccagcaaccccaaatatttatatttgaaaagtcaagttttttttttataatgaatctcattttttgacagtcacattcactagcaatttcattggagttgcactaatgaaataattaaaaacggcgggtcgatctgatcttaacaaaacaacttttttgaaattaatttatgctacctaattttgattatattttaaattaaattacctcaaatttaatattaaaattaatctatgataaatcacaacatttatagtattagctgtgagcctgtgaaatagtgaatataaaataattgtattcgaaataacaaaaactaaacaatacattttcttgatgtgagatgaacaaataattctttaattttacacatatatctaaactttttttcatcatcaaatctattttttgaactttccgaacactcacataaaataaattcatgtatataataaaagcatatatacaccacaaattagcgtgactatatatatagtatagaatattatataatttaattagcttactttccattaattaccgttgcagtaccattagtaccattagtaccattagtagatgatggtttaataccatactcagccaaagccatttcagtctcattagccttggcagcatctctaaacttcttgtaaatgtcactcttgtaaaactgtctagttctaataaccaaaaccagcgaaactaacgatcctaaaaacgtggcagctgtgataataagaaatgataactgaaaacacttaacgccgttacaattcaaggcttccccaactttccgtgtaattcccgaagccaccatttgcttcctcgcttctttatcgtataaatgcccagtcaacctcacgttaagggcgtagagcccgatcgggctggctacggatccgaaattgtagagagtagaataatacttgagtccgaaaagctccgaaattatggcgaacagcaaaggccattgggccccgaagcagaacccgatgattatcgaagcgaagtaaagaccgttaggcacgtcgaaggcgattaggagatgacccacgcaagagatcaatatgattagagtcaacagaagaggtctgggaaatttgtaccgggtcaaaaagaactccgaggcaaaacccgctacgacccgacccagatagttccatatgctgactaaggaaacgaacgtgcttatgctccgttttgggtacccgagtgatgatccgatttgtccgagattgtctatggccgttagagtacccccgacgccactgatgcaagccacgaagagaatgagcatgtcgacactgaaaagggcttgaagtattgtgtaatcttctcccctgtttgggggttggaatgccgttttccagcacgaggcttctgttggttcgggtttggtttcgggttcgggttcggatactggaaccggatcaagagtaacgctactatgattctcctcaatccttgtgaactcgagtttattggactgaaagagcttatattcttcgagaaggactatagcaacaggaagaatcagcaaaaagattaccattccggcgctagcgccaaactccggccgattaaaggtaactttgttctgtattatgatcatgaccatgagaaaaccagcgagcccaagcgaaatgtagagaaagttgtagaagactttgagctcattgggttgtttaatgactttcatgtaccgaatggttctgagaaaagcgaaggaaatagctgcaggcaaccaaccgatgaggagaatcaaagcttttgtatcatcgaaataaaaagcgtgaaagagctgagttatgatagctccactaagacccacgtagcccttgaggagacccaaaacggcgccgcgtgactcagggaagtttttgacaaccgtgactagtgagccggtattggcgaaggactgtgaattggccccaatgcagatgtaggcacacatgtgccagaccttgggagttgggatcctttttgtgacagccatccacaccatgaaatagccgaaaaaattaaggacaccgcccacggcgaggaccacccacggcggtgtcacctcgttgattagaccagcaagaataccgacgttagagcctacgtctttgaaaaacgacaataagttgagtgtcgtttggtcgtagccgagaacgtcctttatgtcggttgagtagaggccaaacatgtaggtggcccccgctgcggacatgattagaagtgatgcgaaaaccatgaaccatcgaccgtttaggacttgtaaggttaggcctttggtggtggcccaaccccctcctcctcctcctcctccgccgttgccagatctggcaacgtccatttttgtttttattggtgaactagtataaaagaataattaaggtaattggtttgagttattgggggagatatattagggtataaataatcaaatataacagaacaacgggagaaagtgtgacacactactttagagttgaccgtttgttacgttggaatattaaaatttgattgcatatatatatactgattcgatcctgtatgtattttagcaaaaaaaaattctatactgtatatttggtataggattagattaaattgaggtttagctggaaaaaaaaaaagatatgataaaatatattttttaaaaaatataccctaataaggctatatattaagaaaagattaaattgagtaccctaatatagttttgaaaaggattataattttttaagtttttaattaattaaaaataatgtttaattaaacaaaaaatttaaattaaaataattgttctataagtgaaataatatcttttttctgaaaaagtcatgatataaataattcattatttttaaaatttaagaactcgttatttttttaattaaaatacatattaataaaaatgtagttaaaagaaagacacaaaaaaataaaaagtttcctttggaagtattttaagaggaccaaaaaaaatcgaaggataatttttgttcaatcactctaagtccaattccaatataatatacaataaattgtccaataatatcccacc

SEQ ID NO: 32596 - DNA, 2101 bp, Cannabis sativa
  modified_base (2034)..(2037): a, c, t, g, unknown or other
atgtgaataccataaattatttttatttttaattataatttaagtaaaaatttattatattttatatttttaatctaattagtaagtttatttaaattattagctaaatataatcattgtggtaatttttggtaattaatatgatattattttttattttattaaaaattaaaataataataaggaatatttttttagcgttgtagttggagtagaaatatttgttgacaccaaatttggtgtttccttggagatgttcttagagagagttaagtgcaagtagaatgataattgagagggtttaaaaaaaaaaaaaactcaatttttaaccacaaagtaaaagcctatgaatattgccacaacgatccctaataactatgcctacaagagcacactacattgcttacgatacaagcctacatgaacatcaattcaaacctaacccagtggcgatcttccagcaatgatgatgagcatccattatcggcattagtcaagtcaattgtactaaggttgaagatctattctactattctgaaatactattgaccatatcagttatccaacaatactatcaccatattagattaattacattattagttaagattgaattgaactggactaattatcttagtactaactcacacacaacatgattaacaatttctccccataagttttttatcactcttgaaaacaattgatgggctatgagaaatggaacaaaaaggaaacttacaaacaaggcatgagccaatagcaagataaagatgatgtaacttcaaattcagctttaattgctgaaatgatattgtgacaaataaattttccataagaacactgtcacttcaagaggaatatttaagttcccaagaaaattccaccacttatgaagcagataacaagactgtttctcttgagggtgaaaaatccaccaaatttattaaaaattaaaaattatttaatttaatttttgattaacatataatatttcaaatcatttatttatttctctgaaaaaaaagcattatttatcaattttaattgagttatttttaaaattaaaattgaaagtaataataaaattatttatttaaaaatctgattagatatttacatattacggtttcgtacgaaatatatatttttcttttaaagtcgtacaaaatgtattttgtttatttatgtagtgaaacaatagcaatattcataaactaggaaataggccgcgcttcgcgtgcggcagttaaataattatataaatattaattaaacaataaaattagtatcaaataattttaaatttatttttatgtatattttttttttaaaatatatatatgtgcttattaaaaaattaataaatctatataaaaaaattaagcagttttttttttaaatatacattatagtgaaaaaaattagaaactaaatatttcttacacaaaatagagatctaaaacagaaagaagataataaatctataaaaaattcatcatataattttaaaacaactatcattactgtatctcatttgtagtcacaactatatttaaagttgatatcatcgccgtatctcacttgtaatcaatcattaatattctttctaataagtttactttgtacataaaataaattaaacaatgatcggtaagtacttactgtttattatgtgagggaagagaaggtgataaacataataagtttagaattttgatattttcggcatattagtaaatatttttttttgtgataaattatattagttaatattaactgtatctctctctgaaaaaaaaaattatgtagattaatttttttaatacatatatatttatttattagttattatatacaaatatatagttatttttttttttaatttttaattgattgatgatctctaattaaataaagtagaataaaaattagaaaaatgagagaatttaaagtagaacaaaaaatatagaaaaatgagagaattaagaagagaatagatattaaaattatttttaattattaattaattannnnaaatttaaaaattataaatagatagtttgagttttctttgttagttattatgtatgattagata

SEQ ID NO: 32597 - DNA, 1208 bp, Cannabis sativa
attacaaacattaattacattaatttatttatggtaattagtttaatcattaatgatttatattatttaataattaaaatgtatgttttcatgtaattataagttttcaagatgtataagtttttaaaataattttttttttgcatattttttgtaattatattatttttgttgtacatttataaaaaaaatctctaatttttatggtaaggtaggcatatttttatttatatttgatattttgagaaattattaataatatatataacagtgtacattatagttataatatatattttattaatttttaaaaaattatgaataatttagggtgtagcaccaagtttcaaattcatatattcaatttgtaattatttttttgtacttgtgtaattgattaatttaaattctatttttaatatcatcaattatttactttttttttttttgaaaaattatagaataatccatatacttttataattacaatataaatcattgttatataaaaaaattatattataatactcacatgaatatataagaaatttttatggtgaggtatttaaaaaagagcattgctataagacactagtggtgtctagcacctagtcgacatgtcacgttgcaattagctagcgatactctctaaaagctattacattaaattatataggacccgatacttagttggaccaataggagagtgctagacaccaatagtaccctttattatttctctttaaaaaagaccccattcatgggcatttaatttaaagtatcgattggtcaagtgcatgtcaatacaatggtcattaacgcatcttatagaaacttgaattgatgaaaatatgttatcacatctcttaatgcatgtcctctctctgagtcaattgttttccatttgaatagattcgggactataaatagtgaaggagttttgttcaagctagaccgaaacggtgaaagtgtattcgattcctcctccgctcgtaacaatatcaccaccacacttttatcattgtcgactccactcagttctttaacatttcccccttttcaaccattgataccttgagtagaggttgtaatcgcagacttaggagggagattattgcaggaggtagaataagtacttttgcactactacaatgttagcctttagaggcagttttttcaaccccatttataaaaagggaagctaaagg

SEQ ID NO: 32598 - DNA, 980 bp, Cannabis sativa
gcgatcttagcaagacgaaagaacgtagaaaggaatttcagggctaattcctcccaagtgttgatagaattgggtggcaaagataccgaccaagtcttggctcgctcccttagtgagaatgggaacagccttagcctgatggcgtcgtcgctaactccattcaccttaaatgtttgacagagttcttcaaagttacagagatgcatgtttgggtcttttgttggcagcccctcaaactggactgaagattggactatctacagtatggtcggcttgatctcaaaattattggcgtcaacagcaggtgatcttatacaggattcgacccccgtcaaatttggtagcaaatagtccctcaggctatggtcattgttgcgaccattagcctagtcttctacatcacctctattgttaccattgttaccattgttgccattgttgacgttatcagccatgactacgttgtacttaatctctattgcagccttttctagtcttttccttagtctgttctgtctggaagtcttctcaatttctgaatcaacaggcaatctggcagttgcaccttgatgtctcataaactagtgaacctgagaattgaaaccaacaggattagtactaaaattgaaaaggaaaaaccaaataaaaacaaaatttaatttttaataatattaactgataatttctggcagcggcgccaaaaacttgttgtggtaattgcaatatgcaagtatacgtattgttttaacaagtattactcacaaagagtgaggtcgatctcacgaggattgtagttaagtacgttaaaattaaactcttacttctatttgactgaataaaatttgagataaaattaaactagaaaacaataagaacaataaaaatcaggatgcaagtaaattgataggcaaattaacaatgtagaaaagttagggttttcgattacaattgtatcaactgattatggcctaatatgatta

SEQ ID NO: 32599 - DNA, 1632 bp, Cannabis sativa
agtaatggtaatgatggagacacaaatttcatctcgaagttcgcccaaaactatgtctacttctccgtcaagccctcagcttaattccattaatcatcaaataataggttacactcttgatttactactgtatgatttctctttgtttttttctctttggatactaacaaaactctcttttccttttacataaacacacaagtgattctctaggaggagctcactaggaggggacaactatcatccaaaaggctctctttttctctgttgtagtttctgatgttgttctctacttgttgtatctctttttctctgtatctgagaaaaaatacttccttttatactgatctatgattctgaactagggcagagccctagtgtaatatttgtaactgattttgtaacagtttcagttgtaactgattttatgttctttaatcttgatctttgttgtatttgatgtaagggtatatttgtcaaactctgtgagtagtgttatacaactttaggataaataagtgagtttgtaacaacacaaaattttatgatattgcttatgtaagtataactatggaaggttatctgtgaaactaaaagtcaagtgatgttgaaatattcatctttcagggcaataggaaaacacctatagttgaggctataaggatattcaaactatgattaaagactaattatttttgtgtttggaaaagacttatacagtatcatcacccagatgattttttggttttgaattctattttgaataagttaggtcattcttattcaattagaatttgaaagtcttttccaatattggttctactagttctttaatttataaatttattgaaatttgtctcatataaagaaactttttttatggtacaaaatataaattaaatcatgagaattctattatactttggtataagtattaaggttatatctcccaaaaggaaaatcaaaagacttataccccttaatttaataaattttaaattttgtaaaggggtaacaaacaaacatgaagaaatcaagtgacaaaataaagtttcattatctaagaatttaagctatatttcgtagatatttcctcatggtttcatggaatgatcaataatagtatcttgtatttagactaatgaaatttattttattcataagggcattaatcttcaaacgttctttcttttaaattttcaataccatagttgactaatcaactaggcaagaaaattaaagtcgatgaaactaactatggtggttaatactacaatgggaggtatgaggaatcaagtaattttgtctttcaatacaaattgtaaggcaaaccaagcatgaagggtatttgagagatgtaattaacatttatttaaggacatggctagaagtgtgattattcattcttcttcatgaaattggttttggggagaaacacttaagattgcaacataaatcctaaattgagtatcaagtaatgtataagttaaaattctttataaagtaaggctgtgattagattaatagtgtaacatatagatatattctatttgtggatgttcgattaagatgagatcttataagcctcataaaaggaatatggattcaaaaatagtaaggaaatatacttta

SEQ ID NO: 32600 - DNA, 1015 bp, Cannabis sativa
ttctggatttgtgtacaaggctggtggttgacaaagtgcaatataacttgaaattagaagtaatgataatcgtctaagtttctatttgtcaatgcttttgaagaagccatatgaatttgtttccctttttgtgactttggtgaagaataatgtatgtatcgatcgtggttatctaccaagtactgttaaggatactcgtagtgaggttggaacttatgttccataaataaattcacaggtgttggtagcagatgtgttacctgaattaaatactatcatggcgacagttgaccatgtagcacaaattccctttcatgataagtttggtgatggtccaaaccctgaagcttattttaatggcaatgatgatgtaagagagaatcaagagacataggtccatgttgtagctttgaacttgactcgattattgtaccaaatacttaggcaaacaacacgtagaagaagaccccataaagaagattgacaaacatctggtactagtagtagttgtataaacgaaaccattaatgctagaggaaccagtgatgctggaggatttagttattcattctcttctttgataaattacggttaattcaaagaaaaaatatatacaaaagaagacattgaggataatagtcattatacatctatgggtggcacactgagtggggagtgacatttaggaaagttttttagaaacaaagagcatttgaatatggtcgttagcttgtatgcaatgaataaagggtttgacttcatcgttgagtagtctggtaccactgtttggtacattaatacaaaatttagattgcgagtggagagtaagagggaagaagaacgtactttctgacatgtttgaggtgactacatttcaaaatttacacacatcccttgatgtttgaagaaaagataatcgtcaagcatcacctttgataattgcccacctaattaaggataaatttgcaagtgacggctaggatcattaagcctctaatataaaaaaaaaaaaaaa

SEQ ID NO: 32601 - DNA, 2083 bp, Cannabis sativa
agtaaggtcccaacccctcttctccgactcaagattgtcggctttgctcttcaaaatcttaatgtcgacctccaaggcgctaattttagtaagagcagttgtcttcgcggcaacagctgcttcataattctttttatagcgagaatagcccttggccaaactctccctctccctatcggtttgtggagcgaacttcatagcatgtgcacatctcaaagccgtctggcaaaaatagagatatatatgagtaataataagtaaagcaataactaaaatggaatgagatacatgcaagggataaatcacatttattcctgacatggctgtgtccttcaaaatagaatcacgcccgtgggagatgtagaaatcatcgtcaggttttctgacggcatccagaagagttttgaagtaattttcagccgactcctcgaacggaacatcctttttaatccggaaggcagggatcttgtcccatcaatactacaaaatagacttttcccaacagttaataagggggtcaattataaaaaccgttggaaaaggtaagcggcgattcttaccaacagtttataactgaagcaaaaaaaactgttgggaaagaacccaatgcccaaacgggtggagaaccgttggcaatactaaatggaatttggtaaacaaaaacaataaatgccaacagtttataactgttgggaataataagtatacccaacagtttataactgttgggaatactaagtatacccaacgtttctaaaccgttaggtatacatagtattcccaatagttattaaatgttgggaaatgatctataaaaaaaagtttcatatttaaaaaaaaaattgcttaataaaaaaatttgtatttacttaaagaatatactaaaaaaagtttcagatttttttttttaaaaaaagaaatttgtattctttttttttttttttgctttataaaaaaaatttatatttaataaaataaaataataaaaaaaatcacatttaaaaaataaaaaaaagtatttttttttggaaaaaaaaagagttttttttttacttaataaatttataatttgaaaatttataaaattaaaaaatttatatatattaattaaaggataattttaaattttattttattttaaataaataaataataaaataattaattaagagttaaaaaaatatatataattttacatcagaatttatatatttttttttaaaaaaaaattgttaaatttagaaaaaaaaaaaactctataaaatattagtttattacttaatttttatatctcagatttttaataatataaatatatatatatcatttttattaaataattattatttttttcaatttaaaagttaaaaactctaaccctactctcagtctcagccgcatatatgcctattacctaaccctattatcacatctcttcatcttctcatctcatcacaaactaatctcaaagcttctctctcttagttgcagtggacggtggaggagatctctcttggtcgcagtaggcgatggaggaggcgacgatttcaaggtcgtggaggagacgacgacttgaagggatggcggaggagacgaccacttgaaaggatggtggaggagacgacgacttctctttgcacagtgaaggttggatctgttatatatagtttatggagagttcttgaagtgcgggtttttattttttaggcagttttatgggggacatttctgagttttttcagggttttgattttgttttcttttgcaggtcgaaaatggtggaggtttggaaaaatcgatgccggcggcggagaattcaaaggaaatttttggtccccccgactccaccgctagctgatctcgataaatgtggtccaaacaaaggttgaggaagaaactttgggcattaattgatgtggtataggacgtgaatctagaacgaggttgcatctgaggacgtagttgtgtcaactccgatcgtgtctcctctccttcgtccacctgatatcggctccgagcattgtatatatgtattttactgctttaaaaaaatgtcactttattcttttttcagaattgtata

SEQ ID NO: 32602 - DNA, 1392 bp, Cannabis sativa
  modified_base (361)..(365): a, c, t, g, unknown or other
ttcggtcaataaatgaataaagatagttatttcaaaattcaattgagtcgaaataatcagcatgtttataatttaccatacaatgcgtacaaaaggtttggtcaatcccaaaacaccgaacaagaaaaaaaatatatttgtaaaaagcaagtgacccggagtcatacgtctgctcggtcacttggggggcacctatacctgtacaaagaatttggtaaaaataaaacaatcacgattgcacgacaattataaacagagaatgaaattcattaacgataacaaaagcacgtaatactgggattaaaagctgtccggtcagcccattgtccaaaaaataaaaaataattccaagtttaaagannnnntggctggtcatgatgtcttagaaaaggccttgaggccgaatatatgtaaaaaataagaaggagataaaaagagaagtgtttaagcagctggactccaaggctcttggttcggttcttctgggccaactggagcaggaggatctgttgtttgaacaggaggaacatcagcagtttgaccagaggttgaaccagctgcctcagttttgccataggccacttgggacgcacagaactcaaggtacatgtccttagcatcgcccaagtagtcgtaattggcctgaggaatagccttccaaaaatcaaagaagaacttgagaccggctgtctctaaggcattgaccttctccttcaacctgtccacctcatccgaaagctccccctccttggcttccttttcctccttcatccgatgaagaactgttcgaagggaagtcctctcgtctagaagactgttcacctcagcagataaggtctcgatggtctcctcaaaacggtcagcaacctcgagatccttagtcagcacaatgattttctgctcaggggcaaatagcttcttgttgtcttcacccaattccaatcgaacagctctgccttccaccttggcttcttcagcatcctacttggccaagtctgcctccgccttcagggtgtcggatagagctgcgttcttagaagtagcagacttagcctgggagtaagtgtaggccaacttcagaccgatttgcacaaaggaaaaactttagcatatcgagctaagtatggaagattaagggaagtatcaaaagagacttaccctggtgaactccttcaagactccgcccaccagaaattccaaagaagagtcattgtcaccaacagccagttgctcactgacctcaggaaccagccggttcatataatgggccagcatctccttgcctatttttgcctctggaagtaccggcaaaggtggagtaggtgcctgcacccgttcaggattactcctgaccagttcagagttatccattggagatcggaagagcggttc

SEQ ID NO: 32603 - DNA, 5873 bp, Cannabis sativa
tgggcgcaaaagcaaaggacaccccccaagaggcgccaacctgcccaagaaaatagctatgtgtccaaatcaaacactactttgatgccatactccgagcagcccccacactctcctaatcatccacaacaacaaaggacagtgagctttgttgaggatagtggttgatctgactctaaaagtcgctccattagtgttcataataatgcaccccgcaattatgaacgtcgctacaacaactatcccccaaagatgcaagaaggcctgatttgcgagaacacctcaatcaaagacaacctgatttgagggaacatttgaataaaagacataaccaaattccaccagtggtgaataataaccataatattgaggggggacatcaaattaacatcccccacgctgaaggacaagttaataatcataggctcaatgctttggaacaaatgatacaacaattaatggtgaccaacaactaaaattccacagggtatgattcggatgaggagcccgagccttactctcctagaatattggccttaccatatctgcaagggtttaagatgccaacaacaaccaagtacgatgggagtacagatcctggggtacacataagtgacttcaacacacttatgcgtgcccaccaagtagttgacgacttgagatgtgtgttatttcttgtgacacttacgggagtggccaagacttggttcaaaaaatttaaaaggcattccattacctcttgggaccaactctcacgcgacttcaagaaagaattttatgccgccaaggccagaaatttagaattttcctcccttgccaatgtgaagcaacaaccaggcaagagcttaagagcctatatcaatcattttaatgctgaagccgccaaggctagagacgttgatgatagtggaagacttatggcgctgggggcaggaattactaatgggtcccaattttgggatagtttgtaatgaaagggagcacgcaccatagatgagttcatgaaaagagttcaaaaatacattaatagggaagaggcaaggttggccaataacctccctctttcatttgaagcaatagaagctactcccacttcaacaaacaacaacccctccaatgcaaatacttattgcaaaaggaaaaatgaccatggtggggaccacaacaatgctaagaaagggaggactaaccaccctctttacactgtcttcacaaaattgacgaaaaagccagaaacaatcttcctcgccaatgagaaaactgtgagtttcttggtgttgatattggtaatattgagaggcttaacttgcttaagtttattcctggtggtcacctcggaaggctcatgatcaagatcaagtagtttttcaagaagtctactcaccatatacgcatccttcgatgagtttctcgaggaggggtctctatatgaacctgctcgatcatagaaacctatggccaagtcaaaggcagttgttatcttttactttaaatatgggcggttatgtatacttctcgcctacgaatcagagcatgacacaaaaatatctgggcttgcaggatgtgtcaggcataccgtaactttttggcacgacgtagcatgatcccatattcttttatagttcggtttagcacgacccgtatatattacattatttttaatatatatattttttaacaaacaacagtacattagtggctccattgaaatgctcgttaaaactagctatttttttttttgaataaaagtaagacttttgttaaaatgaagcttcatccattaaaatagcacgtaatgtaggaggcaaatcatactcctgaaaaacacgacctgtgaaaaaacaagagttgcatgccaaacagtgagcagctttgtttgcagatcgtttaacaaactgaatattgacattactcaaagaaaataaaatagcattgtaatcatcaactaagattctgaactcagaaggcttatgtaacttgctttggagagcctgaacacaaaccaagttatcagtctccaaaatcacatttgaccataaatgttgttggatccaactcagagcctccttaattcctattatttctgcaatttctggggagactacactcgttcgacttgctagaaaggcttccaaaactcgtccatgatgagttcgggccaaacagccaaattcaaatctttcaacatctacaaataacgctccgtcaacatttaccttgatctaattacaagtcgttgtagtccaacgcacaagatgttttgaaccaacataaataaaggacagagaggaactcgtctgtgattgtgtaaatataaattgatcaaggagagaacaagctgactaaacgatgaatgtcgctgtacaggacttattttgccaaactgcttaattttgtacattccagatcacccacaaaaccatgacaccattttctaaaacttgctgattagtcacaacagactgtgacataaaccagcagtcgaaatccatttcagaccagctggaaatattagccatggactgattccaacaagctcttgcaaaagaacatccaactagggcgtgaaagattgattcattgtgaccattacaaataagacaacatgaggagataggaacatgccatttaagaagctgaacacaagtaggcaaaatacgagaaattgctcgccaaagaaaattactaacctttggtgggatatttaacttccagttttttctccaaaaaccagtatagttgtcctcagaccaagcacctttaaggtcttctagaaaatgatatgcacttttaacactgtagaatccattcctttcaaacttccaagaccaacagtcaaaattatgtgaagagcttaattgtattgaagtgatgaggtcacgatcacgagctataaaaaattattaagaatctataaatcccaagctttagcatctaaccgaagtagactattgacatgttggtgtgacaaagtaggatgatatgaagaaacatatgagttgtccttacaaggcaaccacgggtcatggagaattgagattgttgaaccatcaccaacagttttatgagcaccagcatgaactaggaattgggctttaaacacactttgccaaacaaaactcggattgcttcctaattttacatttaaaaatgaaccagatggaaagtagcgagccttaaaaacttgactaaccaaagatgattcatgtgtgagaaggcgctaaccttacttacccaacagagctaaatttagatccctcgggcatatgaaacctaaacccccagcatgtttgtgtttacacattcgagaccaactcatccaactaatatgtcttatagttgatgaaccagttttccaccagtacttagccataaggctctcaagctccttacaggtttccaagggaagcaggaaaacactcattgcatagcttggaatagcttgagcaacagtcttcagtaatacctcatttcttgcttctcgagagtaaacaaccttcccacccttgaatacacttctgtatttatctttgagaaaacccaagatagttgttttcttacgacccatgatattagggagcccaagataagtggtattgttgtcagcttcatagattcccatatgaccacatatcatgtctcttgtagtaggttcagtattggaactaaagaaaatagaagatttctcaaaattaactctctgacctgaagctctctcaaactggtgaagcatgtccataacataatcaacttcctagttagtagcacggcaaaggatgtagctatcatccgcaaatagcatatgtgagaaaactggaaaccctctagcaactttacaactgtggatcttactatcaagttcatactttttcaataaagtagaaaagccctcagcacaaaggataaaaagataaggggatataggatcaccttggcaaattccgcgaggagtgatgggactcattggtcttccagcatggaaaaatataggtaacagtctcaacacaatgcataattaaattaactcagcgcccatcaaagcccatacaaagtaagacccctctgagatagtcccactcgattctatcatacttactcatatcaagttttgaagccatatgccccattcgaccctgagttttcctcttcaaggggtgcattattttgaaagaaatcataatgctattagaaataagtctaccctgaagaaaagtactctgcgtgtcaaagattatagacggaagaacaaccttgagcctatttgccaagactttagtgataattttcaggattacattaaaactagctattgattattatatttgttataaaataaactagtaaatattattattgataagtgataacataattaatcacttttacactctaatccataagcaataagaatgaagaattcatattatgtgatcatcaacttttcgtagtgatgcccataattatatgatatattattataatatattttaatattatctaatgtataactcattattaagttacatcactaacttgtccctaattttctaaacattaatatatatatatatttattatgtatagtcatgattacgtgagatagaagaaatttgatggttgagaaactcgatctccatttccaaatccaagctcttcttcttctccatttccagttcacatctcaacttctcaatggtctgtgccaagtactcctctctgctaattaccgtagtattatgatgatgatagccactatcataattctcaactaatcccaacaccttcaaaacctccattaatacacgcctctcttcctccacactccttttgataagttgaatactttccaatattttttccctatcaacaccaccaactgtagaactaatctcactaggcctggactcgctcactaactcaccagcactgcaacttaataaactactcattggtgatgatgactcgcccattaactcattgacacaaccactatcttgtgactcactaaactcgtcaacaaataatctatcaacattgtttatgatattgatattcttttctttgttagtactattactatcgactttattcataacggtttcaccaccaaaactaacatgttttgcaacagaattgtcttctactacttcttcatgaaccgattgagttgggaataccgggtcaagtttgaacccgtcttcattaaagttccacccactaatccttctttgtttctctcttataatgcaagatccaccgccatcatcatcataatcatcatcatcatcgtggcgatgttgaagagtagtagtagtagtagtagtagtaatattggtggtgatcaacttgttgaacctatcttcaacactagataagccatgcaaaatgtttttgacaagaaaatcaggacctttggtacaattcttaaagaaaggatgcttgagaagcttctcagcagtaggcctcttggtggggtcttggtccaaacataagccaaccatgtccttgaaactcttggagaatctctgcttgtttttgttgtttttggtgttttcatagtcagagaatcgaaaccgcttcgttatcttcatgaggagagacttggatagagggaggtgagataatggaggacaaccgtgagctaattccaaagctgtaatcccaaaagaccaaatgtcagctttgaatccatagccgttgtgtgagtgaatcacttctggtgccatccagtacggagttccagtcacgtctgttaaggatgacaatgacgttgacaatccacggtttgagtttgactcatatatagatgccgacacaccgaaatctgctagcttaacacatccatttgcatccatcagaatattacctgatca

SEQ ID NO: 32604 - DNA, 1200 bp, Cannabis sativa
gtcgttgatcggtgaagccggccggctgaaccgaacggaagcttctcgacgtcccagccaatacgcatgcgaaatcaccaatgattactaattaattaattacattaatatatgatgaatatgcagttagcctaattgatgaacatcggatgctgaaattcaaacacatatcatgcaataatagatttccagcgcaggggatcaaattaaggtttatggattttccttaatacttgtggagtactatcagtaatttattctaagcagtaatcccaataacccttgacgttggctgtgaaagtagccaaggcggaattagagttgatttaatcatttaatatgagataaatatctccaagggaatcacaaaataaaataagtttcataaaaaataataataatgtaagaacgatactaattttaaaaactaatttcattaacattaaaagaaattaattatttcattaaaagcaacagaaaaaaaaaatcaatttcatcaacatcatactgaaaaagaaacgcaatgcaaaaaattataatctaaaagatacaaactttaaaaatcagtttcatcaacattaaaagaaactaataatttcattaaaagaagcagaaaaaaaaaacagtttcattaacaaagatattgaaaaaaaaaattataatcaaaaaatgatactaactttaaaagcaagtttgataaacatcaaaagaaactaatcatttcattaaaaaaggtaggaaaaaaaataagtttcattaacaacataatgaaaaatacacaatacctaataaaccaaactttaaaatctagtttagaacatataaattttatatgaatatctaataattaaacttgtaacttcattctctattttggttaattttttatttgattgttaaaaaaccagagttgatttaagcatagaatatggagttaaaaataacaaagagaataaaaaactaaaactagagagaaaaaaggaaataaaaaaattaaaagagacaaaaatacaataaaaactgtaaaataataacaaaaataaataaaaatataggaatgagagaaatcacatataaaaaaacaacaaaaaatgaggcgaattaatattatacactctggctcatttagtacgttgtattagaccgtattatattatattgtattatattattattaaattgaattatatatcatatttt

SEQ ID NO: 32605 - DNA, 1794 bp, Cannabis sativa
tgaaagagcttcaaatacaagttgaatcgcatcaatcgaatcaatattgagtgattatggccattttactaaaagctgttctcagcccagttcccaagttgacatgtgccgtcaacctggacgttgggtgactaggaaaacgtgatgaggatgtattttttgatgcctaggtgatatttggacatcacttagccagtttttatgttttggtaaagctggtcaccagtgttagattttatgccctaaataaaatccaatttcattataatcttatttactttcaataaagattagaactcatatcttgagcttgtcatatactttgttcacatattttatacataattataagtttaatgtataagttctattaaatcccaaacatatagttatttacaattatagtgttttaatcacagtggaaagtaattgtgattatatgcttcaaattatttagtcacatgatttatcagtgcactagatttacactggcgtgttaattaacgatggggtttgcttacacttggataagtggaatgtcttttccagggcattagtaaagtaaactagcatcaaatgtatcaactatacatcggactagaccgatattaacagaaaaaaagatatcataaacttactgttatatcttttctaactcaatgtgacttaggttatcatagatcatttgatcttaatccagagatagttacggtctagcttaaatgtattgcacgagttctttgacttatctgttaccaacttactgtagaactagctcaatacttacatcttacgaactcgatagtgaaattgagtgggaatgttaatcatagatatggacatctataactttcatgtctattagaagtgaaacgatggttttcttagagcttggcttaatgagataaataatagagcgctcatttcagtaattatattagtttctcgaaatatcatttgcaagtaagtattttaaggataaaatatattggagggtaaaactgtaattttgtttctactcaatgtaaaccatctatagaggatcaatgattgttgtgattgaaacaatggataatttatagtgtatctatatttggtatatagagcattctatgtaatcaagagtataattttgaatctatagtggagccaggaggaattaataagttaggaaatgtacttgataaatttcaagatcttcttattaggatcttagttacataggtctatagtcctcacattatctgggataatatcaacttgttgactcagctaaaggatttaataagtcaattagaattcaaaaatagactgtcttatttgaaaattttcatcaaacttgggcaattttgagaagaaaagagaaataggaatttatttgttaactagtacactttgtgggtctaattaataaatatatttaaattatattttatttgataattatcaaaataaaattagtttttaaataattagatgagataagtggtaaaattaggaaagacactttaatttctattgacttagaaatatggactagacttctaagccacacctgctcgctagattgacaagaatgaaaaagtatttaggtaattataagagagacacatcaaatttatagtagttcactccttgtatcgcgacagtaatagaactacgtctactttgactttttatttctcacgagatggtattacaaaaaaaggctaagtgtcagaatttccaatttctagagagtaaagctctgaccttgtgggtagttttctgaaagtaaaaaatgagcttagggag

SEQ ID NO: 32606 - DNA, 1186 bp, Cannabis sativa
ctagtttttaactgtgatgatctttttttttttattagtgatgctcattctcttcctaattatcctactgtagtttctttattcgaaactttcctgagaactacttcatcctccaaactcaaaaatatggccaattaactttatttgaagaagaaattatacaccataaagatggatgaattcaagaatctcaggaatgctatctgaagaagaaattatacaccatatgtgcttgaatgctatattttttgtatcaatcgtcgccttccttcaattgtaatgatccttctgctattagtttttctaactgtgatgatctttttttttattagtgatgctccttctcttcctaattatcctactgcagtttcttcattcgaaattttcctgagaactttatcttaatttttgtcctcctgacgtgacagtacaactcaccaacaagaagaccaagtcagtacctcaacaaatggaaacctcgacactaaaacaggcattaagtgatagaccagcttcctcacagaagctggtcggccagcctctgaacagcaccatagtcggccagcctgctccttgtaggtgtctggccgactaagagaaggtctgtaggattctctgtgcaattcttcacgtggattacatcatttgagctgtgaattgggccctaaaaacccaatagaatagctaaataatatctatgttcaagggtattttggttttttgtaattaattaattaaatatacaaaaatatctagggtttcaagttgtaacttagggttttaggcttcctatataaatgtcttaactctaatctagaaaacctaagtctgaaagtgagaactaagcctaatactagcctccaagctcttagcctaagtttgataactctcttcttcactccctctcacacgcctgtacaagcactctcatcactagagatttaccgatcttgattcttactttgtatccttaagggtgctatatcagatccgacctatagcgatctcaatagtattaaccctcggtattaatacaactaaaaggagagtaggtcattaccctctattaaaagggggtcgaacctctataaaaaaatctgtgagttcattactttttcattctatttgtgtaacacgtggcaagcctcaaatccatacaattctgctgtcggttgatcacttttcg

SEQ ID NO: 32607 - DNA, 1631 bp, Cannabis sativa
aaactcaaatttggcgggcttctcatatggggctcgcccaacattatgagtattataggatggaactgccgtgggcttgggaacccgcggtcctatcagttcatggccgaacttgttggtcaaaagagacccagtattgttttcttatgtgaaacgttatgtcaaaaggacaaagtggagaggctgagtagttctattgggtttgaaggatgttttgttgtggaggctcaaggaagaagtggggggcttgctctgttgtggaaagacaaagatgaagtatcaatcaatggttactctcggaaccatatagatgcttctatctcttgggaaggcattcatcaatttcggctaactggcatttatggggagccaaaccgaagtcttagagctaacacttggaatttaataagggagttaaaagctgaaagttctttgccgtggtgtctaattggtgatttcaataatgtaatggagcaaagcgagaagaaaggaggtaatcgctatccaaattggctcattgatggctttcgggcagcgattggagagtgtggtttgcaagatttaaagttatatggtcatccatttacgtgggagaaaggaagaaatacaccaaattggattgaggctcggttggatagggtcatgataagtgatgattggttggcaatgtttagctatgcgagactcttcaaccatgatgtctctccttcggaccacacacctttgattctgaacacaaattttcgaaataaagagcaggggcatcggcattttaaattcgaaaattggtggttgagtgaaccgggttgtgaggaagttgttcgaggatgctgggaaaataatataaggggatcccttcagttcaaaattagtaaatgtggtgaagctcttgcggagtggggcagaggcatggaaggcaacttttctcaaagaattaaaagctgtaatatggctcttaagcggcttaagggaagaagtgatgaggacgggttgcaacagtatagtgaaactaagaagaagttgtttgaagttcttcatcaaaaagaggtctattggaagcagaggtctaaacaactatggctcaaagatggcgatcaaaatagtaagttctttcatgctagagctagtgctagacgtagaaacaatcagattgtgcgtctaaaaaataagaatggagtctttgtggattgggaaagtgggttgaatagtgtcatttttgattatttccaagggttgtttcaggcttcagttgttgattggagagaattttgtcttgtgtaccacatgtgatgaaagagaatcataatagagtgttgttacaaccaattatggatgaggaagttaaagcggctgtgttccaaatgcatcctgacaaatccccgggacctgatgggatgaatccggcattttatcaaaaattttggaatatagttggaggggatgtagtacatacggtaagggagttcttcagcaaggaagcaatgccacatggtttaaacaagacaaacgtggtcttaattcccaaaaagaagtgcccagacaagatgacggagcttagaccgatctcgctatgcaatgtgctagctaaagtcattacaaaagtactcgctaatcgaatgaaagggcttctc

SEQ ID NO: 32608 - DNA, 1789 bp, Cannabis sativa
  modified_base (1198)..(1200): a, c, t, g, unknown or other
aattattacatgcttaaataaatcatgtaataacttaccaaattaaaacaaatttccactttcaatttatactaaataacatattaattctgaatatgtgtattaaataaaaatagaaaattgaataaatacaatttattgactaaattgacaaaaaaaaataggagaataattaatattccaaataaataaaaaaaatttatgaaaaattcggaattttcctttttttttttttttttttgaaaatgacattgctagaaacaacatgtcgttttttgctgaaaaaaatgacacatcgtctatcaattgaagggctactcacatatggaaaaaaacaacacgtcgtttttcaaatgaaggctaccctcactggaaaaacgacacgtcgttttggatcgccttcttcagccaaccaggtcgttttgacccatttttctgcacgcgggtccttgtgaactcgacccgaacccaatcggaactctccattctgacgaccaaaaagacctaagtcaattccaaatgaatttaaatgtaaaaattaagacattcatatagatttcatgcatcgaaaacacgtaaaacaaagactttaaaatcaccaaaaaaatttagggtccgaagaaaattttctagaaatttttttagatttctttgtttttttaaatgagttttcatgcttagaacaatctatattactatatgaatgtattgatgcataaaatatttaaaataaaaaccgaaagtgaagacgaaaaatttacaaggcacgaactgaaaaactaaaatttttatttttacatatatttatacatataatgtatatatcacataaaaatattataaatatatgaaagagagtattataaatattattatacaataaaatcatatattcaacgtataatatataacaacatgaaatatataaatatacagcaatacgtatatataaaccaataatataatattatgggtaaatggcggcaaaactcctaaaacttttattttggtttcagttaacccttaaaacccaaatttgggcggtaaaacccccaatactcgtattctgttagcaatttaccatttccgttcattttaagtgttaagtctttagactggacatagtgtacacgtggcacaattttattggtccacgtaaaaaattatttaaaaaattaaaaattaaaataaaattaannnaaaattaaaaaaaaaattataaatgaaaaaataacttttttttttctttctttttctttcttttatcgtcttctcattcgatatgaccatcaagctaaagcacgagcttataatcaacagcttcaagaccatcgacggtcgtggcgccaatgtccacatcgtcgaaaacggttgcataaccctctagtcggtctccaatgtcatcatccataacatccatatccaccactgcaaaccctcaggacacgcagacattgcctcgagtcccacccacgtcggatggagaggtgtatccgacggtgatggtatctccatctacagcgcacgcaaaatctggatcgaccactacacgctgtcttactgtatggacagtttgatcgacgcaataatgggttcaacggggattacgaccactgcactgctgttgagtactacagtggatgaaaatcccaccttcgcagacccaaaatcacacaacttcacattcagattatggtccagaaggacattgtaagattttaaggatttaaggatctgtaaccgagtggctgcccaagggttttgaaaaccctaaatcgggactaaaggg

SEQ ID NO: 32609 - DNA, 1273 bp, Cannabis sativa
ctggaaaatctgaacaagctccccgggaggatcatgccaagtacactgcattcactattttgactgaagatatagaaagtgtgtacatggcaactcagtcactagacccatataagaggcccaggcctatgaagattgatgtcaacaagcaagacatgacaaagttttgttgattctatggagactacggccacgacactaatgaatgcaacaacttgaagcgggaaattgaattcctgataagaaaaaacaacctacacctgcagaagtatgtcaagaccaatcagggtcagaggaacgacaataaccaggatttgctacctccaccggtagatggtcatctgcaagttattgttggaggcccacacatttctggagattcaggaagagctcgtgagagatatgcccaaatagcacagcacgagcaagaagaagttatccgaccgtggtagaaagaagcccaaagttccacgagcaggagagtcgaccataaccttcaacgatgaagacgctgtcaaaattaaatttccacaaaacgacacgctggtcgttaaagtacagatagccaataaaatggtggccagaaccatgatcgataacggagcctcttccaatatcttgttcaaaactgcttatgaaaagatggcactgcaactcaaggatctaacctcatgtctccagcctgtctatggtttctttggtcaaggagtcgcacctctaggacaaattcgtctacccttcactgttggacaaggtccgacgagcatgactgtcatggcacagttcgtgatattatatgttcctttagcttttaacgtaatgctaggtcagccgaccttgtatgacttaaaggctgtaacatcaatatttcactcatgcctaaagttttcaacaaagaatggggtagggtgtctaagaggaaaccagcagtctgctcgaaaatgttacaatcttacagtggccaaggctaagaaggaaatatcctccagccagagcacaaacaagggaaaaaacatttccatgtagggaacttcccaaggcggggatgaagatgtggatcctcgacttagggaccccaagtagcaatgttggacctgtagaagaattagaagagatcgagatcgatctagatatcccgaccacaaagctaaagatcgaaaaatgtttcttgctcgaagtaaaataagaattgataaaatttctaagagcaaacctagacgtttttgcctggtcacatgtggatatggttggaattgatccttctataatttca

SEQ ID NO: 32610 - DNA, 1916 bp, Cannabis sativa
  modified_base (26)..(29): a, c, t, g, unknown or other
  modified_base (57)..(60): a, c, t, g, unknown or other
  modified_base (87)..(90): a, c, t, g, unknown or other
tataaaacatgtttttgaaaaatatnnnnttgaaaaatattttcacttttctaattnnnntcacttttctaattttaaaaacagaannnngattaaaaaagtgttaccaaacgaacccttaataattttagaataatttacaatatagaaagcagtgttcaaacagtctatttcacgctcgtataaaataaaattaagagtcacgtatgcaacatactgtttgaatcctattttaggcgtgttaaattgatccaaaagtttcaaaattttgtaagatatcttaaataactacagagtacacgagtatacataacttttttactttttatttatttatttatattttaagatatttttacaatgcacttatttttaaaaaggtgtttatcgacgcactttttctatttatttcgaaatcttagaggatttttaagttcattattttttttttatataattgtctacgttgtagttatttaagacatattgtaaaaaaaattaagaaatttaaaaaatttaacattctgaaaataaaatttaaacaatctattcagcgtgcatataaaataaaaaatagatgaccatgaatatttattagactctaaatttttttagaggatattttaaataattacaacatagatgactatgaaaaaaattaaattaaaagattctctcagatacccaaataaatagatgtgcatcgttgcattgtataattttcttatattatatattggaatattctataaatagctctttaaaataggtgtaccgatacacctctgtatgttttaatatttgaatgaatttttcaatctattttttttttctaataataatgtgtgtgatagttatgtaagacattctgtaatattttgataaatttgtaataatttataatacaaaaattaatatttaaacaatatatttcacacgcatgatatttagagagatgcaccatattattttcctatactatatattttgtcttttttattaaaaattaattaaatgtttgctaattcactaatccgtagtggtcaaatgaaacgtctctaaaatcaatcaaataatacatataatttttatttttttattatttttttgaaataaaattgatttttaacaaaattctgcaatttgctttgataaacaaattttagaacaataaaataacattattaagttaaaaaaaacactagggaataaattaaaaataagggcctatccattactttctgatttttatttttaaaattatattttaaaaactaagaacaaaagttaattttgaagttttcaaaatacatgacacgcgtttggttaatattttttaaaaatagtttttaattatttttttaaaaaaaaaatcaatactttaaaattccgatatgaagttgaattcaactcaggctgatcccgactccaacttcaacccatacacaaactcgaaattcaaccccaactattttttttttaaaaaaaaagaaaaaaaaactataaaaattactttgtgtttgttttttaatacacaatttgaaaacagaaaaataaaaaataatatcaaataaactacgaacttctttttttttttcagtgaagagaaaaatctcaattaggtttagaaaaatcttatatgacatggtatcttctttcatccatattatgattccaagattttttttttaaatgaacaaaaaaaaaagaaagatatcttcttttttaaaaaaataaaaaataaataaatatttctttttaaattcatcatgtatcatattaaaaaaaatatggattttcaaatctaatgtgattttattttgagaatttatggtaaatatggatttaatgaaaatacttgaataaaaacaaaaattgttaatgattccatttccatattattaagctatttgatt

SEQ ID NO: 32611 - DNA, 2129 bp, Cannabis sativa
gttgggaaattctgcaaatgaagacgtgatgagtcttttgaacacttggcgtcgaagagtaagtctgagtaaattcgtaggaagaatgtcaaagataaagagggcatgcacgatttcaggaagctcaaatgaaaattttcagaaagcttgagtttttgaaaaagacgaagatagtggaaaaatggattcttgccattttatactctgaatttagtaaccatcagatcagaatatagaagatccaatggataaaaatggaagagaagtggaaaagatggttcattaatgctattgatgtgcattggaaccataaaactgccaaaattaaaggcatgcattttttcaaaatggattatgacaaaaataccctctataatcatttaaaaagtaccttttactaataagggactttttgagggccaattgttatactcgaaattcgactggtacttcagaaggtgacacatgtccatctcagggaatatgaaccaacaaatataatgacaattatattaataaatattaaatggaataactctttaaatgcagaaatttatagggtatatttataactcgcagactgcatagtccttattgagacaaggatgtacgaactattgactcacgtattaacaagaaaccatttcatgtcagaagacacaatcgcaaggatgacatcgataatacatagtaaggcatctacctcgcaatatgtagagaggtgctggcgaggcgaagtggctgttagaacacctagcgtataatatgcattatactaacaaagtgtaaaagctcgaaggacatagatgacgagtagtgggacatccacctcgctatcataaggcatactcctagtaaactccagctcgctgccaaggttattgttgctattgacaacccccaagacataattgtccagtctgcaaggccttatggtcaaagagcagttcttaagtttgctcagtacattggtgctcatgtcattgccataagacttatgaatatatcaagttgttcgtgcaccaagcgagacgcctcagcgagatacgttttgcagcatgtctgagtccacgtcagcattgaccctttaaaagcggtttaaattacaactgtgtgattttcacattataactgtatttagttacgtggagcatgattatagcccacaattttaggaaaatatcattgtagaattagaatttgaatgtaattaattgccaacctatgttattataaataggggcaaaatgtacgaaaaaagggacaaaaattccttgagagaaaaaagaatacactgagaaaaatgaaccctagttctgtatcagaaaagtctaaataagattgactcgtggactatgcagagttaactgtaaaaccacgtaaaaaacctagtgttatattttcttcttttattttctataaattttgtgcttaacctatgacaaaattaggctcattatcatcaacgaaaatctgcgttaacaatactcctttcaaaaggtaagagaccttcataaaagtattgaattaagtgttgttcactggtgatgagggcaactagcacacaacctcttaaatcgttcctaatattcatagagtgactctcctgtaacttgccgaattccacaaatttcttttctgatgcttccaactttaaaggctaaaaagtatcactccaagaaaacagtcttcatgtcatttcatgtctccgtagttacaggaggtagatagtacaaccactccttagcagcatctttcctggagaaaggaaaagccaacaacttgatttgttcttcagttactgatgtaggtttcatacaagagcaaacaatgtgaaactcctttagatgcttgttgggatcttcaccagacaatccatgaaaagttggtagcaagtggatgaggccggattgttgagatttaaaggtggataattgatgcacagtggttgttggtcaagatttggcgtggtcaactccttcaacgtcctattttgagccatggtcgtgtgagaagtaaccgagtcctcagaatctgactcaagatcagttgatagtggctgtttgacaggatcaagagattaaaagagtgggctatcggtgataatctttaacgatcgagaagcaaac

SEQ ID NO: 32612 - DNA, 1366 bp, Cannabis sativa
tattttgttgttagttatgtaaaagagaattaatttttttaagtaattcaatattaaaaagtaactaatccaaaataatcaattcaatatacacttttacagagtcgagtgaatttgagttattatattagattgaatccaaaaatataaaaaaataaaaataattaatataatataatagaattttaaaattattaaattaattgaaatcttaaattaaatataaataaagaaaatattacttttaatgtattgaacttataactttttaaaatagtattttaaaagtgattattataaaattattataagttcagtatgttataattttttatatgtataattattatttttaaacataaattttattaaaaaaaattctatgtaaatttaaaattaatatatatatatatatatgattagaattaaattttaaatagacataaaataaaaagtaaaaaaaaacttaggttagagtttattagttgaatttataattaattataatcaagattaattataaattaaaaaatatattaattatggtatatttaaatttttatcttttttaattggataccgtatctaataatgcatatattgttatttggattcataaatttgatataaaagttttttattaccaaactttacgaaaaatataatgtgtgaaccgatttaccattataaatttataatattttacatgtaaatttttttatataaaatatttacataattttttattttattttaatttaaatttaaaccaataaatttaaaaatataattaaaaatatcaataatattataagtataaattatatcaataatattttaagtattttaattttaaatttaaatttaaatttttatatataaaatatttatataatttttatttttgaatatatataataatattataaaattaataagatattttgttaaagttaaagttaaattaaaaattgtgttatatagccaaatatatggatagaaattgactaggaaaagccaatgtatagttaaatttagaacttgttatgtagacccggcctatattataatatatagattaatgcaaagtgtcttaagtcattttcttatgaaactcaatcaaatgtcattagtagaattaatataaatttatatatttatataattaagctatatagccagactagtctatattgtcgacaataaataattgaacacattcttccaaaaaaaataaataattgaacacaaacacatactataataatatttatatgtacataactattgtactagtttggcccatcttattggaccatctatgtatatatggaagaccagaataagtttgttactgaatttatat

SEQ ID NO: 32613 - DNA, 1991 bp, Cannabis sativa
aattaaacttataccaattttaaaatagtttaaatatatataaatattaatataatcgatttctttatcttatattttgagttattgtgtgttatttttttatttaatttgttatagaaccaattttgtttagatttatgtcttagtatatttgaaattgatccccacctctttttttatttttttttattttttaattataattagtttatgtatgtgttatttatttttactaatttattatgaaactagttttatttttaatttatgtttcagtattttaagaactgatttcctttttgtttttttaattataaccagtttgagttattcagtgttatttgcttatacccattatattatagatctattttaattatagcaagtttgagttattttttgtgttatttattttattcattatgttatagaatcggttctgttttaattataatcagtttgagttattctgtattatttgcttttatttgtcatgttatagaactagttatattttaatttatatatgagacatctaactccagtaacttttctgacgataatgataactctagtgactttttcaggggtgatgacttttccggcaacgataattttttctgtcgacttttctagtgctgataactttttcggtgctaacgactttttctgcaaaattttcgacaatatttgctattaaaagttttataaactttatttatggtcatttgtttggtttctcatattttaaattttgattactttttattcttatattttttgtattatttatttataccatataaaaataaattttatttttatttttcatatttatgaaaaatttcccaaataaattatgctaatttgtattcctattcataataatctcaaaaataatataaattgtaaagtatgtagaattatctgtaaaattacgttaattttttttattattattttagcatctatatttaaagtattaatttttagtcatatttattatatttacactttaagaattgatgtatgcactctaacattaaaaattatcaaatttaattaaattttaaaatttactcataatatattttaatttttcttctacatctttttgtgttaattttaatttttttcaataaaaaaagaagggagacagagagatttcacaataggtgtagtgacatatgtgagtgttataattgtcattattatgaatagattttaatgaaccaaacaataaagaaatctaaatttgattccattccaattgtttacaacaaaccaaacgtgctataagtataaggtcaattccaatctaatagaaaggcacattcttttttggctaaaattccaaagaaaaagtgtctgcttttattttaatgatttttcaagggaacattttattttaaattaaacgataccagatagataccaacacttattcatttgtctgttattattattgttattttaattttttttttttattaaaaaatagctcgtaaaagtgacagagactactctatataccatgccgtgccagcctttagccactctttaccttttacagtggtacctaacctgttctatattctcaattacattttggattttactcttaaaaaatgtatataaaaattaggtaaatagcggcaaaatctttgatagttttattttacttacaattaattctcaaaagttaaatttaggaggtaaaatctcaaaattacgataccgttagcaaattacaattttatctaaatttagctgttaactgtcaggttagattatccacgtagacacagtatacacgtgacacaattttattggcccacgtaaataattatattagaaaaattaaaattaaaaataaaaaaagatatattttttttttctttaaaatcattataaacaaaactatttttctttttttctttttctctttttcttttttttttcctttattttctttttcatttttgcaaata

SEQ ID NO: 32614 - DNA, 1584 bp, Cannabis sativa
atttattcctctttttttttttatcgttcaacaaatacgatttagagatggggtccatcaccaatattaaacaataagcgggcaaaaccctgaaaagctttattctacgaatgatggaagtagcgaccaaaactaaagtaatagatgatataaagctcctagcattgcaatttggacttttagctggctccttgtaatggggagaaatgcaaaaaaggagagctagaactctctctgaattcatggccaaggcataaggcttccttcttttagaagatgcttacaagcaagcatttggggtctctccggcaccagccctggtaacctctattcttgcactgaccttgtctactcccgctcctggaacgcaatacacccttacgatctgcgaaccttctatgtttgtgcctgtgcctacacaaacccatttctttgggtatggagtagcacaagctggatgtagtgtggctcctaggaaatcaaaggcggaggtaccggagcaagacttgagtaactcctagaaaaagagagagggaaaaggtccggggtgaggagaggctttgaagaaatctaggaaagagtacgacctgaatatactaagtattctagtcttgtggatacttaagaaaatgtgtacaaggaaacatgtaatatggttcattataggaagcctctcaaaatgcctcaagggggaaaatttcagagaaacccaaagaagcattgtgaatatcacgaagacgtgggacatacaacgaacgaatgtgacctcataaaggatgagattgaaacgttcataagagtaggatatttgggacaatggattcagattcccattatatatctcgaataaggggtcattcacagataaatgattgttcccagacagcggggtacttaaatcctccgcatggagtaggtcacgctcaagctctcggaacatatcctctggcactcctcactccgctaggtccagctgcagtggctttgatagctccgggactagggaacctatatcaaccaaggctagcaccaccaccggttgatggacatgtagcaacgatctcaaatggaccgcaactcgtagggagtactaggaattctcagaagagagctggacatggaaggggcaacatgaagtttagtacagtaacctgcccaacatccttggacaatgagtctaccgtcactttcacagaagaggatgcccaacacgtgtatttccctcacagtgaccctttggttaatgaagcccagatagcaaataagagggtgtctagaatcctggtggataatgggagctccatgaacatcctgtttgaatttgctttacaagcgatcgggcttactgaagcagatctgtcacactgtcccatccagctacaaggctttgatggggatgccttgatgccaatggggaaaatttagttaccggtctccctaaagggagaaagcaatgctagttcaagcattgtatattcgtagtagtaaattaccccacgacctacaacgcaatactaggacgccccattttagtggattttggagcaataacttccatacgttattgttgttggaaattatttt

SEQ ID NO: 32615 - DNA, 3561 bp, Cannabis sativa
  modified_base (176)..(182): a, c, t, g, unknown or other
  modified_base (1127)..(1130): a, c, t, g, unknown or other
tattttgttggtagtttcctatttcctagtctcctagctttgtatataaatatgtactattctatgaaatacatacataattcgattcactattttctacagatcttttgttgcttgccatagacacaagtctcatattatggtaatgcacatgtctgaagcttttcaatgactcnnnnnnngtgcaattccctcatgccttgttcactgatatgtcgaagcctttgatgccatagctgcatatcactttctaaactttttactgtatctgtctcggcgcaggtacagtttcaccctcgagtacatacaacccatctatactttttcctttcatcacaaacattgaagcttttatgatccttaggctcccattcaaggacttatagccataaccttcatctttcaaggttccaagtgatattagattcctcctcaattctgtaatgtaccttacattatgcagaatcttcacttcaccattaaattgccttataaccaccataccaattcgaacaagcctgcaagaaacatcattacccattagtactctaccaccattattggtttctttataatcaaagaaagattctaagtttggacacatatgataagtgcatcctaaattaaggatctactctttactgttattattttccgaaaaaaaataattccccatctgaacttccatctccatacaattgaagaatcttttatttgatttccctgatcattagattttgagtattggttctggtttctgttgcatctcttgtcattgtagtttgatttgaaaccagattgcatcttcaagcagaatcttttaatgtggataatcttttcacattggtaacattgtcgattgtctttgatcatcgacttcgatcttgatggtgactggctgttccttgatgatcctctctttggacttcttcctcttgcaagataggcttcttctttcctagtctccttctcgagttgcaattcaaagtcttttgactttaatgtcgcatgaacaccctccaacgagatcacatccctgccatacttgattactgctttaacttattgatgagcaatatgattgcttgactttcttcgtctaccttatgatcaatgttagctaaacnnnnaattatttcattaaatttatcaatattatcatctaaagaaagagaagagttcattctaatcccgtataatcttccaagaatattaattttgctccatattgatggtgtcatgtacatctgctctagtttgttctacaattcttttgcagttttttcttgaattagctttcttctaactccattggacaggtacataatgatggtatagtatgtcatctcctctatttatgcaatttgctctggcttcttctcagccagtaacttttcatctccgagtacctttttcaccttttggtgcccttcaaactctcttgccatagtgcgaaatttgttgaaccatcgaacttctctagttcgaacctagccatcgacatcttccttcaatctgtgtttttgtagaattccttgatgaattcttgatgagttcttggtgcgaaagaaagtgatatttgaatttccccctttgaacgaacaaccaagctttgatttgtaagaaatttagctctgatacataggaattaacctctgtaatttcaggtcaagatcacacttaaacaaacaaatgtcaaatcaaaacaaacaaatgaagaacaaaaaaatagcaaacacatattaaatcagaaagataaacacagataaatctagatagcttccaaacacaacaacacgcgagaattaaactggtttcgatcttaagttcaatgtgaacttggttatattccagtttgaaagcattgccatcaatctttattgataatgagaattagagatatcaatctcaggagctacaaggaaatattcacaataagacatccatggtgtaatccctcagcactcattaactcactaactcgagccaacataatcgacaatgttgctcaatacaattttccaatccaagctcactctctcaatttctcactctaatttctctctctactgtgttatatctctcttgttattactctttctattctctaatgaaaatgaaatgagtagtcctttttatatagaccaaaggatccaagatacttgctatcatatcggttaagttagttaatgaacaactaactaaccggatcttgattgaggggtctaaggaataataccacaaactaatatcagtcatccaatcgatccaaattggatattggattggttcataactatctattggatgtatttcatgtatatttattggtttaatttagatttatctaatattttagacctagtatttattggatcggatcggatccatccaatattttagattcagtatctattgaattaaattggatttatccaataataataaaaaaaaaattaatgttaattttcatatatacattttttttgcgtttaacaacataaatataattactaattcaaactaagtgaaaatattaatttgttcgattggatgtttgatgtattgtatttttggacaccccatccaacattcgatctgatcagattggatatttaaaaataacatccaatccgatcacaattggatatctattgtttttgatcaaaaaaaaacaaattaaatatctaatatttgacagtcggttgttattaaattagatcgatttatgcagacacctaatcatatgcttgttttgctatctataaatgaatgtaacattttatttttttctccaattagtgacacactttgcataatatatattttctgacccctcctccactcatccccagagtttggtgaagaaatttctggagccttttatctttgttaataacaaactaaagtcctgcattgcactgtgagctgccagctgaaatattctagtcagctttctttctttttctcattgaagtaaataaattataggcttttttttttctcttcaattaggcaaaggcccaataggtaagattgtaacctttggggaaaaaaagaagaagaaaaagaggcttgaatatagagggtctattttgcaatttcaaatggtcattttcctctctctttctctgtccttaaaattaagatagaatatatcttggctcagtcaaattcacactaagtagtccacttgttgattggcataatttttttttttttttgagagtttctaggaggaaagcctggctacatgtgtggacaatgaagtttcatatatgaacagaatactgcctaattgggtgtagcaactcgagttttctgagagagagagagagagtgagagttgtctttcttgtctccacaaattgattggcctaattgccttacatgattaaacataccccatcataccctcttgtattgttaaaaaagttcaaactccactcggcacattttctctcttgcttgaatgaactgttttttcctcattccatgctatgtaagtttttttttttggctacacatgaaagagaaagaaatgataataatcttattcca

SEQ ID NO: 32616 - DNA, 1087 bp, Cannabis sativa
ccaattagactgaaaaactgccatactaaagtcgtccggacctggtgctttgttgccttcacagctgaaattggtccttacctcatcttcttcgaagggtctctctaaacgtgtagctgaacattctgggattttttgccactcaatgccatcgattcctctcccttgtctcctctcggatgtatataatcttcagaggaaagagcttaattcttcaactatttcttcctccttgtaaagtatagatccgtcatctcttgggatttgtgtgttttgcaatgttacatgtttaacatacaggggactgtcatctttatagataagcatttgggaaaacgaaaatttcatataaaggatgtactagtgtaaaatgccatgacatttcatctttatagaaatattcacaggttcataaagtttatttcttcagtgagaatgaatgttaccatttgtaatatggttttggagctcatctacagttctaaacttttctttagcctatttggttatttccccaatggcttaattgttgcttttcattcttccctcgttgtctacctgttgctgctcttggtttgctctttgttttcatttaaacatttggcatggttgcaaatatgacccttccttttgtttcttaacggactctttggtagagtttatgacattcttttatgttgttgatgcttttgttaatagtagcaatccagtttcaaaaatctcaatcatgttattcaagttgaaacatttgcatgttttatattatttgtttctacttgcacgattgtttttccattatgttgcctcattagagtgaacatgtgacagtaaaatttccatcctatgtgcttccaattatgatttgtacctctcctgtttgtttcaccctacagatattttactaattattttggaatgatacttctcaggtatcaattatggaagccatatcttagagctgttatggagcgtgacatgaaagctgttagtgaaggtgcaaaaagcaaagatgaagttttagaaacttgtttgcatcagatgaaatcctgctttttagatgtaagtacattgttggtatctctgtggc

SEQ ID NO: 32617 - DNA, 1387 bp, Cannabis sativa
  modified_base (1189)..(1193): a, c, t, g, unknown or other
tttttttttgattaatcaatgaattgtattgcccaaaaccaatttgaatacacagtaagagcaacccagccggtcctcaatctatacaaaactttctgcactatactgctatttcatctatttataaagcaaagaaccactctctatctacatttgagattttctttggcaaaacaacattaatccgagtccttagactccacttaatgtcacaaacaacctgcctttgattgatctgttcctgctgccatatgagttgatttcgtgccttccagctgctgtaaacaattgcagcaactgctgcagagaaaacttgctttttgaattttgacacctttgccttctcaatccattgaaccagctgttgtatgtttgttgcttttgctttccatcctagccagcttttaatctcatcaagccaatggctagttgtcttgcactcaaaaaacaggtgctgaatattctccttgtactcatcacataggcagcaggtttcttgaatcttaatgcccattttcatcagcctatcttttgtttttaatctgttaagcatagtaagcccagaaaataacactatgttttggtgtattcaatcgagcccatacctctttactccaaggtttccttgcttgtggattgctgaacatgttatacccagctattatgctatacttgcttctctgaaactcaggaacatcagtaacagaactgaggtagttcttgaggttaactagcttcttccagtaccaactagagtatatagaaacctggtaatcccaccaagcttgatctcttatgtatacactattcacccatctaagccataagctttcttgattatttgcaatggcccaaatgtacctggacattgcagccttgttccaaagctctagctttttgatccccaatccacctgaagatttaggttgacagatattatcccaagaaacagcccctgcgccatcgaaaactgcctgccctttccataaaaaagctctgcaaatatcttcaatggataagtattatttgtaagtattttatttttagtatggatcaccctaatggtggcgactattagtaagacttacaaaagtatgtaataatggtaaaagctaataagatagaatggccttcactctcacctaaatgggacaacgctggattcttatcttgatcgaataaaaggttnnnnnaatgtttgtcattttagatgagctaactactctattcaatggatgatatctttatctctcgcctaaacgggacattggtatcagtttgttggaaaccttgaaaattatttaggattgtaagctttagtattttcgctagtaattcctatttggtaaatgcttaataatttctgaattgtgtgtgaatttatatt

SEQ ID NO: 32618 - DNA, 1773 bp, Cannabis sativa
  modified_base (61)..(69): a, c, t, g, unknown or other
ttatcgttttagaaagttcatacttaggatgttaaacaacatagttgtgagtagatctaannnnnnnnnaaaataaattccaacacatatttctaggagatacaaaataggaaatacatgacctataccgtaggtatcttaggagttaggtggatataatcttttatcccctcttgattgatgcgactcctcataaagtagtcgtcactagactcatcgattgttgtgtaatcgccgtaaggagggcatacaccatctgtcacgtcttttatggaggttctaatacgtcttcccccatgcggcattaaatgcgaagcgattgctcaagtaatctctctacctcctggacatgccttatcatggctctagcctcctggagagtaaggatgtgtcctatgctcttttccggaaggcaccttccttgtagtgttcctcttttgtccaagacttaattgattttcgtgagtgatggtgctttcagatccacataacacctttatctgcgtccacgtattttgggaaaaatcagaggcgacaattattatttttatattttttaaaaaaaccaaaaacgttaggtatataatgttgattgatattttatgtatataaataaaatttgcgattaattatatttgatgttttgatattttttttaaaatttgttttttattttctaattttttaaaatatttttgtatttttatagaaaaatatttaaaataaatagtaaaaatcaatttgtagatttatactttttttatagaaaaattattaaaataatagtaaaatatcaatttatagatttatgttttaataaaatattaaaattgagaaaattaagaagataagggaaaaataatttagagtgattttagaatatattgattataatagatatttataatactaaaaaaatcataattgcacgtgtgtagttttttttcaatttaaatttttattttttaattaataacataatattataaacttaataatatatataatttttttaaaaaagaaataatagtgtagttattttttttcaatttaaatttttatttttttaattaattaataacatattattataaacttaataatatatattgatttttttttaaaaaaaatatcatttttaaatttagaattaaatttagagttacgatatatataaaaatatattttagattaattgatatttttaaattaataaaaaaattaaaaaaatgagagaattaaggagagaagagatagtgctatttgaagtgattttgaacaatcacgtcatcggctcatacttctcctttatatatacaggaattttcatggggcacctaaatttaaaaattatttacaaaaatgacaatgtttttgttgtgttaattttgtttatatgtagttgccgtttttattggtagtttcctctttttaacgttttttagattggactttttattccctactttttcgtcccattttttttaaaaatcccttctttgtttgcgtgcgcgcgtgacgtgaggctgagcagctacagcctacagcacgtcaatcacgtaggggggactgatggttttgttagtttccctctttttttcttttttctgttcagtttttcatttcatttcaaaagttttcaaacctgttgagcgaatataagggttaaggtttcgtcttcaataatattattttcttttagctgtaatggcgatccttcgatcatctagttctccttctctgttgcctttatctgattgtggtgcaactgaa

SEQ ID NO: 32619 - DNA, 4498 bp, Cannabis sativa
  modified_base (4453)..(4473): a, c, t, g, unknown or other
tcacaccaaccagcgaggaccccacaccccgagtttgatagaaatagaagctaagacgtgcttgtacgaaaactccaaagtctcgttgttaaaacgtctaatcaacattgaaaccaactctagcgaccatttaacgaatggttggttccgttggaatcatcgtctcgaggagaataatctccactaagtcatttcactcagctcgctactttttcctcatgagatttggatatctctggaactttggaaccaattttcagtgatatttctggtgcttgtttaggctaacggaatgtacattcgtgatctgcttgtcaagaaagttgttttaatatatactacccttatgttcggtgatatttttggtaccaatttctaccaccaccgatcgctattatgcactgattaggtgagatttcagaactttaaactacaaatatagtcatcttatatgtcgttcgactcgatttgaagagtacattacaatgataataattatttattcaattgaagagtgtagacaaagtgacttttgatttaactaagctatttggagcttaagaatcgggggcttattaggagcgtctcttttggagaaagtttgacgatcctaaagaggtagggactcaacttgattattggactttattgtgatgaatatcatttgacatattccaattttattgatctacaaaatatttaaaaaattaaaaacttaatctgcatatttttctaaactattctgggacactaaatgccaaatatatttttgtataattatttatgcatgttataattttttgatctattcaaactacagctgttatgttgtctgattttctaaactaaaaaaggaatatgttcttttgttattcttgtttgtctacttttggttaaattttgattactaatgaaagccatggtgatcatgattttgtacatattattgttccacgacctagtctttgtgttatcataggtagatcgggtgtgcactcacctgtaggtgaaagacctagaatttgtacatgaagtgaattgaatccaagcctcggtaatatggtggttatcaagtgcgactatccggtttagcatgtcattttctatgattggtattgagagctaggggtctagtagatggtgtgatatgcacgagtagcttgtctcttgtaattatttgtggtttttctattttatttatatgatgatgatgattgttagggttgtctttatagtctattgtagtgtgtattttagtatttttattattttattgtgcagatttatgcttgatttttgttttttaggagaaatattgagaaatctctgtttttggtaatttaagtgcgctttaagtctttttgagacaagaatgaaaaattataagggaaaaaggaaactccaataatgcttagatggatttcttgttgcctcaatttagttaaagtttacaatattttagttccaaaatttttggaagcagtcttttgatcttaattggaagcagtctgctcttactgagatgacgcatcctagagatggctcgtattattcgatagtgttcggggaatagctggttgtattttggaagatgatatttgaaatgtttgtcctcattatagcctttccagggtaattcttaggcttagtcatttgaaataaattatattatgcttaattcttttagtttttcaacaaacttacgagtacgtgtgtcaataagttgcaagctctttagagaactcattatctaccctttccagcaatacagtcttgatctactgtatccaagaaaacttctattattatcatctcgccatatgttgcttatgtatcgatcttactaccaatgtcatatgcaagactaaaggtatttattattgagcttaatttctacaatttttgtgtccaacttttcacatgtagtgttcgtatttatggctcaaaatataggcataacaagtattattttggagttttacaaactattaaatctagttatttggtgactacatatttgtgagaatattattgttctatatacattgaagagtggtcctattttattgcaattattttttatttattataagaggtattctattattttaaatgtgtattttatttaagtttgttatataaattaaaaatcacttgtaagtattattttataacaaaggtcaaagtgtgactatctaagttatgggtattacatatctgtcacagcctaagactcaggtcgtgacaaatgacctatgtgctttcctcaccatcactcaaccaaaacaagaacaagaattagtacaactatccttaactgaatcacgacggagattagtacatagcagaacattataaatatacttagaccattataagtgaggttacccggaaaagaaggcaatgctccaagatccaagagcgagagcgagagcgaatctcagtcatgatgccacatgggctgtggcatagctcttccaacatcctgttgtaactcacacttaataaaacgaatcaattcccaaataaagtgtgctattcggtcttgtgagccaattttgagccagataacttcacaattgagctatgaccatgaggcacacttagatccgtcttgaaaatatctttccaattaattcaagttaaccaagtcatttggataaaaattaagagagttaagcctgttttaccgaaccatagtatgtacttttcaggtccaaatccaaccactaccacgtcaaagtgacggttctcagttgtgcatgttctcagacacctcaagtgtgtttttacttgttttttgatggtgaatcatattttgggagtctcaggactccaaaatctcattttgacgtctaaaatcctaacaagagaccactgtcatcagttgatgccaaaagatgacagtggtcacccaaggcttgtgagaagcctttgatagtgtttcttgcttattttagtcatatagatgctagaaaaatactttggccatattagttcttggccaatcggtagaagagagcacttccatcttttggttggtttacattataatttatttaacccaacgtaaacatcgggtcacaaaaatttaagtgcaacccaaccaattaaaaaaaatatttcaacccactcaataaaaattagtcggtttggtcgggttaacccgcccaaaccgagcactaatgtttattttttttttcacatttaattgttatattttaattaattgtaataataaggtaaatatacagattaaattcaaagttcaaatcaacccccataaaagaaatataatagtttgaaccttctatttttttcataaatatatataaattatataatatagagattatatataataaatatatatataaaaactcgtaatcgagttggtcgggttagttcagattgattgggcattgatattatgtttaacccgtccaatataaagattggatggttatatttttgtcaagtttttcagtttgcatttttcgtcgagttatctcggtttggtttggatggattgttcgggttgggcagtttacaaaaatttatgtacaaccctagtgccactcatttatgcacaaagatggcacatgtcggctaggtaattccttggtgagaattaatttcttttccttgtgttgtactttttggtgttgagggaacacattttgacaagtctcctttggtattttgagagtagagagcattggcatcctcttgtggcagtgctctccaaaaaagagagagtacttccatcttcatgtggcagtggtcggccatgcattgttgagtggtctccttgtgtagttttgactttacgttcaagttcaagcctttttatgcttaaataagtcaagtccttattagtttccttgtcgaattgaggtctttagggtgacgctcatgtgggctcataaatcctagtttgggcgcacacttgggtgtgtggaccccaacacgaaatggtcgttcaatattttcgagtctcctagaggtgtcatggagccctcaagtagaatgttttaaattatttggcctttgtaagtcttgatcaaagtcagaaaattgactttttttatttcttaattaaattcggtataacaataccattatcgagaatactttgtaattttatcaaacattttcatgggaattatactaaactacaaaagggctattatagaaggcccaattctaaaatcttgagaatttttacttaaaaagtattgcatggaagatttgaggagtggtccttatgccatttagaataaataagatgtatcaaaaagtgcccacacttgaaatatttggtatttttgcaaatttttgatatagaattaatgtttttcaaaattagttatttgtgcacagtgtacagactactcattattatgtggtattttagcaaattttgaatgtggcactacaagaaatgtcactnnnnnnnnnnnnnnnnnnnnntgcgctggtaaaagtaacttttacc

SEQ ID NO: 32620 - DNA, 1324 bp, Cannabis sativa
tttaggcaacactttttatatgaggatgcgtgtaaatattaatattatatatttgaaataaataaaaaataataaaatttcaaggaaaaaaataaagttttagtaatgtattttaaataagctgagagcatctttaatggagtgttataaatgtggtgtatatgcatttcttagctcatgtttatataaatgaactccaatagtagtgtataatgtgacataaatttggtgcttgctaaaaattatgttaaatttgatacaaaatataacataagttaaattttacaccacagtaaatattacttttttttatttactttttgttactataatgtcactcataactttttatatttttatttatgtatttaatatagtttttatgtactttcaattaaaatttgatgtttttttttttttttacattttgacacctttctcttaaaataaaatttattttattgttaatgcattgaagtacagtaataaaatttgagctaaatataatattaacttatttttttaatcaaaatttagtacaaactttatattatctattaaaaatttgaagtaaaatataaaaaataaaattgtgatgtcttacgtattttgtcgaaaaaaacaaaacaatgaactgtgaagtattaaattcatctacacattgtgcgatcgggttggtgcggcttaaagtcacctcttatttcagccattttgacgtcacgaattacaaatatttatttaagaacccttgccttgtacgaaattcacaaattatttgacacgttaaagtaaaaaaaaaaaaacattagcatttaaaaactgaaaggttagtgtggtctaatcatcgtgaaaataaattaaaccattaaaattaaaatttcttgaaaataaaagggaaaaaagacatgaaaattaaaattatatagataaccaagatcacttacagcaaaggaaaaggaaaaggcattgctttctgtgtgtgacctataataacagtcagtcatattcttcgcttatagtcagtcacttatccttcttgataaccatgaagatgatagagcagccttcattggttcacatttcatgttatttaaaattgatcggtgtctctaccagctgcctattcttacaaagatatgatgatttaaagtaactgttcttaacaaatcattacagaattgggcttaaatttataatatatatatatatatatttatatatttatatatatgaggggtggcaaagatgagaatatacaaaatagctagctacaaaggataaagaaatagctcccatataccagatgtactaaacatagaaccta

SEQ ID NO: 32621 - DNA, 2247 bp, Cannabis sativa
atcagccatgagtatgggagctgggcagtgtatgtacatgttcgggccacactagaccaagcagattggggtctataagtgatgaattttgtaaccctcttttgtcgcataggtcggctagtggaaacggacttgtaatagtattttgtaaaatatttttaggatcccgatacatgtaacatttgttgtaaagttaaaattattacaagtttattttcattccatttacatttaaagtttaatttccgcgctaattttgttagtaatcgtgtttaggggattagagtttcttatttatcttgggtaacgtgcctaatagttagggcgttacagtttaccaccccaacgtgaaatagattttgttattgatctgatacaaggaacaaagcctgtttctaaagcaccatacatgatggatccatctaaacttaaggaattgatagttcagcttcaggggatgttagacattgcatttacccgatccagtgtatccccctaaggagctccagtattgtttattaagaggaaggatggatccctttggatgtgtatcgattaccaggagttgaacaagattagtgaaaaacaagtatcctttgccaagaattaatgacttgtttgatcaacttcaaaggaagatagtcttctctaagatcgatcttcgctcgggttatcatcaattgagaattcgagaggaagacattctaaagactgcatttcctatgacgtacagacattatgagtttctagtaatgttgtttggattgactaatgctctagtagcctttatggatcttatgaatagagtgttcaaggattttctcgataactttgtcatagtgtttatcgatgacatccttgtatactctctgtcagaagccgaacatgagcaaaatcttcaaatggtcttataaagacttagagagaataaactttatgctaagtttaagaagtgtgagttctagttatctcaaatatcctttctagatcatattgccagtgagactggtattatggtcgatttagtaaagattgaatcagttagagattggtcgagactgaagatagtttatgaggttagaagctttattggtttagctggatactatcgtcattttgtagagggattttctaagatcttcatgccattgacagaattgactaagaagaactaacagtttgtgtggtctgataagtgtgtagccagtttccaagaactaaagaagcgactaatcatagcatcggtgttagccttaccgtcagataaagaaaaaattttggtttactgtgatgcatccagacaaggtctaggtgtgtcttgatgcaggccgacagggtcattgcttatgcttctcgtcagctgaaggagtatgagcaacgttacccaacgcatgatttggaacttgcaacagtggtgttcgcattaaaaatttggcgacactacctttatggggataagtgtgaaatttatactgaccacaagagtcttaagtatttctttacttaaaaagatctaaacatgagacaaagacattagttagagttagtcaaggactatgattgtgagattctttatcatcttgaaaaagccaatgtagtggttgatggcctgagtaggaagggccctggacaagtttgtagtaccaagatgatctctccccaattagccacagacatggtcaacgcaagtattgagtttgtgctgggaaaacttagtaacttgacacttcatttggacctaatagaaagaatcaagtgtgcccaactggaagatcctgagttaatcaaagctcgagaggaagtcttagtttgacatgttaaggactttacggtttttgataatggtatgctactttataaggcttgagtttgtgtttcaagcgatagtgggcttaagaaagagattctagatgaagctcacaccactccatattcattacattcgggtaccaccaagatgtattaagatttgaaaccctattattggtggtgtagtatgaataaggatatgatatattatgtgtcaaagtgtttgacttgtcaatagatcaaggctgagcatcaaaaaccaacaaggttactacaaacattgacacttcctgagtggaaatgggaagatgtcaccatggatttcgtggttggattacttagaaccaccaaaatgtatgattcaatttgggtaattttggattgtttcacataaggatgtaaaccgggcggggtgggtgtggggattgctcccccacc

SEQ ID NO: 32622 - DNA, 3650 bp, Cannabis sativa
ttctttttttaactcctcttgatattgagtgtgtatataaacacatatgacacttttcaatctaacaagaattcaacacagtttttattcacttctagacatcaaaattatcggatgtcatataatttagaaaataatatcgttaatcaattataagagtgttacttataaagagtgttgaatactactgatacctaataataatactcttatattattggggttttaacaccacatactgatattttaatttttttacatttttaatgtggagtagatttttttttcagaaatattgtgtaagttttatattgtatattgtgttaagttttcacggttttccacagttatttttaagttgtttcagtattgttttaattattttgttttgttattttacagttattatataaaaaaaataatatttttgtaaaaaatttcatataatagtaaaaatacaaacttttgtccaaaatctttttataaaaacctctatattattatgctcctatgtatgtgatcctactcctgagatgagactgactccatctccatctacgtacaactgaacaataaaacaatttcagttataagaaaaaagaataaaacaatttctttgtcgtttatggtaaaagacacaattcttcctcaacaagtctaacggtaaagcctgcatatgaaaattaataattaagtaagtaaaggataataacaatggcaattggtaagtaactaagaaaaatgagtatgactaatagtactagtgttagtttaattagtgagtacacaaagcaaaagattcaattcaataatatcatcctaacagtgatagtacattccaatttcacgtggattttgagattttgattttggggaatattttgaaagatatttttctttttatatttcattattcatcagaaccttcaacaaaattacaagaaaaagaacataaaaatgtgtgaaatagttagttccaagtttcaacattatttttaaaaaataaaaaatataaaaataggtaataaatgacaaatatgacaaatgtttatataattgatcatcatctatattattaagcttttggaaatgattagccaaaagacaaattacagagcaattttcaaaggagtaaatttatttaaaaaaaatatatatattgttaatatatatataattatatatacatgttagttttttttttggtttttttttaaaaaaaaatgccaacccagtgtgatccaatatcaacccacctccagcaaataaaaattgaaaaacaccccttgtggccagagtgggacattatatcaaattccaagtatttgaacacttttaggtttgatattatatattataaatatatataaacttcccaactcaaagtggtgaaaaaatcccaatagcttttctactctaatttttaaaatacttattaaaatttatttttctttattttacatcaatttttacattatacgaccatataattttttttattttacactacatcaaataaaatattttatctttacatatttaattacttaaattaaaagaaaaattagaaaaaatactaaaaaagtacttagtaggagagagaaaaaaaacaaaaagacaaaaattaaaaaatattatcaaaaaatatatgaaaaggctttaaagcttctctacatagagatgagtttaaggatctctattttaaagaataggtttgaaagagttgatggagctacttttaataccgttttctttataatttttaagaatgtaaggtggcgtttggttaggaagaatgaaaacataagaataggaatgagaatgagaataggtataagaatagaatggaataaaatttaaaatacattaaaaaattattaaattttttctcatcatgcattggaatagtctttccttccattttaaaatgaaatagtaattctactaaaatagtaaaaatatcattctatcggaataatattccaatattttaatatgcatccaaacaaaagaatgaaacaaaaattgtttcctttagactattatttcattacctctaaccaaacggtacctaagaatttaaattgggagtgctttaagttttgtccatttgcttttgttttatttgaagaaattgtcaaggcctagctaccttcttcatgcttctgctacctctcataaccctctataacatcaattttatgtccttaatttcattgggaagtactctattctcatgctatttttaagttgtagtttagtttctcaatgggattataattattattttgaataatactaattataatgggttattataactttgtattttatgtaatagttttaaattctaacacttgtgtaatttgaaagtgatttttcaagagagatgaaatgcattattaagtaatcatcacatcatacagccaactacatcgagatcacactatcatcattcatcaactaatagaacaccataataaataaaaatagcaataaataaatatataaaattgactttgtggactgtcttaaaaggtgtcacattcaacactagagaaaaatacacttaaaacaaaggacatatatatatatcaaatggttcatttgattaacagtaactaataaattgttatcttttgaacatgtcttcttgcaaaaaacaaaaaaaaaaagtaatttacacattgatatgtagctatacgaataaataatatgtgagcatagaaaattcatatggcacagtttctgatatacatatatttaatattgtaattgttagttggaaacacaatttccaaaccccaacgtgcattcaatgctttgcgttatcatcattaacaatgtatatgtacacaaccttctatactctttgtatcaaaatcaacattattgaacaaatatatatgtaattaataatattacttatcataacttcttcgtcatctagtgttgagcaagccagctaagtattagatcccccaccaaccactcaaaatttcacagttgaccttcaaaatatttcataaaaagtaaaataaataaataaagatatgcataaaaagaaatcgcccatcccacatgtatatatgtatatatgattgtgaatcgtgattattaatttgtatatgtaaaaaatgacatttttactcttgttctttacttgtaatagagcttagaagttaaaatctcttgaagaagaaacaaacaagattagacaatagagcaaggcagcaagaaaaaaaaaaactatgttggataagaccatctcctatattttaaattaaatttcgctcaaaatatactataaaataatatttaacttaatttttgtatttatactttaatgtacaatatataaattagttataaaagttactattaatactcattaaaaatatataaaacaattaattaattttatttatattattttaataacttataaatataattttttttattaatgaataatattaattagtgacaaataagtaattaaaaatatagtatttattgtgagctaaaatttagcacatgttattttttgtttggtacaatttttagtttggaccaaaataagtattttacatcgctattgaagttaacttttaacagatattttaaaaaatagcaatatactatattta

SEQ ID NO: 32623 - DNA, 2484 bp, Cannabis sativa
ataatcacgaaaggggattattgccccttccataatgtgctcaaggctcgaagcccctattctagtggagccactggtactggtctcgccactggccccatcagaggtctcgcgtgtaagacgcacaggtgggtaacaactaaattcctcgacttgcacttatctaacccggcagtctcgcctatactcaatgccgtaggtgcttagtgactcgcctacataacctgagataatccgcaccctcgactctattaactctgcctcgaaggtgacttgggagattatttcaaaatccaagtcacctggttcaaaagccagccattgtgagtgactttgggtaggtaaaaacagaggtttagccaaaggaattgaagtctcactgggaggtttaggccaagcagcatctcgcatgaaatggtgttttccttcagtaatttcttggaagaagcatctgtggcgactagcaatgtcttcttgatgaattttcactaagtgttgtctaattctagcatcatttatctctaatttggattgaggttctaaaattttgggcttgtgagggatggcaatctcaatagggtactcaatttttaaatcttttggacgataaacttctaaaccagattggcacattgctgcaaagagaaagcaatcccaattcctggaagaaatttatcaaaccaaaagttggtaaattggagattctagaaaacctacgtactgtctaaaccctaatatttacctagatatagttcggccctaaaaattgctaaaaacaagtgagataatagtgatgcagaccaagaagatagtaattaaactcataaatacaacataacaagcatatgagataataagcagaaaagttacttactgtttaaagttggggtttgggacgatgaacggccctacaatctacaaatcctcgaacgtcttgaagatccctcctaatgcttgaggtcaaaaagtaaatcggatgaaagtcaaagaaaaaatgccaatgacaaagatggcatgcaaggtttcaaaataattgggatacgttttttggaagaaaaactcgaaaattttccaaaagttttcaaaaatggcgaaagtaatgcaaagatgtttcctttttactttatatactcttgggttaatccccgttagatcagaaaagtgattactccaacgggaagaattcaagagaggagtgaaaaagatggtcattaaatgttgatgtacctcgaaaccataaaactgccaaaatcagaggacgtgcattttttcaaaaggaattatgataaatataccctctgtactcattaaaaagcactttttctaaaaaaaaaaactttttaaggggcaactcttatacccaaaattattctagcagtttagaggaggacatgtgtcaaactaggagaatacgaatcaacaaatataatgtcagttatatttgaaaatggaataacccattaaatgcgaaactgaaagagtatattcacaacttgctaattgtaaggtcttaagtgagataaagatatataaattattgcctcgtgcgttaacgagaaaccatacgacatcaatagtgcaagacgaggcatcaagctcgctacgcatgacgatacatgatgactgttaaggcacttagcgtataatacacattatacaaactaagcatatcggtcaagcaaattctaacaactaatagcgaggcatccatctcgcaataggaaggcacactcgtggtaccttcactaatcagctccagacatcttacaatgagatcaacagctccatcgagtcagctctctcagatagaaggtgacattcaaatgatgttgactgctgaagttcaccttctcaccaagaactgcgattgtcagatggagcgctatgtcttcaagcacagaaacgacaaggtttacattatcaacctcaaaaagacatggggaaacctctagctcgcaaccagggttactgttgctatgttcctagcgagacatcccaaaatgatacgctttacaacataattaattcatgtttgcattgacatggtaaaagcggatcaatcagagctgtgtgattttcaaataataatcgcatttattttacgtgggatgtaatcaaatcccacaatttcaggggatgatggttgtaaaatatcagtcaaatttgtaattaacgggcctcctatgtaattataaataggaacaggttacactggaaaaaggatgaaaaattcattaaagaaaaagcccttgaattgtatcagaaatttaataagattgactcatggactatgcagaattttaattgcagaaccacttaaaaacctttgtgttcttactttttctttactgcttttattttctgtgctaatccatcacgattcgagctttaacatagttaacgaaaatctgcgttaacataattagacctaaatcatcaaaagaccataaccacattttagtatttatggcatttgcatcttgt

SEQ ID NO: 32624 - DNA, 1432 bp, Cannabis sativa
tgctaattaaccaaaattttacgcaactaatataaacaccatgaacaatgtaatttagaagaaaacagatttgtagtaatcaataatgtcttataatacaatctcattcaactatatataagaaatcattcccgatgcataattaaggcaattggagatgaaaaagcaaaataaacaataagctactcttgaaatttaacttatcaagcaaagctacttatttttccatcatttttttaatcaaacaatgtgcatattattatcataattggctaccaaattctttttaattttataagggaccatatatatacacgattttttccctctaaattatgatctctgtagaattttatttttttatttttatatttttttttgttgcattgctcatctaggtagctattagttatatatatagttacagtaggagaatcttcaacggacatacataaattggtaagattatcccactaaaaatgaaaatgtatatgtctcttagttgtttagactctactaaattaatatcacgttagtattatataaacaaattatttaaatatataaataaattagaatacaattacatatggaatatttgcaagcgaattttataattcaaagaaattttttatggtgagaagacaaagtcattatagttggagaataaaaaagaaattactcaaaatattttgaagtggtaacatacaaacaataaaataaaaaggagtcggaccaataatataaatgtatgtatttgagtagagtattgtttttagacactagtagtatctagcaatttctcaacatgtcgtgttgcgattggttaacgatactctctaaaagctattatattaaattatacaggacccgatacttaattaaactaatagtaatattgatatataggagggtactagatactactggtgcactcatttcacttgcgattgcattgcatgcatgaattgattttggaataatgattagtttttggtcacgtggtggggagacagatggaagaggcccagcccagttgttttcaaaaactgccaccggaatctgtttatttaacccataccattaccaaacaaacactcctcctctcgatttctccaccaccaccttttgtttttattctttaatgcttaattacttattttctcattatttaaatctctttcattttcgatttcaaatatactattttatttactaacaccattagcaatgacacacttgaattttttttttagttatgtgggagctttaacagttataaaaaaattatttatatttgttctgaaaaaatagtataatccttttttattataatgttgggatttttttactattttattgtatattatttaattaaaaaatatattaatttttttaagtgttattttgtaataggggctacaactcccgt

SEQ ID NO: 32625 - DNA, 1560 bp, Cannabis sativa
tctgtttctttattgatgttgaataaaagggattacattgaaatggagttttattttgggcataaaacccaacaaaggagactattgaaattctggaaaaggattacctaattcaacaatgatggaaaggcatactcacccatattgggggaaaggctcataaattgagatgcaatttaatggacatgtattcgagtgattagtgaatgttggatcactaagtaggttgtctattaaataacggactacatagctgagggtaaaatgactttagagtgattaaccaagtatgaagatactgattattgcaacgaagcaatagtagcgtacaaatcatggagtaaaaccttagtggttaaaacaggaaaagaatataagagtcttagatgttgatgaatcaataccatcaacaagggactcactacaagttgtagtggtagttcacaccaagggattgtcaataaaataaataatatacatgtataattctagatgtgttaaaaaggaaattttaggatttctacctaacatagatacgaaactttgagatcaaggaatggtctttgatcaatttttattagctaagaagttatgaaatggatgcaaattaaaatgagtgtaggtggatcagattcaacttgataataagatgaaaattcctcaagtataagtgaaaaaaattgatgaggaattgtaagaggataatgaagggagtgatggaaattggatttaaataacgaaagtaaaaaaataagaaatacaagtaggaacgacaaagaagcatctactttttcataacccacgatgagcttaccttagagttgagcatactcaacttggggtaatctcaagatgggaaatctttgggggagtcatctttaaaagcctacgagtgaggacaaagtacactagaaagattcatattaggatgtagaatcaatagtcgttctagagattatcaagacgaaaggatgtgtgaaaaagtacagatttataaagtattgagataagcttatgttaataagtagaaataagaagtgctctaattgaatatttattagcaacaaatacttaacttgttaataagttaagtcagtagatttgtttaggaggtcccataagatatattgtgatatcttatgagttcgaccgagtagtaacggttgggcatactgagttaatatgttgtctatcagcgcagacaatctatacaataaatgaggatatagaattcatacgaaggaatagtccaatcttgtgaaattccaaagttgctatcattagctatgatgtgagaattaatgaaggttatcgagaactatgaggattaaagtaaaaatgtaataatgttttattcttgaaatgtagctaatctgggagaatcaatagaatattagaaacatgctgtgagcatatttgataaagattagattatcttagaataattttttccattgacgaagtgtttgtttaaaactgatgattaaatgtaccattcgttaggtactttaataagtgtggtatgaaaaagatgttgggcacttgttcactggggaaaca

SEQ ID NO: 32626 - DNA, 1154 bp, Cannabis sativa
caacttgaaagattaagtgaattataattcacacaagtctatattcttttttggaataaaggtagccttgagttggatggagttacaatccctgaagtgacttggttagaggaacatcaacctcctgacaactttgtgattcggagagggctgtacaagggtcctgttattagaacttgagaatttcttattttgatgttccttacattttagtcaaatttggtttacttgataggaaacattgaggggaactatggtatatgagtggttgaaatggccatggcaataatgtttttggctatgtaagttgggcatttggttttgtacataataaaacagccgtacactcgttgatttacttactgacctcacattaaacttgtagagtagtctctgaaagttgggaaacacttgttgttgaaggactattcatctcagaattggtttgtttaattatgcaataatgatattagcttattacagccttgtcttcttgccccacccccccaaaaatatatctttggttcacaaaaccaagtatttatgcatttccaaagcaattctgattcaccaagtttggctttgcagtctccctagcattttcatatgtttaatgaaataatcaatattattcgttcaatttggtttctgttcttatctaaccatttaaagttattgatttcctaatttagttttctagcatagatttttcgaggttacacatgaaacgaactcgtatggtctttaaacatatatacattttaattctttgctgttcaagtattatgcgctaatttcatatgttgagattaatatactactatgctgcgccttcactttattaaagttccagggcagagccaccaattaggcccaagccgtgaaagtgccccattttgatatccatatctttaactttgaataagattaacgaaagtaggttcttaattttgtcattttaaataagttaatacataatccaagtattcaaattcctgctaggggaaattctgagcttgaaataatatatattattcgacttattctcacaaattatgtagagaatttagttatgttagtgttttgttcttattagaaatgtaaaaaagacaaatccacaatgtaacagagagagaatagacatgtgatggttg

SEQ ID NO: 32627 - DNA, 1962 bp, Cannabis sativa
  modified_base (32)..(37): a, c, t, g, unknown or other
cttaagaagttcaagatggatgattctaatcnnnnnngcacaccattagaatgtggaacaaaattgtcaaaccacgacgaaggaggaaaagtagatcctactcttttcaaaagtcttgttagaagtttgcgctacttaacttgtacaaggccagatattctctatgatgttggaatcgttagccgctttatggaagctccaacaacaactcatttgaaaactacaaagagaatacttcggtacatcaaaggtacgaccaattatgggctattttattcattttctaacaattatgagatagttggatatagtgatagcgattggattggagacttggacaatagaaagagcactactggatttgtgttcttcatgggaaatacagtatttacttggatgtcaaaaaagcaaccaatctttacgctatcgacttgtgaagtcaaatacgttgttgcaacttcatgtgtttgtcatgttatttggctaagaaagttgttgaaggatttgaacatgccacaagaagagccaactgagattcgtgttgataacaaatcagcaattgcactagcaaagaatccaatctttcacaaaagaactaaacacatcgacacccgctatcattacataagagaatgcattggaaaaaaataagagtggaatatgtcaaatctcaagatcaagcagtagattttttacgaagccactcaagagagaaacattcatcaaactacgaactattactggagtcacaaatcaagtttaaggggggtgttgaaatattaaacttgattaatatagttgatttctacaatttttttgtttctactaagtttctagactattcttatatttactaaagaatctagagtctttttgtttatttaagtactcttgaactttctagaatttttttcacttgtgttagtagagggaactatgtaaaacaatgtaaaagctagccatggaataatgtttctagattagtaaatagagtcctataaatagagatgcaatcccatccttttgtacctagtcacaaaccacacaagttgaaatataaaaatatagcttcttccatttaaatattctctccaaagttcttcttatgttccaacaaatgttacttaactatatgttggaaagtttttatgattgttattatcctttctttaaaaatttaaatgctctacaactctatacataaaaggctctaaaattttattaactacaaactatacatataaatatagcgtaaaaaaataaaaaccataaaccagatatcgcatccctctcatcattctgcttggctaggatgttgtcagaggtttgcaggtacgtttctgttggcttgccggtatgccgcttgcacgggatgtggcctaaacctacaagagttattgtggtgtgccttggccatgagtctcaacacaagatgacacaagtagtcattcgtgggctagtttgcatatgcgcgtgggatggatgcgccatgctggaaagagacagaggtctaacgtatgctactagtttggtggcttatctcgaaagcctgccaaaatgcgtggaggcatggtgccttgaggatcagaccatgaacgtatgggggtccttggttgatgagggaaacggttcagacagtattaaatggggcataattagtagcgttggcacgtcagcttagtgttggaatcttgccacacatgctaccttggtcatgagagactaggtgatcgacggtgtcgagatttgatttatcatagtgagaacctatggacagtgcaggtatcttggctagagagtctcgatgcatgaatgcactcatggatgcttgcaagcatcactcgacgggagttgtttgagagatggaagtgtgcacgaggcacacgatcgcgtaaatgaaccaattattactaggatggtcggaaggttgaccttggcttagagaagtcaaggtgccgcacg

SEQ ID NO: 32628 - DNA, 1607 bp, Cannabis sativa
tggtgttactaaggttgctgatatcttgttaaacaatggtaattgggacatctgtaaactcaacagtctctttgaccatgagacgattgttgtaatcttaaagggtggtaatccctcgggtcttggcaaggataggtgggtttggactctgaaaaagtactggccaattttcgtgtaagtctgcttaccttacccacgccaaggagaggtctcctcactgtgacattgctccttccctctagaacatgctttggattagtaaaatcttggagcgtcataaggtcctctgatggtgtatcctgtccagagccctccctgttaggtcggtgatcagtagtaggtttcttattgaggattctaacttccctctttgtgggtcgggagaggaatcttttgaacacttgtttctgtcttgtgaagtaacatttcacctgtggcggtcctctccgtggggtatttatcctgtttgcaatacaagcattcgcctttgggactgggtgaaattcatctggaattttaaacacaagggtattaatgctgaagatagttttctttatgcttctatcgtggttgacaccatctggcggacccataatgataaggtatacaacaactgtccggttgatatgaagaagtgtattgactctatttgtactttttttttggtagatttgaatacttctcttttccctccacctaccccatactgcatggaggcctggtgtccccctcctcactactggatgaagctgaactgtgatatcagagtggggtcagatagcatgtattctgttgttgtggctagggatcacatgggcagggtgatccgaattcatacggatcggttggatttttttgatgtgttgtgtggagaagcgacgacccgctgcttggctgttacggtggcactggacatcggtgcgaagtttgttattgtggagaatgactcgagtgtggtgctcaatgcgcttagtgggaaggatcctcattgggctcttgagaactatcgctccttttgtaatagatcttctccctcgtttttagttgtatttttacgcatgtcagtagaacatgtaattttgcagctcataatgtggccaagtaggcatttgctcacctgagatttggtgatatcccagtctctattattctgaccatgaggtgtaactgctttttatcttataacaaatacacttttctttttttttttttttaaaaaaaagagacaaatgaactacaaattacaattgtaagagattttagcgagagctaattgcaaaagacggtggcaatattatatatgagagaccttaactgaagatgtcatatgagagacaacaaccacatcacacgagcaacaacgttagtttgagaaaggatatcttgttaagtaatagtttattttgttaaagttaatatagagaattaaaaaatactcttaaactaagaattctatacataactatattttatataaaatagatatttaatataatttttcttatatatttttaatataaatataatatcttttagttgatttcttttacaatttctattaaaaaaatttattttagctgttgtacattagaacaaaattataaaat

SEQ ID NO: 32629 - DNA, 1574 bp, Cannabis sativa
  modified_base (556)..(559): a, c, t, g, unknown or other
  modified_base (1421)..(1424): a, c, t, g, unknown or other
aaggaaatttcaaatgggcgcctatatacgttggtttcttaggagaggataaggctttgtgagaggtccatgccacacattctcagtgttaaggccattcaactcatttgggcctcttctagttttcttccctaggggtttattaccaattttgtataaatccataaagtttcaatagtttcaatatgtttatatttattaaatctgttagtatttattttatttgtagagtcattattaaacgattgtaattaatttaaaaattaaataaaatataattaataaattatttgtaacttaatactaatctaattttatttatttttttataaataaaaaatatttataaatattagttgcgaaaaatatcttattaaatattttaattaaaaaattaatttattttaagtatataattaattataattattttgattttaaaaataaaattttacctattagtaatctgctataacaagttataaaaaatgtaacgattatagttacatttttaatgtaatcattgaatagtcactcataaatatatatatatatnnnnatatatatatatatatagaacatttctcaatgagtattacctatgaatggttactaaataaatttaactataaatattgcttttaaaaatattaaactatcaaattttgatctaatgacgaataatgaaagagaaatttaaatttttatacttaatttaactatttaattaaaaaatatcaaaagatatctctttttacactatatcaaatatatttttgatatagtgtaaaaataagtattttttgatattttttttaattaagtagctaaattatgcataaaattaaaatttctcttttattattcgctattggacaaaaatctaataatttaatatttttaaaattaatatttacagttaaatttgtttagtacccattcagaagtattccatataagttaatatatattacagtaaacataaacgaaacagtatgaacgaatcctcgttctccttcttttaacaaaatctttttctcttatatccattttcttcgattttcaacccgaaatctagtgatctaagctccggtagtagcaggatagcaaatccttgaaaagaaaaaacttaaggtatggtttaatttctttttaagtttaaaataattagtttcgtataggaattttgtgaattagaatagttatgaaggttctgaccttataggattattctcgggtagtcatgggactagttctgatgtttacttgttgaatttgaggtgatttttaattagaaatcgagtttggaactttttaaagcatagtccaaacgttcatttaaaggctcgatttttatttctattacgtaaggatggtactatttgtggtatatatacgccctgtgaagtttggagtgattnnnntaagttttggtagtgtttcggtgaatgcaaaaatcagaattttcgagttttatattttttaaaaattcctaagagatcagaaatcatatttttgttcgttttggacattctatatataccatttcgaagcttgcgatgagctctacaata

SEQ ID NO: 32630 - DNA, 2237 bp, Cannabis sativa
gacaaaagtccttaaatccaaccatctcaatagttcagagatcatttttaacgagtttcaggtagcatacatgtcaatattcaagagacaaaaatcctaattaacctactatttaattactttttttttgctaactactatttaattacttttagtaattttttttttctaataatcagttaaaaaccttcgtcaaaactaatccacataaaaaaaacctaaataaagtaaattgaatatgctgctttgtagtttgtactaatatcgacaacaaacctgttttgggctataagacgtttggagatctccatattagcttctgcattagaggtggtgacaattaatttctatttttcactaaagttttttaattttattaaaaatttacaaatgattttaaataaacatattacataattataaaaaataaaaaatacatttattatttctaaataccaatttttttttaaaaaaaaaatgtatcagaatggtgtaataattcaaaactttcatgaagtttaagaatattgttattgggcatgagtggtacctaacacttttagacatgttatcttatgattagctagcgatactctttaaaaattattacattaaactatatgtaatccaatacttaattggaccaataataataataatacacaaaaaaaaaaaaagtattaattaacactactattattttttaacatttctattaagtaaaacatggaattaaattaatagtcaaatattaaaagtacatcgtaacttcatgaagtgaaaatagtgtattaaagggctatgcaaaacaaaacaaaaaaaaaaaaagtgggacatatatggaaaaaaggtcaacataacaactgggttatcattaacttttgtgcacttatctattaaagctatgcaattaattatgtcattttaattgttaggtgattggcaaaacttagaacccttaataatcatcatcatcacacctattcttattcttattcttttctctctttttttcaattaaatataaatattgttgttatctaatctttgtattggatttttctctcgttaagaaataaattatcaagaaggaaagaaaatattaaattatatcatagtggacaatttttttctttttggttccatgacccatcttcaataaccaatatatatatataaataaatgtacataaatacttgaataaaattgccaatttgttcttaagtattgtaacattgtaaaaagaacattattaaaggagaataacaatcaaaatcaatgatgtgttgaattgattaattactacattatacatatatatatatgtatatatcttgattggtggttgtacttttgtagctattctaagggatgtgattaatataatgatgtcaatttaattaagaaaaatagctagctaacttttattaattaaaaatataggtttattaggtaacacttaaccgttgatagcattggattattggtagaagattaggatcaatcattttaagtcaagaaaaaaatatagttagctctaataataatctctatagttagctagtattagttagatttaacaattgcatgttaatgaataaacactagggtcaatttgcatttataattgcatttaatctaaatatatttgcaacttattatttatttatttgtttgttaaaattaatatatatataaaactatgttaccaaatttttgtgggtgagatggggttagggcatcaaccatggatttcatgaagctttttcacatgatttacacacttaatttatttgatatattgtttcttttactctattattttaatttcttagtattattgacttatgtaaatatatatattattaaggagagaagagagaaagtcaacttttagaattttcttttggatgagaataattagaaatttaccaatcccaatgtgatgaaggcttattaattattagttcaagttagttaatctccttagcttaactttatagattgtaaataatatgtatgtccgtacatcctagtgttttgtttgactaaaagtttttacttgtgttttaatttagcctaatatatagagtagggttgaaaagtttaaatgggagagagagtacattttttatatataaaattattatttattttattttaggataaatactattttgaaccttgtgttttgcaaaaattactgattggactctgtgttttgttaaatgacaaa

SEQ ID NO: 32631 - DNA, 1261 bp, Cannabis sativa
gcttctttgaatgagtgagaaaataagttaattatatggctatttataggcctagagcttaactatactacaccatactacaccataatttgaaaagaaactattaaattattagtaaagcatcataatcttctttacattcggtcaaaccagtttaatactatcagtagttttttttttcttaattagttcgaaaaggctaccatgtagagaatatcatccaggactgcgtataatattgagtaactctctcatttattgttgtcacataaaccgttcgaccatgtgactaattaaactattactcaaactctaaattcttaacatatgttcccgtcctctactaccactagtaactttttcttattatgttataaatatataggaaaatttttaggtaagagcattatatttgcttttatagatgagggtatttttcaaagttttttaattggttgaatagtccggttgcatggctttaccatgggttggggagtatgtgatttttttttttttggaaatatagagagagattatttatttatttattcttacaaggtaatacatacattgtaatctatataatctcctttataaatgtttgtatttcaggaaaaaaaaaataattttatgtaaaacttttgctaataaaaacatataataaaatcattaaaaaacatataataattctttaagttttggattttttttcatatatatgtattaaatttattttttggtgtctgtaatatatataaattttttgtaaggtcgatcttttttattttgtttttttggtttttttttttttatttcttcaaataataatgaaaaggaggatataatagaaaaattggagtatcatgaatctaactaaaattttttaatattaaaattatagatattaaaattatagatgggcaaggtaaataagaaataaataaaaaaatatattttgaactaattggttatggtgatttgagttttttttttttcttgtagaagatgaaggattttgggttaactaaagaaaatatttatacgtgggtcatgccgccccaaatataaaacaccaaaaactgccacaagattaaatgatacacatataaattgacagttaaaatgaaaaaatcctatgtaaaaaatcctaatataagcaaatagatccaaacctttaaattcaaaatcaatggatataaaaatgctctcatatgtaagagcgaaagtaatcttatcacctaagaagttccctatatatata

SEQ ID NO: 32632 - DNA, 1342 bp, Cannabis sativa
tgtcaccatcgagtgatgccatattagagtgcaaaaattgggataacattttcccccaagtctgtacaggactttcaaagttgcgtgtagacttcatctgagctgtctttgcattttgatggatgacacatgtcaggcgcacttgtttgcgatttgatgtgaggctgactaggcgtgtcttcggttttcagctaataaatgctctaacacaattaatatttttgaaatccgactttctcttaccacgtttgacggttacacttgattgcttttgatttcccatattttctcttgggggaatcgaggcgtctgaagtcaacaaaatgatgttccgggcatcactctacagttgagtgagcttttgagctctatccctgagagaaagcgtgaggggtggatagttatatacaggaatctactggaaccaagtataggtggtgcccatgccttctaccatatagtattcgtcagcaaaatgcccaatttggctagcacccttgtccgcggtgctcgtcaagcacttgaagtctggctgagaaaaatagaaatatcttgacctgccttgtttgggagtagacttcaagtcgaagaaccaacttacctactaacttcaactttatggagtactggctttacccaaaggatttcattccacggcctgtgaaggggaagaagaggaaatacagtgctggacgggctgagggaggtcatcaggaggatgagcttattcaatttaagcgtgaagctaagttgaagggaggtgcaagggccaaacagtatgctcatgagcctttggatcctgaagatgaggctgaggaagagcaggtgacttcgctcaaaagtagaaagaaacctttggccaagcccaggcctgttgaacatgaaattcaaatcagggagcccagtttacctgctcggccatcctctcatgtgctaggaaaagggaaggccgtcctggcagagataagagacttgtcaggtgatgatgaaccttcgagtcttgcttgggcgaatactttccatgaagcagaagatactccaccttgtttttaagcttcttgattattatggttttatacttctgatgccttttatattctaaccacattgcttttattctgtgcagacatgtctcagaagatgctcgacgctctgaagaagagagtttggggaagctcaagctcatctcctctggacaagaaatctagggtcggtgaggcgaccccatccagggaaaagcaccaatcaaagaggttattgatctttatgaggagctaactgtcgtggacccttctgctccgaaagctgctaagtccaaagattctcgaggaggaagctcgga

SEQ ID NO: 32633 - DNA, 5357 bp, Cannabis sativa
aatctatatattatattattataaataatataacaccttataccttctacaattattgactgagttgctaaagtgcgacattctttggtttcataagaaaaatgaaggagaatagaggaaagggcacaccggttggtataaaatcagggagaagaagaaagagaatgacggagaagaagaaagagaatgagggagaagaagacaaatttcatattggagaagaagacccaaaaatatggcagtggatgggtgttcttctcgtcggaagttcttctggtggtgggtgggggaatttcttcgtcatctcgtgaagggtgggggtgttatggagaaaatgggtctcaaaaccctaaactgaacctaaaaaataaaataaaaaaaataagaaaattacacgtgttaaattacgtaaaatgcataataggagtcacgtcagtactctgttattaaaatgaacagaacaagacactatactacaaatttaacattatcaaaagtttaaggagaattgtcaaaaaaaaaaaaaagtttaaggagaatttttaacgtcaaaattagtttagagagcacgatttggtaagtaaaagttcgggggaattataaattagcctaaataaataaaaaatctaagttcctctcattttaactattttaagaaaagaaaagaagaataagaaaatgaaggggttgcgtgcggcgggacaatatttttgggtttgaaaatagaaccaaaaaaaaaaacatttatggattttttggggtgcttggtggatttgtagtgttgactgttgagtagtaaaatcattttcaagaacataccgcaatttgttgttgtggttttgaattttaatagctaacactcaacttaacagtatctacggaagccatggttttcggcctcattcccgttgatccctccccaggttagcttaccatttcactgaaatcttctctcatttttttccttttaatttgtttcccagaaaattttaacaataaatatgtaatctttatcatggtatttgtgattttaggcaaagaaaccaaaaagtctcaccactgattcattatccatttttttttcccaaaaattaattaatatttagataggttttatctgtaaatatgaataatgctctccaaaagtggtttgccttgtacagttttccttgtttatacactgaaggggtttgtgtgtgtctgtgtaagaagaaaggggaagtttgtttatgttggtagggagggacttgtgtaacaagagaatgctggtgatttgtggcattgaacaatgtttcttccttaatattgattttaagaaatagattttaatgacaattcccaggatggattgggtttatgggatagaaatcagtgtacagcaacttcagttcttgatgactaaattagtggtgtagtggaggggttaggatgttcttaaatgtccctttctttggttgagagttcgaattcccatgtttttgttagtcttgggcatttaatgccctggactaggctcaaatgtgcttaaccttgagctgaagattggatagactgcggtcgggcacttcccactcttggtgcaacccatgatttcgaaaggacaaagggtatggagaatgggaggcaccactgacaaaggataaatgaaataaaaagcaattctagataatttagatgtataccctctattgcaattaatttcagttgaagaatatggtttagtttgtctcaccggtttgtgttttctttgtgctttgatatataggtttttggccttctaccttactttggatcttccatcatatagtttcttaaacccttttgtaactttaatgaaaatacaatgtttatggaacagtttgctgtggttttggttggtctttattcttttgattttatgtttttttttttttatttatattggctttagatctttactgaatcactgagtatgattaacacaacaggtgaaaataaatactatatcactgcaaagggttcatacaaagtgggtcgcaaaggtacaatacaccatgtctattttgtattatttttctttatccatgagaattacaacgttaggagaattttgcaaattgcaatatgaagcatgaaaatgacaactaccatgtttaattatcgtcctgaaaacctaaatgacaaccacactgtagattgatgaaaaaggatgtgaaaatactctttatccccaaatgagaatgttgcaatatggagttctttttttataactttttctttttaaatgaaaattttatgtatggccttttatgtcattgtagggtgtgatataattatcacaaaggacaaaggtgtttctcgggtccatgcagaaatatttgttgatgagatgacttctgctaatcccccacatacgaagacttctaatttgtccaacaaagttcgaattaaagattgctcaaagtatggaacatttattaacaagagccttgggtcaatggagaaagtccatgagttcccaggaaaagaaacagttttaacagatgggaacctgatttcatttggaactgggaatgcaacatacaggtattctctctcccccttgttttcgctcttctaagtgttgctattggcgaaagcaacgagtaggaaagtgtttttggatagaaagttgtacaattatttgaaaacttgtgagtttattaacgtcattgtatctttaaattgcagctgtcgctggataatctagatgtagttatatttgttggtatacttttagtggattcaacaagccaaaaatttcaattacatgtgcatcttccttgtgtccaaattgacaggttttcttttgttccattcattatttgggtctactctttggagccccaccaagtgactcagtcctttcaagataaactttcattaataggttagtgaataaatactgctagcaacgatttgataccgagtatataattgttaaaagtttcttcttttttttttccttgaaagaaaattgtccatatcttatggctaataaatttattggttgctggatatcaataatctctaaagtattatttctgctataggttattttcttgtactaattacataacctcgatgcatacaaagagacaacaaattcaaccaaacatagatgaagaaggaagcctccaaaacataaatgaaattttttcttcttctctaattcaataaaatagtatgccacccaactcccctaactttgctaatcaactattggctatgtagttggttttgctgctgaatattaacacggttgtggggttggggagttagtaaaaacctttatgcagtaacttggcttatacctcgtgtacctgaatttggttggcatttcaactgagtttttcaatagtatatttcttgacataattcatacacacaaaaagaagggatggaaaatcaccaagaaagaaacggcaagaatgaattacagataaattggtggttctttggatgtttcagtttattttttttttagatatctgtttgtctgatttagttagctattggagtacttgtttgtaaacaataagatgataccttatcctcttaacttctgtatttttttctttctttttttaaaccttacctatcaataatattagtctctgtttctaaaaaaataaaagaaaaaaaaaaaatcaaagaacagatgatgtcatattttgccccattacaagtatggtttagttttcactcatcctgctctggccaccgtatccaaaattagtatggcacaagttatctatgtatatcctgagatcaagatgctgcctttaagtgattttattaattatttgcatttgataaaaaacattacataatatttcttgataccccatttgatgccatctagtacttggcatttgatgtgtgtttttttctaattagtacataaagtgagagttacttggtatcttctgttttgatcccaggtgctgatattacttacaatttcaaccaaaagtgcacccatgtacttgttgatgagctgactcccctaagagaagagttactagatgctattgtggcgaagaaagcttgtgttcggattagctgggttgaagtaaacaaatgtttcatattcaatttcaaatgttattgattacataaatttataggaacatttaaaaatgcaattatagtttatttaactttttcttatgtcggtgttaatttctctgtagacagttgctgaagagaagatttgcactgaaatccctagctgcagcgagtaagttattattatagatagtgattattatgtgtagatttggaattatcactctaatcaaagtatcatttctgatctttatcagccacaccccaactctctcagtagaggatgtctcagtcaaacttgcagacccgggaactcgcgaaaattgtttggatggatatacttttgtgttggactcgataaacagtgtaaaattttggcccccatttatgtaatgtatatttttatatgaatatattataacttttgtgtttatagttgataaggagcttttatgactatgcctattacacaacaattcactcaaaaaaacagacagtaggatcaactacagtcataataatttttgattttagggctaaatgtgattaacaacctcaagattgtatattcttgagctacataatcacaaaaatctaatttcattcggtttgttcttttctacaaatacagtataaataccgaaatcagttgaagtccctattagagctagctggagcaaagattctttccattgaagggtttagttcaagcagtcaagtatgaatctctcttttaagacaagctttgtattttagttgccgttgaaaaatatttttattaatataaataaacttgagggaattattttattcgtggttgtctttctagaaaaataaggctgtatatgatctttgtttaaaattgtccctatctgaaaccttttgaatgaattcttccagggatcaaaacatgaagaaagcagttatgttgtttgtgtcatccccggagggtcatcctacaaaatcgattgctttaataaactcaatgcagtatctagagtgaaggaaatagacttgatacgggccattttaactgggatactggatcgatccattttgatatcaccttgcggtgagtttgtttgttttgcttgtgataaattacagctttgttattgtctttctttccaacaattgttgctgtagatgatcaaatgcttccaaaagtttatcgcttcgggtccctcattttcttattagtagagactagaatactcgctaagctaatgtgtctgatgtaagacggtatagaaagtaagagtaaagag

SEQ ID NO: 32634 - DNA, 2338 bp, Cannabis sativa
  modified_base (1890)..(1900): a, c, t, g, unknown or other
gtattgctcatgctttcttgatcaacataacatggaggcctgtttccttctcgtgtttgccttcctgatcgacggtgttcttgagatcttgagtgtctcaagctagaacttgcctcgtcttgtactggccttctccttcgaaagagattagatacacgtcctctatttaggtacgtgtatacaccttccatctcggatcgagaaggacgttgagggtgtctcagtggtagcccacttatcctaggttgagtcccaggatttctctcgttattacaggggatttcctgttccctagttcggggctaccttgtgtcctcattcctgcgagaagcctctggtacaccattacgttcattcccttgattcataagtccttgagatctttgaggaacttctcgatgttattcttggttattttgttgttcatccactggaacatccctagtacccccaagttgctcctcctaggtgttttggggatttccttgattcacttcttgtctcttggctcttgaaccctgaggtccacctcgtggtcttcttaccccaggatcaggttgattctgagtattagtccctatagtcactttagccgctgcagcctctctatctaactcatcattttgtcggttagatttggctaagcattgccgaagttgtctattttctaattctactaatggtactaatggtacatacctagttagatcttaagcatccttaagcatcctcacttctaggtacatatcctgtagaagtattagtttcttcattccttccttctgggttttgattatcaccaccataatttcttcttgaacgtgttgttctagaagtatggggtctttgagaacccattggctctttcccagggtgatgtgtagtttcctcaggacattttccatcgttttaattgtgattagccatggatagatttcggtttgtaaggggggatttttttgagttttatcacttaggctttcaatgaaaggctttcaatgaaagctttcaatgaaagcacagcaccaaactgttaacgcagattttcgttaactaaatataataaacctttacgtaagaaatatatcacaaaaatagtaataaactattaaataactccagggattttacgtggttttgcagttaattctacatactcctcgagtctattttattatgatagttttctgtataattgatacaagatacaattggtgatcttttttctctctaaatattcgtccctttttctgtggaatttgcccctatttataagaatataggtcggcagttatttacatttgggatcaatttgaaatgtaatcgttcatgaaacgtgaacaattctcacgtttcatttaaatgcatgtaggataatactggataactacttaatttctttttgttcttatctttatagatagttattgctgatttggacaattatatctcgcttaaccccgagttattatctttgtttatcataatgtggaaaaaatctaagtgttaatagatagttcgcctcgccaagtttctttagttagaatagcgaggtggctgtctcgctatttgtaacccgaggttgctttgcatgattgtattcactctacttaaataaatgaattatcttttttggttgtgaactctgaggcaggtgtgtgtcccgtcaatataagtttcaatagtcttttatccttatcccgcttaagactatgtagtcagcgagttatgaatattttctattaatcctttattagcgagttattctttttctttgcattaaatgatataatttcattatatcaggtggttcatattccactgcaagacatgtgtcactttctgaagtgtagccgaatttcgggtataacaacaacaacaacaacaacnnnnnnnnnnntaataataataataatattttttggttgctaccgatttttattttagttagttagaatttttttttgaattgtatataaatattttttttagttaattaatcaattaatatttataaaaataattaaaaataaaaaattagataaaattattttaagtaattttagagtgttattttattaatttaaatgagatatttaaggagaaaatagatagagttattttgagtgattttagagcgtcgtatcaccgtatacttctcctttatatatagatatatataaatatatagattgattgataggtatacgttttataaataagtatgaattaatatatttagggtaaatggcggtaaaactcccaatactttcgttttggtttcactaaagccccaaaacccaaatttgtgcgggtaaacccccaaaatcaagaaact

SEQ ID NO: 32635 - DNA, 2125 bp, Cannabis sativa
  modified_base (27)..(27): a, c, t, g, unknown or other
accgtcaatccaaaaagacaaggaccnaatccaccgagtggatacaattaaatctctcaaaggtaacagggtaccgaaccccgaagaaaacacattacatggcttatgaaaactttctattactttactcgatacataggagtgagtagctcccgaatcaattaatacaatatatgaacaaccaataatagataactgacctatcactgctgacggactaacattagcggtagcctgagtaatggtaaatagtcgtctcgggttctggttggtattcttctttggctcttctttcttggcctgaggacaatctctgataaagtggcctaccacgccacactgaaaacaagtcttggcccgacattcaccctgatggtgtttcttgcatttcgaacactcagggtatgatctgaatgaagatccgcgaccctgcaccgaaacttaatattaccccctgaagttccggaagcattagcctttcgtttgtgatcagggttaccattgtcggtccccttaactgatattaccactcacaagaggattcgatgccgtggcagcattctttgcagtttgctccttaatcacatgttgctcagcctcctcagctattaaggctaattcaacaactttcttatataaagtgtcgtgggcaatcttcaagtcccgactgattgtggcattcagtcctctcacatatttttgtttccgggtgtaatctttcggcaccagatcaccagcaaatttagatagccgatcaaattccagagtgtattcagccacagtcattttcccatgagtcattttcacaaaatcttccatatgtgacgttttcaaagcgatgttataaaaattttcctcaaacatactcttaaactcattccaagtcattgtgctaacatctcgagtctggcccacaatatcccaccagacgtggacatgatcttgtaacataaaggcgacacaattcactctctctgttcccgtcacccccatgttatccaggatgcaggtaatagtactcatccatagttcagctttacttatatcagtacttcccagaaacgttggaggttgcagctttacaaagtgctcaaatactgaatctgtgctgcagtaacacttgctctacaggagctgccgatgccagttgcctcaaccgacgtaattcatcctctcatcgaagtatgatactccttatttcttgaaacatttaccgccaatcagcaggcggattagcattgccaacccccacattatcccccagattcggtggaggcgcaggcggtgatggtggattggtttggtctacccaggctctatttgctcaccctgtggtctagatgattgtggagggtccattttcacaaataaccctgtaatcaacaaccccgacgagttaggaaccaataccacacttacacacttattgcctttaaaccctaactcgactattccatttcatataaataaatatttattaatttgatgtactaaacatggcttcatatcacatatattctagatgctcacatactgcctaaaatggaaagcgataaataaataatcacataaacagttaagtatttactctcaacacttactgcaccatgagtcgagcttgtctctaacgatgattgtacatgttcagctggtctacaggaagtttaaaaaccttggcactctgataccaaattacgatgccctaacaattaggcacgttaagacaatcgataataaaaccctaatcccgctaaatcgggattactataagggtaagagcgggaaatttaaactttatttgcaatagaatgaaaatataacttgtaataattttaaactttacaaacaaaacaaaacaataacatgtctcgggatcccacaaaacttttcacaaaatattgcaagttaattcacgtgccgacctaagcggtaaaattcgaaggtacaaaatacaatcacttatagacccaacctgctttgtctattgtggcccaaacatgtacaagcacccccaagctctcgtattcatggctgatcacagactgatttaccctttcttgctcagtagagcacccgcgagccaagcccagcaaaacagtaaaaatatcaataatcacaatataca

SEQ ID NO: 32636 - DNA, 1624 bp, Cannabis sativa
cagcgtcggtagcgaatttcgcgaaaaccgacgctgaaagggcttaaaaaccgcctctaaagggggtttttgtagtagtgtatattttttcaactgaataaaggtctgatactcgattttcatatgtaactattgtcaacgcgattgcaccacaaaaagacaaatatggcgccgacaattgttaaaatgatgaccctaagttaaaatgatgcttttcattgagtaattcacattttcggcacatttaaatgcaccagtaaaagttttccgccctaatatatttactcacgcacgcgagaattttctacaaaaaaatttcggatcactgccgtcgcaaaaatgatttgccaaaggtcctataaaactatgctatttaccaccaatttttattaagttttgctggcgcaaaaaatgggccaggaaaatatatttttaccaaatttttccagacaatatttcccaccaatttttttttgactgttatcggtgcaaaaaaatgccagttaaaggtctctcacccgtcaagatttacctacctcttttcaatttacacccaaacttgtactgacgcatttctattatttttccagcgcaaatttccactgacaaaatttgggctttcacgtaccccttcttttgctggctattttttgcggttactttgactaaatgcgctgataaaagtcacatttttagtagagaaataataaatttcccatctctttttggttaaaatataacttaaatacgttcaaatcttgactctttaggcctatgggaaacactttctggccaatgacgttggaggaaaaaaatttcactctcaagaaatcaacttccgaacccacttgattagccattgaggccgcagtggaattaaccgagccaatggtcgagctctcaccccacatgcatgagattttgattttgctaattcgacatcatttaataaaacgcccatagctttctcacttgaacttcaaatgagataattcataaagtttagaaagatatctataaattatttttgaagttttgtctaaaagggaaggaatattcatggtccaaattaagtttgaaattttatactttgggtaagtaaaatccaggtcatcagacttgtgtaagatttattaaatccatctcaatttttgtagtcattgtatcattttgtattctatttcataattatttattggattttcattttcactctcacttgctatttctcttcactttttctctcctcaaataaaataataattaaatataaggtagtaacttcttttttttaaaaaaaataaaaatatatttcaatttctataagtttataaattccaaaatcaatattttttacaaattgtcccattcacaattgattaatgtatctggtagggaagagtaacacaaatcaccaaagttattttactcattacaaatgtctattaattagcaactaacagaaatccatagcaactaacaaaataatttaaatcggaacgaaaatccacatatagcaacctacatggaaaaccagagtaatccaaagcctaaatttaaaaaaataaaattaaaatatagtataatctcaaaaaaaaaaaaaaaatactacacatattccgtc

SEQ ID NO: 32637 - DNA, 2264 bp, Cannabis sativa
  modified_base (1516)..(1518): a, c, t, g, unknown or other
ccgaaccaagttcgggcccgaaatgcaatttgaattgaaataattagcatttttatttaatggtgataatctgaaattatattggatttatgggtgcatgaaatgacttaattgcccatgtgagtgtgtatgcatgatttatggccctaggggcattttggtcttttgaccttattggatttattttaataaaagatgaatttttggaaaaaggagaagaattttctggctttttccttcccatacccgaacccctctctctcaaccctctcttgaaatttaaatttgatcattggtggattgcttgatttgaagcttgaatttggaggatttcttttgagtttggaattgaaggaagttctagctttatttgaggtagctttctcagatttttaaccttgtcttcttactgaattttattgttgcaaaggcatggaaaaagttgttttgagcttgtagttgcatgtttgtcttatttagttgaattgagcatgttattgcataaaccttgtttgtatgatgctttggattttggttaagctttagttgagattttggaggtgttttctagctcgaatccatgtgtttttaaagtagttgcggctggaaattgattgaattaagtgagatgaagctcaagttctagagcttgaagtttgcttagttaaagcatgaatttggtgattttttatgcaatctgaaatgagggtttgttgttggattttgatgcatgattatgtgtttttaatccctagtgtttgctagaaactctggtctatgatttggaagttttggttatgaatttgaatgagtttgattgagttttagcctgaaaattcgtgttcttggtggctggtttctgggttttcaacccaggtgccgcggcatgctcagagcatgccgtgacctgcccctgtttggtcgaacctgggatgtgtcccaggtgccgcggcatggcttgggcatgccgcgactcgcccttaagtttttgggcagttttgagttcgaactttgaaaattcataacttttgattccgaactccaattgaggagttcattatgtcgttggaaagctcattccgagctctatgtgattatttgaattttaaattccttgaaaatattttatgagttggaaatcaaggggctaaccctatttgtgaaaatctcagattgtgtgactaggattactggcacctgattaggagcacccggggattcagaatctctactattgtaggacaacaggtaagacagtggttagcacgtagagtatgcgcagtggtgcttttattgaaagttatatgtatgattgtttagtaaccgggattagggattattaccctaataggaacggtctagtagcctagggttattaccctagtgatatatgtgtgtaaattccatgccatgttaaatgtaatgagattcaaggattatgcgcttaaggcataatcaggttggacttggtaaccataaccgagatgaaccattctaaggccttattgtaattagnnntgtgagagcaacacgtaggtctacaccacgtagatataaatagatgtgtgagcacaacacataggtctatgccacgtacacataaatgggcatgtgagtgcaacatgcaggtctgtgtcacacagacatatgtgaatggcactactgtttaaataagcatgatgaacatattgttattgttatgatttatactatcttgttgggcttggatcacgagtgctctactgtgcaggaaagggtaaggctatagccgatcaaccacgagttcaggagttgggcgcagaatgtacatgtttgagccacattagaccaagcaggttaagggtctaccaacgatgtattttgaaactctattttgccgtttaggtcggctgaaagaaagagacgtgtaataaagtttgtaaatatttttgggatcccaactgttgtaatgtttaaattattacaagttttattttcattctgtttattacaaaagtttaaattttgcgcctttttgattagtaatcccatttacgggattaggaatttgtaagtaacttgggtagtgtgcctaattatttaggttgttacaatttggtatcagagtgccaaggtttctaaacttcctgtagaccggctgaacatggacattcatcgtcagagacatgcttgactgatggtgcagtaagtattgagagtaaatactttactatttgtgtgatcatctatttactgcttttcattttaggcagtatggaagcatc

SEQ ID NO: 32638 - DNA, 3531 bp, Cannabis sativa
aaaaaagtttgcctgaattctttctcaataattttggtggatttcctaaagttttattcattggctcaagaaggctttgtctacacctctatgcatttttagccctgtcttggttgcaagacactgcctaaaatccataatgggtgaagcttgccccaggttcgtatgtggccttagaatccaaagtctcttatcgaaaaggtccagggtaagaaaatctgcttgaaatgttttcacggttttagcccaattcctaaacaatggattacacttgaaatctatagcatttttaatcatatctctcaaagcccaactcacaaaaagcaagagtcagggaacgcttgaaactcaaaagctcgcccttccgcaaaaaaaaattatccttgactaagcatctcatgagcaacaccctaaaagggtaattaactatcaaagacgttcaaaaagcgctgagactccacgactatttggtagtctaagaatgatttagcaaggaaacactggaagctcttggatcgcagatcgtctggaaagctttggggcaaatgttgtccagatttttgtaagcatgacaagtggaacctaacagaagaggccaagttaaacttcagctaattagtgcctttggccccggctcccgcgaggggcttccacaaagggtacgtctattgcaaggcaaggacacgtggagcattagtgtgcatgacatctcttattcccgagagtggaaggaagggtgagtctttcaaaaaggtaagcgccctatagaagccaaagacttcctcgagttgcctatgtcggtggcaaaaagacctaggatggcttttatccccgtatgatgtcgcggaagatctccgtctgtacttattagattaccaaagtgacgacattgcttttctagtacaacgttagtcttataccctatgtcaggctatagtacaaggcatgcgcaccactgcatctgcctattgtccaacgaccattcacgagggcgattcaaaaaggaaaggcttttaggtgacacatatggaatgtttggatggtatgggtcatcatctctatgcaccatatgatggggaagccacctaccaaataaacggtcggatatcttatagtaaggttgaccccgaaagtaggttgagcaagaaacctgttgttggagaaatttagacaacaccaaataaaataatatacttaaaatataagcagaattgtgcgagtaatcaacctagagcagcgagtattcaaattatggatacacagacgtactggaaatataaataacacaaagagagtatagtggttcagtcagatcatggtctgcttagtccactgttgcaagggttttctgtcttgttcattacacattggatcactcctttatatacaaagcaagtgtcctttgattacacagagattgatttaattatcaatccgtttgtacattgaatataacatttaaatcaacaaaaacgtaaatacaataaatgaagaacaattttggcccaattcactaaatatagcaatgtatgcgacttccatagtacgagttgtctattcatattctcgcataagctcgcaggattaagatgcatacaagagtaatcgagtctaagatgtctgcatcctgttctagtcgcatatacagacatcccataacaggtcgataacttaagacatgtgagtctttatcgagttatcgaggacgtcaggtcatccagaccagctcgctgaatagagaatcgatctctatttcttcccaggaagacctttaagtccttggatatatctcggtatatgtgagtcttaaactcaatctttggttttgcttcgtgttaactataagaatgcgactagactctatcaaggtcacatcatcccgttgagtctggttcaggtgaggtttgcactcaagaggttctcatgttgacatctttatcctcgaggagagtgagtccacgtgtcatttttatgggagcgtggtctcaagtttttaggtgaaaaattctcactatgacacatgcccctagttttgcgattgacagctatgtcacgagggaaactataagcgagaggcaggcgaaaggttgtcacgagatggtgactttaggttgtctaatcgagggtttcaaaaagacggctgtaattattatccttaacgcatttgggatgccatgtcatcgaaactcttcggagtccgtgcaggcgtggttatggataactgttggattgtgagaccttaggcattccctttccacatgtctccatctcaattaatgagggataatggtatttaaactccctgatacgaaattatctttaatttgttttgcctctcattttcagttttcccctttttctcctctggtttttgaattttccaacctttgtactccttataacttttctttgccagaaaagtaattataagtggttcatacttacagaatcattcaaagatctgcattttcaaggttagtggaaaaaaaattacaactgcttccttttatttcgaaaattaatctgtattctgtgtttcgagaggtagaaaatgcatgagacgataagatatatgtatgaaactttattttcttttttgacaaaatatacatttctctgggaaatatatacctgaaacttgaataatcacggatttcaggaagaacacctcgagtgttcgtaaatttcacgttgagtatttcgaatactcgcgagttttgtgatgaacatctcaaatacttgcatacacttctgaatatcaaaaatgacttagtaaatctgtacctaccttagctcactactacaattttgcattttagtgacactatttagtgacccacataaatatgtgtgtcactaaagatttaggggtcatttttagtgacatgtacaattagactctaaatattcagtgttagtctcttataatgtgtgtcactaaaaatatggagagtcactaaagagtaaaatctaaaattttctaatttttattaatttaaaaaatactgatctatagtgacgcgctaggtgcgattggataaatatatcttgacacacttagcgtgtcacaatatcacaattctaatttttttttaaaaaaaatatgtataattaattaataagtaaataaaaaaataaaatatatatatgtcaatattagataaccaatacattttgaaaaaaaaatcaatttattaattatacatattttttttaaataaaaaagttatctcaacaaaaaaataaaaaaatattattaactaaatatataaatgagataaagaaaaccttaatttcttccttaactatctctacgctgcctctctctcttccccttttctctcatctctgtttttgcgttctgcacattaccatcaaccatgatcgctaccctctcaaccttcgaatgggttcatcgccggacaaaggaaatctcaaaacctcaaagtcccaaaatcccgactcctccgttctctctcttgtctccgatgcagatctgctctgccagccaaagagtttggatgagcttct

SEQ ID NO: 32639 - DNA, 1713 bp, Cannabis sativa
aaactttcttaaaaaaattcttaatttgcagcatcacaatcgggtttcgcagtagcagatcaggaccacaaaggaaactttccaaattgaaccaaaatcaaaaatttggacatcaaaactgccaaataaagaaagttttatttgttctaataaaggcaaaatcgaaatcatcaattagaaaaagggaaagtcaagtttccaaaaattagacaactttccataagagaatttcttctcttacaagaagtttccaaacaaagaaaagtctaactgaaaaatgattctgtcctaagatagaatagaacaataaaatgtacaaaatcaatgtaataaaaataatttaaatgctcaataaaatacacattaattaaaaaatattttgacaactaaattgtaaaaaaatgacctaacaattatgagtacaattagttagaactgccatgggcttgggaacccatgggccattcagttcatggggacattttttttcaaaagaatcccatgtttcttttcttatgtgaaactctttgcaaaaaagatttggtggatcgagttagaatcaagttaggctttgaaggtgttttttttttttgtcgatgctcatggtagaaaagggggaattactctgttttggaggtcttttgaataaggttagttgcttggctattctccaaatcatattgagattgaggtttgcaatagaggcatgatgaactagcatctaaccgatttttatggcgaaccaaaccatcgactatttgataaaacctcacatctgatttgtactctatctcacgagtcgcctctcccttggtgtttaattggggaattaaacaacattgcaaactaagacaaaaaaagaggtcgatggccttatccttcttccttaatctttggttgcaaatcagtgcttgaagattgtcatcttgctgatttggaccttcgaggatacccttttacttggtaacgtgggaaaggtattgaccattatattgagattaggcttgataaatccaatattactcaaagttggctagatgttttcaatcaagaaactctcactaatattggctacagctgttttgatcataccccaatatttctgcaacttgaagctctcattttggttgctcccgttcatttttttaggtacaagaatgcctagtctcgcgaacctatttatgctaagattgttgggccaactctcgtgattcttctatacaagataagattaaaaattatggggttaagctggacgagtggggcagagagcttactagaaatttcaagaagcgtatagttagaagcaagaagattatgtcgcgactgaagagccggtaggattctttctctaatacagaatttagcactaaacaaaataattatattgagcttttggcacagcaagaattctattggaagcaacggtcaaagcaattttggcttcactatggtgataagaatacaaaatactttcatgctatagctagtgcccagaaaaggaacaatcaaattcaacaattgcaaagctctgattgagtctggatagattgggaagctggccttgattaggttattgtaaattattttactgatctttacactgccaattgtttggatagtgctttagtgatcaatgagattaaatgttcagtgagtagttttcaaaatgaagagcttctaaaactagttactgttgaggaaattgaaata

SEQ ID NO: 32640 - DNA, 3631 bp, Cannabis sativa
  modified_base (1090)..(1097): a, c, t, g, unknown or other
  modified_base (1509)..(1513): a, c, t, g, unknown or other
tagatctaataagtaccttgtggcagaattgagaaatttacttaacacattaactatagcactgcacgggtcgatacacacaacacctagtatccattatttatggctaggactagtggtgtatctaatcccattcactcccatagctttcatgcctcactgtttgtgttagcctagcagagtgctttcgatgttggtgttctttccaatctctatgcatttcactgctccactggaaattccttctaccactgtcgtaatctctatgcacaatcattttggataaggcttgcatcctctatattatcgcagctgctggcacagagttagccaatgctttttcccgatataccatcatttcttcttctctgagaaaagaagttcatgactcgtaggccttttacctccatgcgggattgctccgtttggctttttcctattgcagaaaattccccactgctgcctcgcgtaggaatctgggtcatgtcttagtccctttgtggctaatcatcctctcagaccagttactgatcattgccttggtaagttattgcctcaccaactagctaatcagatgcgagcccctccttagatggattcctcctttttttcctcaacttacggggtattagtagccgtttcctactgttgttcccctcccaagggcaggttcttatgtgttactcatccatctgccactagaaacataacttcctttccgacttgcatttgtcaatcatgccgctagtgttcatcctgagccaggatcgaactctccatgagattcatagttgcattacgtatagcttccttgttcgtagataaagtgaattcagagttgtctttcattccaaggaataacttatatccatgcacttcatattctcttgcagttcgctctagcctacgagtcatgaacttcttttctcgaagaagaagcaatgacaatatctggggaataagcatcgactaactttgtgttaacagccgcggtaatacagaagcgttatccagaataattgggcataaagcgtctgtaggtggctttttaagtctgctattctggagctacaaagatagttattaaatnnnnnnnnccacataaaaacattcctcctagactagttgttaatatgaataatgaaaactctgttatagccatttatgtaaattcaatgtactctacgaataaaggaatacataaagttgaacatagtaaaataggaaattgaagattttcttaaaattgttcgtttgaaaatatcccgatcgaagtgggagcagatttgaaaaagaatcttagagtgtctagggttgggccaggaaggtctcttaacgccttcagttttcttctcatcggagttatttcacaaaaacttaccatggtagggaagagaggaggaacaagaacactgcgagagcgcagtacaacgaagagttgtatgttgcattcaggaaggatgaatcactccagaaaaggaatcattgattctctcctaattggttggnnnnnaggtgcgatgatttacttcacgggtgaggtctcatcctcaagtctaagatggcctagctgcacaaaggaaaataatagaagaagcatttgaatccttcatgcggaaaatggggttttatgatccgataaagaatcaaactcatttaaatgtttccattattatatctttccttgaaaaaggcgctcagcctacaggaactgttcatgatattttgaagaagacaggggtttttatggaaatttctgttaatcaccaaccaaaattcaattaatcaaataaatttaaagtttggattataatcttgccaccttgcaacgctaaattgtaactccctaacaataggaacgccacgaactgtgactaaacatattctaatgccgctaaaaaaactaggatttactagagctaagagtggaaattaaactttaaaacgaatacagaataaaaagaaataacttgtaattattaaacttcacaaacatccaaaagattacatttttgtttcgagatctcataaaaactttttcaaaatattacaagttatcaatacacgccgacctaagcggcaaaagtagagattacaacattttcccctagtagacccaacccttgtagtctagcttggcctgaacatgtacaatacaccgcaaaagccctcgacctcatggctgatcaataacagattcaccctttcctacacaatagagcacatgtaagccaatgcccaacaagacaataaaaacaacaatatgaatatcaattttaaaatcacttagcattgatgccactacatctattgtctatttgatatacacctacgtgttacgctcacacatctatttacaataaggtcttagaataatttatctcggttctgattaccgattctaacctaattatgcctaatgtgcataactctttatatcaacatattcaacacattattgcattcataataactttaaattctaggataataaccctaaattacataaccgctaaatttaggctaataaccctaacctcggtttctcacataaaatatacctaataacgtacatgagtgccactgtgctaaactctatgtgctagtttttagtcttaagtggtaatccaagtatgtggagattccaaatctccgggtgttcctaagcaagcgtacgtaatcctaatcacacattttggagatttcacaaataggattaatctcaaattcattttcacatatacacataattttaattccatttacaggttaacacatagagctcgaagcaagattttcaacgatgccaagaacatcgaaaatggagttcagagtcaaaagttatggtcaaaataagttttaacactttttgccctaaaaaacccctagtgagccgcgacactcaaaggccatgttgtggcttctgggttaaaaaccaagaaaaactcacctttaggcacccaaaaatgcaccaaactcaacccaaaaataccataacttgccaacaagctttccaaaaaatttaaggtgttttccaagcatttatacaccaaaatacatccaatactcatgcattaactaagattataatcaacattatactaatctaacattaacaacaactttaagcctagaaaaaagctcaaaattaaagccaaacatatctaaagcatgttatacaaccacccacaatcaccatttcacatatgtcatcaagcttgaaattccaaccttcaaacattcaaagcccaactcaaatattcaaaacaatacccaaaaataaaatctcaagaactcactccaaagctcccaatttaatctaaatgcatcaactacaaccctaataacacaatcaaacaaaaattaccaagatttcccctaaacctcatcagcatgcatccataaacaaggaatatcaggaacacttaaaaactcaattatgaagcttgaaaatcaaaatttaaaacaagtaaaataggttagaaaaagttcccaaaagtcctcaagcaccaagcaagaagaatccacaccaatttgaagcaattttccttcaaaattgtgtttgaactaacaaaatagagagagagagagagagagggggggggggctgtgagagaattttgtgagagaa

SEQ ID NO: 32641 - DNA, 1986 bp, Cannabis sativa
acacttccacaaagcatgagttaatgtttcagcatcattctcacaagcctcagatgtcgggtttacctccattcctctataaagaagatttgtttttgctggcagccagttatgacaaactctccagctaaacaatttgattcgaggggccagcttcatgctccatatcatcttccaccatttatgaatttcttccatgttagagcacctaggaggatgtaaattcatttctctaccaactctataaccgctttttaccaagtattggccatttggagtatagggccaatgtagcgagtcttcaacatacatgtcaattggagttccttgtatccaaggaacattattcggatgaaaatgctgagtgacttttgccatgttccactgcccatcggttgtgatgaattggttgagttttgtattagcttctactccgggattttgagttagcatagtcccttccattcgaggtagccatttgtcttcccaaactcttatcttccttccatttccaaccttccatcgagccccttccttcaatatccttctccccctacaaatacctttccaaatacatgatgaacccgagggacagccgacttccataaatgatgtagtgggatagtagctattctttaaaaaccgagctaaaagtgagtaaggattttggataagtctccatccttgtttggccaaaagttcttgattaaactccgttagaatcctaaagccgagacctccttcttctttaggcttgcaaagtttagcccaagatccccaatgaagtttcttattgtcctttgtgtccccacaccaaaattttgctgccaatgtttggagattgttgatgagcttcttgggaagacgaaaacagctcattgtgtaactcggaattgcttgcacaatagcttttataagtatttcctggcctgcttgagagaacatcgaactcttccaccctttaagtttattccaaactttgtccttgataacatcaaagacctcctttttccttttcccaacaaagctcgggagtcccaagtacttggcatggttcgagacaaggcgcactcccaatctattagcaagctcatgtccctgttgaggagtgatcctttttcccatacatatttccaatttctctagattaatttgttgccccgaaagtctagagtacctttgcaaaacaagcttcatagtatcacattcactttcctttgcattgaggaacacaaagctgtcgtcggcaaagaataaatgagaaactttgactctatcttttccaaactgaactccattaagctggctagctctctcggcttcatgtataaggcatgataatccctccgaacaaagtaagaagaggtaaggagatagtgaatcaccttggcgaagaccccgggttggttggaaaaatccaagcttctccccattgataaggactgagaacgagacacttgttacacatcgcattattttttcaatccatttttcctcatacccgagccccctcatcatagtgattaagaagttccactcaactctatcgtaggctttggacatatccaatttcagagccattttcttgccattcccaaatcgttttgtcttcatgcagtgtaggctttcgaacccaattatagcattatcttggataagtcttcctcccacaaaagcactttgttcctccgatattacttgatgaagactgtttttcattcttctagctaggcacatggccactattttgtacaccacattacaaagacttattggtctgaaatccgtcatctttgtggccttagaagttttcggtataaggcaaattaaagtatcattgagttccttcactggcatgtcatcatttagaattcctaaacagacttttgttacctcgggaccgatagtagaccaatacttcctatagaacataccgggcaaaccatcacttccaggggccttttgggggtgtatatctcgcatcgc

SEQ ID NO: 32642 - DNA, 5845 bp, Cannabis sativa
  modified_base (5613)..(5625): a, c, t, g, unknown or other
  modified_base (5675)..(5680): a, c, t, g, unknown or other
agaagtgttccatatatgtatatgtatatgcacaaattatgaaatactgtgtgtttctttttagacagaacatttaagacattaatacactagagtaaatattttattacttggcaaacaacatattatatgcattagaagatacattttttataaagaatgatagaatattcttcatccaagaattaattatttacatgtattgaatatacattacaataacttcacaaaataattatattactttttattgtcttaatcactttttattaagaaaattcaattagaccataataataaattaaattatatataattatttcttatattatttataatctatctatatatataaatgagaagtataagacgatgatgtgacactctataatcatcccaaatattattataaaataatcaactttaaatgtaatggtaactaatgctttgcacgtagcttttttctaatattttttaagaatatgaattgaaagaaaaaaagttaaaaatacttagtataattaaacatataaattttatataaaataaaaattattaaaattgagtgtgtttagaaatttttggggtgtaaataaaattttactagaatgagcttgaaatgtcaaaaggggagttctatttgcaccacataaaattataattacaccccattattaaaaaaaaatacaaacttaaataatttttataaatcacacttaatgtttttttaaaattttttcctcacattattttatattaatttcaatacttattttatttattttcataattttttctaactcatatataaatatattttttatttttatttttttgtcataatatttaaaatataattttttttgaaataatttaaaatataatttaattttgtttgatatgtaaatatgaatgggaagaaaaaagttaaaaaaatttagtacaactaaaaatataaattttttataaaataaaaattattaaaatggaggtgtctttacaaatttttggagtgtaaataaaatttctcatgtcaaaaatagccccgccgattatgaaattccaaaaacgcccttcttccttcgacatcccaaacgcagcactaggtcccagatatatgttcccaaaacgagaggaaaacctcaaaactggacctagcaaagaaatcgatacaccattgaagctcccactctcactcactctctctctctctatatatatatatgtatttatatatttattatctatactaaataaatataggtatattatttagatagttatggacgagcacgacgagcaagagcacgaggtctatggcggagagatccccggagacgatggagatatggatgccgacatcgacggcgacggccaggactacgacgtcgacgaccctaattctaaggtaccgccacttttacttattcctgttatcttttttcttgatctgctcttggtgctcagcttgatttggtttggtttcgcaggagttggaggatatgaagaagaggcttaaggagatggaggaagaagcaggtgctctccgcgagatgcaggctaaggttgagaaggagatgggcgctgttcaaggtcactactttttgttattgcttcctgtatcgtgtctgtattttcctatatttatctagttttatgctattactttgacctatttgaattctatttttgttattctttaggttttaacttgaatttagtttcttttatggttttgagtgtcgttttctttttgccatatttatggtgatctaaaagtcacatgtaggaaagggttttcttttattcaacttttggagaatactatagctgttactgctaaattgaagttgtagaacactgataactaagaagtatcttatattgatgaaatttgagaatatcaattttgtatgttggaactagtttcattgctttgcttactggaaacccaaaaaattaaatgtgatatgatatgatataggcttactatcagtaatgtgagatttctaccatgtatttcgttgctcagagttcttccacctaagtatgttgcaaactattatggtggttgttggttaaaacagttcgagtgaaatatggtgtctttaatttctgaacccatttgagaggaattttattaagacatgtggcaattagctattagaaagtcgtgaagctggatgaatgacttgcgttaactattatcttgaattgtacacattagtgttgacccggtccaaaatttcttttgtccaatttttctgaactagttggattgtgcaaattgaatctcacttctaggtttagtctcaagagaaacttttgttcattttatcctattgaatatgtatgcagattcctctagtacttctgcaacccaagctgagaaagaggaggtggattcccgctctatttatgttggcaatgtaaggtttctatcattgtacttattcttttgcattttggattttgttgattatttactcttgcgcagtctctaagaaatttatgcaagtattatgtgtcattacatatttttaagaatgacttgatattttgatataggttttccctgtctggttgtttgctttagtttcaaggtctctgtcacttgatgtgtgtaaaaggagtctgctactttctcacaacattgggaaacattgcaagtacgttgttcatgctatcatgatcagcttcaccaaatgttagacccacatagttggcaattcaactctgcattagtctatgtagttactagtttggtattctgaatttgctatgtttattcactacatatactttttttttttaaaaaaaaatcttctttttttggcaattcactctgcattagtctatgtagttttgtattccgaattttctttgtttattcactaaacatatattttcattcattttccttgaatgaaaagaaaatttctgtaattattcatgcttatagaatttcttcttcttcttctttttttttttaagaaaaaaaactaggatcccgcctaaccctacaatatttggggacgaggaaactataacgattgctatgtaggtacccaggtgggactcgaacctaagaccttgtgggagcaaaccatatgtctaaccattttagcccctcttgggtacgcatattgcaatttatttgtaggcaaatataattgtttatattcatctacaaattattgaaggtttcatctgatcagttggtaggtcttcgtttatctcttagcaatctagtgtcccaggtcattcgccacttgattttagctcaagtggttgggtgggtgtgttgaagtaagagtgtgggcatcaaaccccaacctgagctaatttgagtaatgtttttaataactgtttcttataataaaagtgtcacaggtcatactacttaaaaaataaaacgaaaaattgtttaggtgcttccctgtgtgtacgtttgtttgtaatattgattacaaataaagtttgactgaaggcaaggtaaagaaataaccctaaaatacttatgttaaaaacttaaataagttttttaattgatcaggctctttccaagtttcatcgaagttcattgggattgactctttgtgagtttcagaatgtttgttgcttgataatgataccagtgcaaagtattgaagccaggcctaatttttttatttattttttgttacttcaggttgactatgcatgcactcctgaggaagtccagcagcattttcaatcttgtggaactgtcaacagagttacaattttgacagataagtttggccagccaaaaggatttgcttatgttgagtttgttgaggttgaagctgttcagaatgctcttctgttaaatgaatcagaattgcatggtcgtcagttaaaggttttttcttttttaaactgtcaattgaagtgcttggattgttttttttttttcacgtattttttttgttatgctttactctttttgttataattttctttaattaacttataggtttcagccaagcggacaaatgttcctggaatgaaacagtttcgaggaaggagagctggccccttcagatctcgaaggccatttgcgcctgcttctccattctatccttcatatggttatgggtgagcactagattgtttttactgcttctgtttctgtatagaagttaattaaagtatacttactaccttgtgattgtctaattattaagatcatctactaaatagagttatctcaattatttggtggtgtgatttgaccccattttaaggctactgtctgctagctagaccaattacaatattatgttgctattgactatgtagcatgtagaatattacatcacccccacttaagagatgctgaactttccatattagaatttacaaagataaattaaattggttttcttttttgatttacttatatacaagtaaattctgaccagtctgccatggatagcttatttatagttcactgcattatcggaaacctttatcctggtgactagttctctttgattactctccatgagaagcgaaacgtttttcccaaaccttgcatccaagatttaatgtgcatggtctaatctttctgttttgcaggagggttccaaggttcaggcggcccatgaggttcagaccatactgatgaggagtcttaccttgtcggggatggcaccaaccaaccattatggaaggactattagttaaatgttttaaagtggtcttaagttcagctctgtagtcagggatgaaagaacttctagcattgtttgcatggcaatggccaactagatcatttatcgcgaattagaagcgtttggagaagacattgtgattgtgtttgtcaaagcatgcatttatttgcttttcagggaatataagaaagctaaaaatacctggataaaatagccaattgtaggagctgggaaatgattcttacttgtaatccctatgtgacatttgtaattctattaagttatcaccgtggatgagataaacaattgaggatttaaattcatatcagctaaacaaagtgtttttgcatggaattataaggctttcaacagtgaaattgataatgaaatcatgaatagaaagttctccaactgtagtgttataacatgttaaaattgccagtgggatctgggaactgaatgtttggaacctggatttgaatttggtgttgggggcggatttttatttatttatttatttattattttttttaaggtgagtttgtatattccataaataagagggtttaagggtttctgttgtaagttaatttttactaagtttaaaaataacttgagcaatgttctacaggaatttgcacgatctattattctactatgtgacataattataaatgatgattgattatttatctttacacttaaaacggtagaatatagggtatgactcatgaaaaaaaaaaaaaactaattagtaattttttccctttgacatgaactaaattatatctcctgaatttttttggctgttaaaaattttcccgaattattgagattgttaaatttaaagacatttgtctaatttcattcgtttatgtactaaactatgctccctagactttgatatctaccaaannnnnnnnnnnnnattttgatatatactaaatcatgccctatgaactttcatccatgttagannnnnnttactaaaattagataaaagttcttaaatctaacaatctcaatagtccaggggaaatttttaacggccaaaaaagttatttggtacatgtcaaattcgagggaaaaaattactaattagcctaaaaaaaataatgtgcgagcagtttgtgtaaatttctcttata

SEQ ID NO: 32643 - DNA, 2118 bp, Cannabis sativa
tttaggtttgggtcctattacagtactgccaggtctaggttcttgtcccagtcctggtccaattccaattcttggtccaagatcgggtctggatcctggttcgggtctgggtcatggtacggatctaggtccatgtcctgaattcaaacactgactgcgggatcaggttaaagcctcaggtcttggtctaggtccctaatccaggtctgagtcctaggtctcgctctgagtctaggacacggtcggggttcaagtcctagtctaagtttgggttcgggttttcgatcctagtggtccaaatctgggtttgagttccgggtttgagtttagaactaggttcaggtctgagtctcgagttttgatccgggtctaggttttcgaggctcgggtccaggtccaccatctaggtacgggacctaggtcctagttcgggtccatgtttgggttcgggtcctagtcctagttctgattttgattccgtgttcaagtttgggttcgagtccgggtctgggtctgggtctgagtcctggtctgatggtccaagtccagggttgggtctgggtccaagtctggatcccggtctggatcagggtttgggtctaggtccgagtccaagtcttgtgtacaggtctaggtttaggtctgggtctctgtccggatccaggtgccaagtttcgatcctggtctgggtatggattcgggtctgggttcgacttcaggttcggttatagttaccgagtctaacttgatttttccttgcctgcataaccctattcatatatacataattcatacattacgttctttcagtggtttatcctgatgataaatgtcaggtctaacccagttatgtcttatacacataactcttgacatatatgcgtacattatatactataatataaaaaatcttagggtaataaccctaactttcatactaaataattactcatataacatattatagaatgttcaaaataacacctattgagggtaataaccctaacttgatttctcttgattagcaatgttactatacactgttgctttcttaccatcgtgtaaattctagggtaataaccctagactgcatttctattaaacttagggtactaatagagattctaatttaattatgccttgagtgcataattctttattccaacatatttagcatggcataacatccaaaatctttaattactagtgttgacctcgcttttagccaatgacaatgagtctaatttgtatgcgacaagtagtttaatacgagggtaatataattgttatctaaaattctacactctgatgtggcatcactcgatggtgacatatggaatcaactcgtgagtcatcaaggaaatccctataacttgggtatcagattacaaagatatggcaagctctccaaatcccacgatcaatgtattctgtatttattatgcaatctctctacttatatcaattgtaacgagcagggaaatacttcctctccaagctcgtagccctataaatagtgatgcatattcactaggcaaagggtcgaggacattttggtcgaaagattttatctaagaattaatattcacagatactgttgtaaaagctctaagaaaaggaaccttgctccttgttcttaagtcaatacaaataacgaggattaggctattaccgaactgctctgggctgagcctctataaaattcctgtgtcttattattgctttattatatattcattacgacatatcgtttatcgcttatcaaaaagaatcattgtcgttggctaaaagcaaagtcaacattttggtgttttcattgagagaaggatcacaaatttctcttgtcgacattcaacacgatggtgcaaactcatagaggcctgtctgacccaaaaaattcacagacgctggatccgacattgcaggacccaagaagttcacgggtttcagtgctgtcaatcctggacagacgggaagcgtggtgaatggtgaaacagctcctgttactgaaattgcgcctagtgtgaacgagactgggaataatagttctgcacacagccagggcattcataacacgactgttccgcctggaaccaatgcccacacgaccatcggaga

SEQ ID NO: 32644 - DNA, 2768 bp, Cannabis sativa
tttgattaagtggctaattgcttaattttgtgttaaaagttttgatttaccaaaattagtataaatttccaattcagcccccctcttggaaacatatcttgggctaacacattccacctttcgaggagtcagtctcagaggttcaccaggctactgcttcttcaagcaaggctcctgagtcattgcccatcgaggttggggcactggttcacaatactgggtgcagtttgcttcatcttgttggtgccatttttcgatcctttcagcctagtgactgggattcggtcaacaatggcaacccaaccgcgatgctcgagaagagtcttaccttcagtctctcggttagtttccttcttcttttctttgttttttaacatttctttcaagaacccacaagaattcatatgcatttcttttttgtaggccaccttcttgtcccacatcgcccaaagtcgggtactccacaaagtgaagcaactggaagccgagcttcgcaaaaccattgagcaacgcgaggctgttgctaaagagtggaacgaagcttagaaggagttttctcgtctgaacaaggaggctgaggagagaagcaagactcacaagactgaactcgaggcagctcagaaggaggccaaggacaaatgcgaggcatgccaaaaactctaggaggaacttaacgcagccaacgagaagctcgagggcgctgatgccaatgctaaagaatgatgcatgttgttgccaagcgttccatttatcgagcctgaatggagaatcttgagatgcatttaagtttcttgggggagggtgtcgaggaagtcttagcttactgcgagaaggctaagaaagaagaagaagaagctgttgagaccaaggaagaagaaggtctatccaagtctcctacgatgtaggcttggtttttaactttttattttttattttttaagaaactggccttttggccgagacaatggtttgccccttgtggtaatttttcgtaaagacaaatttgcattgttggatggccaactttacttttatcttttcatttattgcctcgcatctttatatttgaacttaatctgtttgcttatttgcatatttattcacaacttaaacaattatattttgatcaaacttaagatactttaagtaagcatttctattgatctcgttcttcttttgagattgctttagtagttattaatctactatgtatgtatgcaagtagttatattctgctatgctttttctttgcgagcagttcttgtcaattctacttcgcacgagcaattataatctgccacttataacttagtaagcaaacttaaacatactttgaataattcattttatgaattactttgtacattttttgattgcctatatgaatagttaggccttctattcatatttcaggttaaatattatcttttcaaggcatctaggtgcctcgtttataatacatgcctacataatgcgagtcgttagatattcaacctagcatgtagcttaatgttatttttatgagttaaatctcatttacaactgctacttcaattttcttttatgacgagaaaggttcaatttttgactttacattgcccatagacaactttaatcaattatttagaaaaaaaattaaagtggagcgggtttgcaatatatcatgtatttctagataaattccaattgatcatacacacatatatgaccctcaagtaattttaaagaataaaactttgtaattacttgaataatacttcaactttattgataaaaatttacatgacaaagagaaaatacaacaatttcataagtttactggtaataaggtcacaaatgttcaacattccagtggttctttattagcgagtcgttaagccgagccaatttataaactctagttctaactattgcctcgataacataaggaccctctcagtttgggttaaacactccagcagatgcatttcttgtgtttgcaaatacttgtcttaacactaaatctccgacattaaaaagtcttttcttcactctcttattgaagtatctcgtaattcgatgttaatatgctacattggtgatttgcgattcagtacgtttttcttcaagtagatccaaggacaatttaaggagttcttggttttcttcttgattatagaaatctcatttgtgggtcgcaatattaacttttagtggcatcattacttccgagccaaatgccaacgataatggagtgtcacctgttgttgttttctcggtcgttctatgagcccaaaatacttgtggtagttcatctacccatctcccttttgcatcatccaacttctttttaacagtatcttttaaggttttattaacagcttctacttgattatttgcttgaggtcttgaaactaacgagaagctcttaatgattttattcttttcacagaactcagtaaataactcgccatcaaactaggttccattgtcaaatactatttaatggttattccaaatctgcaaattatgttcttgacgacaaaggcaagaactttcttggaagttatggaaactagaggtttagcctctgtccactttgtgaaaaagtcgactgccactactgcgtactttgctcctcctcaccctgtgggcaatgccctaatcaagtcgatttctcatattataaatgggtatggcaaggtcatcattctcagttctgttggtggtacgtgaggtatatgtgaaaatctctgacatttatcgcacctcttgacaaattcatgtgt

SEQ ID NO: 32645 - DNA, 2279 bp, Cannabis sativa
  modified_base (371)..(379): a, c, t, g, unknown or other
  modified_base (1042)..(1046): a, c, t, g, unknown or other
tttcatgttgtttttatagaaaaccgtaaaaaatgtaaaaaaaaaaattctttaaacataaaaatataattttttttacaaaaaatggtgtcctgtctaattatccctattatttgtatataaatttaagttaattcatgatactatatacaacgagaacaagtgtgtgaataatgccaatttcaaagtggtattttatttgcaacaatatataaatatacttttatatataaaatttgactatcaaacaatttttattagtttaacctaatattttaagaatataagaatatttcgttaaatttaacactgttagtaaagttagtttcataaatatatataaatgttaatattatttattttaaattaannnnnnnnnatataaatattaatattatttgttttaacttaattaaactcatattaattttagattaatttaaatatatataaatatatgtggggtttagaacacttaaccaaccgacttaactgtcgtgacagttggtagttatttcggttggtagttatttctgtaaatgatcaatatcctactgctatatataagagacaattcaacaacagaataagagagagaaatcgagttagagagagatcgcacaagagtgaaatataagagctgaacagagatgaattctcttcaagattgagggtagtacaagactgtttctggttcaaagaatttgacagtttttgaagctcttgttgtaactggtgtgaatcaccattagttttgttttgtgcacttgattctccattgatgtaagttgtaatctttgtcattaatcaataaagtaatcacaacctatagagctgtttctacccggggattaggtccaagttttatccaaaacttgtgactgaacctcgttatttcttgctgttttatttatctggtttgatacaatttctggtttatcattctaagcaatctgtttgttcttgcattgtgttcttgttggtgcttgagtgcacaacaatataatatattatttataatattattattttttattgttannnnnaatattgagagtatgttcaattttaatattcttagattttatatttatttttcttaaatttttaaaactttgaatattattttgtaaaaaaaaaaataaaaaaagaaataagtgattttctttaatttataaaattttaaaatacacaaaacaaaatagaaactaaaaatataactaagtatatgtgcattgcacgtaacaataatatatatttgatttatacttgctatttttgtattttattttactttctctcacattctaaaaaggtaaaatatatattaaatattaagagaaaaaaaatcttaagagtaaaaataaaaaataaatatgttaaaagaattaaaataaatatatatattaaaaaataaaaacaaagcaataatttattgaatttaatgaataataatttttaaaaattaaataaagtctttttttattattttttattattaaggtgtatatataaatttttgagatgtaaatataatgacttatattaaattgtatcagaataaaaatagttaaatataatagttagtttttaatgaataaatttatctataaaaacaaaagttataaagctaataagtttaaatcaatacttaaaaaatgaacaattttattttatttcatttatttattacagtgcttttctgtttgttaaattagtcataagattcaatatctatttagtcataagattcaatatctatctatctatctatatatatatatatatattataaaagaaagcataaaatatgtttaggtggataataatattctatttcaccacacataagtgttggaatatattttaccaaaacttaaatttactaacaagcatgtttttaatatcctaaatatgaacttctaaaacgataaaaattattcacatataaagtatgagaaaccttacattggttgcagcgaaattaaatgactcattccgctcagatctctaacccttgttcttttctattgcagagtataatcaagatctgagctcgaaacaccttcagttgtttggattcttcacagtcttacacactattgtaggaaatttaaagtcctttttccaaccttgccctacaccaacatcaaataatcagttttaaaatcaaggtcaatttagacctttcccacttccctgacttttcaaagtcagctgaccaaaacgacttcgttttggctttgaacaaaatcaaaagatcgagacacttctcgatc

SEQ ID NO: 32646 - DNA, 982 bp, Cannabis sativa
  modified_base (644)..(645): a, c, t, g, unknown or other
ttaatttattataattttttcgttaagaaattgattagaaaaattaaactcgggaaatttagaaaataaaaaaattaccagagaggacaggttgaacactgttaagaagaatagtgaaagccaagaggagagatagtttattaacaacttcaaggacaactttgcttgaagagaatatcaaggcaatctcattgtggaatatcataatggaaacccaaaagaagagccctattactattgatgtcaccactgatactatagtcgcaaactttgcccctttcccatttccagctccgagctcatttgacacccttactctgtacttaaatgtttattagtcaaatctgcttatataattaaattttaactaatcgaattatattactcttgataattaatatatctcatattattataagttgtaatacgtaaggaaattctttaaactttgtaaacgttaattattagataaccctaagttaaaatattgtttaaatactgcaacatattgtataaatatatatatgattacaccatcttgaatatttaattgttataatttatacaagtaaatgatagcatgtttattatctttcaaatattaatttacacgctaaaattaatgtataatatatatatatatnnatatatatatatattttgagatatagcctcaaaaaacactactaaggaaaaaaactccaaagggtaagtagctgtaaagcatatttagcaagagcattcattactccattgagagttctggggaaataaatatttctacaaagaatcctatttgttaaaagagtaatttgcggcaaaactccctcaactgtcaatttacttgtaaagaaccatctaacctcatattttggtgggaaaatcctctaaagtactatttcgtttacatttttaaggtcccgtctattcagcctcattaagttctaattttgcccatgtggcaatgacaggtcactaaaaa

SEQ ID NO: 32647 - DNA, 1352 bp, Cannabis sativa
atcctggtaaaatattccaaacagtaccctcacgtcgacccattagtaatcaccatccagcttgccaacaagaggataaaaagggtgctggtagacaaccggagtttagtgaatatcctttatagggaaacactaaagaagatggggcttgaaaaagccaaattaagatcttccatggtaaatctttatggatttattggagacagtgtcgccagccaaggaataatcgagctcgaattaattttgggcgaagcacctttatccaccataatagtgcaagactttttggttgtcgacttgccatcggcttacaatatactgctgggtcgtccaacattaatcgaactaggggaagttagttcgattaagcatttatccctgaagttttagacaccagtggttgcaggagtagtgcgaggtgatcaaatgttggctcgaaaatgctatcgcataaagctgcaacacagaagagccggtcaccaactaatggtagtcttgatagaggaaggaaagaagaaggataaagatcttaatactcgaattcaagatgaaagaaacttattgaaaccaattgaagaattggaagaagttattctagacccaagaaatcctacaaagtgtgtttacatcgtgaacaacctggatgaacaattgaaatagtagctaataaattttataaggacgaaccaggatcagttttcttggagccatggagatctgatagggattgaccttaatattatctgccatcatttaaatgtcgatctaaactacccagcaaagagacagaagaggagacccttggattttgagagacaacaggcactcaaacaggaagtggataagttgttggtgaacgattttatacgcgaggtgttttatccctcgtggataaccaatcctattcttttcttaaaacccaacagaacttagagaaattgtattgatttctctgatctgaataaggcatgtccaaaggattgttttccactaatcagataaaaatgcatgtcctagatcaggaacatacaagcttcgtaaccagcatgggactttattgcaataaggtcatgccatttgggttgaagaatactggggcaacatatcaacgactagtgaatgaaatgttcacaaatcagattgggtggaacatggaggtttatgttgatgatatgtgaaagtcataccacggacctcggggagtgcttcgaaatattaaagaagtaaaatatgaagcttaacctgaaaaagtgttgctttggagtttcctcaggtgagtttctaggattcatagttgacgcgaggggcattgaagaaaatcctgagaaaatcaaggctttgatagatatgcc

SEQ ID NO: 32648 - DNA, 1822 bp, Cannabis sativa
taattttaataatgcaagtaaacaaatgtaagggaatgattaccttactattgattcctattacttattagtaaacatgccataagtttatggtcgtattcttgttttaagtttttctgttaggtagcaaattttattctgttaaaatattataatttcttgtttatactgtcaattttttattataattttttatttaactttatgtcctaaaatttttataattacaacatcatttttataaatattttaaacttttcaaataatttaattacagtatcaaaaatatatttgaagttttaaaacacacgtggtaaattgattattaaaaactttatttttgttactgtaaactaatcgaaatttttttaaaatttacagaaataattgtattcataacaattacagatatgaaaatgtatatgtatgattttaggcatagaaattgagtaagagattgtactttttttttattcttatagtaatactagaaaattgggccgcgcgttgcgcggtctgaaaaaaactatatattatagttaataaaataatttatcaattaatattaataaaattgagctttgcacaaataaaaaaaaatatatttaataaataaaaagatgtgaaaatttttaaaataaaattataaatttgtcaaatatatatacaaatatttaaggtactccttaggtgaggacatcacttttactcttaaaaataagagtatttttatagcctttgattctcaatctaatggtaataattaatttggctacaataaaatatctcatacagaattaataacttcttttattttaatttattttttaagaaaaataaaagaaaaaaaaactacccactaacaatacagttcattttcttaaaataaaaccataataataataatctcacatttgtaaatacttttaaactaataatttaaaaaatagaaatcaatacacgtgtatgatcttttaaagatggaactatttatttatttatttatttttagggaagatggagcttatttatttacaaataaaatttaggtttctttgaaagaataatacaaaaaaaaagtcccctatgttattgttaaattctattttggatcttttgttatgaaaaataacaaaaaggaccctttgataattaatagggtaaaaaaaatgatcccttgaacatgttttttagtgaatttttttctttcaaaaagacaaacaacattatctatttttaacaattaatttttcgaatcatctaaaacctcatttaagctgaattagaaaagaaaatgtttaaacaaaatttgactcaaattgtgttcatatgggacaattttttaccatcttaataaacatatgatcatttttataatttcttaaagaggacctcttttatattatcccttctttgaaagcattatctctttctcatagaattatctatcccatttttcttcttcaattcatgtataatgtattgattatagaaaggttttttttttttttttatttgatgaatgaaaagattttttttgaaaacattaatactcttctctttttttatataaaataaacattaatactctttaagaatgataattaaattagttgactcaaatcgttttaccttattaatcttaaaattcattaatgtttttaatgaaaagttgctcattttttgtaaaaaaattaaaaaaaaaaactaacatgttccacaattcattttaatctcattcaccttcattactaaaccaatcaaaactaaaagaaaatgctctcataaatgagagcaaaaaagtgatgctctcacctaaaaa

SEQ ID NO: 32649 - DNA, 1356 bp, Cannabis sativa
  modified_base (1313)..(1320): a, c, t, g, unknown or other
tttttttaactaaaattactttgaattttttgaaagtaaaatatttttttatattagctttatttttaaatgcagttgtaaaataaaatggaatattttatgatatttgatgccccatattaaatatgctttgcacgatatcctaatattggaaaattgcataatgcatctcctttaaatgcgtatgtgttttaacatacgaaataatttttagtcaaatatttttatatattgctgcccaactaataaaatattttacaaatgtataatattaaatagataaaataaatgtacttgcctatcataaatagatttcttttattaaataaattatttacaccatatattattatcttacatgaaaaatattaactttttgcaagaatactacaattttgattaaattaccatgtacaaattatccataaaaaaaatagacaatccaattatatgcgaatccagtaaaataaaaagtacaaaatacaaacattataatattatctctgtcgaagctaaaaaaaattaaaacccaaccatttagagaatccttatttttcttttctataatttttaaatatatgttaaattcaattatcaacaatttagagatttctttttaatttttttttttaattttccacaagtttaagttgtgtttagtttattatttgaatattaattttttatttatgtttggattaatttaataacaatttacagttagattatccaaatttcttaaacactaatatattgcattcaatatttatttttaatttgcaataccattatttacattaattgaacatacctaaaaataatttcaaaatataactaatgaactttttgttccattatttattgtattatttttaaataaaataaaaaacacctagaataaaaagtatacatgcatcgcacgtaattttttttctaatgcacgtaattttttttctaatatatatatatatatatatatatatcaatcaatcaagtatacatatacaaattctaaacatcattaaaatccaacaccttgagatgataagggtaaagcaatatatattataccaaacattcatatattcaaatcgtagctagacataaatagatcaaatcagaataatttaagaaatattccacaaatatagtagagtaaagcaactaacctaacagcacaaaaaaacattgctaaagtaaaattttatagcttgatattatttgtgtgttaagttaggtaaatactctcagcataagtagtattggataatattatcccacatggattaaatgtgaaagtattgagccatatnnnnnnnnatgggctactccactcattgtcaattggttttgaga

SEQ ID NO: 32650 - DNA, 2194 bp, Cannabis sativa
gagccgatctatctacaaaaaataaggaagagcgtgtttgaccataccacaaggtaacatgaaaattaactaagtgttaaagtgtctgacgtactaggtcgacgattaaaatcaatcttgattcctggtactttaaacatgtaaaaccacttagatttccaatctcctatatttgagaccatgccttccaccacttgatttgtgcccacttgctgaagcaatagaaatcgttgtgaaggcccacgttctttatattgtaaaattagctaaagtcctccattgaaggttccctatgcacgtactccatgtacatcgcatgaaaccctaaggctatgcgataattgtttagagtcaatttaaaaggggacacatcctatcgcttgagaatagcggagatgaatggatggaaaggaatcaatactccacatcaaagaataggaatggagactacaacgtcctctgagggtatcattgcggggttagtaaaaggaaggtgcggtctttgggtagggtgaggacacatggtaccgagtcgcaataaatttaatcttgaaaaggtggtcaagtcgaatttggtaactcttgaaaccaagtcctcgcaggagaaaggctcattcagttgcgtgttgtccattgaatcagtcccgcttccttcggcatctccttcctcatctgactcacagtcaggaatctcccagttcttgcccatctcctcagtttcgacatcaggagcgtgcctagaatgaacaaggtgttcacaagctgacaccgtagactcgctatcacagatctcgattgtccccagctcagcgagctcctgaaccatcctttctttattcgtggaagacaatgggcctggttccgcagctcagcaattggagtctccatttctgagattgaggtcgagatgaagctatcctcctgatcttggtcgccatcgaaagcattacctctggagtcgagcatctggctgtccgataagtcgctcatctgaaatatagaagatcttttcagtgtggtgaatatgcgaaaaacaatacaagtgacctcacctgcataaaaaaaatttaagatttccttggaaggatatttcggaatctcgcaaaaatccaatcagcccaccaaggcataaaatcgcaagtgtgcgattagaagaatatctaaaaaaacggctgggagttacctagtgacccaaggggcatgcatcctcaagcatgaccctgaagttagtggggaacacccaccgttttgagcctaacaatcacaacctgcgagtatatcacgcatatccaactagcagttcatatcaagaaacagctaaggaatctcctatatctgaaggggcatgccttcttcggataaccattgggctaacggaaacacctcactgtttcgagcaaccctactagttgaaatatacggttgtatggaaaaagggaacgctggcatatgtcgcaaatggttgggtgtaccgcggtaccttaaggaacatgcgatcgcacgcatgagcattggaatacgccgacacacccaccatttgaaagacttaaccagtattcccacaacaaaatacacagagaatataaagaaaaccctaagttctaaacaacgagtaaaagtgataaagtctccagaattcctaaaggaagtacatacgcgagtattcgagatgctcatccaaatactcgcgagtattcaaaagataagcaatcaaaaaagtgcgaatattcaaaatattgttcctaaaatttgcggttatgccaattacaggtctgttttcttctggggattacctagttccaacaaaggagtaaaactctatgtgtatcccctacaacaaaacatgcatttttaacctctccaaatttcaaaaacattcagaaatgcaaggcttttctcgaacccagaaaccaaattcaaaagaaaattcgaaaaactaaccttgagattcgatgctcctctctgtgaatagcctcgattgttttgagaagctttcaaatggggcagaacaaaaatttgtttgaaaatcggtttttttgcctttgagagctttgggtgaatggagaaagtaaaaaatagagggaaagcaaaaaaaatcatttcgtatcatgaggcttaattactgataaccctcataaattgggatatgacaaagtttttgttgggttttatgccgtaaataaaactcatttca

SEQ ID NO: 32651 - DNA, 1893 bp, Cannabis sativa
aattagcatataattagggtttaattatgaaactagattattaattatgatttgtcattttatggagatttatttgaatttagggtgtattgtttatgccatatacaaaattttataaagataaatgatatttttaaaaattatttaaaaaatatgtatattttttatatgggcacctaaaatgagtgggccctaggcgcgagcctggcccgcctatgcttagggccggccctgcatgacatatacacccatacatatataactcatatatatgcatatatctcacatataattatacaaaaaaaaaatcatatctcaatataggaaaatatgttaatatatattttattatataaaaaatagtaactcacaaaatatcacaattcttttcttacccttgtattatcacatgttgatttcttttcttccattaaagcaagataggaaagaataagcttttgattggaaattgttgtgctccaataaaaataccaaacgacaagattacaattgtatgataaataatacaaaggacaaacatatgaattaaataatgttacaacactaaacaaaatatacacataaaatagagaatatagagataaagagagggattataactcaaagtattaagctacacataaaacacaatatataaatagcatagagatgtgagagcaatctctacacaacaagtgtataataggagaatcatcaaacttgaataagatcttacacctttgtccaaaagattattctccctactacaagcacttaggaaaaagaaaagaatgggaataactttctaaatttatcaaacctaaagtgtttctagcaatgttctctcttgatagaaactagtttttactcaaagtgaactgaaacatatctatttatagtgttttgagggatcacatatgaaaatcaaaatcctttcaccacatggttgttactagtactttagttggtatttattaggataaaaatgttgcataagagagctggaaatatgttcaataattcatgtacgtttatggacgttattttaaaacttgctccaaacaaaagagaagaaccataaaacaacatgtcaacaaccataaaacaacagtttctagaaaacctaatattgagtttttgtaactcttattcgaactaaatctttctttaacgtcccaacacacagtttctaatagctataaacttatccccattgatttcataacctccatatgtaataactcacttaattacatataattaaatgtaatctttaaattacaaaatcattttcaaattttgtaaccactcttatgttacaaatcatgtgtattattaaactatatattatataatttttttttgaaaaagtattatataatttaattactaaataatatataatatgtcacatttgaatattttaatctatattatattataacaaataatataacactataattaattagcaatttttgataatatttattaaagtaaaataagtgagagctgatattaagttgcattaataactatattacacctcacaagagtgctaggcagtatctataaatgccctttagcatttctcattcataagttggtttacacttgcacatttctacaataaaataataggggtattagttaaaaatatatatagaaaaaaaaaatgtgtatactaatttggctagactataaagacagaagatcctagtgccataaaaggccaagtacatggagttaactcactgcatgactatgattatctcacttttatttacaaaaagaattccacatctaacggttctactctaaagcattcattttactttatatatctttatattatatataaaaaatatgttagatatatattcatcatttcac

SEQ ID NO: 32652 - DNA, 2073 bp, Cannabis sativa
attatctatactaagaatatgtgtatggtatacgcatatttatattgatatctgtttgagttttaagtgtttggaagatgtatattaaatgcgtgacaagttatacagtaagggcaattgaattgcctaattagcgagctgtctaggctcggggcaaacggtaaggaaaagaatcctttattgtcataatacttgaaacatataaattcttctatgcaagatgttattagacaacaaggggaagcagattcgagatctgagggaacaacatgctcgtcttttgtctattattgtactaccgacacttcttgttgtaccactggatatggtgaaatatatgaacccaacttacgagcagatcagtaggtgtaaactaaatgaaccaccaattatggaatagaatgaaaggttctagggtgaccaggatagcggttaaagtgagaataagaaatggtgaccttatcttgagtgttcaagatgtaaaaaaagcgccatttgggctaatgtagagtcaaatcttgttattgtgggggtagtgggtcatctgaaaagaacctgcccacagttaagaaaaactgattttaaagaagaaaagtgtacgagtcatgcccaagtgctaattatgattcaaggggacctgggtatcggtccttcgactgactaaagttagaattttgtgagtaagattatagttgttgtttcaattgatatcaatatcaaacattgtatactcaatgaggggatatcaaaatatctaaatgggcaatgtgtgtatgttatttagtgctaactcatcgacagggtagacagattagaaaaatggcaatatgagttaaatttgctgatattctcaagtggaaacataggatatgagtagttaatgggagtattcatctaattgatttggagaacagaatcttttgatataaagtgatctactgttagtataagtgggataatgtatgagtattgtctgaaaccctgtgaattaaaggcgatgattatgtgggtggatctattcactaccagagggaatgagtcaagctgtgacgattagaaccccgtgatctgcgaggaaaatactagtagatgtacaatctcacatcgcctgacagaaggtcgtatacgtagtgattttgcgattatgtaggcatgggactacatagtgttaaggacttgaatgaattgtttatgactgcctataagtatcctattttggtagcccaccatgaaggaactccacagttaagtgtgcttgacttggggtgattttatttatgaagtttccccatgaagcgtgcaaaccagaacaaagcacgttggaaacacttggattggtctctggggcaagtcgtcagtctaggaaataattagagtgatgcactcgtgtataagggccattattctgtgactataagggcccaatggaggcttgaagcagggacattaccagggtaacgtataaaagaacgctaaggagagtagtaatatctctaaggtaaggaagattacctggattacatatggtgatacggtaataatggaaaatacttttatatttgactggatggtcaatctggtatataaggtgactattgaaattttggaaaagggttaccttattaagtaatgatggaaaggcatactcacccagattggggaaaaggcttataaattgaaatgtaatttaatggacatgtattcgaatgattggtgaatgttggatcacaaagtaggttgtttattaaataatataactgagttttagagtgattgaccaagtataaagatagtgattattgcaaggaagcaataatagcgtacgaatcatggagtaaaaccttagtggtaataataggaaaagaatataagagtcttagatgttgatgaatcaacaccatcaatggggaactcactacaagttgaagtggtagttcacaccaagggattgtcattaaaatagagaatatacatgtacatttctagatgtgttaaaaaggaaattttaggatttctacctaacacaaatacgaagctttgagatcaagaaatgatctttgatcaattgttatt

SEQ ID NO: 32653 - DNA, 930 bp, Cannabis sativa
gagtttcaagaactgatgaatggcattagaggcagaggttatactattaagtccctgggggacatttctcatcaaaataaatggaatgatgagattatcaagcaggtgtttggcacggagttagggaatcggatatgcaacattcctagaatcccagctcctttcacagaccagatctattggaagaacaatcaaaaaggtaattttactgttaaagatgcataccaagtggataatgctcatagatttactcccagtaaaaggatttggaagtggatttgggaagagggagtccttcctaggaactctgtgatgctgtggaaagttttgaatgaggctattcctaccaaaaatcggcttcatttccttcaagacaagacctgtagcttatgcgattatgatttggaaaatgcttcccaccttttctttaattgtaactttgctagagctatttggtttggtggtctgttccccttaagaattgatggtatagcctcagagagtttgatcacattgctggaaacaataattgatatattccaaggtaatagcagagtcgatatactcaattatcttggttgtgctctatctgaaatctggcaccaaagaaatgcatattgtattcgggatgctgcaatcaatattgatctggttttgggaagaataaggaaaagcttcttcgaagttcagcaggcaggtgccaacagcattaggcaccaggttactgaccaagtcgcagatggctctgaggctttgcagaactccattgatgaacaggaaaggcagtgctgcaacatcatatttacagatgcctcctggacaaatataaatgcaggcatagcttcagtggatattgacactttttctggcttttggtttgttaaagctcaaaaggtccaagctcattcggttttggaagcagagttatta

SEQ ID NO: 32654 - DNA, 1903 bp, Cannabis sativa
gctatatcagatcccacctttagtaatctaaatagtataatctgtaggtattaatacaactaaaaggggagtaggtcattacccgctaaataaggaggtagagcctctataaaaatcattgtattatttactttattgttcttgttgtgtaatgcgtggcaaacatcaaatttatataacaccactgtcgattgatcacattttgaggtcaacagtttggtgctttcattaagagcgaggatattgtatctgatcaaatgccataattcacacgagaagaaccctagtcgcaccatctgcatctacgggttcccctcctaacctgcagacttcgaatcccaatattcatgatccaacaagaactagaattcccatgaacccaactgatgtggtcaatcctgccaccatacatggcatcacgaatctggccactacggttagctaggatggcctaaacatcctagtggatctgaggaatcggcattttcctccaagggaggaacctccataagcgcatccaactaaatgaacaatccttagggggcaccccttaggagcaataagtaggtttcttccccagtactatgtaggaaagacaagaataggaaatgtcgatcttactaatggcgtgccccacatggacttaggagaagatctcaagttatccagacttaaaaaggccggctgtaaagtcagcctaattgaagaaccacacgttactgattgcgatgtactagcttagtagagacccgaattccttgaagaaacacgtgctgctgattgcgatacgttagctcagtaaagacatacaattcctaagatggatggatgaccaagagtacatcctttgagctagccaggcagagttacattgtcgcaataggaggccaatgatctgataaggtggttcaactatagaaccagtttaaaaggccaggatctcatcaaagatccacttcatggagtactagttgattggtcaggagggtctatcgacaagttgaccaacctggtccctcaaggactaggatagatcttcccttgcaagagggaagatagaccttgcctcaaaggtctaacggtgagaacagctagatctcgacaaccagcagcatgggtgctggccagggatctcaagctcagcaacaacccctactatccatcctgtggccggccagccaccaacaagagtccatatggccaaccagccacctgaagaagtccccacggctggtcagacaccctcaaaagtcttaatggcaagccagagatgagcactccctcctcaagaccaaaagaataattttcaaacgacaaggaccaagagtaggtggcaatacccaaaacaaaaatttgagaagtgaaataaatcacctctgacagttgggtctatcaaaccccagcaattcatgtgatctacgcgatgtcaactcacaaactccactagccaggcaaaaatgtgtgggaggctaggccttgcccaacctagggctagccgaccatgtacaagtagcagacgcagggctggccgacattgagtataccctctcccaaggtatggctggccaggctgtggctaatccaaggctgcagctcaatcaagaagagctaatcaatgagacccctgaagtaatagattcttttgtgcaagcacagttggataaaatactagacatgctcaaagtcctagcaagtccaaagccttcagagttctagctagacaggactaggggttcactagtctaagcatatattaatgccatgcccttgcccaaattcaagatgctgacttggaagatgtacacaaggaaagaagatcccataatacacctaaaatactttgagaattaaacaaatctctaacaagcatctggcaatatgcgatggcgaatcttttcagaaa

SEQ ID NO: 32655 - DNA, 1995 bp, Cannabis sativa
gttgctctgttgtaaagagaatggcattgagggcatcactggatcgagaatgaacttaggagaacagcatgctatcatcagcaaacagaaggtgagacaagggctgagcgcccctgcacatctgaattccaaagaaatttgcatttgtctgttgcagccgaatagcagcagagggaccctcaacaattaagaggaagagatagggtgataaagggtccccttggcgaataccacgggtagaatgaaaggtgtttgtgagagagccatttatggatagcctaaactggacagtagaaagacaacgcattataagagagataaaagatgcaggaaaaccaacatgagaaagcaattgatttaggaaagaccactcaaccctatcaaaagccttttccatgtcaaggttaatagcagcccaacctatcttccccgaacgtctagaatgaatagcatgaataagctcattagcgataagaatgttatcagtaatttggcgcccctgaaggaaagcactttgattgatactgataatggaatgaagaacaagctttaaccaatttgcaataactttggataggcatttgtagaggctattgcaaagactaatcggcctaaaatcacggacaagtttgggattttttttttttttgggatgaggacaattatagtttcattgatgtgggagatatccccctgatggttaagaatttggagcatggctctggtgaaatctttccccagagtggacaaattacttttgtagaaaaaggagttgagaccatcagggccaggagccttatcacccgaaaggctaaacaaggcttgtttaacctcaatctcagtgaaaggttcatcaagaaaagcaacctgctgaggggtaagcctgctagagatcccttgaagaagagagtttacagccatatcacacacaccttgagaagtaaaaagagaagtatagaagtcaagaaattggcagattatagtagtagaatcgtgggaggtggatccatcagggagagtaatttggcgaatgagattgttcttttttcgagtagaagcacggtgatgaaaaaattttgtatttttatccccaacacgcagtcagtctactcgagaacgctgcttccaataaacttcctccttaaggagaaggccatccaaccgagattggagagtagcagcttgagaagtagattggggggttggttgagaatcattcaacagattgtgaagatccgcctgaatacgggatatttgaaacttaaaaggatgttgagatttactccaagtcctaatatccgacatacagttagattgcttgtccaggaaagattacaaggggggtaaagagaggttctgagagttggcccaggaggaattaaccatggaagcaaaagaagggtccttcagccaatgattttcaaagtgaaaacgagtggagtggaaattactgaaatgtgggtcctgaagcaagatcttaagggcacggtgattagatccatagaaacctaagtggaaaagagtagcttgaagaaacaaattttcccaaagctgatttgaggtgcaccaatcaagacgttcaaggatcaaaccatgccgccaggtgaattttggcccaacatgatgaagaggaatatgattgtatctattcagaaaagaatgaaaagaatgcatagcatgagagggaggggagtgatgcgtgttcctgtcactaaccgagagataatcattgaaatcacccataactaaccaaggcaaaagaggagcagtatcaaataaacgattaagtaaagtccaagtaacagatttttgatcagcataaggagaaccataataaccagaaaagtgccagtctttaccattaaaattatttataatacaatcaacatggttaagggaataagtaacaacattaacatcaacagagtctttcaaaaaaagtaaaatccctcccccaagaccttgcctaggcacttctaaaacactatcaaaacg

SEQ ID NO: 32656 - DNA, 3691 bp, Cannabis sativa
  modified_base (168)..(175): a, c, t, g, unknown or other
catggttgatcagccactgacttaccctttcctgcacagtagagcacccgtgagccaagcccagcaaaactgtaaaaataacaatctggaatatatattctagatttagataaatactgatgccaccgcatctactgtctatttagcatagacctacgtgttgctctnnnnnnnntatttacaataaggccttagattggtttatctcggttttgatcaccgagtctaatctacttatgccttacctgcataattttttatctccacatatatagcatggcattgcattcaaaatcatttaatgactagggtaataatcctagaccatataacattaaaccgctcactaccgctcactttagtcactttagggtaataaccctaatcccagtttctcacttaatcacaagaataataccaaacatgagcgccatcacgcttaactctatgttctaactactatcttacctggtatcccaagtatgtggacattccaaatcccccgggtgttcctaagcaagcgtcagtagtcctagtcacacgttccttgatttcacaaatagggttaatccaaaattcactttcaataatcacataattagaattagaatttacatattaacgtatagagctcaaaaagagctttccaacaataccaagaatgtccaaaacggagtctcgagtcaaaagttatgacaaaaaaaaaatataataaactaccatgccatggtcgcgtccaaacttgcgatggtcgcgactagagcccaaacagggactcatcctctctagtttagtgctaggccgcgaccactggatttaaaaactcaaaaaatgcccagaaaatcatatttaacccaattcgaacttagaccaaattatcccaaacttaccaaatcattagcaattatatttcaagtcaaaaataaggtattttccaaacatttacactacaaataaacatgcccaaacacccaaacacttcatacacaaagctcaattaccaattcaaaactcacacataggggtgcacaaaatatgggccaaactattcaacctggccaacccaatccattttttgtagtaaatggttatgttaagagtaagtcatggcttattgggttaaaaagtgataggccatataattatgggttggttatgtggttagacacattttaactctatataacccaaaccaaccgatttcttaaaagatgttctaaatttgagacaactttcatacacaaaatatactttacattcacaaaatatatacaaatatatatatttaatgtttttatacataaataaatttatattgtgataaccttaaaaagtgaattaatcaaaacacatcactaacacgtagtctatagttaccctactatttctaccaacaagcctaatgtgagaataaatcactattatgaactttgctactcacacaatgataccactaccaccttagttatttttaaagtactatattacacacatatatatatgtatcctttttttatgtatgcactaagttagataattttatcctatttgtaatataaatattaaagtttaaaattttcatctcaacccaatgaacccaacccaacccaccccttatattactgtactaagtagggttgggttgtacaataaaaaaatttgaatagtttataacttatgcaaattgcaataatggggttaggctattaaaacacctctaaccataccaacccagcccatgtgcacccctactcacacacaaaagcatgccataaaatcaacataacttctccaattcacatgcttaaacataagacattcaaatccttcaagcaaacccaaaaaatcatgctcaagactcagagatttaaaccttaattacaaccctaataacaaccaacatagtctataagcactacacatccttcttagagctcaaacacacaaaaatttataaagtataacctcaaatcatcaacatgcatgaacactcacaaaacttcaagaacaccataagaaacatcataaataccaaaaatttaaggtgagtaatggataaagtgattacctcaagttccaaatacaataacccacacaaggttcttggcttttccttccaaaaatggttgaaattgaagaacaaagtgagaaagagaaagagaggggagggggtcggccaagggttcaaacccaaaattctggttttttccaattaatcaacaaaaatttgatttcttttcctttttgttaaaaatataaaatatggtcaaatgaccaaaatacccctaaaatcattaataagcataactataaaatcaagggcaaaatagtcatttcatcacacacacatataacacaataaattttcgatttctcatttatcagcataacacaataattaaatcccgaaagtgtattttgggtcccgaacccggttcgacctaaaatacccaattgtgactataccgcgccgacttgtcagaaaacacctgcagatggacaaaataagcatattatataataatatagtccatgagcacgatatatcattaaaattataattttactcttctcgcgtcaaaattatgaaaatgcccctaatacaccaacggggtcttaaaatgcaatttatcagtatagtttcatatattaaattatataataatataatttctcattaatacataattaatctagttagggttgctaatccagtttcataaaccttaagttattatagatatattatctcattggcaaacataatacatgtacactaaacatgtgcatgtatgcttctattacactaaacatactactaatatattatcctaactaaggagtctcctgaggaaaccgctgccaatgccccaaaaaaatattcaagacagatatgatgctcggattcaatccaacaacaaggccaaatgtttcatgcttgtaagcatggatgatgtttgcgtaagacgcatgaagatatgaagaatgcatctcaaataatgaattctcgacaggccatgtttgggcagcagtctaatcaaacaagacatgatgctactcgtaactacactgctctagaagtagtttcagaagtagaaaaaccactggcgatctactatgacaacattggagtggtggccaacttcatggaaccaaggagccacaagagaggcaagcatattaagaggaagtatcatctactaagagatatagtagagagaggtgatgtgatgatcttgaagattgcatcgaaacataacctaacagatccaatcacacagacgctaccagcaaaatctttcatgggtcatatagctactatgggagtagaggagatgcccagtttgcttttagggcaagtgggagatggttagggtttatgccatgaaaatcctgtaaatacattttagattatttataaagagttgaacattttgatatatgcatgaatgtcaaattattaacatttattattgaataatttaaatatctaaaaattcattattcatatatgaggttgtggcttgtagttgtatagagaactaagaccacttagatatgaataaaacagttggtaacatattaaagttatggaatctttaatcaatggttgttagtgcagttcacagatgcccgttcttaggtgcaagtaatcttggttcggattacggatgtagtatgacatcaaagt

SEQ ID NO: 32657 - DNA, 1570 bp, Cannabis sativa
  modified_base (1130)..(1134): a, c, t, g, unknown or other
  modified_base (1233)..(1233): a, c, t, g, unknown or other
tatctttttattttttatatatctaattcggccataaggccttttctaagacatcatgaccggccaagcagtctttaaacttggaattatttttcatttttcagacaacaggctgacccgacagcttttaatcgcggtatcatatgcttttgttatctttaatgaatttcattctctatctataattgtcgtgcaattgtgattgttttaccaaatgctttgtacaggtataggtgccccccaagtgaccgagcaaaagtatttgttcggtgttttgggtttgaccaaaccttttgtacgcactggatggtaaattaaaaacatgctgataattttgagtcaatttgaattttgaaataactatctttatttatttattgatcgaaaaatgtatttgttaccgtagtaatttacatcagtgctatttgatccaatctgatcttttagcttaacatgagataaaacaaattgcagaaataagaaattgtactttaaatggtggtcacctgacctgagtactttgtttcttttatcgaaacctttgagcgttatctgcccagctttccattcacttaaaagtaaatgttcattcagtacttaatgtggtcatctgacctggtactttattggtagtattttcttaaatgtaccccattccaataccgtggtactagaacaagttgcatttttttgtcatacttacctaatttgtatgctccggagtcgagaacttcgatcacttgatatggtccttcccagttaggtccaagtacacctgcggtactatctttggtgtttaggaatacccttctcaggaccatatctttcacgaagaatttctgagccttcacttgtttattgaaatatcgagctactttttgttgatgggccatcaacttcaagtttgtagtggctcgtttctcttcgatttcattaagttattcggctaggagtatgtgatcggtatcttaattgtacatcaattttttgtgggaaggtggctcgagttctacgagcagcatagcttcatatctgtacgccataacgcatggtgtctatctggttgccattttctcaattgtgcgatatgaccatagaacttcaggaagctcttctggccaatttccttnnnnntcttcaagttttttcttcagtgtatccttcaaggtcttgtggactgcttcaacttgaccattcgtttgaggatgcgccactgcggagaaacttttgatnataccatggttcgcacaaaaatcagtgaaggattggctgtcgaactgcttgccattatttgaaactatcttgtacgacagtccgaaccgacatattatgttcttcacaatgaagtcttgaactttctttaatgtaatggttgcgagtggttcgacttccatccacttattaaagtaatcaactgctaccactgcatacagcacttctcctttacctttgggtaaatgtctgatcacgtcaatcccccaaatggcgaagggccacgaactttgcatctgtgttaactcgttaggtggagctcgaggtatctttgaaaatctctgacatttgtcacact

SEQ ID NO: 32658 - DNA, 4420 bp, Cannabis sativa
attaaatatttcaattaaaaaattggtttattttaagtatatagttaattataattaacttaagtctaaaaataaaaaatttacttattattaacctgttgtatgtaatcattatgattatattttaatgtaaccattcaatagttacttatatattttttgacaaataatttatttatatatattgagagaaaaggttttaaccaccaaacatcaagatcaatgagtactctaaaatagtaggggcgagaatctactatcaaccgattatgtacaaaaataggactccttggccaccaaatcataatattacttgaagtcaaagtaagtttggtcaagacatgagcaaaactattacaggacctattacaacaaataaaagtaacaactttgagcctattacaaagaccaacaatatcattaaataatagacctaaagaagtaataagagagacattatttttaatttgaagcacaacactcaaacaatccgttcaataatgatattgtcatacccaaaagaaagacactgggacaaagcctttttaatagccaaagcttcagccacctcaggcacaaaacaaccatccaaatatcaattcactaaagcacgaacaatacccaaattgtctctaataaccatctccaagccactacaattacctgaagagcttagagtcgtattttttttactttgagataatcaagaggaggatctttccatttgggaggtgagctaaagacgacagtcatggcagaagaggaggggtaccaccgatcaaacactgcctattgtgaaacatccctaaaaagtcatgagcccaatgaacagtgagagcagaagacaaatcaacattgttatggatcattttattatgcttatactagattctttatattatcaccataaccagttcgaccatctctttcgaaaggggattaataaatctatgaataaagtcaagaaaatccacacagtgaactaaagaatctcccaacacaaactcgcagattttcctacaaggaagtagagaaatacaaccccaaagcatgatgagtaagtttttcatctacccacccaaaggacataacacattagagaaaagatcatgatgagccaaattgattttagtaggacgccaattatgggatgcttgccaagcaaaaagtctaacctttggaggaagattaagggaccagatctttttccaccaacccgacaaactaccagacggagaagcacaaggcattgccaatttgcaaagagccaaccaataaccactcttaacagaaaaccaacatgacgtctcaaagttttaaataatcttatttggcacatcgtttgaagaccatggaataaaaaggatagcctcagcttcaatagcaaaaaatctagatcaaatcaagtctttatcctaccaccccaagccatcccttaacaaagaaaccattcttgaatcattaaactgatggggagatgtcaagacagagggcggcactgaatgaatctaattatatgagtaaatagcaatgtccttcccattccccatatgctagatttcccctgaatcaaagagtttgttagcccataaaatattcttccacacaaaggagcctctctaggacttcttaatttcggcaaaggttttctttcgaaagtacaagccttttaaaacacgaccagctaagcaaccaggaacattctaaatacgagaaatttttttatctagaagagactgattaaataattgtaggcctcaaaaacacataccaccatcctccttatgcaagcaaagtttgacctaagtacaccaatgcatcttttctttgacatcatttccatcccacaaaaactgagcacacatacgatgaacattttttattaagtcttttgaaatcttaaagagatttatagtatatgttggaatgaattgaatgattgccttgatcagaacctcatgacctgccatggagaataatttcgacttccacccgttgagctttttccagattctatcacgaatggcatcaaacaaacccatcctgatatgccccgcaaaacaagaaaggcccaagtaattctcatggaaatcaacccccttaacacccaaaagtccaccagattgtctttcttagagctagatacatttaggctaaagcaaattgtagacttgtcaaagttaaccaattggcctgaggccgccccataccagctcaaaagttgcttgaatctaacacaacacatatcagaagccttgaagaagaaaaggttgtcatcatcaaatatgagatgagatataactagaccacttcgaccatagagaaagctaaacaataatttattctcacaatctcctttaaccaaactcgagaggccctcgacagagagtaaaaaaaagataaggggacatggaatgaccttatctaagtccccattatggagtaatagaacccagtacctcaccatttaacaacgctgagtactccacagaagagatacaatacaaaattttcctaatccaatcaccatgaaagacgagcttcaacataatttgtttaagaaaacaccactcaacatgatcataggctttagacatgtcaaatttgagagcacaataaccatccctacactttttttcttgagagcattaatacattcaaaaccaataagtgcatttgctattcagaaataatatcacccgaaacctcatacatgcagtaagttgtagtcttggaaatgatcttgtaaaaaatattacaaagattaatgggtcgaaaaatcaacaacaccgacgggtttgataactttggaatcacataaataagagttttgtggatacctttcaagctagagaccccattcaggaaggccaaagttgctgaaatggtgtctggcctcacaaaatcctaattcttttgattatgacaagttgcaaaataatcttcacatgggctatttgaaaggtccatttggaaaagagcttctttgatgtcattaccaaaaatctttttgggaaccgagttaatgacctttgctaaagcatcattagggtggtctaaagtgaacagagtaggaaaacaatcttcaaaaatagccccaatttcttcttgtcccgacacctcaatcccttctctatttgaaagattcaaaattttatttttgccatgcctacaaaatgcgcacttgtggaagtacgcaaaatttttgtcacccaacttgagcaatcattcatggccctagaagcccagtatttctctttccttctcattttcaaactccttttcaatcttatgaagctcctcacaactgacaatgtcaagattagcatccacaatagcaaattctttaagctttttattaatggtagtacaatgtctcttatgaatttccttattccaaacattaagttttccacccacatcaagaacattaagttgtgcattacgaatgggattaacatctttaaagttccaattattttagataatttccacacaatattttcctcatcagcctaagcattttcatagtgaaaacgagaacgagccacatggtttccattatcctgatgaacgatgttagcggtgaaaattcttcaactaacttgttggccagaaaatcaaactatgtttcaagccaagatctaagacaaaaggaaaaatgaaatatggatttaaattgttatcttaaaatggagaaaaaatgataaaatttctattgctctcaagttcaagttataagaatgatttttcaaccccatttcacacttgagaatggggtattgataggctctaatggcctgagttacatggtagtcctaaatagacaagtttttgcttttaggctacacactacaggtacaggaggttgtggtcttgcacctcgtacctttttttggtgttaggtggtctccggtcactgaggtggtccctggttgcaggggtgatggctgtaatgcacccttggtcgggtcctcagaccttgcaagtgcgtcgcttccactacataacctccttgctcttagagcttgtaggatgcatggttgtacactttttcctagcacgccttgtcctttgattcctcatccaatgtcattcttgtcaatatgcattcaaatttcaccttcactcctcttcacacaaacaacatacttggcacttcataacactttcacgctaacgggctttgtgcacacacatatatacatgctagcatgcacacacatatacgcacgctcgcatgcatgctcacggatgcacacatgcacatgtatgcacgctcacatacaagcccgtcacagcctcgcagcctcacggccttgcatgtgagccccttgtggcctctcgtatgagcccctcgtggcctctcatgcaagctctttgtagcctcacatgcgagcaccttccatcctcaagtgcc

SEQ ID NO: 32659 - DNA, 2193 bp, Cannabis sativa
aagaagaacggagaagctcatccccaagcgaatgaaaatgatgacacgaacaatgcgagtggttcatgaactcctcgcaatatcttaactattattggaggaccacatattggtggagattccaagaagtcgcaagagagatatgccaaagaagcaagagaaaaactgctcaccaatgtaaaaagtgagggacctgagaagttttttaagaaggaatgcgatgacataaccttcatggagagtgatgccaggtgggtacaccttccccacactgacgcactcgtgataatcgcaaatattggaggagataatgtccaccaaattttagtggacaatgggagttcagttaatctcctcaatttccaagcttttaagcaaatggggttgcaagagaaaaacttgcgactagtaacttcgagcatctatgggttcactagagatacaatcacattgaagggaatgatcaagctgctaattactctgggaactggccatgttactgccgaatcaatggccaatttcacagtaatcgaccagtattctgcatacaacgcagtgataggtcatccaatcttgaaagatatgagatagtaacctcaatctatcatcttacaatgaaattccctacccccacgggtgtggtctctgtgcgaggagtctaatcgaattcaagagaatgctataacatagcactaaagatcgcagaaaagaagaaatcggtaaatgttatatatttactcgaagcacctcctcctcggcaggaaatttttagaattgaggagataccgcatgttgaaaaacctaatttggatccaagaatcctcgattacactaacactgctcaagctgcaaaagaaacaattgaggtatcaatcgatcctttcgatcgtaataaagttttaaaaattagttctaaactaacctttcaacagcgataaaagcttgtcacttttctcaagcagaatctgaatgtttacgtgtggaaacattcggacattgtcggaatatcaccgcaggtcatgtgttatcgattgaacattgacccataagtgcgaggtgtctgacagaagcgctgcaaaatggaccctatgaggtaccaagcgcttaaggaagaagttgattgccttttggcatgtggctttataagggagtcattctacccaaactggttagcaaacctcgttcttgtgccaaagccaaatggatcatgctgctcatgcatcgatttcacagatttaaataaagcatgtcctaaggacaacttccctttaccgagcattgaccaacctattgatgttaccgtaggtcatgagctccttagttttatggatgtgtactcgtgatacaaccaaattccgatgtatgaaccagaccaggagcatacttctttcattacagatcgagattgtactattataaggtaatggcctttagtttaacaaacgcaggagcaatgtatcaaaggccggttaacatgatgttcgcagatctgataggagagacgatggaagtgtatgttgacaatacatgcaaaagaccatgtcgcccaccttgaggccatgtccagaatcctacggcattatagaattcgacttaaccccctaaagtgcgtctttggagtaggctcaggaaaattcctcggctttattgtgaaccaacgaggaattgaggaaaatcccacaaaaataaaagctttggtggagatgcgatctcccaccaaaccaacgaaagtcaacaacctcacaagtaaagtcactgcactaaatcactttatatcacgttcctctgacaagtgtaaagaattttttcagattttaaaaggaactaaaatgtttcagtggattgatcagtgtgaagaggcttttcaggccctaaaaatgcttttggggcaaccctcaatattgtccaacccaatgcctggagaagttttgtcaatttacctagagtgtctgaatacgcaattagttcaatactgattcgcgaagactaagaaacacaacatccagtatactacgtgagcaagcgccttttagatgctgaaacctgttatccacaaatggaacaactagcatttgcacatgtgattgcttcaaggaagttgcgagcttattttcaagcacacaacatggacgttttgacaaactatcccttgcgacaagtgttagcaaaaccagaagcatcaggaaggttact

SEQ ID NO: 32660 - DNA, 1746 bp, Cannabis sativa
  modified_base (306)..(308): a, c, t, g, unknown or other
tagattttagcgtctacaataatttcgtcctaaattaatttgcatcaataacaatcaaagcatattcaaatctcacttcttagaattttgattcgaattcataaataacaactatcggtgattagtcaataattgtaaaattaaatcagattgcatggaattaaaataagagaagaagatgaaattgaataactacattaatccataaaataaattcaagtggttcacataataatccttaaaaaaaattagctcataaaagttgtgatgagtccatatttgtcttataaatatgatcaatttatnnnttaatattcttaaattgattctttgaattattgattagtgtgatttcaatttgttaggttatttttaaagactattcatgcatttagagtcttttggagggcttttagcatattttggtggaaaatagtggaagccgacgagctcggttttacaagccggagtttaattgtgaattttgacgatcttacaggtagaactagacttggagctcaacatgaaagttttagatctcgttcttagctttccataacatcttgaattgtccaattccaaataatattgagagagttatggctaaaatattatcattcattgcaacagaaatttctaaaaagaaaaaaagataacgaaaaaaaaagatagttttcaagtagagttgcaatttttttttaaagatgtgttatcttttcttttagtgagatatttcctaatactataaatagaatcctaattctaatgggattcttctatcttttcaagtactataaatagaatcctaattctaaggggattcatctatcttttcaagcactataaatagaatcttaattctaaggggattcatctatctttttaagcactataaataggacctcttaagctacgaatttattgattcaaaagctacaaattagatagagcaaggaagagacggagatcggcttcgaatgttcttcattctagttcttttcttctccttctactcttattatatactatgatttttattataatgtctaattcagggtagttttcttagttaagggttattcaaagcccgagacatgaattcttagtttcattattgaatgttaatttctagtttccattatatcaaattatttttatttttctatgtcaatgctatgattattgttttaatcttatttagatgactactaaattaggttttactttaatctaccgtcatcttaggactactattcacttaatagtctaaaattctaagtgtttgtgataaattacaatttttatttatgatgaagaatagaacctaggttaaataaattatatgcttcattgattttgttgcctagattagtctatctccataaaactcaatgctttatctaagttaaataaattgcatgcttcatggatttactatttaggtaaaagagttaattattgattacatacaatagggagattgggataattgactgcttcagctttatttacgggattaatagtttgattggaaactgaaaattacattctttaatagaaattaggaatgactgttaagggtggcaaataacctttaactagtttctcatatcgtagtgtcactttaaatttagtgttttctttaatttttattctaatcatcaaaacctccatttttctaattcttattactaaattgtgaataattaaataaatatagtcctcgtgggatcgatccttacttac

SEQ ID NO: 32661 - DNA, 1689 bp, Cannabis sativa
  modified_base (1652)..(1663): a, c, t, g, unknown or other
atataaattggtcaaacttaaatatgccatatttatcataagaacttttaaaatcccatagtaaatgtaattttctctaagtaatataaggatagatgtgacttgtcttttgatttatgttttctcaagaacacacactcagttcttaaactgtagcacaccattatctgagatagtgaataagtctttagcctttaataagtattacaatgtaataacagttctgactgttagttagtgctagttagttggtttctctattatattttccttttccactgtttgtggctcctttcagttatattagttagaaggattgtcagtggttagcatatatatatatatatatatattccttcattgtaataagctaattaattcaataataatattctttcttttctctgttttctcctttgtttctttcgcaacatggtatcagagccacttgtgatccgttgtgagcccaaattgccaccggtccaaaaagccgtttgtgagccaaagtgctgccagtccaagtatatatttccgttgtctcccctttaacctccatttgggacctttcgcgctaatgtgtgccaatttccagtgttggggtctttgacctgtttcaaaatccacaaatttcccgatgtatgcacccacaaatttcctgatatttggccttgtgggattctttcaaatgtcacgttcggtcctgtggtctcttaaaggtcgttcgttatacccacactttccaagcccaaacgtgaggagggtgtattaagagttagtctcacattgctaatgtgtaaaaataaattgtgatatatatagaataatggactactcctctcattgccaattggttttgggctactcctcacattcagcttgccgacaccttcaccaagcctctttcttccacaatactcaattctcacattcacaaaatggttgtatataatgtatacagtccatcttgagggggttaataactattacaatgtaataacagttctgactgttagctagtggtagttggtttctctgttatattttccttttccactgtttgtggctccttttagttatattagttagaatgattgtcggttgttagcacatatatatattccctcattgtaatcagctaattaattcaataataatatcctttcttttctcagttttctcctctgtttcttccgcaacagccttgcctggtaaggcctctttccaataatgtagattggagtgttatattggaaagtcttcctaccacaaacttaataccagcctcggtcatgtctaaagtcaactgtggagaaatttgcatcaaactgtatatttgtccctgacctttctaactacgggcatcatctacaatgttgacctttctaatatgataagtaatttcccaatcataatgttttaccaactctatccagcgtctttgctcataaatctttatgagtgaaaaaatacttgagactcttatgatcaatgtatatctcacactttttaccgtataaatagtgtcttcactccttgagtgcaaacaccactgctgtcaagttatgagttcgatatcgtttttcatactcctttaactgtcgagaggcacagacaagcactacaaaaaattgctacttttagtgacaactttnnnnnnnnnnnntaaattttttgtgactaaatgcgact

SEQ ID NO: 32662 - DNA, 2069 bp, Cannabis sativa
tagggcataaaacccaacactctactgtgcaggaaatggtaaagttgtttttgatcagccatgagtgtaagagctaaattaagaatgtacatgtctgggccaaactacaccaagcgggttggggtctaccagtgatgcattttgagactctattttgccgcttagatcggcgaaaggaaaaggatttgtaatagtatttggtaaatatttttgggatcccaacttttgtaacttttaaattataaagtttaaattattacaagttattttcatttcgtttattaataaagtttaatttccgcgctaattttgttagtaatctagtttaggggattatggcttcttaagtatattgggtagcgtgcctaattatttagggcgttacaatggtggtatgggttttcgatgccttaaagagttcaaccttactatgcttgctaaattgggctggagattattatgtcaccccgagtccttcgtaggacgtgtattcaaggcaaaatacttccccaatactgattatctctcggccgaacatagcaacaatcccagttttgtgtggtgtagcatttggggcgcccaaagtgtggtccatgctagtgcttttcgaaccattgggaatggactaaccacaaatattctttcccacccacgactttatatgaacaaattgttgactatctctttgtaaccgaggaaagaagatgggatactgaaatcattaatgatttgttcaatcaccgtgaacctagtctgatttctagtcttggtctggagaacattcaagtatattctttgtgaaaagtgcttacactcttttgcaaaatggtaagcccaagagccagagagttgatagctctgtattctagcgcaaactgtggcatctaaagatccccccaaagattaagaacttcctgtggcgtgctacttctgaatgtctcccaacttgcctccaacttatgtcaaaacatgtgagaatctcatcctcttgcccggtatgtaactcccatcttgaaacgacttttcatgctttattaaaatgtcatcttgcttcgcattgttggtcaacattggaacatggcttgaccatcctcgttcggcaattggctccatgaagtctttctaaaacttgatgaggatcaagtatgttgtgctgcaatgttatgttgggctctgtggaaaggaagaaatgctactttttggaacaaaaaagtgtcttcccatagtaagattcttgcgtcagcttgtacaacctttgatcactagcgaaaagctcaagacaatacatggctatcctccttgttcttttagaacaaggatgatggcgctgagtgtcacgggctcacctattcaggcagtggaacacccgtgcggcaccttgacttctctaagccaaggtcagccttccaaccatcagagtaacaatgggctcatttttcatgcgactgtgtgcctcgtgcacacttccgtctgttgaacgactcccgtcgagtcatgctcgcaagcatccatgagtgaatccatgcatcaagactctctagccgagatactcgcagtgtccataggttcccaccatggtaagacaaatcccaacatggacgctcaccttgtcactcgtgaccaaggttgcatgtgtgggaagatgtcaaaaccaagtcaacgtgccaacgcttctatcatgccccattcgatactgtccgaacagtctccctcgtcgcccaaggacttctatacgtccatggaccaatcctcaaggcgataagccaccaaactagttgcatacattagacctctgtccctttccaacatcgtgcatccattccatgcgcgtatgcaaactagcccacgaatgactaaccgtgtcatctcgtgttgacacacatggccaaggtgcaccacaacgtctcttggaggatctaggccacgtcccgtgcaagcggcataccgacatgccaagggaaacgtactagtgaacctttggcagcattcttcgatccactaccgggtcggcccgataatgtccatgagtactccaactcatggagacatatgagtcccctcgtggtcct

SEQ ID NO: 32663 - DNA, 2635 bp, Cannabis sativa
aataaacacgaaacctaattttttagattgaagggaatgcgccttacacataaataaagaggactgagaaaaatagaacctgcttgctaactattgctccgatttgacttcctcggggacgggaatgaaagtattgttcagattcctcttcagaaactttctggacagatccttccactcttacctacaaatcaaaagttaatgtaagtcagtttcttcatttacaagtgtaatcaattgctaagaaaatcacgtgaaatggtaattattatgctttgatagcaaaacactaaggcatgaatgtggaaatgaaaattagaaaggtatacatttcctaaatagcaaaggagccttactgttgaaagaaaagaaaataacacattgtggaaaagtcatttacactaatagacttctcttgggaaaatccactcaaatgcttcattggtaatactattgtgctttaatcaatcccaattggtaacactaggaaagagaatttcagataaaagattagagttcccacaaggcaagattattgtgaccgtaaaagttattaataatattaaattttaagagaaaagatatttccatatactatagtatgcaataaatccctggatcttccattcaaagttagaagttaaacttcccataaccctaaaaagaaatgtgagattttgaattaccattcaacattgtgcttgaacatacatagctacacaaaataaataaaagtgctggaacaattgtcgactgacttacgattcaggattaaggaaggaatgtcacataaccaaagcagttttccacatccaatttaattatataagaaattctttttgactgataagaatgtatgtacgaaggcatatctgatagaacttgtactacctgccgatttaatccatcccaataaaaaagaagtgatgcatgaggattttctgataactcatgagcctttcgactctcataattggtgaacctgcatatgggaacaagagaacaaaattaggtccatttatacagaaaggcattacaagcactactgctgaaagtacactaccatactaaccagacaaaaccattctcatcaaacccttttagcaataccattcgtgatgagctgtatagaacagtaaaacgacagtgaatcagcaattcaaatttataaaggaagcaaccatatcaaaaaagagcaaaatgctcaaagcacgaaacaaataacagaaactgatatgtacattgttcatgttggagttgttaaaaaaactattggagaaaactacaaaaatttaccaatgatttaccaagactgtgtagccaaataaataacaatcaacttttaacacaaccttgaacagtaaaaattgactaataataactcaatttggaattgatggctgtgctctttttattaaaatccacaaaactggttccaaagggctctagcagtactctacttgacataaattaggacgtaactttgattcccaaataaccactactcaagcaatattatcttccttaagtaggactcctactgctatactcaaaaatatgtagattgactttgttaatgaggctagtgcaaaggaaagacctctatgcacatcatagttgataaactacaatggctccacaagctaagcacttcaataacataggttattttcaaatacatgctgacgtgttcagtagggaaaagtgataccaaagcagagaaatggaaactgaagagaaaatgaatttgtgtattactgaaccacgctaagcaaatagatatagagcatttgaaagactcctagaacaaagctcggttacaacttagatcagtcatacccttcagagtcatgcctcttttaatacacacagaacctttcataacaaactacctgctctgtgcccaaacctgccagctaagctactaagacatcactcattagttttcttacaactagtacaagtaatacaaaatagaagggttatcagtgttcaactaatatcacgaagcactcaagttccaactttacagatcttgcattctttgagagtaagagaataattatatcagatgacatcagacacttgcattttacaaaatgcataacaagatcagaaaatactttagactcaataaaacccttggctgtaatacaaccctacaataaatgttatttcagtttagcacaagaaggaaaattggaatgtagaactctaagtaaataactgaagtgtgaacatctcacacaaataagtacttcaggaacatgcaaaaatacagtactaacaataaaggtaacaaagcaggaaaagcaaacattacacttttccattcttgccagcagttgacaaggccatggcatttggttcttttaatccagcacccactgcttcctcaaaccatttgcggaactgcaagttacctattagttttattgatataccaggctaatttttgcaacaagatatataacaaatatgtatacatgatgttgaacataaattataagtctcgagattgaaaatgtaataatcatccggcagtggttatcaattattatacctgatttattgggtcagattccacatcttcctcaaggaactcaggcgaaatgtaattctctctcagagctga

SEQ ID NO: 32664 - DNA, 1483 bp, Cannabis sativa
ctgagactactgggttgactaattcaagagctactccacttgaggtttttctcacacctcgtcttcattccaaactttatgaataatattatatatgtatgtatatatgtatatgatatatgattatgtgtgtgtaatgtttaaatatttttaatgtttgatcacattgtatcttctaatattgcaccatatgataataatctagtttgtgacttgacttgtgtgagtattatatataaacttaaattacatgtgaatatatgatctaaaatcttattgagtaaatgatgagtggatcaaatctcttgttttatgagacttgtcaaaacttaaaaaatgatttttttgaaaaaaataaaaataaaattaaaataagtttttaaattgatttctagtaaattaattttaggaggttttattttatggactaatattaaaagattattttgaaagaaaaaaaaaggttaagacattttgagagtagggatgcacattgggcggagaattaacggacattgcttctccgtttccatttccattaagaattttaatttctttctccgcttattcctcatcagggatggacgagcggagaatctcctaatagaaaaataaagtttattataataaactttttaatatacaaatatttaaactacataaaaattaaatattatacattaattattattcaataaactaattattatccaaaacacaacttgaaattcataaaaaaagatactaatatactaaaaaaatgcaaacataaattataaattataaaatataagataaaatattaaacgagtccccgtcgggacagagagtatgatccccatctccttcatgtttaacattcaaggacaaaaagtaatccctggtttctgccctgtccccatcctgttccccatttagacggggaatccccgccccattaggggcgggtccttgtgaggccccattcccgtgggttactacgaatgttaaacggggcggggacggggatcacacttcccgccccaatgaagacccgtttagtattttatcttatctatatatctatataaaggagaagtatgagacgttgacgtggcagtctaaaatcactcaaaataactctatctatcttctccttaattctctcatttaaattaataaaataacattataaattcactcaaaatatttttatctaatatctaatatttaatttttaataattgattaattaacaaaaaaaaaaaaaacattatatgtacaaaaccatcaaaaccatcgtataacaatataattcttttttttcaatccaaaaaaaaaaatattttttaaatctcaaattctaaattcactcaaaatatttttatctaatatctaatatttaattttgaataattcattaattaacaaaaaaaaaaaacattatctattctatataaagtgtgcctatataacagatttcttagtttatgagaaattcatg

SEQ ID NO: 32665 - DNA, 3613 bp, Cannabis sativa
aagtttttgtttgaatattataatactatttttttataaagtgtgagcactcacaatataaatcataatagctaaaagtaaaaaaaaaaaaatctcaaaagagcttaatattagagaattgctaaagggcaggtgccttttttagtgtcatactgctattggtataattaaatagtgcgtctcatataattttaaaaaataagttttagggaacatctctaaccaatcataaagtcggacctataaaaggtgctgggtaccactggtgcctaatagcaatactcttaaaattaaccccaccaaatattttaaaacttcatcctaaattccaaagaaatttttcatatagctcaataaatataagagagttaaatgtattttatatatttttttctctttaattcctttaatttttgttttttttttttttttgagaaatcttttaattattttttattagtttactcattcatgtattttttttttttttctaaattacaaaataaagtaaataaaaaaaaagttaatatatagtataatgtaaatgtaagaggtaaaataaatatgtggcataataataaaaataaaaatttatggggacaaaattaagaatataaataaacatattaatttattgggagaaaaactaaaattttcaaaattttatgtataagaaaattaatttttatatattcaaggggcaaatgagcacataaagtatctctaatggtaacatcttttaagaatgttaaaaatttacacattatctaaaaatataatattttactttatttctcttccacatcattttggcactcttacttctaataaaaacactccaatgtataagactctttaaaaataatataattatgatttcacacattattatttaatatatatcttaatttttagctacattaactttttagcttcaattttttattaaaaaaatgaatagcatcaatgctacaacatagcatccatgcaaatttctaaaatcacattttttatctacaatggtataacatcttaatattttgccacataatatgttcacctcactaagcattctttaaaattttaaaattggagatgctttaagccacatttcctccatcgtgcttattgtcaaaagtaagaaaacaattaattattttaattttaaatatattttctcaaaaaataaaattcttactttttatcaaaacacttataaaagattttttttttaatctaatattaaaagccaaaagaaagttagagaaattaaatcaaacaatattaatgttgtcacttttatgttgaaatggagataattttactactttttttttattatttatttagtttaagaaagagacaattgcttcaataaatttaaataaaatgtcaaaaaataaataaatttatgttttgtagattttgtgttattattttaattttgaatataataatataaaaaaatttgtaatttgttcaataatcatgtgatattaatgtcatggaaggtatataatttaagttaaatttgacttaataaataaatcaatattatatttaactaaattttatatttttttctaattaatatattaatagtaaaatttagcatttcttaatcaaatgatgtaaaaaaaataaacaaaaatattttaaatacattttagaaatatatataaataaatatatatttattaaattgattagagtttatttttataaatatattgtaatatataaatgtttaaataaaaaaattattacggataggggtgttcatcaaattgcctaaactgctcaaaccgcccgcaccgcaaaaaaaaatgcggtttgaaattctttgcggtgcggtcgtggtttgaatttttcctaaaccgcgcagtgcggtgcagtttacggttttgaattgttaatatgcggttcaagttgcaccgcacattataaaaataccaatttttatatttatttagatccaatataactcaaagtctactaattattgaatcgttgacacttaatttttttttcatatttattttcaagccttatgatgttttgacaagttttattcaaagtttattatatttgtaatagtttaattatttagtgatagtctaaaccgtataaagcacaaaaatcgcaccgtttcatactattttttgcagtgcggtttttaggaatttttagtttcgcgaccagttgcacatcgaacaccctagcgatacgacacttttaagtactctgcattcttggaatagaaaaacaaattgcacattttaatttttttaaaaataaataataatggtaagagcaaatttaatttgttaatagtattaatataggtaaggactagggagtagggaggcatcacgggaataaagaaatgcatgtttggaattgagccgtctgataacggcggcggagcatttaatgttgttgtctatatacaattatcaacgtcactgactctctgcgccgaagcccaacggcctttgacggcgttatggggaaccataatggactactggactgctactctactctttagtcttcttctgtgcgactctgcctcgcacgtcatgtaacggcgtccgttatctgtgtgaaaccaaaggaatccgttatgacgtttgaattcccgtctctttctctgtcttcgtcgtggcacgcattcgtattggctcgtcttaacccggcaacggaatttcggttttttttttattttttttattttcttatttatattttggattgctaaatttggatttcccttagttggtatagttcatatgaattgtattgtcgtggggcccatcctggcttctgtattcaaggttattgctcagaacttcttcattatgtttttaccatattattattgtaatttacacatcacattacttataggcgcgtgtcatctacttcaactcttgaacttgaattttttcactaacgaaaatgtgtatattattcaaagagaaagtgttacatatttctcattacacttggttcttctcgtgatgatctataatttttggcgtggtacctttctacaccctggaaaaaagggggcgcgtgggatgcgtgtgtgtctgtatgaagctttgcaaatatgtagaatggccattctgtgcagtgtttggtttggtggtccttattaatggtggtcgaaaaggaaaataataaaagaaaagaaatgaaaatgaggagtgtgtggtcccatggtacacgtcattatagaagctcattaagcttagccacgtggtttggtcacttccgtaccgacgtgtcatgagcccactgctttcttttctattctcctcattttttttgcaggatattctgttcccaaactccttgaacaaagcaaaatagataagtttttattattattattattaaagatttaagaacgatgtaatgatcatattaattactcttcttcttcttcatttctgtcctcaattacttataagatgattgaaagtgtagtgtaacagattatggatcaatcaaaagctcaaaacatactatattaatttttgtggaataatcaaagatagcgaagtacattgttatacttatacaccttatatatgtaatatataaa

SEQ ID NO: 32666 - DNA, 2176 bp, Cannabis sativa
  modified_base (1920)..(1924): a, c, t, g, unknown or other
aaatgttccccattccaataccgttgtactagaacaagttgcattttttcatcgtacttacccgatttgtatgctcctgattcgagaacttcgaccacctgatgtggttcttcccagttaggtccgagtacacccaccgtactgtctttggtgtttagaaatactcttcttagacccatatctcccacaaagaatttctaagtcttcacttgtttgttcaaataccgagctactttttattgatggtccatcaactttaagtttgtcgtggttcctttctcttcgatttcatcaagtgattcggcaaggagtacatgatttacttcttggttgtacgtcaatcttctgtgggatggtggctcgagctctgcgggcagcatagcttcatatccatatgccatggcaaatggaatctgttcggttgccgttttctcaattgttcagtacgaacatagaacttcaggaagttccattggccagtttcctttagcatccttgggtcttttctttagtgtatccttcggggtcttgttgactgcttcaacttgaccatttgctcggggatgcgccactacggagaaacttttgatgataccatggttcgcaaaaaaatcagtgaaggactggctgtcaaactgttttccatggttcacaacaaagtcttgaacttttttggatgtaatggttgccagtggttcgacttccgtccacttagtgaagtaatcgaccgtaaccattgcatactgcactccaccttagcccttgggtaattgtccgatcaggtcaattccccaaatggcaaaaggtcacggattttttatctgagttaattcgttgggcagagctcgaggtatcttcaaaaatctctggcatttgtcacaatttttaacataggcctttgaatcttcaatcattgagtaatacatttgagctttagtggaatcctcgtctatacataattccctcaactatgatgtaccgtgcagccttccttctcatctttcgagcttcatttcgattatttcggagttccccagtgttgaggtaggctgctattggcgtcatcaagtttggggaagtatcaatcattttgatctcttccgtgcgagtaatgctaggctcttcaaggaactggataagaaccgagtttgctttatcacttacattactgcttgccaatcaagctaacgcgtctgcagttgtgttttcttccctcagaatttgtctaagaccgtaccgtctgaactgtgcgagcaggtcatgtatttttctgagatatgctatcattttttctccctgagcctcgtattctccaaatatgtgatttaccaccagctgtgaatcattgcagattttgatgtcttcgactttcatctcttgtgctagttttaggccaacgatcaaggcttcatattcggcttcgttattggatgccttgaatccaaacttgactacagcgtgcaggtgttgcccccaggtgtaagaagggtgattcttgcaccggatagttgatttgtagctgatccgtccacgtgtattttcgaagtcggcttgtattcactgtcacttggccgaggtatttgcactggctcgggggtgcctttcgatatgctttcttcttttcctatgcattctaccacaaagtctgttagggcttcccctttgattgttgttcggggtttgaaagttatttcgtattgacccagctccactacccatttaagtaatcgcctagatgcatccgccttttgcaacatttggcgtaatggtttgtcagtgtacactcgaacaggatgagcttgaaaatagggccttaactttcttgttgctagaatcaggcagtaagtgagtttctccattaatgggtactggccttcgacctcaatgagtcttttactaatgtaatagaccgagtgttgnnnnntgttttcttctctgatcagcacagcactcacagcatgctctgggacagctaagtatatcccaagctcttctccgtccaaaggttttgagagtacgagagggtttgcgagttgcgtttttagctcctaaatttttttttcacactcctctatcaactcaaattgtttatttcctcgcaggatattgaagaatggaacacacttgtctgttcattttgaaacaaatctgctgagcgcggcgatccgaccagtca

SEQ ID NO: 32667 - DNA, 2700 bp, Cannabis sativa
  modified_base (1388)..(1405): a, c, t, g, unknown or other
attttactatagtattgatgtttttttttggattatacttgagttggattgtttgcgaactccaattcaactttttgagatctgccttttatagatctataaattgaagtcaaaacattagtttaatgcatattaaactggatttccagttggattttagtttcgtagtagtttttctacacttttttttattaatttaaaacagcctctgttttgattgattctgttgtcttctcaggtgaagtcgccagaattaatggcggttctcttttttattaaattttcgtttcagttgcggtgggttgctgcgtagttgcgcgatagttgcgtgatagttgtccaggaagcatagatcctgggttaaatgtgtgtaagtggtatttgtgtaattttttttagttgagatgtatatttgtttatttggccaactgaaagtatttttataatattgttatttttttttttcagttaaaactaaaaaaatctctttttaaaaactggatgtggagttatataatcttaatttctaactttaaccataatataatcctatcctataggaagtagtgtagtcgtgtagtagtggctactagttgaaaagtgagttgtttaattagtcaacctaatttttgacttatcagttggataatattaatagctctattatataaagaacttgggttctaacgttgggtgtgtgaagtgtagcaataaaatagcaataaaagggaaataaaagggatgagtttatttctctctatttctctctctatatatatatatatacacactaaatatctaagaaggacgatgcatgatcactcaataatcaatatggaccaattgaatcttttgttttcatgtaatggatgaacttggcatgtttagagtgcaattatgagttatatttaagatcatcatcagataggtatgtggaacgttacccccaaaattatgtgtactatagtatatatataatgcacacagcgtacacaggcgtggtgcttgtatatttctatgtcggattcgtacatatatttggaaacacgccaaggatgaatcattgtccatttcgtaaactaagtgggagtcacgtgcacttctgataaataagtctaacatatcaaaatagtccattaataatgcatcttctgataagactctctctctctatagctatttgtgtggtttcatggtgtgtaggccgaactctcaaaaaggccagttatttagagatgtgttcatattaagatgcatattctagcaatacttttaatgatttttatattctccttgtctacttgttagaaattagtggaattaattaatattggaaaatatatattgtctcacatagattaaatgtaaaaatattgagccatatatannnnnnnnnnnnnnnnnnctcatcaccaattagttttgagatggatctttatgattctcatcatggtagactactccacttatcaccgattgatctattttgagatggaaccctatgattctcatcaattaataaattagtagtccatgaatcttttatggtttcactttgttatttatttatttattttttttttttgaaaatttagtttttaaaatataatttaatttattgtgaatattcaatgtgaattaaatattgtgttcttgtgtgcaatttagttcttatagttgtcctttttatttagaaaaattttcataaaggagaattttttttatggatagtttgattaaatgatttatttttggaaaaattggcttttccttttgcgagttactctttccagttttgctatgaatataacatattgtataatatttatatgcatggcatgtattaaaatttaaattgtgatcttaaacttctttggaaagtttccccgatttgtcattgcaaattgggattatgtcgttgcaaaatcagggtctattttagaaaagttttgtacagttgtaaataagtgttgttgttgtctctaaggtttaaatgtattataaataggacttagagaacagtcaaacgtactcatctcttctagtctcatattttcataccttattttgtgagaagattatttcttttgtaaaaacctagagtgttgaactagatttttattttcttgtactgatctcttgatgttcataaaatagattgaagatgaagagaagctttgaacaagcgtagatcttcgggaaaagactttttttaagtctcattttgagagaaagtgggcatatattttcgggaatagatctgtcaaaaactcacttcgagaggaagtgagcacgcatcaatagttgaagtagttcactacttgatgtatttcagagatcatattagcaaggtggattatgaatgtttgcggcaaattattaaagtgagtctatttttgtgtaagtcaatgttttttaatttttgatactttactaattgattttatggtcccgtgtgttggaaaattgttgtgccccaatagaaatattaaaccaacaagattacaactctatgataaataatacaaaggaaaaaaatatagatataatgttacaacactaaacaaaatatacacataaaataagaatagagatgaagagagattacaactcaaagtaaaaagttacacatgagacacaatatataaataacatatatataaaagagatgtgagagaaatctcaacaccacatacacca

SEQ ID NO: 32668 - DNA, 2535 bp, Cannabis sativa
  modified_base (1481)..(1505): a, c, t, g, unknown or other
ataaaaaaaaatatattatttaaagatacaaaaaattaacaataatcttttataataattcaaattgaagaaaatataaataatgaattttgaataatttggactcctaccaagcaatttgactccagctctacattttgctacagttgagttttaattcagcttcacgcttcttttatatcaattacttcaaccaaatttagtgtgactatactagtaaaattatccaacttaatcatcattaattctccttaaaagtctcgagcgactatgcatgacccgaccttttaatctcaagtattacacaaaaagatctaatctctttttttaattatttttgttttttttagtataaattatttttgtttcaagtataaattttagttaacgtgtaattattttttgacaatattatttatcttgtttttaatacttcatgaaattttaaaacgaaccaaataataagttatctaattctagatcgtttaacacaaaaattaaataaaaacatatgaaaaatattacaacatcataaaaactgttgcagtaggttcaatctcgtagtttgagcacttaattattatgtaaggtaagtaactgcactactaacaatcttttcagtcgcaaaaaacttactattcccaactactgacaacgatttaatagcagttatttatttttatcaaacgttgtaaataaataaaacctgagatttgatcacgtttcatgagcggttactaagataagaacaaaaggaataactgacattccaaaactcctacaaattgagaggggtgatgacaaattgagaggggtgatcacttaaagagagaattcttctttaaataatgtttcttactctataataaaaacctaaaaaataagatggactcgtgcactatatagatttaactacaaaaccacgaaaaaaaaatcctttgtcaatatataatatataattctgtatttagttttttacaatatatatttaatacacaaaaatacatcatttattgttaacaaaaatttaaattaacaagcttacagttaaacaggacgattgtaatatcttaataagcataatggtaaataattagggtttatatttttattatgagctaattaggtaataagtgggattatgatcctactaatctatttcaacataaattttaaatttgttacaagtggataaatacgcgtaatttattaattactgagaattatatagcatgtgtgaatgtaatatgagttatttgtggaataaaaatattttcagatttggtgaccttggagactcgatcgggggccaaaaatattatagcaggtttaattaatagattttttggcaatattatgataagttgatagtataagtattggggtaattaggagaatgtgaaatttaatctaatgccttaaaagtagaaatttcttaatgaataactattaataataaagttttattattattattattnnnnnnnnnnnnnnnnnnnnnnnnnttattattattattaaagtttattaaaaacatgtatttgatatatacatgttatgttttaaaacataaacagttacgaacgaaaccatccttcatcggtgcgacaaaaccctcctctctattaatctattttctttgattttcaattcaaaacctagtaattcaagctctggtagtagcgggacaataaatcatcaaagagggaaagcttgagataaagattggtttcgagttaaaaacaattagttttatatagtgactttgtcatttagagtagttatgaagatctgacttcatagaattgttctttggtagctatgggactagttttgatgtttacttgttgaatttgaggtgattgtgagttaaaaatcgagtttggaactttttaaagctcaagtctgagctttaatagagttctccgtttatgggctcgattttaatttttgttacgtaaggattgttgtatatatagtatacatgtgtcttgtgaaagtttggaatgatttggataggtttcgatagtgtttctaagagtgcaaaatttaggatttttgtaggagatcagaaatcgtatttttgtcataatttttcactcagttgtccgttttgaacattctacatactatttcgaagcttatgacgagctctacaatatggtgtctattttagagccaaaatttaagttttattttattgtacttatactgcagagtttggtagaaaaccctagattgtcttatgtgaatattaagtagtgttttgggatagacacttgttggtttactgttattatgacatagggcctgtgattgtcgatcgttctccaagtaggttggccaacatacctgatccaaaacatgaggtaagaaaaatataatatacaaaatggcatgacaagttttaaaattatcgattatctgattaggcaacgacaatgtgaatatgatatacaagctcacctaattaagtgatgtgatatataggtgtcaggttatggtacatggttacttgattgggaaatgtgatat

SEQ ID NO: 32669 - DNA, 1894 bp, Cannabis sativa
  modified_base (632)..(634): a, c, t, g, unknown or other
aagtgaggataaatctttgcaaaatgtggtgaaacaagttcacattagagacgatgatgggatgtgagtttggggtggtgagagttttgattcacataacattagaacccttcttttgctatatatatagatttgtaagaaagaaaaaaaaaccagaaaagaaaatataaaaaaatatatacatatatgtacaacaatagtagtaaataaaataagagagaaaaaaaggcaagtttaaggctaagtttggggtgtaccaccccctaatcgaagaaacatattgttgccttttctctctttatctagttggtttgaatatatatatatatattatatacatatagcaagagaattggaattggattgagtgatcattgtgggttgaggatgaaattttgggtgagtgtttgagaggaaaagaaaagtccttgataaattgtggtaattaggtcatgagcctacgaaatgtcatcttttaccaaacttgaacctaagcctcacattacaagcctattaaagtccttttgatctaggatgtaaagctaagctacattagtggagagggttgcgctaattcaacttatggaagcaaactttttaaacttgaggatcgagggtagttgttatagaannncaaggtgttggtgggaagcatttgtacactttattgattgaattattcttgataagtataaaggacatagatagaatgtaaaactcgattgaaacacacaagttcaaggcatattcactaccaccaattcacttccattccatctaattctgagagcatttttgttgctaaaccaagtttaaatgcaatatcttctctgttgcaagtgtattatggttgctgtcatgtttttcctttgttcttattatttcgttctttctgtttctcattacttgaggacgagcaatactctaagtttggggtgtgataactctatggtgtagagttattttttatgctttaaagctgaaaatattgtgaggagagtagtgaaaatgtgtttggttgcttaattttaagtagttttagtttaatttctatttagtaagctaacttttgagtctattaaaaattattgtattaattgtgttttttttaattaaatgttgcttgtttgtttttggaaagaagaattaacttgctaggaaaaaggaagtgatgtaaaggaaaagttggaacaaaacctgaaaactggacagaaatgctgaagcaatgctacagcattctgggcagtttgggaagtgacgtggaaaaagtctaaaaaacgaatttcacttatccacatcagcaatttcatcccagtcactcaaagtatgccagctggctactgtggaaggaaaaagattaaacctagtgggccaaggtggagaaagattgggcttccatttttagtgtatcattttgtaccctaaagacccaacaaagaagaaaagagatgaagtacacctccatcatcatgaataaggcagctgccatttttagagaggagtaattgtagaaagtacagagagaagaaaagagaagggggacctaagtgcaagagaaacagaaggacaaaagccctattgtttgcatttcttttcccttttcttctatttttcttttcttttctttcttgtcactaatttctagaaacttgatagttgtaaaagagaggcagtagccatgtatgaacaattcttaatttggattgtaatttttgtgttgaacatgagctaattttcttaaggcttgagtgactatggactgctatgttgggtatgattaactttttaagcatattttagcatttatgcctttgttcattcaagtgagttctcatttttatttgattgttatttcttggccattaataactatttgctaagctagatcttgttc

SEQ ID NO: 32670 - DNA, 3054 bp, Cannabis sativa
attgcttcaatctggattttcgaggctcgattgagtgattttgcacgataaaaaaccgaaatcaaatgtttaatttcagtttctccacggttttctggtttttttgttttttaactttctgtttagatccttggatttgttcgtttccaatcgaaattcgccggaatttatggttgttctacgctcgatctggtttcattctggttgcgtagcagactggatcgatggaggttccttcatcgtctccgttcgtgacgtgcggctgaaggtataggtcaggtggtatttttgtaatattttcaatgtaggctgtataaatgttaattggaccggcccatagtaattttttccctattttttattaatagatacaaaaaaaaaaaaaatatttttcaacttaacccttataatattccattttttcccaattttgtaatagcccatgatttaacttgttactaggccctatttgatctggcccatcttgcattacaacatataaatagggtcatcatgttactaattatttagtcgctgaaaaactctaccaagtatttaaaaaaaaaatgaagaaaatgaaaatggatatcatccatgaataatccactgttctataaaatataacagacctcatcatcatcagccatcataaattacttacacaaagtgaatgaggaaataaatggtaataaaaagaagaatgaaaatggataaatacctccagtatatatcaaattaaaaagaaaaaaaaggacttttaaacattccaacataacaaccatgacagtcacaggtctcactcagtccaaatatttaaggaattaccagtagtctaccactaccagactcaaaatgatattaagtcatcctttgctgcttgtttcttaccatcttgcccaccttctgacgtaccgccactacctttcttcccgaatatcatttcgtcaaggtcgtccatcatgtcgtcgttgcttcctccctgggatccaatccgagagccagctggctttcggaccaatgcctcttcctcccttgtatgccggggtgactcatcaggctcgacggcaacaggtatcatagctggttctggctcagctgaaacatctaatggcttcttcagctcatcatacttggacattactttctggatctcatcgttcacattcaatgcctcgaatagcagggcctcgttatctcctgcagtttcaatcattctctgtatggtagcctgggaccgacgacactgctgtacaagtgtggttgttaagtcatcctgccaaaggtaagaaatttatgtcaacatatgatcaagcgtaaacactatcatctcgtctggacattgtcttaacatttttcaatcctgtttgaactgaatatgtccttgtgtacccaacacataataccaaaccggctttctttgccacccaataacaaggtcaggctaacaaaatcattgaatttgtgcatctatactacacagctacattaattttgctttagttgatagccaagcttggtatttcaattgaaagggataatagattagaatcagcacatccctgatcatggaagatataactatgggacagacaaaaaagtgaacaagaaaagagtaatacctgtagaacatcttgctgtggtgatgaggacaagactgtagaaagaagctcaatgctgtttctcgcaacatcaaatgcttcctttgtctgttcagctgtaaagctttggacagggggctcacgctgaatttgctgcaaaagactatcatctggttctggaggagctgaaactgaacgagggggagtaaaaataggtgccaggctctccatgtcgcgaccagggaaccgaattccccttgattttagactctgaaattgaaagggcacataaggttaacagcacacgtacgaagaatataaaaccacattgccttggtttagcaatttgaagtcaacaacagccagatgtaaaatgaaaacaataagaatgaaatcccataaggtacagtgctgatgaataaaactcctagtcaattactgtcatcttgatctagaccagtaggaatcaaaacaaaactgaaaaacaataaaaaagagcaccaatatccacacattgatggatagattaccttgtatgtttcttcaaaaactggcaaataacggagctcactagttgattccccccacgactcgatcaacatcaaagccttgttacgattgttaacaacagtctgaggatcatcaatgagcttcaccatctcatcaagaactctctcagccgccacttccgagaaagccttctcacagttcttgacacaagtttcaagtagcactaaacccaaatattgaaccctaggattcttcaaaacaattcgcctttttatcccacgaatcagttcaacactgttgagtttctcagtattgatcatgtcacaaatatcaagatttaaggcccagtcaggctcctccagtgcctctgaggttgcatcatcgacaagcttatccgcctggtttgggccttgaaagagctccttcatcttaaggctcatcgaactgattcccgcagtcatctttctacccacgtcggccccttcaatcttgagacgctctccaaaagcactcactttctccattatattgtcactcatctttcaaacttttttcactgaattattactgaaaacatgccatatatatagtattacaatcttaagcataaaagaaactttgaaatttcaaccaaaaccatcttatcagtagaaaaaattcaaaacttttaacaaaattaaagacttttcctttttccttcaacaaacaaacagactaaaatagaaacacaaaactaaaaacaaaaacacaattcatagttaataataatgaaaaaaaaagcacaaatcgtaagtagagaaggtgggcaaaaaaatctcaacataaatcatcaaagtaaactcattcctttatacagaaaaaaaaatctacaaaaccctaataagtggagggttgattaccagtccagaatttttttttttcgaattatggtctcaattcctttaat

SEQ ID NO: 32671 - DNA, 1566 bp, Cannabis sativa
tgtgaagaattccaacaacagaagaagatccaggtttagagcttgatcatactctgcgacagaaaggatcaagggttaaagatctaaacggaaggagacattatattccgctgccaccaatgtaaagttttctataaatttatatgtgttatttaattgttttagaaaaatcatatttaggatgttagattacagttctataattaacatacaagttagtaaatctagatcctggtaaaataagttccaacaagatgggggaacaatgctcgacttcatggactttgcaaaactggtggctgaggaaatagttgtgcaactagaaaacaacccatagagagaggctgaaatcacttattgtgacaaatactaatcacagatcctcaacatcctgaaatagaaaacgcacaaatttacaacgacaaagaaacattacaaagtgtgcttagtttctatgcaattagaaacaacttccgatacaatgtcaaaaaatcttgtgcaaaaatatacaaaatttgttgcttggatccaaaatgcaagtgggcactaatggcatcaaaaaaatggaccaactaagtctttcataatccgtaaatatgacataaaggtgatacacacttgtgatctcaacataagatttgcagacaagcgataggctacaacaaagctgattgaaaactacatcaagccaaggttcaccagcataaaaagaactcaaatgtcacaagacatcagaggagaagtaaagagcacgcacaacaagaattgcgcagaaaagatagagaatcatacaatctgcttccaagttttttgcacatgctgcaaaaaaccaatcctggaaccatagtacacatgcaaactgaagaagataacaacttcatgtacttgtttgtaccactagatgcttcaataaaaggatggaacaagtgcaaacctataatcgtggttgatggaactttcctgaatcaacatatgaagggacattgctctcagtttgtacacaagatgcaaatggacacatttttcccctagcattctctattgtgaattcaaaaaataacaactcgtcgaaatagttttttacaaaattgagggaagcatatgaggtaagagaagaaaagtgcttgatcccagaaagaaatgagagcataattaaggcttcttctcatgtatttctagacataactcacgggtactgtgtataccacctattaagcaacctaaaagcaacctttaagaagaatgtcagcaaactcgataaaccattctttgtaacagtaaaaccatacacaaagaggaaatttgaataccatatgagcgagcttgatagcttgaacaagcgtgttaggccctatttacaacaagttggataccacaaatagtcaatgtattaaagcaaacacaacatgtatacaactatgacttctaacatagctgattaatctctaaactcagcaaacttagcagctagagaactaccaatcactacactaatagagtcattgagagctttgatacaacaatggacatacataaacaataaaaaaacatagaagacaacaaaaa

SEQ ID NO: 32672 - DNA, 1122 bp, Cannabis sativa
gttattgaagtccgaacttccatctcgaagatcccagagtcaacctgggggtagggctagggtcccctctcaagttgactgctatgactcgggtctactcaactctgtaatgtcatcattcatgccacgtgtcaaacattgatgtccacgtcactagaaaaagtttccaagttaacaaatttaatttttctttaatttaagtttacgtaattttcttaatcattaattgatttttagtttaatgattttctacacatacataatttgttttttttaaaaattttaaattatacacatggcactgacgtggcaacggataaagagactatgtcaccattttatttgtcatgtgttacaaaacttcatagaataactaatttaaaacacagtgaataagttaaggaccatttgtaatgggtaaaaagtttaggaggtacaataatacatatgtcataattggggataaaaatccttaatagcctttaaatatttgtagtatgattatacaatgtttaaataaataaatgtttttattaaataaaataaatttaagataagttatttgtgtggtatgattttattaaaaacaaaatgttaatttaattatacttgtatattctaaatttatttataagatacatttaggaaacttaaaaggactaaattacttttcttctctcttatttggtaaagtgttcttgctaatatattaaggaaaaagaacaacataaattcttgtaaatcctatgaacccatattaacccttgagtgttgaggatgacttgaaagactatggtatgagtttccattattatcactggataggaagatcgaatttatacgaaaagaaagtaaggattcttgatagccatcaagaggtgattttcatcactgttttgcttcctggtttaatatatgacatatacggggatccttagggttgtacaatcataatcaacaataaatatttttgctacatactttatttagtaccgcaaaactaataagaattttgaaagaggaaaagaaaagagaaagaatggggaagaaggagaggctctagggtatagggtgttagagagtgtgagccacattggtgaagcctttttgggctgccgcgat

SEQ ID NO: 32673 - DNA, 2571 bp, Cannabis sativa
tcttttattgataacaaatcagattagattgaaatagattttatttagagcataaaatcccaacacatacattggaagaaagggttaacctacgcaaaatattatggttgtatgtggatttcatatgctgttcacatttgtgtgggcaagatgggaaggaatagcacatgatactcgtatatttcttgaagcattaagaaatacaaatctaaattttcctaaaccagctaatggtatgttgtaatcacttataaatatcaattatgtgaatatgatttgaaacttaatttaacgattttttatcttattttattgcaggtaagtattatttagttgatgcaggatatccaaagatgacaggttatttagcaccatataaagggcaaagatatcatcttcctcaatttcaacaaggtagtcaacctagtggctataaagaagtatttaaccatgtccattcatcattacatagtgttattattgtttcggtgtatggaaagcacgttggcaaattttgcatcgaatgccaagttatggatatgataaacaagtagctattgttactgcttcaatggctttacataattttattaggagggagattattaatgatatggacttttcgtcttatgatgaagaaaataatgattttgtagacgatgatgtacaaaacattaacttagtaagagatgagagtgaaatgggagttgtccgtgataaaattgcagccgaactcatgctgagattaacatgagtattagtgttgtttttgtaattatgtaataattattttaaataataattatgtaataaattaaaaattggttttgtttatatatttttattttattttttaagaatttattttttaaaacaaaaaaaaaagaattatattattattattattattaataaatttgatatatatatataaatatattatttgtaagagcatttatattctattaccaaacacttataaaagctcttcaaatagaaaagaagttcttttgaaattgagatccaaacattaaatgaaaaacttaaactttacttctcttcttctactgtctaaaagtaaaagtataagttatgccgaacaagccttattattagttttctcttctgcgtgaagaagactttaaagcaaaggcatatcaaaatcgatccagagacaagtattcccccctccacccccacaacccctaaaattgtaagcctaatgaaggaagaacagagaaggaaaattaatattatcaatggggattttcggaggtaacaagattagggatagggttttgggagttacaaagagagaggagatcaatgttcttgaggagaacaggagggccttgagggcatcgaatggtttaagggaagcgttggggaagtttaaggggacaaaactcgcagaacaagtaaccgtaactgaatacccaaggaatcgtagcatcgctatgatagttttgtaagaagacaaggcattccagcaactccatcattaccgaccaccagcacgaccctcttccgtcgttcaattatatgtaatgtctctttagttcaatagtcttaaattaaaggtaaaatctttgtttatacatatattgaataataaagtattttttttaaaaaaagttttgttttttctatttgattgaatcaattattgtttctatggtatcttaaaaataaaattttatttctatggttaaattttaatattttcgatattataataatcattcaatggaaattttagtgatattttttttatttcatttatgataggttgcagttgcaacagtggggaatgaggaacattatgttaaaagaagcacaaaaagatggaaaaccttcaaggctatcaaggattataattgaaatgtctctgtgtttgattacaagtttaaggagagataattggtaagcgatttcatattattaactctatttttagtaaccatcttttaaaactaaaatatatatatgtatgcactgattaacatataataagatttatttttcattactcttctaaataagaggtgatttttaagtaccacactaatgtcatgtctcccttttcctctttagagttatgctttataattcaaatcaaaattaggatacaaagaaagttgtatgattaataattgaggagtgcaacccattgtgttgctctgtttgtggttttttaatagtccaaagaagtacatattgtatatgtgtattatgatatatttttttatattgttttgtttgatgtattgtgtataagaatttagagtatacgcattgagttgttacactctatgtttgtatttgtagtgtttgattataattattgaagatatgattctattttaatacataagcaagtttatttggagccctttgtctttagatcagaaggaatcagatcagaaacagttagaagatgtttcttttcttttttagctgataagaaggcttcaaaacttttatagtaggacttgaggcaacctctataggcatttgccagtagtcttagttttcttaataatattctattattctgcctaatattagttt

SEQ ID NO: 32674 - DNA, 2469 bp, Cannabis sativa
  modified_base (26)..(45): a, c, t, g, unknown or other
ttagggtgttaatcaatatacttgtnnnnnnnnnnnnnnnnnnnntaaaataatttccaacagttgtcttcctcggcctttttaggggctccatgtcgacatataatggaacctctgagatggtcaacctcttatttccctttttgcctgatgaaagaaagagatgtcaagattcatttctgggagattcattatgttagcattcatttgaaaaacgagtatgaggagaaattagggcataatctcctgcctaagggatttatcataatcataagaagacatagaggaaggactataatatccactaaaatccctacaccccgtgatcctgaatatgtcataggagttaaatagttctaaatcccaggtcgcatctaaatgacttgccctatccagcatggtttcgtactactcagctatcccatagaacgagtcagtacagctaattaggacgtggaaccttgggtactaactatcaaacctatgtgcaatgcactctatgaggaggggattccaagtgtaaaaattgtaacgactatctcgaaatgacactaaagtgttatgctcagccctaagcactgtgggtgaccaaccacattgattacctcaggatgctccttcttcggcttctcgaaggacgacattctagaggtaatgtgctcgagccacataatcctgaccttccgcatcggttgggacgaaaaacctgctaccaagaagaatatttaagatatttataatcacaagtaaactccttgtcagtaaggagacccacagacctcaggttggcctcgttcaaaagaaacttagatgaccgaagaccaaagggaagacccagcagcagcctgcgttgctcgaccatctcgggagtcaaaactagtcttttcgagaaagctatcgaaaacaaaggcaaaaagatcagaaaaactagagtaaaaatacatggaataatttaaccaagtcttaagcaaaaattacttatgtattatgcgaaaggtggttgtgctgattggggaaagaccagtcgtccagaagaattcttctttaaaaggagttttatttggcaaacctacaatgattacaatcgcctgtgtgagtcccacgatagtgaaaaacccctactgcattcttccttgtaggaacagccttgacagagtaaagatactctattttttggggagtggggcactcccaattcaaaattttgtacggaaccttcaaacttgcaaggattctgtatgaaataggattcaattggaatagggcaagcccaagatagtttaggaagtccttaaagtagtctcgcagggcgatgacggcttgagccctgatgtgttcgaggatccaagcgcctatcccggtcgagccacctgtactggcctcgccactggtccactcagatgcttcaggagaaagtcgtactagttggtaacagctgaacttgccaacagccactgatctaacttggcattcccgcttatattcaatattgcaagtcctcggggtattacctacgtaatctttgatggctcgcaccttcaactctattagtttagcctcaaatgtgatgttaggatcctggagagtctttgattttcaaggcttggaggtcatgatttcaaagtctaggtcacctggttcaaaagtaattgtgactctgggtaaaaataaaggcctagccagaggaattgacgataaattggagggtttaggccaagcagcatctcgtaagaaatgacgttttccttctgtaatttcttgcaagaagcgtttgtggcgactaacaatgttatcttggtaggtttttactgagtgttccctaatttatacatcatttatctctaatttggatttgggttctcaaatttttggtttatatgggatggcaagtttagtgggacactctatttctaaatattctggacgataaacttctgaattagattgggacattgctgcaaagagaaagcaatcccaattactggatgaaatttatcaaaccagaagttggtaaatttgagagacacaaaaatctacgttctgcctaaaccctaaaatttacccagatacaattcaaccctaaaacagctaaaaccagataaggagataaaggtactaactaagaaactagtgatcaaacccagaaatgcaaaattaaaagcatgtaagaaaataaagagaggaatattttactgtttgaagctgggttttgggtggttctgcaatcgacaaaacaacaaacaatgatccctctgaatgcttgagctcaaaaatcaagtcggacgaaactcgcaagaaaaatgtcattgacaaagatggcatgcaaggtttcgaaataatatgggtatgaactttgcataaaagcttgaaaaatttccagaattttgaaatgtcaaaggtaatgaaaaggtggttcttcttttttcgttttatacttttgggcttgtaacatcccgatttcccgagatg

SEQ ID NO: 32675 - DNA, 2162 bp, Cannabis sativa
atgttatttaaaaataaaaataaatatccaataaaataaaatgataaataaatatcatttatctgattttataatttaatttaaataaaataacaaaattttgaaagttagcgaaaatatctggttagattttaaagatttgtagattaaaataatcttattttaaatttatagatattctcttatgtttaatgactcactgcatggatattttgaggggaaagggtctaagacagggagatccaatgtcaccattactctttgtgctaggtatggagtacctctcaagaataatgctaaagatcggatccaaacctgacttcaaatttcaagatagatgtgtagaacttaatccgaaccacttgatgtttgctgatgatgtcatactcttttgtcatggagtttacaagagtatttactatatgctacaagggttaaagctcttttcaagctcatccggtttgcatccgaacccaaacaaataagctttctattgttgtggtatggatgatcatgatattcagcgtattgttgattgctcagggtttagcaagaaagaggtacctttcaaatatttaggtatccctgtctgtgctaagcaaatatcaggaaaagaatgcatggttttagctgataaaacgatagcccgaataaaaatctagagctcacggaatctgtccttagcaggaagggctattcttgtgaactctgtactcatgtcaattcattcttattggagtcagatcatggtattaccaaagaggccaattagagatattgaagctatctgccaagcttatttatggaaaggccatcatgtgacacagggttctggacctattgcatgggatcatgtatgtcaaccaaaagcagggcatgagatattggtttgaagaaaattgcagaatggaacattgcagcaatgacaaagtatgtgtgggcaattgcgaataagcaagataacttgtggatcagatagattcactgtgtatacatcaaagatgagaattggtgggattaccaagccccacctcaagcaagctggtgttggagaaaattgattgttgtaaaaaatcaagtcaaagctactatggatatacaaaagtttgctgcgggtaaatatagaatatccaatagctacaaggctcttttccccacacaatccaaagtttattggagtcatgaggtatggaatagacttaatatacctagacatagcttttacttatggattgctatacaagatagacctagaacaagagaaagattgcataagtttaatatcattgatgaagatttctgtttgctttgcaagaaccaaactgaaacttcagaacaccttttcttctcttatcctttatctttgtctatgtcatgtgaaatcttggctgtgatggaatgttgaagctacagaacataacaggttgttaagatggctagaaagagcgaaaaccagcaagctccgtaaagctatttttactgctatagtagccgcattagtgtatcatttatggaaaaatcgaaatgaagtcttgtggaattcaggtcaacaaacacaggaacaagtaactcatgctataaaagttgaagggaagagcagagtggcctgcactatgccaagaaaagttcagccgattgatgtagagtggttctcaatgctgtagctttgctctttgtattatatagagttaatttgttttgttatatactgaaatcattgtatagatagagcattcaagtcttcaattgaagatgctaaattggttgtaaatcgatattttggagtagtgcatttcattgattgaccaaaaaaaaaattcaaataaggtcaatttataaaattaattaaataatttaaatataaaacatctgaccttaaatttaaagaataagataaaataattaaattttaaagataaagataaccaattaagcaaaataatagactttatctattttcaggttcaaaaactactaatatcttaaattaattaatttaattctgataattagatttgaaatttgaaaaatgaaaatcaaaatacaaaattacacaaaaaaattgaaattaattccatgaaaaaatgaaaaaaaaaattgcatttagtgtggtgcataccatccgcgagcctaggagagatgcacggccgagaaaacacgca

SEQ ID NO: 32676 - DNA, 1116 bp, Cannabis sativa
ccaacatggatgatacctatcacagcttactacaaaccgaagctttgccaaaagacaaaaacgaggcaagcaaactaagaagaaaagcgaaaattgggataacaaagaggttgcaacatattaaaacattatctttcattctttttaagctttctcaaaatacaattcccaattataattttcctcaaacttatttgaaactcatggtatagttaggaataaaaaataattgttgaattttctttttattttttgctcaacaagtgtgtattaaagaaaaaaaaaaattggtttaaagctcaaaagggttaaactagggataatcacaaaataggttagcttgaaaggcataaacgttctaaaaaaattgcctaaattatttttcaaagcataagtcatcaagaattttgcctcaaaagtcaaacaatacaagttcttttaaattcaaactaacataccaccaaccctaatcaagcatatataataaaatacaaaatattgtatttgtaagacatattaaaaatttcctatcataaattttaaattaaactcaaaaatagttgaaccaagcacacgattattagcgattttcgtttcacaggaaaagaaatgcaatgtacacaaaaacaatggcttacaaacaaacaataacacaatcaacaaaacaacaaaaataactaactaaaaattataaattataagtccctcgtccaaactaaagatttacattgttctctatgtgataataaaaataaagagagagaacttacctcaaatatacgccaaattaatgagtggttgacgcccataataattgtcatgcatgacaactcgaaagttttgatcatgaatgccctcaagattggcacgatatgagtttgtaccatgtttagaaccaacaacataagaatttgaaggatgagtttggggagaaacatttggtagctcgtagaggatgtaatatggtgagggtggtattgatggaaaatatagattcattggtggtgtaaaagtcaatatcattgatgaattcaaatcaatgatactaggtgtttcctcatcctccaatgtgacatttatttcactctcatctaacaaactttgtttttgttgctc

SEQ ID NO: 32677 - DNA, 918 bp, Cannabis sativa
aaatagtaaattaatttgtctcgttaagtagtgggttgggcgcacattcgtcggtcgactcgcgtgtcaaccatataacccaattcgctcattcgtttgtcgcactaaagtgtatagaaacaataaatatatactagtttgtccaagctcgtgaacaatgggagtcattttgagggttgggtctaggaattgaggagaaaaatcttaagggttggatttgtgtatttgagaggaagaagaagctcttcagtgaagttgcgtctttgtattaagagaaaaagaagaagatgatgtaatggagaaagagaagaatttttttttaatgcattaaaaaaattattactttttttatctttaatttgtattttataattaaggttatatgtttaaattttttgatgttttagggggctttgttgtaaatatattaataatttgaatgaaaaaaaaagttaattgctaaaagaaccttctttaataactaattggaaaaattaattagtaattataattaaatttaatttttaaataaattaatcttaattgatattttataaggaaataaaatatgataataaatgaatggtagtttcatgtcataggtaatatattaatttttttttattaattctttaattaatcaaatcaattcaataatgatccaatggtcaaaattaatataaccatcgtggttacatatttaacgtaaccattgagtagtcacccttatgtttatttgtacaggtcgttaaattatataagttttcataagttggtttctaaattttattttttggtaaattagtctccaaaatatataagttttggtaagttggtcttcaaactttatttttttaataaattggtccccaaacttttattttttagtaacattaagtccccactcttagatattaa

SEQ ID NO: 32678 - DNA, 2589 bp, Cannabis sativa
ttaattgctgacagaaatctccatatcaaataaatttttattttagtatttcagacatatttaataatttaaagtcaaatgcacacctgctatcttacatgatatacatgcagacatattttaatccaataaaggtttaatgaacaaaatgcaacaatgctagaacttacctgtcagctcgttctcagaaaccttcaacttacatattgtacgatctactctgcaaaaataaaaacaaatttcaaaaaaataaataaattaaaaagaaaacaaaggacaaacataggatgcaaatgatcacactttctttcagacaagatttgaaaggtcaaacaagagaaactagccaatgaaggattccataatatcactaacactgaatccttggacaacatcattgtcatcacctagcagtatgatacaccacaagttttcaagactgctttatgcatttataagggtgtctttttctttcaagtaaaaaaaaaataatgcatgagtgatactacaccagtcaaaagctactacgagttcaaaacaaacaaagaaaagaaaaatacataccataattttatttaattaagaagagcaacagaagaaattacaaaacaaaagaaagtgatcatgttttaaacttattggttgcaagataaccattgtgggcatttggtctagtggtatgattctcgctttgggtgcgagaggtcccgagttcgattctcggaatgccccaaattatgttaaaaatgttttacatttattttagcagttctatataaatctgctagctagtaaaatattatgtttaggatctaaattaataagactgcaacagcttttaaatttaattttaagcacttttaagcataatcctgcaatgttgaacattaattaatccacaactaatttttttattagaatctgaaaattaaattagatttgaaaagtcatacatgagaaacataacctatgaaaaatactaaaaatattgaatccttgataacaccagcatatgatcatatctgaaaatgcaagtgtgatacacaacataattctgagaccatctgattcatttataagagtgcaaaatctcttctctttttaagttaaaacgaccttctattatatgagtgctaaaacaccaagggaaaatatgcattaaggattaacaacaaagtagagaagaaacatggatgttaattaatcaaacaaaagtaatcaatcctgtattaaaaacattagctgcaagataaacatcagagggcatttggtctagtggtatgattctcgctttgggtgcgagaggtcccgagttcgattctcggaatgcccccatcacgcataagaacattttttacaattatattatcaatccttgtaaagggatcaagtaattattagagtattcttttagatcttaaatacttccatcaagttactaggaagactgacagcagcttccatatttaatattttacattaagaataaaccttcccctgttttagaaaaagacaacattattcaatcatatcttaattttttattaggatgaaatgagcagttttcttccagatcagatttaaaaagtcaaacaagaaaaccctaaaaatatgaagtatttgataactttgtatccttgagaaaaccatcatatgatacacacgaccaaattctgagaccacctgattcatttttagagtgcattttttttttccttctgttcaagtaaagacaatactctattatatgtaagttttacagcacaaagggaaaatgcacaataaggtaaaaagaaaacaaaaatagaggtaagataaacaacagtgggcatttggtctagtggtatgattctagcgttgggtgtgagaagtaccgagtcaattctcagaatgccccaattaggctcaacatgttttaattttacttatcaatcattgaaaaggattaataacaagtacagtattgcaatgggaactaaaatactactccgtaaattaagcacaaagacagcacacagcttctattattaatattttacataatttgaagcataaccctctcctgccttagcaaaagattgtgtaactcaacagtaacaattcacacatctcaaacatttgttaggatccgaaaatgaaaagagaccatgctttcgtccagaccagatttgaaagtcatagaagagaaacctaaacaatgaaagatccaagaaacattggatctttggtaaaaccatcatatgacaggtgatcacaaagcatgtatatttagccacaaaattgctagaccaatatgtttattagtacgattaatattttttcctttgtagagaatgagattttccattatgtttgagttttacaacaccaaggccaaagctgcactgaatttcaaaccgaacaaactagagaggagaatggaacaagaaagaagttaattatacatagaaacaagagaaattataaagaaatcaatctgtgtaaggatattggatgcaagataaacatcagtgggcatttggtctagtggtatgattctcgctttgggtgcgagaggtcccgagttcgattctcggaatgccccaattt

SEQ ID NO: 32679 - DNA, 1876 bp, Cannabis sativa
tgaggtaagcagcttttttattagcttctacaatttttaaatatttttattataaaataatttgattttaatgatatccaaatctatcttatttcattcaattttactaacgtaatgattgtccttgttttaaatcgtgctcccgaactttgatatattaaattgtgaacctcctgagctttcttccatgtcatacttttgttagtaaaattgaacaaaatctttaatttaacaatctcaatagttcatgttagagagttccacattgttaatgtgtggaaagaataatagaatatataagatgaataggctacctctcccattaccaattggttttgagatgcaatatcattcactttatcacaaatcctaacagttcaagaagaacttttataaaagttcgaaaaacatgatttggtacatgtctaagttcgtggaacaaatcctaaatttagccattttaaaaatactacatgtttcttttgataaagggctttattatttatttatttttttctaagaggcacaaaatctcatgattgttaactgcatatacatatataaatatatccagactgtagagtacttactttctattgccgagatggagaaggacatcttgaataggaaaggttataaggcctctgatctccttgacgaccaaccaaatgacttcaactcctaccaactccaatgtgtgatgaatgtgaagcaaccaacgtctacatgtcataacattactaatagtaagaataacaataaatcattattgagaaagcaatggattagtatgcacctaaggaaacataggagggaatggttgaaaaatgtagaaggatcaatcacggtggtggccactctcattgtggccaccacatttcaggcggcagttaaccctcccggcggtgtctggcagcaaacatacaacaccaccaaagcaattgaagactcaactgattgcagcatcgaaacatgtggacacaaaaatggtacttgcactgaaagaaagatatgttatgcaggaacttcgataatggctcaaatcgatgactaccattatgccttatttgtaaggttcaacagcatagctttcttggcttctctaagtatcataattttgattattgggggagtacctatcaacaataagttttgcatttggctctttgatttggtattgtttgccactctattttgcgtgggtcagtctttcttatatgccaatatcttagtgactcccgattatggtgattattatgaaagccttaatacggtgtacaattgctccatttatgtgtgggaggggatgtttgtgctcatgggagcttggcatgttgcttaccttgttattaagcttcaaaaatggttgcccaagcacaagcacaagcacaaccaagagaaataaaattgaagtaagaagaaaatttcaaaatcttaataaaagttttagaattaaatataataaaatgtaaaagaacacatagttattatgttaaaataacttttatgtaatggtattttatatttttaccttacaaatagttgcaggatggttcaaatctcaagaataatattttagttcttttttaaaaaaacaatataaaagtgaagtattaaacctgtgacctccttaaacttttaaaaaatatttactactatactaaacaatcttatttaatattatttgaccaactcaaaaaatttatttagccttaaactccaaatagtttaggataggtcctactttcaggtgagacagtagtctaaggtgccttataattaattgatattttgttagcttattttttattaaaaaaaatgtagtgtaatggtattagtgtattagtgtacgtgttaatgcaagttaggttagtgt

SEQ ID NO: 32680 - DNA, 1442 bp, Cannabis sativa
cctagttgagaaattatagatatctctataaaataatttaccaccacacacattcttctccatacatgatttaaaacgtcagtacagaatgaaggagctattcttatataaaaaaaatacatgtatgtaattttcttctttgttttgtttccaaactcgcctattcacctcatcattattttcttgtatggtttttcatagcagagttggctcattgatatactcctgtcaatattttgcattcaaattcattctatctacaaactccttaaaattggagctacttcacatgttgtttctaattagattttgggaatgtcatagaaaataaagcaaacaaagtatgaatcatgttcatgtcaacactgggtagacagaaattcaacactaaaatcaaatttataactatagttaaaagcatcacaagagattttaggatagcaaaaagagaaacattaatctacaaattttatccattatcatattgacgtttacaagcaaaaataataactttaattattgtgttaataaaaaatctgattccaaaaaataatcatctagctttgtgtaataggtaaaacacaatttcttgaaagagactttcttaagaaaatataaatggtgatttatttcattcatgaatctccatggcagatttaaaatcaattctgaagagatttatcacaaacaataagctactctaaattacatgtaaacttagataacaaagttcatattagtaaaaatcctaaataaataaaaataagaaggatccaaataacaaaataggaaaacaagacaaattgagaacagaaaagcctcaaaaatataaaggggaaagaagaattggaggaaaaaagtggaaaagaaaattataaaaaggaggaagagaaaaacccaaagtaatacatgaacctgctactttcctgttcgttctctcttcatcattgacggagagggagttcgtgagattaccaggcagtttggataatggagttttagagagtgaaatagagaggttgatttggggatgaagacgatagagattgctaatatgctaatgaaggctcaactgaataagtgataattaaggtataggaattgaaaatatagagggaaaatttaggaatttaccgcctaaaataaaaggaaataaatattgtgtgtctaatttatttttagtaatgaataattatatttctctcaaaaaaaataattatattatttattatttttatatattatttaatattttaataaaaatataaatatattatatttttattatattcaaaataatatagcaaactaacattaatatatctaggtaaaaaaattaatatttatatattgtccatatatatatgaataaatgtaataggtaaaatataattcaatgccacgctgtgaactcattttaattaaattttattatattagtt

SEQ ID NO: 32681 - DNA, 1206 bp, Cannabis sativa
gtttgtttttcttcttcttcagcaacctccttagtttcaaaaaaaaaacaaaaactggaacaaaatgtacgcaataagtcagtagctgttattgatctgtttcatgtagtgaatcattcaatcaaacacttctactacattatacattattaccaaaacaaagctttttttttggaaaaaaacaaccaagtttatactatactgctccaacacaaatatcaccctttttttttgaaagggaactatcattttttctcaaagacatttaatcaaacacctttattgcgcagcttgtattctaattactaattatagtgccaccactataggacgaaacccaaatcaaatagggatctttacactagatgtcaaatttgacatcttatttacatttttatttatatttggttttttaaacttttttgtaaaatctattttttaagtttatttttcaaaaaattctttaattacaaaaatacttttgttgtttaaattatccttcctcattttttttagtctcttttacatgttaactccctctttttttttcttctttttttttttcattttatattgagattagcattttttttaaaaaaatgaaaaataatgtttattaataataaaagtgacataattatttagaaaaaaaaataccccttagtttgtgctagttcagtgaactctttccacttagcactgcggacctcccgagtgagggacaccaattcccaccacacgagagcgtcttcctggaactaaaatgtagcgcaggtcatccgatcattaccaaccacacccatgaaattcaagattcgttcaatcacagtgagccactgctcagccttcatcacatttggacctcccagaaacactggagaagctttcttacggaatctttcgtataacgactccatacggttgccagcaacaggttgttctgctagcaccactggagcaacagcggcctaagcttattgtggaggcacggcaagaagaccctgctgccttaatctgaaaatttcctcatcttgttggcggattcgatcctgcatctccgcaaacctctactcccaatatggaggagcttgtggtggatttacaagacgaccaccctgagctctgccatagccacgaccgcgaccatgagattttggggaattttgtttccctgaccgcctccagtctcaaccatattaccctgac

SEQ ID NO: 32682 - DNA, 2698 bp, Cannabis sativa
  modified_base (210)..(212): a, c, t, g, unknown or other
  modified_base (849)..(857): a, c, t, g, unknown or other
atatacatatattacatagcttatatacatatagcatatatattttaatatacatatatatcatatacacataatatatatattaataacacaattatatatattatatatctcacacatatataatatatatactttaatatacatgcataatatatattatatacaaataatatatattatatatgcatgtctcatataaatacctannnaataattatttttacatatttaatctcactaatatatattatgtcacattctctacatatatatataatatatatagaataattagtaatttttctcttgaacttttaataatactgaatttgccctctaaaatatacttaaaatatacggcttgttaagaattctcctgaacttttatatttgcaaaaatttagtccatttgttaggttgcatcccattatttcttttaaatattgacgtgtctttgtaaattagcaattttattccttaaattttgacaactatcaaatcgtaccccctcaaaataaaaattaaaaagattcaacattttttagtaaatcttaaaaagttaattttgttcttaaaataattattttgaatgattaagaaaattaaaaaagaaataaaaattttaaaactaattaagcgatttaaaaattatttatttttttaattaaaaattcatttagatactaaaaaaaatatattaaaaattcaatttttataaaacctaaattttacgggaacaaacttgagtctattttgtttttctcagaaaaatgtagatttgtttaagtaaacaaaatatttttttttagtttaatttctacctttttttaaaaaataattttatannnnnnnnnaatttttaattatttttctttatttattaagagtttataaatataaataagtttgattttttcatcaaaaaatcttagtttatttagattatttattagattttcaataattttagtttaattttttaagatacgtgtttataaattaaataaagtttgaaaatatttttttaggaataatttaattgtttataagtaaaattaatattttgtaattaatttaatatttttatcaaattttttaatatttttattatttttttcaaaattaatagaatattacatttttaaattattatttttttaataaaagatggcaaaatttggtattggtcaaagtttagggggtaaaaatactaacttttgacggtaaaagaaaaagaacctatcagaatgggcataattatgtaactgttatattttagggggaatttttaacaaaccgtatattttattaagggctaaaatcaggtagtgccaaaagtttaaggggaaaaatactaattattctaatatatattactcatatatacatgatatatatattatatatctcatatatatacatataataacatgatataaaattcaaatatcatattatataccattatatatattaatatgatatatatgtcacatatatatatttctctatatacatgtaaaactctcccatctcaacaaaggaaaatatgttaatacatagattactattatttaaaatagtaaaatacaaaatcaataaccactatgttcatctatggatgattttcacataaaacctcttaccattgtattgtcaaaatcttgatttatcttctcttgcattgaaaaggaataagctttctattgttagagattttattataatgaaagaaaatgaagacattacaattctattgcaatataatacaaggaccaacaaaaatattaaataattaatattacaataaaatatactacactatatatatatgtatatataagaatggtagaagaagaagaatatgtatagaaacactcactcacaatcttgagcgtagatcagtggggatcatgacttgaacaaggtataatacctttgtccaaaagcttatgtccccctctcccttagcagtaattaagaaaactctcttggaaataactttgagaatcatcaaatcttgtattttctagcaagtgcttgttgatagaaaactgattgtctaaaatgaatactatagacctctatttatagtgcttcaggatcactttagaaaatcgaattccttttacttcatgactgtcaccgcactttagtaggtgtttaatatgataaaaatattggggaagagcgctagaaacatgctcaataaatacatacacgttcatgaatgtattccaaaattggctccaagtgaataaacaaccataaaataacatgttatcaactataaaacaaccgttttttagaaaactcaattttgagttttgttactcctctccgagctacatgaattctcaacgttttgatacataacaatctgatatttatgagtatctattctcttccaagagtaataattttatagcatttgatttgcataacatataaaaaatttactcacttaaattgtacatttatgtttgtgatccataagttacaaaatagttactgctttgaattcttatttatgttacaatattttatttataataaattatagattatacaatttatttaccaaatactataatatatattatgttagacatttaaatgtataaactgaaatatatgaatgtgtatatataaaatgcggaataaatgaacatatacactatatgaatataggatc

SEQ ID NO: 32683 - DNA, 4171 bp, Cannabis sativa
  modified_base (28)..(50): a, c, t, g, unknown or other
  modified_base (454)..(455): a, c, t, g, unknown or other
  modified_base (639)..(650): a, c, t, g, unknown or other
  modified_base (899)..(924): a, c, t, g, unknown or other
accaccgtcttactcactatgattgagnnnnnnnnnnnnnnnnnnnnnnnatggtactctatcactataggctcgagtacgaagaacaataacggaggaaaaatcactatagaaggtttcccgcatctaccagttgtcagagaatgaaaactagatttggtaggttgaaaagtcaagtgttcaagtggatgagatgagagcatcatgttcattctatagtgtttcaacttgggcttagggttaaattataaggattaaaaaagaaataaatattgggcaaaaaatcacactattagccaaccataaagaacctctagttacaattttgccactttgtttcgaccacttattcttctttcaataataccatatttccaattcaatcctataaattccaaaactatttatttaataattatatttaattatcaaataaaattgtcatttatattanntattaattagaccatacaaagtctgttaattaataaattgaccctaaaacctcttttcttcacaattaagtcattgtttagtgaaaattcataaataaaacatagtctaattttagaaatacaattgattaattaaaatcaattaactgagtctgcaatcagtattatctcaactagtgagggnnnnnnnnnnnnatataatcgagcttccaataaatagatctagaatctactaaggaaatttcctaacttattaattctgccttatgccactatagatttaaaattgaatacactctcaattatatagaacactctatatgtaccacgatatagatacgttatgattatacattgttacaatcctaatagtcaaagatctcatgtagatgatctatactgaaaatggacaaatttattgttctacccttcaatatattttannnnnnnnnnnnnnnnnnnnnnnnnnatgatatttcagtaaactaatattgttacacccgaaattcggctgtacttcagaaagtgacacgtgtcagtctcagggaatataaatcaacaaatatgatgacaattatatcattaaatgtaaaatagaataactcattaaatatagaataaatagagtatatttgtaactcactggttgtatagtcttaagcgagacaaggatgtacaaactatcaatttctgtattaatgagaaaccatcttgtctcggaaggcacaatgtcacgggagccatagacaacgcatagcgaggcatcaacctcgctgcatgtaaagaagtgttgacgaggtgagacatccatctcgctacgtataagaaggcattgacaaggtgaatcgattattagaacacttattatataatacacattataataactaagtgtagtaacttaaaggacatgattgtctagtctgcaaggtcttatggtcaaagagcatttcttaaatttgctcagtacactggtgctcatgccattgctggaaaacaaaactaagtcactcacttatgtactaggtgagacgcctcagcgagatatatttggcagcgtgtcctaatccatgtcagcgttgaccgccttaaagacggtttaaatcatagttgtgtgattttctaatattatttacacgtatttaaatggagcataattaaagtccataatttcgggaaatattgttatgggattcgaatttaaatgtaattaactgtcaacctatattactataaattggggcatataatacaaaaaaagggacgaaaaaaattcttagagagagaaaggagtttactgattgtaaaaaagccaaattctatatccagatatatctgaataagatagactcgtggactatgcagagttaactacaaaaccacataaaaacatggtgttattttttgtttgtatcagtttcccaaatttcttataatttttgtaccaaatatattacgaaaataggctcataatcgttaacgaaaatctacgttaacagtttggtgctttcattgagagcttgcgtgataaaagctcagaaaatccctcctaaccaaagaagaaagaattttttctccatggctgattatggggaaaatggcaacagtcgtcctgaagagactaatcgtcatcctggaaaagagccaatggactcatgaaggccacccacttcaagaactacgtgttcaacacgatcaacacgttcaagaagaagccaacgtgataatgatcaaaacctagaaacagggaatgaggaaaccaacactaatgcgggtggttctacacctatgagcgagggtgcttatgatcccactaggtacatactgttagttgagttggaaaattgccaactccgaaaatgtctggctgaggcaaaccaacaaaatgctgagttggaaagggaggtagccacagccagggctacacaagaaaataacacacagaaccaacctgatcctagaatgagaaggtcgcgagctaggcctcgaggttcaaaaaccaagaggcaggagacggctcaggaaaacccccagaacactcaggaggagcaacctggagaaactggggatgttcctgaagatgaacaaccaaataatcaggcacctcgtcaagaagtgccttgaagaccccggggattcacaacgtaggtgaatgaaaacaatgacttatcgaagtcttctcgtagaaacgagaacagaaggcaacccgtgacaagggaacaggagatccctcgtggtaataagagagatcctagggctcaacttaggacaagtgggttaccaccgagacaccgtcaacgtccttctcgaattgataaggaggaggcatatacaaaccccagcagggggcatgtatcaaacctttcccaaaagagaaggcatgtacatgacgaggcaagttcaagctcgagacgttcataatctcgagattacagtcgatctacacgaggaggggatagaccttgacgtagtaatgatcgagaaagtatgagcacaactaggagccatcaatctgagagttacttaggtacaaggtcaacaagaaaccatgatcgaagacggctagatcttcgtgagcaattgaatcggaggaaacctaatttgcgccaacaaatcaatcaaaagcaagaggatccaattcaattgtgaatcagtgagttagaaaacaaattcaagaactatcagatgggaaaccgcctgattacgactcagatgaggagctcaaacctttccatccaatcattatgagtgctgaacttccccaaggatttaaaaaccctcacgtctcgttgtatgataggactacggactcggtcgctcacctcaacaactttaatacaataatgcgagccagtaatgtcacgaataacttacgttgtattttattccccacctcgctgactggggcagcaagcaactagttcaataaatttacccataactcaattacctcttagggacaactatctaaagatttcaagaaacaatttcaagcagcaaggaataggcgacctgaagcgtcttccctcactaacgtgaagcaacagccaggcgagtcacaagggcatatttgagtcgatttagtacagccgctgctagagttagaaacttgaacaacaatatacagcttactgctcttcaagcggggattacgactaacctctcaacagctgaaggcgagttgtgggatgacttacagggtcgccctgtaaaaaaatcagtgagttcaatgaaagaagtcaggtgtttgtacgaaaagaggaatcaaggaatgagatgaaattgataaagactggctcgtgaaataaacccagcactatctcagcaagtaccgtctcgacaaaggttgacaatccaagaggctctagcacaaagaaaaaatatgacactaaggaatcagccaaagataagaaaaaacaaaagaggcacaataagtatgtgccaatttacaccatttataccgagcttaatgaaactcaggaaaatattttccttgtacatgagcacagggttgcatttcgcaagcctgaacccatgaggcatgcgaggcacaaacgggatgcaatgaaattctgtagatttaacaaggacatagggcatacaacagatgaatatcgtcagttgaaagactagatagagagccttatctcgcgtggttactttcaacagtatgtaaagcgacaaggcaatggacaaaatgttggaattattttacc

SEQ ID NO: 32684 - DNA, 2009 bp, Cannabis sativa
aattcatacattatatatacatataatcatgtgaaccatgcatcataaaatgttatttctgatctttattagtaaatctgattatgagttttatttagggcacaaaacccaacagtttcctgcataacattttaaattcatcaatatttcccagcgaggccaatagactgactcgtggactaaggaatattaacacctgaatcatgtaataaacattcctctcttatttctcaccattcattatttctttagctcttaaatattttagtttttgaaaatctcgataaacatttcggtactttcattaagagccaaggaaagacgaaaaccactgttactaccatggtgttcataaaaaatacagttcacaaaaggactcttcaaggtggcctcgagacggttatggacgaagtaaaccccctctcgtcgaagcatgcccgatgagcgatcgtgaaaggcgagaatacgtccaacataaatgtttaagagggggacctaaacaaccaacgtgactgtattggtgatggcaaagatactgaagaccatcaaaaggaagaagtagatgatgagggttgcgccaaagatgggttttacaaagatgaccaccgttacgaacacaatcattaggttatgagagtttccaaggagttgttcgaaactcggcaaaatttggctagtcaaaaaagattttctcgaaagatggaaaagaagttggtctgcctttgaagtaagtttagagatctagatgaaggagactctgatgatgatccttcagtaggatgtgtcagaaggaacaccaaggagaaccccactagcatcagaacctcttctcttgaacaagacaagggaaaggcaaaagtgggtgacccaaaaaactcttatgccctcgaactttctcgaaaaaatacaaatcaggccaacaaggtctttcaggcgcagaagatggccaatgcttttgggcttgggtttctttcggcccaaaaaagtcctttagcaccgaaggggattggtacgaaagtaccaaaacctagaggaaggaaaggtcgccctaatgattcagtaaaccagggcgatggggcagaggagcagtacttcgatgataattggtccattgtggacctcggaaggtgtttggatgcaatatatgaaaaagataagagaaagaatgtgaactcacgtggtgatgacctcagaaaccactttagcaaaaatgcctatggaaaggatcttctaaatagtgacataaaatgactagaagagcaaataagcaccttaaaaattggtctaaaagcagagtagggccttcactgattcgaaagatgaagacttggcctagagtcttgtctcaagaggatcatagaggctcctctcctagagaacttcaaaatgcctcaaattgagttgtacaatggatgctcgaatcccaagacccacttagccaagtataacaagatgatgcaagtggctagggttagcaatgatgccaagtgtttgtgcttttcattgatcagttcactcctagaaggacttacaatctatattttggaagaaatttgtggctcctttcaaatacgaggaggaaatgggagtctatcaccaatatcaaacaattagcaggagaaactctaaaaagttttttccaacaaatgatggaagcaaccaccaaaaccaaaataactgatgatatgaagcttgttgccttacaatctgggctcattgctggctccctactgtggggagaaatgtagaggaagagggttgaaactctctctgagttcatggccaaggcccaaggcttcattagcttagaagacgcttaccaacaagcatttggggtccttccgacaccagcctcggtaacctctgttcccacattgacctcatctaccactgctctgggaatgttatacactcccacaatctacagaccttttgtacctgtacccgcacctatgcaaacccatttctctaggtagggagctatgaagaccgcttagtttaatttggaa

SEQ ID NO: 32685 - DNA, 1308 bp, Cannabis sativa
attaatttaggatcttttaatgaaagggatagagagctcattgttaatattcctcttaatattttttgcagtggatgatctttgatattggtctggatattaacgatttgtaatatattgaggaagcttataagtttctctgtaaggctgattcttttgggttaagtagtgatgatgtgaaagcttgaaagatttcttggagccttcatatttcgcttaaggtgaaccaatttatgtggtgtgcacttagtggttgtttagccaccaaagtacagttagtatgtaaaaatgttcctcttgatttgtgttgtcctatgtgcaatcaagccgatgaatttattctcatttgctagttagttgttcttttgctaaagcatgttggacttgatctattgtgaatgctagtagtgtagggggattgatttttgggtatggtttggtaatttaatgcagcaacatgttggttgttctggggtgtgagaggaggtggccatggttgtttgggtggtgtggcagacctgtaatacttagggtttggcagaacaagactccttcagcggctcaagtggttctttcgactcgtgcagcccttaatcaacggacaatagctcaattgaaaataaggggttctttattttcatctacaggtttggatgaagaccttgagcgttggactaaaccagatattaatatgattaaggtaaatgtcgatggagagattttcatgtcagaaatgaagttcgacataggcatggtggctcgggatagtgatggtcaattggtggaagcagcctcgttgtgtcattctggtcacgtgatgaatccaactttggcagaggatgtgaggataaaagaagctcttagttgaattaaggctaaagggtgggctagtgtgaagcttgaaacagattcgttggtagtgattcaagctatttctagttcgttgaatgtgccttcttcttttggtcaaatagttcatgaatgcaagattttgttagcttatttaccatttattaaattatgttttgttaaacgttctgttaacaaggttgtttattgtgttgcttgttcttgtttttattcatatcgtaattttagtttagagaatgctcatgttgaacttttatctattgtaatagttgatgcttattaattaatgaattgccattctttttttaaaaaaataaataaaataaaaaccatgccactaccataaaagaaataattaacattaactacatgcattaaaattgaaatttaacaaatggagtgttttcaaaaaaatatatatttcatcataatttataa

SEQ ID NO: 32686 - DNA, 2480 bp, Cannabis sativa
aaaagctactatgcttggcagtataacaagcatacacaatagactcataatagcttacaacccaattaacaatttgttgtgattgtctttattgttatccatgggtaattttatttctctccgtccatatagcccaagcacttaaataataatttttttttaaaagaatcccttctaccacttcagaagcatatagtaacacatttttaaaattaattacctctttcacttcatgtagaaagttaaagtctatgagcttctaaatttcttgtgcaaagggacaccaaaaaatagcatgagcattggactcacctccaaaaccatagagctcacaagaattgttagtgactatattttttttgttcaaatcgttatgagtaggcaagatttcatgaaaatctctcaactcaaaatgtaatattttcctagggatttttaaaccccataattatttccaccataatgagagtacatcactagcagaagagggtaatgatttatccaaagtcatagcagtattatatccactgcccactgaataattaccatgactagtataatgccaaaaccataaattttcatgattgaatggactcgacggtataaaaaaaatatattcttcatcgagaagattaaaattctaatgtatcaccgaataattccaacaaccatgaggcccaataagatccgacactcttgccatctcatacgcaggagctgagcttggaagaaaagaaggtggtcttggcaaccaagggtctttaaatgtcattgtatctttactatttcctatactccgtctaagttcctttaataaaaaatttctgccccatcaaattccttgccaagttggtgaaggatacgattccttgtccgcctctaaaatgttagagaacctaaaatatcttgcttttaaaacttaagccaatattggtgagggaattattaagattctccatgcctgctttgccagtattcaggttattgattatggtgaagatgaaaaaataaaaggtaaaaaaaaaattggtgatgagaagtttttaaagttgtagcgtcacattgggataaatgaatctataattttttataaaaaatattatatatctacatgtaaacattgcatttatttcattaatactctatattaaacacatatatatcttccatattttatttggttataaatttttattaggatcattgtttaattagttggttattctaaatttttatctattattattttaaatattaaaaatttatataatattatattataaattttctttattatttttggtgttgtagcataattcattgtaatgatacttaaaaaaaacagtgataatttattatttttatgaaggattctatctatctatatcattaacttttgtggagtatattatctatgtcataaattactctattaattttttctttttacttcttgatgataattaattaattaagaaagatttttatgataattatataattttaaatttaataataactaacaaaacaataatataatttaattaaaaattaattaaaagagacaaaaaaaaaacaaatagttaatatctattcaaaatatctataacaattatttttttaaaaaaaaaaatctataataatttatatattttttaaattaattattaattaatcaataattaaaaataacttgtactaactttttcttgacatgttaaacttaataaatcaaataagagtaaaaatattttgaaactttaggatggagttactatgcgaatatataattattaagtaaaatttttggataattgcaatttttaaaaataattttctttttaatattgatatacttaaattttaaagttttaattgtttttatttagctgacaattttataactaattgtattatctttttattcattaaatactacaaactcatttgtataaaaatgagtttaatgtctcttataaaagttatattaaggtatattcacgcctaataaaaaaagtattaagtttgaaaattaattaatatatttttgttcatcaattatcattaaatatattttataattttttttaatttattttgaagtaaaatcacttttataaaccagcaaatacaggtaccaactaaggaagcatctcagttgggacatcccccaaactgaaactacgaccaggatgtaaaatggaaactctaacaagactatgagctaccatattagctgatcatttagtgaaacaaacagagacatttttcaactcattaagaatacacttacaatcatgtataacaataccaaataaagagatcattttgacatgctgcgaagtgcttgtaccaccgtaagacaatcagtctcaacataaacctgctgccactttttcctctttaaccaacttagcacttcccaaattcccattgctttcgcaagagcaggtttagaggctgttggaatatgttttacc

SEQ ID NO: 32687 - DNA, 1504 bp, Cannabis sativa
tgtgtatatatattagtttgatatcatgtataatgtataaataattaatttctttttaattaggttcgattaggtgatattaagtgcaatgtacatatgtttaattttttttaattagataattttttaacaaaataccgttaaaccgaattccgttacataaccacattttatataaaatagatatatgataacgagaaggtctttataatttagagaaactaagccaaagtactgaccacaatgggagagcaaatcaatagtagaacaagaaataaaccacaatttctacaaactcaaactctttaaacctattaatacagtccaaaaatagcgggaaagaatcccacccaaacagaagagaaccaaagctaaaccccttaacagccacaatagagtctgattcaattagtttcgagataccttttgacttggccacctgcaaagctagattaatagcacgtagctccccctctagcacacaacaaactgaaatgaaattcacggccataacagcgtctcccaagtctgcacaacccttttgagtcattccaatacttgcctctgaattacctactgaggcatcaacttgaaaagtccagcaatccacaacgatagtcaaactattagtcagcaacacattcgagcaagaattttcactagagggatcaccatacactacataaaattctttgaatcttagaatacaattcgaaagaatttccatgaaatcacaactcattcgattgtgcataatatcatttctctatttctgtaacacatcacaaacacaagccacaaatagtttgaactcatggtcctacaggtcaatccacggcctcccaaagtccaaaggattgttccatttgaggttatcaattcgcagacccctcttgcttataaataaataccacgggtaagactgtacttatgaattaaatgcagtgcaatctccactttcaagttgcagaagacacaattctgatcacctggtggtaggaaacccattctgtatgtgtgggaagttagtccgatggaaacttccaaaggaggaaagtgtgtctaagatggattttctattttcaaagagagttccatactatattagagctcaaaattgcttgacttgactaatccaatagacacttttgacagaaaaaataccaaaattagaagcattccaaaataaggtatcccttctagctcgcagaggcttaattcaaagaataacttcaattatgtcataatcagagaaagcacgaatgagaggctcattccagaccatgtatgctcattttttatcgatagaaaaacttttattttgaggttaagtctaaaatggattaaaatgagttatttactcgtttaccattgttgtgacatagggccttgaatcgtcaaacgaattccactcaggttgactggctcgcttgaatttagattaaatgtaagaaaagtacaattgtaccgtatatcatgtccaaatgtgatacgaaaattaccg

SEQ ID NO: 32688 - DNA, 2677 bp, Cannabis sativa
  modified_base (137)..(139): a, c, t, g, unknown or other
  modified_base (1328)..(1328): a, c, t, g, unknown or other
  modified_base (2141)..(2149): a, c, t, g, unknown or other
agacctaaacccggaccaaaacctggttcgtgacctagaccttgactgggccccggtttgggaccccgacctggacccaaatagggacttggactcattgtggatccagacccaaactaacacctgaacccgtactnnngacctagactcggacccaaacttaagattcaaacccgaacctgaacttggacctagaacttggactagaaactaggcaccggaactgggatgaagacccaaaactcgccccaaactcgagagacgggacctaaccctggacccagaaacaaggacttgactattgggacacaaccccgaactcggaccctatcctaaacttaggacccgacccaagacccgagacccgaactagaacaagaccaggacccgaaccaagacccggaccaaaactagtcccaaacccaaacttggagccgaatccgtacccggtgaccaaaaattttaaccgaaacaggaagtaggcggggacccgggaatgggactggaactgtaactagaacttggacttagacctagaaccgtaaccggacttaaacctagacccagaactgtaaccggaccaggtgccagactccaaccaagacctagacccgaatcgggacccaaacttatatcccaactcatacctagactaagtgccgaacctagacccaaacacagacccaaacatggaacaagactcgggacacaaaattggggccgggacctagaaccgcaccccagtctcggtccgaacccaaaagtcggacttgggacccaggacctaaaccggaactagaccgggacaggtgaccgggaccagatcagggactcaaaccaggacctgaacccgaacccagaccaggacccaaacgcagaccctgacccagactcgggagacggaactggaacctaaacaagaactgcaaaaccaggacccttgaacaagactaggactgtgaccaagacccacacccaaacataagaccaaactcagacctagccccaaacccaaagcgagaccaaaactcgagcccaaacacggtcgtgtacccagactgggagcgagagccgaaccttgacctagacctgggacacgatccaagacccaaactcggacctagataggcattcggatacgaacctagactcgaacccagacccagaccaaggtcaggatcgaaactcgggacctagatccattctgagaccctaacctaacccagtcccagacctggacctgcacctaagaccaaaactcggacctagacccgaacccagatccaaacctacacccagactcggacctagactcaaaccaagactcngaccccaaccaggcccggacccaaactcgaactcagacactgaatcgaaatcaaaactgggactaggacccaaacccgaacatggacccagatcgggacctaggacgcggaccatgaccatgacctgggcctcagaacccagacccagatccgaacacaggactcagactcaaacttggaccaggactcaaacccagatcctgacctagaccgagaatggaaaccgaactgggacataggatccggacctagatatgggacttgggccccaaacctgaacttggacctaggtcgggacataggatccggacctagataggggacttggccccaaacctgaaccttgaccaagacctggaccaaggatcaggacttagatgggggactttgacaaaaaatagtgccctaaactcgagacacgggacccgaccctagatcaagactcggacataaacccaaattcagaccaccaggactgggacctgtgacttgggacctaaaccaagactaggacctggacccagaccgggtcccagaccctgacccagacctagaccaaaaaatgggaccacacccaagaactaacaacatgacttagacatgggacccaaaaatcagacccacagtggaactgggacccgaagtcggacccggacccgaaccaagactgggaacgaaactttgactcgaacccgaattgggacccgaactcgaaccaagactcgggacccaaacctgaacctagaccaagagcaagacataggaacctgacatagatgggggacctagaccagggacctaggccccagaacnnnnnnnnnaatcgaaatccgggactcgaacccgaactaggacttgacctggactcgagaatctgaagtcaaacctagacccagacccaaaacctaccccgcacccaaactaggataggaacctggacatgaaccaggatcaaacctgaacccagacccaaactcaaaatcggacccttactcgggacctgaactcagacacagacctagaatcagacccaaacctagacctagacccggacctgaactcgaacgcagactaaggaacccaggacttagacccagaactaaacaaaaactcagatcgagaatggaacttgggactcagacccagacccgaacctggacccgaacccacacccggagcttgatccggacctagaccgaaatccgaacccaaacataaactcagaccaagactcgaacccctacatgaatttgaatccaaactcaaactcagaatagcaactagagctggaaccgaactaggactaggactaggacctaaacccgaacccgacccagataaaatcaaga

SEQ ID NO: 32689 - DNA, 2538 bp, Cannabis sativa
ttcagtggcacaagaactgctgcgaaggttcttcaaagtggattcttttggcctactcttttcaaagatgttaatgactttgtgaaggcatgtgatcgttatgagagaacggggaacatttctaaaagaaacgaaatgcctttgacaggtatcttggaggtggaattgtttgatgtttgagggatagatttcatgggtccctttccttcttcttttagcaatttgtacattttattggttgtggattatgtatcaaaatgggttgaagctgttgcatctccagccaatgatggtgaaacagttttgtctttccttcaaaagtacatattcactcggtttggaactccccgagcaatcattagcgatgaagggagtcatttttgcaataaatagtttgaagctctcctatccagatatggcgtctgccatagaactgctctaccctaccatccacagagcaatggccaagccgaaatttccaaccgggaaattaagatgatattggagaaaacagtgcagagatcaaggaaggactggtcacgaaagttagatgatgcactgtgggcttatagaacagcgtttaaaacacctatcgagatgttaccgtataggttggtgtacggaaaagcctgtcatctaccggtagaattagagcataaggcctattgggctatgaagaccctcaacatggacttagcggctgcaggagagaaaaggctgcttcaattgaatgagctggaagaatttagatatgaggctatgaaaatgcgaagatctacaaggaaagaacaaagaagtggcacgaccgaagcttagtcaggaaggaatttcaacctgacagtaagttttactttttaattcaaggttgaaattgtttcttggtaagttgaagtcaagatggtctggaccgttcacggtggtcaaggcgttttcatatggagctgtagaattgaagggtgaaagtccagaaacctttaaagttaatggacagcgattgaagctctacttgggaggtcaaattgaccaagtcaagtctgccattatattggtgcctctttgaagaataactcagtgtccggctatatgacgataaagacagcgctcttgggaggcaacccaagtgtttacctttatttttgagacttttgtttttgtttataatttatttgtttttagcattttaaattttttttgtaaagtttcagacgttataattttggttgaatcgtgaaaaatgtgaaaaatcaaaaaaaaaaataatttttcaggcctcggaacccagtactcgcgaccaccaggttccatggtcgggatcctttttcatggtcgcgaccctggtcgcgacttgggggttctgtagaacacaggaaaaattcaaggttcagtagtcgcaaccagccctacccatggtcgcgaccctttttcatggtcgcgaccacggattctacagaaaggctggcaaatttttttcgaagctagtcacgaccagcccttatggttgtcgcgaccagcttacgtgctgacctaaaaatacctataaaaacaccccatttcatctcattcaaccaaaccctaaaaatatttttccaccctcattcaacctctttctcagccgaaataccaaccctcctcatccattcttcaaattttttcacccatttatcaatttttcaatccaaatcatccaaaaactcaatttctctcattaaatatcctttttcttcaaaaatcacacccaaaatcaccaattcttacctaaatccgaaaacactattcatcatcttcaacctcaagcttttcaaggatattcaacaatggaggtggattagtggcttcttcaattagtaagtatcatcccttttcttatttaagagtttgattgaaggatttagggatttcttggaattaattgggtatttgggaaatttgtgtgattgattggagtattgtttgaatattgtggattgtggattgctattggtattgtttgtgttactttggagatatttgaattttgggaaatcaagaaatttaaagggaagtgctgcccaattttttttagaaatttatgttggtgaaaaaatttggtgttgtgttgattatgggtcctaaaagaacaaggggtaatgaagaggggggttcatcatccaacccaccaccttcgacttttgatagaacccgatttgttagcgaagcggcccaacaacgcttcatgcggctaaagagtaggccctatattgaagaccgaggtattgagttccccaacgctacattaagacaccaacctcagtttgaaacaattagaggtcaaattgagagaatgaaatggggtagctttgttgacgctagggcccgagccaatgtcactatggcttgtgaatttctagcaaattggcctgaacgcagaaacggagaggtcaaggtgcatggcaagaaagttcctgccacatctgatgccatcaatgccatgtactgtttacctgactactctagagaagatcaacgcctgcgaattattgaggaagaagagcaatttga

SEQ ID NO: 32690 - DNA, 3298 bp, Cannabis sativa
  modified_base (3151)..(3153): a, c, t, g, unknown or other
acaatgatcctattttcactgcacacactaatgtctgacaagtgtgtacaagtttgtatgtttcctctagtaaaaaaaaaatcttggttcacattttatgtagattgtctattttttctgaacacctggtaagtatagtttgtatttgagatactaaatcttatgatctttgaaaacataacatggttatttgtcctttttatgaatcttggaaagatgcatgcattagaataacttgatttttgtataaaatattttagtttttttttttattattttgaaaaaaaatgataattaaaaaaaagtatcgtgtgacttgacttttaggctaagaaaaattagtcatttgtctttcttttggtaagtatcaacatgtgctttatttggtaaatttttgatgagtttcttcttaaaatttgatttcttattctttatattttgtttaattgttgatcatgattggttttttttagatcttaatttttgaaaaattttggtttctttttgtctttggcccttatagaaaaataaaaaaggggagtatttggggttttaattttgattgtatactcaactgtccagggggagttgaggtttgtatttgtgttcatctttggtcaaagttagttttttattttagtttaatgttgtgcttttaagggggttttttatatttgtttcgctaactttattttgcaggtgtttgttaattaaaaatattttgattatctaaagtgccaaatggggagattgttaggccttttttttggcaacttagttgtcaaaatattttttaattaatgtgcatttttattgaccatttaaattgtttttattacattgattttgtgcatttagttactcttttcttctaacgaaagattctttttcaactagtctctttttgatttaggaaatttcttgtaagagaatgaattctcttatggaaagttgtctaactttagaaaacttgactttccctttttctaatagatgatttcagttttgtctttattagaacaaatcaaataaactttatttggcaagtttgaagtccaaattcgtgatgttggttcaatttggaaagttccatttctggacctaatctgctgctgcaaaacccgattctaatgctgtaaatcaagaattttcttaagaaagttttgtacagttggaaaatcatttttatggttgactctaggattgctattctataaataggacctagagagtagccaaacgattttatctcttctagtctcatattttcatatctttctttgcgagaagagtattttatttgtaaaagcctagagtgttcaactaggttttgattttcttattatgatctcatactatcatagaataggttgaagagaagctttgaacaagtgtgggtcttcgggagaagacttttccaagtctcacttcgggaggaagtgagcatatatctttgggagaagatttgtttaagtcttacttcgggaggaagtaagcacacatcaatagttgaagggagttcactacttggtgtgtttcagagatcagattagtaaggtggattacaaagggttgtgacaaatcactagagggagtctaaatttgtttaagtcaattgcttttgtaaactttgatactttactaattgatgtcattctctgggcgtggccccatggactaagagtgttcgaaagaatactgataccacatataattctcttgtgtcaagtgatttattttctgctgatttttttttatttatggttctggtttgtttctgcaaaactgtgttttgcagtgacagaattacattctgctgctgcagactgttacagttttatttttactgttcttttgtaataattactgacattagcaaaaactagatttttcaggtatcaatacaattaaaaagagagtaggtcattcactgttaactaaggggggcaaacttctataaaattctttgtgttctttactttctagttctaattgtgtaacacgtggtaagcataaatttaatatgactgttgtcggttgtccaatttctgaggtcaacaattaccaatctcaagatcgactaatatggcaccatatcacaacttggatctactcagttaagtctgggttccatctagcgacttctattttagatgcaaatgaagattcaacatccagcaactacaaaagctggtggaagtttttttgggctttaaacttgccaccaaaggttaaaatttttgcttggagagtcattcaaaatgcattgcccgtggctactgctgtacacacacacacacaaaaaaaaaactcattgattcaacaatttgttcaatgcataaaagcgcttgggaattaattggacatgctttattcacatgtaaacatgccaagtttgtttggaagaaaacatgtttctccattaatgaccatcgtgctcatggtatgtacaatggagattatttgattcacctcgcaaccattcttggtaaaacagatgttgaacttctaatttgccttatgtggagtatttagaatgatagaaacaaagtgctacatggtggaacgaaacgtgaagcttctgctcttgcaatccatgttataaactatcttgataaatatttctctgtcaaaagaagttgcaaagacaaacaaaggcctattgtgtcgcaccagcaagattcctcaaggtctgctgtgttgcaccaacaacattcatcacgacctgttgtgttgcaccagcaagtatcctcacgacctgttgtgtctcaccggttttttcctcacaacttgttgcaactgaaaacaacacaaggccgacaaataggataccatggaagttgcctagctatgtcaattgtcataaaatgaacgtggatgcgactgtaaacactaaagataaggtgctgggtattggagcagtggttcaaaactacaaaggtgaagttattattgcgttatccaagccagtccaaggctgttttagaagcaaatgcactctttcatagtatcaattaggctaatcaacaacaaatttagataacacatattgaaatggatgcactaagagttttttctgctttgacttcttcacatacagacttattttgttttcagatttaattaatgatgttcgttgtcttttatcctnnnattatcactcatgttcgtaagcatactaatcaagctatccacgccttaacaaagtatgctctagagttagatgaacacgtcttttatattagagaaattccaaattttattttctgtatgaaaaattctaaagaaaaaatagtat

SEQ ID NO: 32691 - DNA, 2233 bp, Cannabis sativa
  modified_base (1311)..(1312): a, c, t, g, unknown or other
taaaattatcttatatgataaaattaataataataaatttgaaattaacctagatattttcatagatattctaaccataatatttttaaattcataaattggttattttgtgatattatttattatttataaatcataagttaaaagaataatatttattataatattatatcattttacttatcatatatttataaataatattacatatatttaaataacttagatatttttgttaaaatttaaaaaaaaaaggcttgatatgagatattttgacatataattgagaaaattatcatttatttattattttattcttaaaataataattgcctaatcatatcaattttaaaatcggtttttttgattattttaatttttttttaaattataacattagaaaaaaaatatgaaaaatatctcgttggttatttcatatcatttatcttattagctatttaatttattgtgataaaataattcaaataaacctagatattttaaagctagtttaaattttgaaattttgaaaagatattttaggtcgtttcaacaaccgtaaatttttaaaattagttgattatttaaatgataatttaattatataattaataaatatgtgaattcacgtttgttacttgaatgtttgttttaaatgtttaattcaaaactttttttttaaacaaacctattacttatttgatttaaattgctaggattaatggtaacgcaaattttcgttaaccaaatttgagcctcacgaatatgattcaacacaaaaaaaaactatagaaaaatatgaacaccgaatttttacgtggttttgcagttaaaattgtacgtagtccacgagttaatcttattcagatttctgagtatgtttttttcttttatgttcggctcccctcttttgatcttatcagccactatttgtaattgcatagtggcagttaattacaaagatgacaaaaatacgtttacggctattatacctaaaattgtgagatttgattacaaatcaagccaaataaatgaggtatttacacagctatgaatagcccgcctttattgggctgagatgagcgcataattaaagatatacggtaagttgtatctcatagggatgcctcgccaaggagagagccaagatcactttgatagcaagcagctgcttgtgattttagcttctcgaggataatattgtcttaacactgatggttatactctctagggtcgagaagatcttccgtgcatgcaaaacatcttttagcaagataaatgcctcgctgtctgttatcttggctcgtcatnntatctatactcagtttgtatatcacataatatacgctaagtatttttagtgtcgtcgctttctctttcacgcagcgaggttgaggcctcgtcatgagcgtatgcactcacatagtttctcgtcaatacataaattagcagatcgtatgtctctatctcaaagagggctattcagccaactgagttataaacctaccctgggaattatatttccaacgagttgttcaatgctaattaagcgtacttgtcgtttgtgtgtttgagttcttcccagctcgacacgtctctgatgtgcttaccgaactttgggtatactgattaacttgttgacagatctaatgatttcactttaatcatagtccaattgtcaatagatcaaataaataattagtaacgggtaaattttgtaatttcttttatctatgataaactaaataacatcatagggcccatccaaatcagtttgtatgtttgagcctatatgtttgcttttggacttagatgcatataggaagcctatttatttatggatatataaatagattagcttgctaaaataaaatatcacattgatagttttatttaggccaaattagtaatgggcttatttaataataacaattatttaataaaaggctaaaattctctcttttgggccttgtgtgagagttaggggccaatagtagtgggtacgacatactgaatccaaccccccttacatgaacaaccccaattgtgaatgcccatttgccttttttaaataatttattaggttagttaatataattaaaattgaattagaagcatacttaactttaaaataaataaaattaatttttcattagattgttttaaaattaatttgggaaaacacatttagtttaaagaaaagattctagatagtaatttctaataactaatt

SEQ ID NO: 32692 - DNA, 1644 bp, Cannabis sativa
attcaatgtgaacagttaatctataatccaatcatagaattagatccaactgttagcactcccagaattaacactataaggaaactaatattcaatattttcagaaagcttggattccattattgtataacatgttcccagccacccatgtttccaaatttctacacaaagtgacgtacatctatttgggtgacacgtggaacagattctatgacctggatggacgattccactcacaacgaacggtgtagtgagaactaatgctcaaagtcagtaacagtagggacatctgagaaaggtatgcaagaacacccgactaattccatcatgtgagcagctcacataagctgaccagagggtggagttggacatttttagaggatgtatcccacatatccccgtgcttgcgagacatgacaatatccatattttcatgggatagatacacagtatcaaggaagaaaggaaacatgccttatttctcattttgcctattgtaattatagaaagtaaacattttcctcattttattcattattagtttttggaagccaatcaatgcaattcatccatataaatagtcgaatcatctcactattcagggacaggaaattcattcagagaaaacacaagagagaattctaacttcaggagtgtaaaaactcagagatcattctaagagcttttgagagataacaaagaattctgcttctctactcacaagtcaatacaaactaaaggggagtatggtattaccatcatcaaggggtcggacctctaaagttctagtgttttctttactctatattattcatatttgctatttagttattcttaatcgctttaatgtgactcactatcattggctaaaagcgagatcaatattttggtactttcattgagataaaagaaacacaagtatttgttttaagttctttgaggacacaagatggatataacaacacggagagcaaatcagactaaaaggaggggtacaatttgtgtcattgcagtagactatttcaccaagtggacagaagctaaaccactggcaacaatcaccactagaaaagtccttgactttattctcaagaacatcatatgtcgattcggactttcccagaagattgtgttaaataatgggaagcaatttgacgttgacatgctcactgatttctgcaacaggcatggcatcatcaaaagattatctaccgtagcccattcttaagcgaatgggtaggtagaagttgtcaataaaacccaaggacaccctgaagaagtgccttgaggaagcgcaaggaaactggcctgaactactcccagaggtcctatgatcgtataagactaccgagaagacgaccactaggcaaacaccattcgatctagcttatggctatgaatagatgttgcctgtattggaatatattttactagggcctagatttactaacaagtatgtttattgacatcctaaatacaaatttctaatttaaacacatataaagtttgagtaaccttacattcattatagtagaatataatgactcctcccactcagatctctaacccttgttcctttatgtcgtagagtataacaagatcttagcccgacaatcctttagttatttggattcttcacagtct

SEQ ID NO: 32693 - DNA, 2273 bp, Cannabis sativa
  modified_base (899)..(918): a, c, t, g, unknown or other
tttattgatatatataggtgcatgtaaggcataaaaggttcaattccattaaactaattgttttggttgaccttttcatgaatagtagtacttattggcttttttaatatatgtaggatatattattaaatttttttattttaacgcaaacttttacattacaatatgaaatatctttactaatttatctgtacattactaaaatattatattttgaaatatatatttaatctttttaagtatataatattaatttataccttacatatataaaataaacaaataataataataataataaaataattttagagtaattaatattacttctttacatgtaaatgtaaaaaagtattattcattatttttaaaaacaatataaaattactcatgatgtatgtcattttttaactattttttctctactttttaaaaattaaaataatataaaaaaccttattttgaaagaactaatatgagtgctctaatattcttaatttcttaatactcttaataaaaatcctcatccattttcttgataaaaaacctcatccattatatcagttttcaaactcggttagtatgttcctatcaatttctgaactctaatgaaaaggcaagtatgttcctacatggtgctttaatgaaaaagcaacagctcttatttttattaggttaattaaaatttttgcttaacgaactttgacatgtaccatatcataccccctgaacttttaaggtcgttaaaaatgctccttgaactattgagattgttggatttaaggacttttgtccaattttagtaaagaaaaaagtctaacatggttgaaagttcatggggcatgatttagtacatgtcaaagttcaaggggcatgattggtagatatcaaagtctggnnnnnnnnnnnnnnnnnnnnaacaatcattgaaatagtaaaattgaataaaattagacaaaagccttaaatctaacaatctcaatagttcttgagagatttttaacagccaaaaaagttcaggggggtataatttggtacatattaaagtttaagagtcaaaaaattctaattagcctttgtattatagtgaatgcactacaagactaccatcaaattactttgataaaataataattcatttgtcataaaattattatgaatttgtcataaaattattatgaataatataaaataaataagatgaaaaaaaaactgaatgagaattttttaattatttatttcaataaactagatctttatttatataaaaatatgactagaataatgagaaataaaagaaaatataatagtatttatggtataattgatttgggtgattcggacattcatatatataatatttcataacactctcccttaaatgtccataatagctatcttataaaaaaccttgtcataaaacctaataggacaaaaactcagccaagaaaaaaagagtgcactatgaataaacttcccataatttaggtatttgtggagatctttaaatcgacgaattccaatcttgtgaaccatcttctcaaatattgatatttgtaacgcctactgcttaggcacgctacaatatcttttaaattactgtgcacacctttgctcatcaaagggtttctcgaaaaaatgtgtcaaatttaaacctttttacaaaaatttaaacgtttataaatatgttatatatccgtacaaaaagcttggatcccgcttttaaagtttatattcatgttcaaaatacattttataatcatgtcgcacagggcctataaaataaaacacaagttgtcctaagactaaaccctccaggtcaaactatgttgacatgtacattcatcctcgagctttggactcactattgctcagccttggcctttcatttacctacatatgtaaccaataaatgttagtcaacagactctataagaaaagtatataacacatatgtattaccgacttgtatttaggcacccatacacctatccacaaggcttaataaatgatcaagaacgttcttaacaaaagtacgacctctgtactacatgcaataagtagtcatcctgtacttaattgtaatgaccgcattttagaatatggattagtaaaggcaattagcgttacttattggtaattctctaaatagttattaatttaattaattgtgggtcccattattaaaaatgggcattagagttataatttatcagtttcggagattttattaaactcaaagtgtattgtttgagatatatatgaattatgtt

SEQ ID NO: 32694 - DNA, 1749 bp, Cannabis sativa
tttgatgtaagaaatctggggtctctctactactttttggggattgaagtagtacggacaccagcaggaatgcatttatctcagtccaagtatatcaccaatttacttagccgactcaaaatggatggagcaaagccaagtccaagccctactagctctgctcataaactttctctatccattggagacccttttcccgatccaaccctctacagaagtactctaggggccctgtagtatctaactctcacgagaccggatgttgctttcattgttaacaagcttagtcagttcatacatgcccctacatcaatacactgggatgcatgtaaaaggttgttcaggtacttgaagggcaccatccatgaagggttattcataaaaccagctgctagaatggatctccaagcttattcggatgccgattgggcaagttgccctgatgatagaagatccactggagggtatgctgttttcttgggagataatttaatctcctggtctgcaaaaaagcaacaagttgttgctaggtccagtactgagagtgaatttcgggcactcgcgaatacggctgctgaagtaaattggctctgttatctgcttcaagagcttcgaataactttaccctgctgtcccattatctgggttgataatcaaggcgctgcctctctcgcagcaaaccccgtgtttcatgctcgctcaaaacacatagagatcgatcaacacttcattcgtgatcaactgttggccaaaacattggaggttcgctatgtaccctcaattgatcagactgctgacattctcaccaaatgtctttcaacagatcggtttctctacctaaaggacaagctcaaagtgtgttcatcaccatttcgcttgaggggggatgataacaataatacagcgttagttcaagaagtagttagttaactgttggttattgtaacagtttcttgccacgtgttttggctgtttgctttactctgtttgttctgtttttctttcctctgtaacagacttcataattgtctatatatacatcttctccttccaaggcttgcttaacttttgcaagtcttgtgtttcttctcatagacagattcctcatagatttgtatagataagttcccagtttacatggtatcagagccatatccttagcgggctttcgatccacacctatccagatggtaaaaaaaaaaatcattatcattattattatagtgaactagacatcactaatatattaatatacagaaaatcacatataaaaaggtaagtgctttttatttgtttttgttttcctaatttttatgaaagtactgtattaatattttaagaaaatatattattcacttaatcttacttttttttttttgtaataatccacgttgtctaaaaactataatgattcttgcattatttttttaaaaaatgatattatttgtgggtaaatactattttaaatttttgttaataaaagttactaattagattatttgttttcttaaagagtaatttgcggcaaaaccctctaactatcaatttacttgcaaaaaatcattcaacctcatattttggtgggaaaaccttccaaagtactgttccgtttacatttttaaagtgtcatttgtccagtctcgttattcctaattttgcccacgtgtcactgacaagtcactaaaaaattatcttatgtgaaataaaaattttaagagtaatttgcggcaaaaccctccaactatcaat

SEQ ID NO: 32695 - DNA, 2791 bp, Cannabis sativa
taaatagacacatttacaaaattatcccaccctaaatatttgaaaattctacgattcaatatagttttagctatttagaattttttaagttcatataacttgtatttatttaaaatattatgtaaaatttagaaaaatttaacaccactaaaaataaaattcaaattgtttgtatacacatactttttattttatatacgtgtaaaatatatattactttacatattgtaaattattctgaattttacaaaaatttacaaaatattttacataattagagaaattttaatatttttacataataaaatcctcaatatcaaaatttatacattctacttatttgtacaaaatagtgccattattttcctaaactacccaaaataccctttttatttaatgcactaccgagagaacccatattctaactgtcatcgtcgtcgtcgccgtcgccattaccaagctcagtgaaaaagtaagtttttttaaaataaaaaattatatttttcatagatttgcatgcgaatttgtgtatgttcttcagattagttgaatttttgtagatgttggatatgtttcaatagtatttgtgtgtttttacagtgttattgatgaaatattgataggttatcgatagaatatcaaccaaaaatcgaaatggggtagttgattgtgtgagtgaattggttacagttttatcgatgaaatatcgatagtttgtcgatagtatatcgaccaaaaatgaaaatgggtagttgattgtttgagcataactattttttttttattttttactgtatatcaataggttatcgacaacttatctatggtttatcgacattttttattaggatatattttttaaaatttattgaatatatcgatatgttgtcgtgaaatgtcaacttgttgtcgatagtagttctttgtttgagcataactgaatttttcaatttttttaactatatatcgataggatgtcgacatgatatcatggtttgtcgacaatttttgttaagatatactctgttagactatgttatgtatgtcgatagaatattgaccgtttgtcgacatgttatcgacaattttatgcattattatgttaacaatttgttgacaggttgtcgacattttgtcgataattttattgtattcattttttttattgtgataatatcgccagaatgtcaataggatgtcgacttttttcgacaactttttgtggggcatctttgatggtgtgcataacgtatgtttttgttatatatttttctaaatgactccacgactcatagtttcaacatttgagtattttactggtcgtgtgacatatagaggcaccggtgcttttgcaaaaatcaagatgcaatttgaggagtacaatttgagtaacatagtgaaaggaagtagtttcgacaacttttggaatgacgtacctctcacattttcctcggtgttatttcaccaagtcatgttacacaagatgaaggttgatgttgagaaggcggaggagatgcatttttacattggctggaaggagctcagatttagagtggttgagtttgcactcattacaggcctgaacttcacctcgaggccaacatatgaggagaaagctacgcaggttgcccgctcggggttagaccgattgatcaacaaatatttcaaccggtctgatagtgtgaagacagaagcactccaagtaagttctcaaactgtcaaaacccgaaagacttatacaagcttagcttgtgcttgtttgtggagatagtgctactaggtcacgaggctaacgctttgattatggctaacatacttagacatgtcgaagatctcaagttcttcttctagattccttaggggaagcactcattcgccagacttatgcactcgcttcaaaaggacatgttgaaacagaaggccaactacgagaagaagctgagtttggaagttcagcattagtgcaaatacacagcttatggtttcgcacctgtagtataatattgggcatatgaggccattttagaggttggaaagaggtatagcacaaatcatgtgattcgatttttgaggatgcttagttggatgagcaagggtgagataaagaataaggagctcagtgtattattttctaaacgagtatgaatttcttttatgtttagagtaattattcaagatgaatatttataataaatgctaaatcatttttctcttatattttttgaatcttaaacagcaacttaaagtgatgaagaagctacttccacgcatagaagaggaagaatatgtaaggaccatctcttataatggtgtggagatcctggttgaggttggtgtggatgccacacaggctgaggaggacacccaagacgcagttgttttcagaagacaagcagaaaaaagcattggaatatgtcaaaaatgctcctttgcccaaggcagagactcaagtactatttttttaactttttttttttatgattattatttgtcattagttgtgattagttggttagttgtaatttacataggttgtcagtcattgttttatagtttattgtgttatcattttttattgatacattgtcgatatgatatcaatagcatgttgacattttgtttacttttaccataaattaatatttttttgtcattgattaatttagggtaattagtggcataagtactcaaagttttaggtttgtaagcggcataaacccaataattttttttagtggcataagtacccaatgtttataaaactgttattttctttcagtttcatcagtac

SEQ ID NO: 32696 - DNA, 2579 bp, Cannabis sativa
ttttttttttatttaattattcaaagaacatgtttttaatttagttatttcgagaattgatttttgatttagttaatttaagtaaccggtttttgatttatttaggtggagtttggtaacacttttataatcagttttctgtttttaaaattagaaaagtgaaatattttttaaaaacatgttctataaaattgtttttactttttaattttttaattaagaatcaaaattttgaaaaaaaaaaatacttttaatatattttaaacagttttttttccttaattaatattttagactccgaccagaaccggacccaaatccccccacggccctagcactgaacccgaatctgacccgaacccgaatctgaccccagtcctagaccaaacttaaataaaatcaaaaaatgaaaaagaaaataaactttacagaacacactattatttttttatttttaatattaaaatataaaagtggttataaacacatttttgtttttcaaaaacaaaatttttaaaaataaaatttttactttcattttgcgttaaaaaattaaaaaacaaaagttttaccaaacgacaccttatttttacataattagtttttgtgtgttatttttaattttgattgctttacaaaactaatttttctgtctcagatttttatctaattaattgacgtaaccagtttctttgtgtcatattctaacgtccaagttcaacatccaactccggtaacaataaaaatttcgatgactttttcaatgccaatgacaacttcagtgacttttcgatgacttttccgatgacgatgacaaattttagtgatttttcctgcaaggatgaaaaattccaacaaaattttcgacgatggtgactgtttcgacgaattttccagcaacgatgactgtcctagtgccttttccgataatatttattattagaaatcttatcaactttatttatgattttttatttagtttccctaactttaaaatcttttttatttttttattttttatttttagtcttatatcttttttaattattttttatgccatataaaaaagtgaacctttttttttttccatatttataaaaaatcaccaaccccataagcaaattactccaaaatcgtcacgaaaaaaaaagccaaaatattattacttggttgatttttgcttctctaatgccactgataacatctttgaggatgctgatgaagggtgtagctcctattccaagaccaatcagcacaaccatatcatacttgacatggtcttgggaggcagctccataaggcccatcgatgtatattttagggtacttctttcccccagatagtgttgcctggaaaacttcaagagtgagcatttttttttattattattaaaaaaaagattcttctcttagcttcagtgaaattactgcttattacctcttggaaaatactatatattgtataactccagtcacctagagttcttatatgcacacttaaatagtcatcttctggtcctgaagttagtgagaatggatgcctgagataacgaaaaggagtgatcattggaaacaattcaaaaatttcaaatcaaatgtatatttctatagaaaccttcaataacagaagtaagaatattaggctatacttgacaagaaggcatctagatattaccattcaaatggtgatatttgagggcattgaatgaatatgtacatgccactctggtacctaaatccttctggtttctgcaacttgagggacaaaacttttcctggataaaaacttgcctgcatttttgggttacaccattacagaactgattgtcatttcatatggtaacaacagatgagttttcaaattttctgaaggaagaggattgtttgtcaaccttcaaaatttgaacctcacagctgcttgatcttatggctctgaggatccgttctccggtgtatacagcaattggaatggaaatgtacatccatgtctactcaggaaaaaatgagtgaaacaatgtacttatgtatttgagagtaaattttctcattgacaaagttgaatgaaataattagaaaaagatctcactgttttttcagccgcatcatctgttaggaataggaacatggagtggataataagtaaggcatacacaggaatgaataagtggtgagagtaccaaaaagtgttgtatccagtgacatgtcgaactgtccttggtagcaatggcgactggcgtcgtggccacttagttgctagtgaaaatgaaatggccattagcactaccataacaatccctgttgccacctctgtggtggctaatatctctaggtatgatggttggtggtacccgaatccggctgctattgtctgttggaaaactgaattgttggatttactaattcttgggaaatcacaaccaagatgagtgccaccatgaagaatcactcccaccacaatccctcctgcaatcaactgtactcaactagcatgttttagcataaagctttagttttgatcaaatcttcattttctttttcaatgatgtaaaaatttagaaaattgaagttgcatatctactt

SEQ ID NO: 32697 - DNA, 1660 bp, Cannabis sativa
gctaaaagtgaggtcaacaatatcaaatgtcaaaacaactaaaaataagcagtagaatcttaaaagctccttgatcgaatttatgtaaataagtcctccaagaattcttatgttgcactgcatacaattaggccatgtggccaatgcataaagtagttatacctattttgttgcactacaattgcaagtgcatttgaagctttcccgtccttttcaggtaagaaaacatacaatcatttaattatatacttttacatataaatttgaatgggtagagtaattataaaaggcaataaagaaaatgaaaacaatatttaccttatattcttcaagatttccagtaaattttctatttggctattttctcttcttttaaatcactaatatataaagaagttatttcacttatatggacgataaatattacacttgcatatgaaatgagaaatggattgaaccaaacctttctttcttctgctttatctcacatctcgtcttgcttggatgaactctctattgaaatcaaaatgcaaacctcaacaattaaaaagtaaacatccgacgactaaaaattctacactcagcgactgaaaatgcaaatttcaattaaaaagtagtgattgaaaacccaaatcattctttatgcctttcctccaatcgtttctacctccatccgacgactaaaatctagattgagaaattgcgactaaaaggagatgaagaacactttgtaaagatcaaactaagttctttctcagaggagtcatcttctatcgtagatcaatgaaaaatactctaggaattgttatagttgtcattgcaaggtgtggttacgggagaagagaattcatattttgaattcgttgatttcatatttagtatcgggttttaattaaaagttaaataagaatattttgttctgtcaaaatttcacagaaaaaaataatatcgttaaaccaagaattctgttacatagccatattttatattaaatagatataacaaaaagaatcttatagcacctaatatttactacacttattagtcataatcttcacaaatttttaatagtcatctatatatgtaatatgtttatatttatttgtaattatatcaattaattgccatcaaatttatttaaacaacaaacatattatgaatgatagttgtgttagattgatactctttatatctgagtcatttatataaatatattataacgttcgtatattataactaattacttaatcccacactttattttgaggtgtgtgatatctctatgtaatttgggatgtttaattgaattgtaaagtcaaaaggttaaatgcaaccgatgataattagtaatcgattgatatgtttagatcattgtatttatgttgaatattttattgtgaagcattatcacgagcattcttttcctgtagtaatgcgtgaattatatgaagtagactaactcacaccacttttaggattaacctgaaaaatggcttaaactacaatacatgacaaaccatcatatatggtaccaaacaagtcatatcaaacacatacaaactaacatacataagtacaatacaagccaaaagccacaatcgacccaaaaataaagtaccataacataaaatacaaaataaaatataaaactaatagtaat

SEQ ID NO: 32698 - DNA, 1605 bp, Cannabis sativa
atcattactctgctctccctcttttatattatccatcttctcttaactctctctccatcctctctattctccatccaccctaccaaacatatgtaaaagtattttaagtcagcatattaacaaaattatatgcaactaaaaagtctaaaatttacatcttcctttagggcctaaatttacatctttaagggcctaattactatagaatttaaaaatagtgaaagtccgtataaaatattagaaaaatatatagtacactctttaaaaaatattttagtatattattcaaaacattttttgaatctgaactataagatatagttatttagaactacatgttttttttagtataaagttcaattattttattgcactcgtaactattttttactacgtagtaattaattaataaattaaattttatttttaataatgtaaactatttaaaaaaatttaaaaataaaaattaaatagttatccaactacaaaacatagtgtactgcagatttttccatgattgtctattttaaaaaattaaatccaactaagaatttaaattttaaactaaaatgaaaacagaattttcatattttctcaatttgagtgtacaaaccaaccaatcacatattcaattttttgaaaactaaaaacaataaataagatataacttatcataagtttgtacaaactaaattcaaattcacttgaacctccaattttcttataagaaaccaatcaacccctaaatatttggttattatttcttttatgatgtcattcttaatttttccaaatcatttattttagttctttatctcatttttttattaattaaaaatatttaaatgatgtataagaaattaaaaaacactaatatgaaaattctaaaaacaaatttgatgttttacttgaatcaatcaaccaaaatagtttattttctgtgtttcctcactaagacaattagacttgtattccccaatctgaggcccaaatactccattggaaaattagtgaaatggttgagcaaagaaaaataaaaaatgcagggtaatactaacactaacaagtgaagaaaaaaaaactaaccaaaactcaattttaatcatcagtcagcctcctatttgttgttatgacttagtgactcttatcaaaagaatgattctatcactggtctcctagtggctagtaaaatgtttgatgtgtactatacaaaatcaacctcatatgtttcacaatctataattttaaaaaaataattataataatggaaaagagaccaataattttaccaaccatagtactggaggcacattatacaactctaaaagaaggggaaaaaaaatcagccaaatttcccaatttccatcttcttcctcattgctttttgaccatgatatacaaaggaatctattattccagcaatagtgaagatacctaaacatattcaagagaagcatcaatatagttagttgcatcataggtaacatacagaaagaatatcaaagaattgctgtgaaaaataacaacgccagaagttatggataagtagcatgcaaagttttcagacatttcaaataaaccagtatatatatacatatatttata

SEQ ID NO: 32699 - DNA, 1984 bp, Cannabis sativa
  modified_base (1429)..(1429): a, c, t, g, unknown or other
agaaaatttacagttttacaaacacggggtacttatgccgctaaaaataaacattgagattatgccacttacaaacttaaaacttaagtacttatgccgatgtttaccctaaatttaatacacttgatcataaaaccccaatacacttgatcatgtactatatactttaaattaaagagaaatttgcggcaaaagtcctcaaaaacttaagattgttgcagattagtccccaacctcaaaaattagcggtaatagtccccaaagtcatgttttttatttgtccgttagtcctaattttaactgagtcgtttactttttaaaaattaccacgtgtcacaatattattggtctaaattattattttaattttaaaaaataaaaataaataaattatttaaaaataatttcttttttctttttctttcttttcttcttcttcgtcttcttcttctcactgctagcaccaccaacccccaaccctcaactccacagacgccatcttccttcgcctcttcttccctccacattctctgagatcatcagatctccaggccagattggttatctctggcatcgtaacacccagacgggcaccagcagtagatgtagcaccccttgaaacgtcgatttctctctctgccaggctcgttttcaccatcatcgccgccctctctagaggaagccttcgatctaatcccacccaagtcatctgcaaacctttgtcaacatttaaaaaaaaactatgagttcggcacagagtggtaaaaattagggttttttaattttattattttattttattttaaaaaacattgtttcaaaatgggttggtttttggtgtccaattgacagggctggagtgggggtggctagggctggctggggtcggctgagaatcctaacatcgggatgtggttggggtcgtggtggtgctccggtcaaacgttgtggctggttgaagaagatgaacaagaaaaaaaaatatatatataataaaataaaattataattttaaaatatattttttagttttttattttattttaaattattttaattaaaattattattaggaccaataaaaaattgacacgtggcactttatttgggtttaacagatccgttagaaaagggatctaacagacttacaaaacgccaatttttgaggttggggactaatctgcatcaaccctaagtttttgaggacttttgccgcaaattttcttaaattaaaacattacattatttactaagtatattattatatattgtaatattataatgtaatttaaaatatcaatcatcaatatataaaatgagagaaatgaggcggtgacatgacactccaaaattattctaaaattatttttctctactctccttaattttctcatttttaatattttattagagcataaatctataaatnatactttactattattttaataaaccaattacattaaatatctaactttaaattttctccaatttttaaaacatatataattctaaacttataaatatatattatacatatatttatatattgttctatatgcatctctctcacacatttgttgttcttcatctttttttttttgttcttttgtttttttaataaaaattctcaatctatatctaatccaatttatttttttctctttttttttttatttgctttaagtttaagtaactattaatttttgatgtatgcatgacacctcgacgaaaacatcaataaatagcatcaagacctcgatttttaatatttctccataatttggagacatatagacttttttttatgtcgacaacttcaccgccatcgatatttttgaattattcatgatttactcattagtatgaattattttatgtaaaaaaaatgattttttaatgatatattcatgaaaagtgataaaaaatactattgtagctttttttttattctcatgtaatactctctatttttcattatatt

SEQ ID NO: 32700 - DNA, 1653 bp, Cannabis sativa
catactaaagtcttttgtcttggagcaattaatttaacacctgatcttattcttgaaaatgttctttatgtgcctagtttcaagtgcaatttgctatctgttaattcactaacaactacaactgattgcactttctctttttctaatgaaaactgtgtcatccaggacactttgaagaccaaggtgattgtgatgggtaggaaaattggcaacttggattgcatgcattgtaatcaaactagaaataagcaaatgcttctgttatttcttccattttctgattccaaagttaccaataacactgtatggcattacagattaggtcatccatcttgtataaagactcatcctttgaataaagctttaaaatttcatgccaattcagattctttatttcattgccacatatgtcattatgccaaacaaaaaaagttgtcattcatttctaattacaatattgctgaaagttgttttgatcttattcatattgacatttggggtccatataacatcatgaccacggagggatacaagtactttatcaccattgttgatgattgttccagatacacttggattaatctaatcaaacaaaaatctgatgccaaagtgctattcctcaatttataaaacttgttcaaaaccagtttaacaaaaccataaaagttgttaggtctgacaatgccaaggagttgcaatttacggatctttttagtgatctagggattattcattatcaatcctgtgtttaaaggcctcagcaaaattctgttgttgaaagaaaacattagcatttgctcaatgttgctagagcattgctgtttcagtcacatataccactggtttattggggagattgtgttgctactgcaacatatctcattaacagaactcctacaccaaacctaaagaacaagtcaccctctgacatactatattctaagccaccagcctatgagcatttaaaagcttttggattccttgcctatgcatccactctaagccagtctagattaaaatttgctcctaggtctgttccttatgtttttcttgggtatcctgttggcatgaaggcttataaacttcttgatttgaatataaacatgacattcatttccagaaatttctacttctatgaacatatctttccttttgttcatactggtctgattccctctggacatgcatctttcttttttaatttttgtcatacatctaagcctaataattcacaagatgcatgtacttcctcatctgttccagaacctgatattcctagttcttctgaggctattcctactcataatgttcctcattctacaagaataggaagacaaatcaataaaccatcctatcttaatgaataccactgttatttggccactaacaactctgctattttttctcaggcatcttttgtcattgatcatcccttgtctcaggctcttgggtatcacaggttgtcaccaggctacagagctactgttcttgctatttcaagccatttttaactagccactttcagtcaagcccatggaatccctgtatgggacaatgcaatggatatagaaatagaagcattggagaaaaatcacacttggattgtgttaggttatttttagtattaattttagattaagtttagtatatttt

SEQ ID NO: 32701 - DNA, 1218 bp, Cannabis sativa
taattataacgtgtcacgtgtacaaaaatatacatctaaacagttcatgttggtagttaactgtggaaaataaattgttcattaaatttgctaacagtttagtaatttagaagattttactactaaaatttaaacttaaaagattaaatgtaagtaaaataatagttaaaaaggacgtaaaaaacttttcaagtaaatattatttaccataatatttaatgagtaaagaaagtacatacatatatatttaaattgtacacatttttttacacaataattttatttagcttgtgatgtccatcaaagttatagttcaatgaaaagaaaaaacaataggaaagtatttttttttttcacatattcttagtactgtttggttttttttaggaggaataatagtatttatcactctttatgtgtactaagtccatttctatcaggatattaaaattttaaatttagtgttatttctcattaaaattaatctagccaaacactaaagttattctatatataggattctctacaatattctattattattagtggaacactatggactacactaaaattgcttttttatttttttcaatttttaatatttaaataatggttaaataattaaattttcttaatatatatatgtgtattatttataattatatatcaaaataataaaaaaatatatatttttgtataatttatagtgttgtagttataattaaaaaaaataatactaaaatagtattttttttttttaatattgatttaatactaaatttaagttttacgattagagttacccttaagtatagataatttaaccttaagaatttaataaaagggattcagtgtactaattactaaattttaaagtttaaatagtttaaccagtaattactttttaatatttacttattttatttttttacacgtcaatagtaggcaccctcggccagcagctaacaactttgggttttggaaagagttgtggcagctgaaaatacctccaaatgttaaaaatatgttgtggcgtgccgtgtgaaactgcctccccacatgcctaaaccttgtcatcatacatgtgaatgtctctgttctttgtcccatgcgtgatggtcaacccgaaaacacttctcatgctttgattgagtgcccactggccgctgcatgctggcagcatattggagttcaactaccgacatccccaggtacttt

SEQ ID NO: 32702 - DNA, 2616 bp, Cannabis sativa
agatagttagggtgttacagtccctatagtctgtgtgaaccctaccttattgagaagatagcctgagaccagattccttctcatctctgaagtatgcatgacttctttgagaatcatagtttttttagcggtaaactttaattttacatcaccagtaccagcaacaatagtagtgtggaagtcacctaacaacactttcttatcctcggttgcagtcgtgtatgttttgaacatagcatgatcaaagtagacacgcgcaagaagcaccagtgtctacctaaaacccttctgatccaccaatttggttgatttctgaaatcatagttgtataaggcagctcttcagtctggttagcctacagaacagaactagacctatttcaacacttgcatgccatatgacctagtttgttacaaagaaaacacaaatggtcattcttattagggggttgctactatttgttttggttccttggaatcccattctaattgttattctgaaaattattgttacagttcggagcatgcttgctgtaacgccccaacacacggggacgccacgtgtgtgcttttacaaacttacttagactaatctattagtttggaaaagtacagtttaattaaaaacttttaattaaactggaatacaactatcattcaaaataccaccataatacggggatcccctgtttataaaacttttacactaagttacaaaactgctattacaaaagaaaatttacattttcaaacacaactaaaggttgatcctgcttcccggaagccaagacaccacgactgatatgtacattgctggaagatttcatattcatccaaacacagaacctattctccttacctgcaccacgaagtactcgtgagtcacaaagactcagcaaaaaaagctacaaaatccgaaagcagtgtaaaatacaaattaccacaatgtattaaaataaacatactcatgattcggcatgcattgataattttacatcaatacaaacatatattacatgcattataggaatatcataggcaaccatttcataattacaataagtaaatatttactcaatacatagtcacacaatcttagtgcttcataaagcgctttcaatcatacatcaccataaacacataatcttagtcgcattaccatacactgatctcagtgtttcatgaagcactctaatcacacattactataatcacataatcatggtactttataaagtacccatttaccactcgtttcgttaaccaaaccacaccacaagctgtgaatattatgtcactatcattgcccgatgaagtaaacaataagaaacctatccacggtttcaagagtaattactcgtagcggtaatgaccgtatctttattattcatgataacagtaataaccgtgtctttcccccaatcataatccagtcacaaacaataataatcatttctcatcattatctcgattataatcgagtcacaaacgataataaccgttccttattatcacctcgaccacagtcgagtcactacgagtacatatcattattctcgatcttaatcaaggcactaacgattataactgattcttatttagctacttaacaaagcattaagcttttcttacctcagtcaagaacgcaagtgtacatgccaactcgagtggaaacaaagctgggcgatccccacgacaactaaaactcaataaatgcattaaaccaaaactccatataaaaccccgatccgaaaccgaataggaacctaacttccaacaactccaaaataggtcatatagcacataaacaacctcaaacagatactacgcaccaccccgagccaaaatagaacttgaagaaaatctaagaatttcccctgcagggcaaccggtcgaccggttctattgcaccataaccaaccggtcgaccgaatctgtcaggccacaaattcaagagttttcttccccaaacacgaaccaaactcttcccaaacctatgtaatagctccagaatagtaaagtatcataaatacaacatactcaattcatcaattcatcacaactcatcaaattactcaaatcatcaaactagaatccaagaaatggggtttaaactaaaaaaactcctaaaccaagctaaacaaccaagaaatcacccaattagaacttgaacaaatcttaatattacacttgaaacaaactctgaacttaagtaaatcatacaaccccaaacttaaaaattctaccaaaattccaacctaaaatctgagaaaaacaagacaaaagtgagaagggcttaccttaatgtctacaccacttctaaaccctattaattcagccaagagatgaagaatttgctgagaaaattcttgaattgctgctgctatcctagggcacgaagggaaagaaagaaaaaaagaagatggaaccttgtatatccctgatgcttctaatcctttctaaccctttttcctatatttcatttcatttattaacattatctttttttaatgatcagccactaaatctaattgtaaaccaaataattatctaaccccaaaagattattttaccctttatgatacccttaaccctaagacacatctagggacagctt

SEQ ID NO: 32703 - DNA, 3287 bp, Cannabis sativa
  modified_base (1576)..(1586): a, c, t, g, unknown or other
  modified_base (2262)..(2286): a, c, t, g, unknown or other
  modified_base (3261)..(3262): a, c, t, g, unknown or other
tatattattattgtgttctatgttgtatacaaattgatctttagtttattattagttttctaacaacttcttgatattgaaactaaacaagtttatatttcaagagatgttgtcttctatgaaaatattttccccttattttcaacatctcctccatctgaaataagtcacttgttacctgacattgttcttcctacaaacaaggttttacaacaagagaatcatgctcacaaaaccttgcatatctcacaagcaccgtctggtttaccaccagcaacaacctcacaccactacacacctgctgcatcaaagaacaaacaacataaaccaacttccattggttctggtacactagatcccataccagcagcctccacaccaggaaaaactaatctagttttacaaatcctggtacaacatcagcaccacaaaaagttgtttctcctcattctggcacttcagcgtccaaaccagaagcctctaaacaagaaaataacaacttggatgtgactacagtagctcccacaacaacaaacatcacccgaaccataagaactggtatagttttgaacaaaccaaagcacctaacagactacatctattatcatccatcttccagtgctcatccaattaagacattcctttcctacaacagattacaccctcaatttagagcagatgtccttgcagcctaatctaaagttgaacctcaaagttatgctgaggcatctcagtttcgacattggcttcttccaatagataaagaaactgatgccctcaaaagaaacaatacttggattgtcactaagctcccacctggccacaaagccattggttacaaatgggtgtaaaaagttaaatatgatgagagtagggttgttgaaagcttcaaagctcgcctagtagccaaaggctacactcaaaggcatgtcattgattactcccaaacatatgcccctgtggcaaagtttaacaccctcaaaaaaattttagctcttccagccatgtacaattagaatgtacaccaattagacatcaacaatgaattttttcatggggatctccatgaacaaagtatagatgaaaattcccccaagatataaagcacctcttaacacggtgtgcaaactaaataaaagcatttatggtcttaaacaggcttcgaggcaatgttttagtaagcttagtcacaccctcatttcagatggcttctctcagtctctctctgacaattctttgctcatcaaaagaataacaccatctttttagctattctaatatatgtagatgacataattgttgctagcaacaatgactattgttatcccaatttttgcactttgacgtggcatcgcataatggtgacacgtggaatccacttggagtatctgctcggagggtgcaatccgagcacgatgcctcgccggcatgcctagagcaaagcattcagcaatcaatgcagagcaaccaacaattagcgaattcagctttcgcattgagtcatcaacgaaattcctattacttggggatcagattacagagatatgacatacccacgatcccacgatcagtgtannnnnnnnnnntcccacgatcaatgtattccgcatttatcccaccatcagtgtatactctatggattgtgtaatctttctgcttatatccactgtaacgagaggggaaggacttcctctccaagttcacagccctataaatagcgatgcatgttcactgggcaaaaggtcgcaaatagtttagtcgagactataccctaaagatattatctaagaatacatattcagagatattgttgtacgagctataagaaaaggaacatttctccttgttcttaagtcaatacaagtaacgaggattagactattaccgaactgctcggggctgaacctgcataaaattcttttgtctttatattgctttattatatatagattgctataaatcacttattgcttactaaatcagactcgttgtcgttggctaaaagcgaggtcaacattttggtgcgttcattgagagaagaatcaagaattgctctttattcaaaatctaaccataaatacaatggtgcagactcgtagtggcctgactgatccaacaaattcatagacggtggatcctgcattgcagcacccaggaaacacaagggtcccgccagctgtcaatcctggacagccgacaaacgtggataactgtgtaactcctatagatgaaatcgtgcatggtgtgcaagagactgggaannnnnnnnnnnnnnnnnnnnnnnnnattcataacacaactattccgcctggaaccaacacccagacgaccatcggagatgctaatgaggtacaaaatctccatgacgctcttggactcatgcagggtcataacaataccctacatcatgattaggacgaactccgcactgcggtaaatcttgcattcgaagaacaaaggcgtatgtttaccgagtggatagatagagagatggaggcattaagggctcatcatacagagattgaaaatcgtagtcgacaagctaccgtgttgatacgaaaagcctaccaaactgtaggtcagcaacatctgaatatcattcccctgggtgagacggacaaagatccagcgatgaatacttcccagactgcaaatggtcaaccgcccaatccctggtcacgagttccactcgtgggcctagcggtaggtggcaaaccttgtctaataattcatcaggagaagtcatacctaatggttccaaccaaatcaatggtgccattccacccgtcaaccaagcaaatcaatcgctgaggcagtcaggcgcttttgtattcgaaaggttgggggtgacccatgacctaaggaatgatctgaatagaaggaggggagtagacgatcagaatgtcacgacgatcgtgcagcccggagcccgtacttaaattcccgataagaaagatgctgacgaattcaaatttaccagaagccgagcaggttagcccagccgtacaggcacaactagacgaattgaaagatatgtttcacagcatggctgaacaaagaaacaatgatcttgagctggactgaacatgtgtaactcctttctcacttgagatcaatctcctggcattgcctcacaagtttaaaatgccaacatggaagatgtacacagggagagaagatcccctttcctatctcaaggacatcgaaatgcaaatggatttgcaaggggtacgaggagatgtatatgttgggttttatgcnntaaataaaactctgtttcaatgtaa

SEQ ID NO: 32704 - DNA, 1146 bp, Cannabis sativa
atcctttttcattgtaaggggcattagaaaagattctactaaataaaatttctagtgttcttctctcaaaatgttcttctaaattttcttgaagagatttcttaagtagtgatggtgtgaattatggatcataccgaagatagtattgttatgagttaggtatcactcaagtgtaaaggtaactaagcaatctatctttcataatcgtaagtcacgatgcagagtcgtaagtcgtgaagactcttgtgagaatattgcttaagttgtctttatatttgatgatgcttagcttatagcaggaatcctaatcataatagtcaatataattgatatcatagaatcaaattgaatattttgtgatatgtatttttactataattgatataattaaaactcttcatcatatttattttagaaatgataaaaaatatgactatataatcatttttaaaaaaatgatattgtatgtatttttttaattttttttaaaaaattagatacatacatgagtcttagatgtgtaagtttatataatcaattaggattgttggacacaaggaaaagatcaacttggtccaagagttaaaatagtgggaacaaacaataataaaaaaattgatatatcactactaccaaaagagttttttacttcagtttctaacttacatataaagaatttgcttcagttagcgtaaccgatgctatagccgtaaacacaaatactaaatttttttgctttggttatgaattgaaactaattttttttctttttctttggttatgaaaaaaaagcttttgcttctgttcataactgaagcatatagtagtgtaccgacaccaattaatttttttcttcgatttaaaagaaattttaaaaaaaattattaaaaaaatttgaaccatcgcaccaccattcaaacccagaatacacagatttaaactaatgcaccacacctaactcgttattcctgaacccagccgcacgccaccaccctaaacctgaaaaaaaaaattctatctattgaaattatgcaaaatgaaatataattacacctctattcagaaaaaagcatcatcaaagctataaaaaaactgattcgacaatcggttcataaaaatcccaactggagagagagagagagagag

SEQ ID NO: 32705 - DNA, 1403 bp, Cannabis sativa
ttttagagaggttaaatgaaagaactcggaggtgcaaaacaatttgggttgaatatgcacatccctttctttatctatcaagttttgatttgtcttatatatagttactagttcactttggatctaaacctcttggtcttagtctctcttcctatttccatatgttcagatgacaaggtaaccgttttggagtcggagaagcgggcatgggagacttctccggaggctcaagctctcagggaagcattgaatccttggagaaaccatgatacagaagcagagaagaaatcatagttttttccccaagttgaatacttctgatgccaattcttgcattgaaatggcttatgtttccaatcccatcctatctcttgttgactagttttatgtagtcaaattgtattttattgcaatttccactataaatgtaatcataaaaattcattgtagtagtgacatcaattattgaataaagatcagagtacattaatcattttattattattttttgttctgtaagaatgttagttcagtaagttttttttttttttttgatgaataaggaaacttgtattgctcaaacaaccaatttacatcacatgattttgtacaaacacaactgatactactaccatctgctataactctaaattctgctataactctaaattgtctaccaatttacaaagtcaattacaaacacagcacccaattcttgtcctcatcctttgctttgcttggccaaacccccacaatccttctcttgctttcctgctgcacccgattgacaattactgtggtttgccactgtttttggttccatagcacatcattgcgtgcaccccatatatgataaaccaaggcagctaacatagttaataacatgctcttcctggtggctgacacaccttttttcttgttgatgagatgcagcagctgctgcaaatccgtggctttggtgccccattgcagccgaatcttccactctgtaagacatttcccactatactcacactggaaaaaaaggtggtgaattgattcattctccttcccacataacaaacaagttaagtccacctgtgtatcatatttgcttatcctatcttttgttttcaatctgtcccacaaaattaaccacagaataaacttgtgtttgggaataacaagcctatcccacacatgtttataccactccttcttctcgggcctattaaacagctcatgatagatactagaaatactaaatttctgcataaggaaagttgctcgatccatcttaccttttacttgatctctaacttgaatcaattttttccaaaaccagctgccatcagtgggaacttcataatcccaccagcacctatctttcaagtatacagcatgaacccatttgacaaatagac

SEQ ID NO: 32706 - DNA, 2411 bp, Cannabis sativa
ggccaacatggagcaacccataggctccatgactttgtctggtgtccagtattatgctggagagatgggcccgagaattggcgagccattcattatcgagccccatatagacttgggagaagatctcaagttagccagacttagaaaggttgttcgtcaagtcggccaaactaaagtaccacgcattattggttgggatgtattcacataatagacatgcaaatgtcagagatggatggatgaccaagagtacatccttcgatctcaccaggcagagatagactgtcataacaaagaaggtagtgacctgataatgcagtttaatgaaagaattacttgaagaggttaggatcaaatcagagatcctctccaagggagactagttgacaaatgagggagggtctataggtaaacaatccaacgaggctcctctaggagcaagatagaccttcccttacccaaaggaggacaagtcttgccacgaagatctggtggcaagaacagcaagatctaggtaaccagctgcctggggggccagccagggatctttggcttaacaatatccctgattggtgcacctttggccgaccaaccccctagtggagaacatctggccaacaaatagggtgaactctcatcccgaagcatccgagagtgagtaacccaaaggccaatcattaaccagcaaggtcttggaatgggagaaaatacccaagacaacgacaacttgagatgtgagtctaatcactttaaatatttagatccacgtaactctaataatttgtgtgatctaccccctgttaacatacagtctacaccagccaatcaaggaagaacgggcgcccaggccctacccaccatagcacttgctggccatgagtagctacctagaataggattgtccagccaaggctacttcccctacctaggagtggctagccatagcctaaaccaaggcttagggctggccgacctcgagcataccctttctaacggtatggctagtaaaactgtggccaattcagggctgcagcccatcaaagatgggccaataagtgaggcccctatagcatcagatcccctgtagttggactagataagagacatgatgaagggcctagctggatagatcaaggggttcaccattctggacatacataaattccttgcccttgcccatgttcaagatgacagtatgaaagatgtatactggacaagaggactcattagcacacatgaagtactttaagatgcaacttgatctctagaagattattggtgatgtgcggtgttggatcttccaaaaaaccttgtcaaaaatgctcagaatggtacttcaagctggctccaggaagactcaattcttggaatgaattttctttagaattctacacccagttcgcatcctcaagactgataccatcgtagctggaagacattgtcgaggttaaataacgataaggagaacctttaaagaattacatccaatgaatcatggatgacgccaccaaggtaaaacgcctaacagaagaaggtcggtatacggtcgtactagggggcatccttccattgagtgacttctagaatgatataacaaggatctcaaccaataatatgaaggagttccttgatagagctaacaactttatcaagctagaggaagctgttcgacaagcccagacaaggtaagtcggtaataggcggtatcagggtgccctgcaactttatcaaggtttgtcttccgaagaactttggtggtttgggattcaaggatggagctagttggaatcaagcggttcttgcgaaatatatttgggccatttcaaacaaaagggattctctttgggtgaaatggatcaacaatatatatctaaaaaactcatctatttggacatatgaactaaagattgactcgagttggtattggcgaaagctttgccatgtgagagataaacttgataggttggacattcaaactgcaggggcttcgggtaagttcaaacctcatctttaatacaacagtaaactgccttagattcctttcatttacagcaggggtgtgtggagttcaataaatgtcccgaagcataggtttatcttgtggcaagttgttaatgatcagctactgacaaggaacaaaatgctgcaatttcgggtcttgctggacaatgtagagtgcccgatttgtgctgaagttgctgaatcaattcatcatcttttctttgagtgtaatctctccaacaaggtcgcagatcaggtgcaaaattggttgggagttgggggctggccaaaggattttcaggcttggaaaaacaggttggtgatcagcaacaaaaacaagaacagcagaatttgtactactgtcgtggcagccatggtatacaggctgtggttgaacagaaacaactgtg

SEQ ID NO: 32707 - DNA, 1310 bp, Cannabis sativa
caataccagcatgatccaggagtgagaaggccgcgaggtagaccttagggcttgagaaccaggaagcaagaaacggttcaagaagacctccaaagtacccaggaggagaaacctagggaaactagggatattcttgaagatgaacaaccaaatgatcaggcacctcgtcaagaagtgcctcggaaaccctggggattctcaacctaggggaatgaatacagtgattttccagagtcttcccgtagaaatgcgagcagaagataacccaagactagggaacatgaaatccctcgtggtaatgagaaaaatcttgggactcaacctaggacaagtgggttgccaccgagacaccaccaacgtccttcttaaactgatagggcgggacgcatacaaacattagtaggggcatgtatcaacccgttctcaaaggagaagccatgtacatgacaagggaagttctagcttgagacgtacttgatctcaagatcacagccgatttgcttgaggaggggatatacctcgaagctgtaatgatggagaaagcatgagtcatactaggagtggccgatctaagagttactcaatcacaaggtcaacaagtaattacgatcgaagacagctagatcttcgtgaccaattgaatcagaagaagcccgatttacgcaagtaacttaattctaaccaaaagcaagaggatccaatccaattgcaaatcaacgagttggaaaacaaatttaagaaatacaaagatggaaaaccgcctgattatgactccaatgaggagctcgacctttccatccaaacattatgagcgctgaattcccctagggatttaaaaaccctcatgtctcgtcatatgatgggactacagatctgtccgctcacctcaacaactttaatacaataatacgagcgaataatgtcatgaataacttacgttgtatcttattccccacctcactgactagggcagcgagcagctggttcaataaattcacccatcactcaattacctcttgggaacaactgtctaaagatttcaagaaacaatttaaggtatcaagagataggcgacttgaagcatcttccttaactaaggtaaagcagcagccaggtgagtcactcaaggcatacttgagccgacttagtacagccgctactagagttaggaacttgaatgacattatacagcttactgctattcaagcagggattacgactgatctctcaacagctggaggcaagctgtgggatgacttacagggtcaccctgtaaaaaacatcaatgagttcaatgaaagagctcaagt

SEQ ID NO: 32708 - DNA, 1994 bp, Cannabis sativa
  modified_base (436)..(437): a, c, t, g, unknown or other
  modified_base (573)..(585): a, c, t, g, unknown or other
aactcaggatccatgcttcctgggcaactatcgtgcaaccatcgcgcaactacgcagcaacctaacgcaaccgaaacgaaaattcaactagaaagataaatgtcattaattccggcgacttcatttgagaagacgaccagaatcaatcaaaacagaggttgttttgaattcataaaaaaaaaagtgttgaacaactaccaaactaaaatatattatttagatataagttgtcactttacttttagtcacaacaagtatattgtgattaaaaatacatttagtcacaataaattgtatttttgtgattaatacatttagctacgaacctttaattcaccacattaataatgatgatttataattaattacaatttttttatttttacttacaataattaaaaaagtaaaaaaatttaggggctttttcatttttacnnttcaaaataattttttttttgtatttttacggaattatgcatggaaacccctattgcaactagcactacaacttaaattgtaataaaaaatagtacagaaaaccctactgcgaccactttagaaacccaaaccgtnnnnnnnnnnnnnaaaattaaaaaaataatatatagggtaataaattctccaaaaatttataatacttatccgcaaataatctttattttaatttatatttgtgcactcattagtataggttgccacttggaatattattattaagctagcataataaaacacaagaatttgcattaattatatgtgtcttaaatatttataataatatttttagacgaatactacgtttgatatacatataataataataaaattaaccttattaattaggtggaaacggcgccggagagccacggcgacaatccacaacattgaacatttttcctaattaattaggtattagatttctaagacaaaacctctacaatgtgtcaaataacattacaagtcaactttcttttgtttctttgataaaataacatgacaacttttgcatgcatatcaaataaattagtacattatcttacaagaaaataaaataacatatagaaatagaaaaatgctatttgggactcatcttaatatcgttgttagtgtaattaagtattaaattgtcccatataatttaaaaaatatcactaacaaaatataaaatgattaatttaacaagtattaagtactattagtacttaataataatttttgtaaagatagtataggaatttaatttttgttaataaaattaagtagccaaattttgggaataacaattagaagaagacaaagtaaaggtcaatattagtggacaatggccggctctaaattctgggtatatattggttaattagttgaattaatcgagaaagtataactaaactttattataaattaattaattaattaggacaaaaattaagaaggatttttatgatccacaaaataaaaaggtgcactcaattagtttttattaattaattaataaagcaataatagaattgctccaaattgcttgcatgtgctttctactttttctatactcttctattggctgattaaatcagagttgatttagtactgatcaactctacacaataattcatttgttaaaaaaaaggaactcaataatattaatgcataaaaataaatttcatcataattattaacaatattttgttttttcttttatatcttttcaaaccaaaacccaggcgatcaatataaatatgtatacgtaccacaattatttaaaagatattaatttataactttatttaaaagatattaatttataacttaatcgcttagtcaatgttatttatcaatgacaaataataattatatatatgctattattaaaagtaattgcacatataaaatacatacaaaattaatccatacacttttttttgtgattttttaacaagtaagatccatctgtaataaaaattagtggttgaaatattatttactaaataagcatt

SEQ ID NO: 32709 - DNA, 1073 bp, Cannabis sativa
tgctttcttatatattcatgaaaatttcaagtgtctaatatatactactaataattgattataacatttattaattaattttattaaaaacaaataatgtcaataaaaaaattaattacaaattctattaattcagttacaatataaatttatttattattattaagagctatcatagtattaatgataataaaatttagtgacaatctttcaacttacaaatgtttactactatatatatgagctctcatataaatatatttgctctgttgtaaattatgtttttgttagtgctttatatatatgtacttttctttcattcttttttagctttgttgtagcagatgttaattaatgtactcatttctctatgtatatcatgcgtatatgtattttcttttttagcttttaacattttttaattttccatagatttttcttttggttcttattggaacacaaattatctttacaaaattatgttcttgatttcaggtcattaaagagcaaattgttgtgttttatttgatagcattggacaagtaagttaatccaaaaattatttgtttaagttgtttctcttttttctgtatttataacacatgattttagggaatttttttttgatgaattgtgaaactgtattactcttagttgtttctatatggcacaactaattttttattactttccaaatttttttttcttcttatttattggtatatatatttattaaaaaaagctatatgcaaagtacatacacttattttatgttacgtgctttataatttaatggagaatagttataatttaatggagaatagttctataaataattatataatttctataaataattatataatttaaaatggtttaaaaattaattttaatgattgtgtggaattatttcaaaattcatggtgaagcctaatttgaaatttgcataaagaaagagtaaaggagaatcattagagtttttaatcttcatctctttctttatataaacatagattaaaaatttatttaattacaataaccgaatgaaatattttaagtggttgagattaaat

SEQ ID NO: 32710 - DNA, 1124 bp, Cannabis sativa
aattatttgaattgtttaaatctctatgagaattttgacaacatgaaatgttagttttggtagattgctattacttagtaaaattgaaatagttttttcgtagttgtaaaatagtttctggatagttatgatacttatgaagaatttattacattaagaatttcaaaagaaatggtttttaaaagtcggatatgagttttttataagttgtataataaaaagtaaaaaaaagttggcataatagttggtagtctgtttgagataagatgtttgaaataaattgacaaatatttttgctaccaaattagtttgtgcacagttgcataatagttttttttttaaaagttgtacgcctaaaaatatacaaaaaaaaatattaattgtaaaatcataacacagttgctgttaaaacataaaaaagaatgaacataatataatggctaatttcaaatatcctataagttgataaccggttgcataacatcaaacgtataaagtacctaaaaacattaaaagaccaaatattgtctgaaataaaaatcaaccaagcacaacaaactttcccataaaatgaccctactttttccctttagaaaccttgaaagacttgctttgcttctcatcctcactatcaatactttcatcatttttcttttgaccatatgaaaacaagagggcagcaagacgagtgcggtaaacttcaatgttaaagtcagcaaggacatctttcccgtgaatgaagaacttcgcaaaagtagccacaaatgctccgcaatcactattttcaaaaaaggaaacaaaacagttaaacacctattatacaacataaagaaaactcaataacaacaactcactttttctcctgagatagaagactagaaatctccacaactcttagaggagctttcgagtcagaacctaaatcaggaacgtgagacctattcttccaaaatccaaggacagcaaaaaacaaagggagaagaacaaaataagccttcattgcatttttttgctgcagaattctttttggcagtcctaaaagaattataaagaaatataatcccctcattcaaatcaagacgaccaaaaactcaatgactttctttcctaagatttataatgaa

SEQ ID NO: 32711 - DNA, 1285 bp, Cannabis sativa
ttctacccggtgggggaatcatgccaaagagtattatttttcccacttaggctattatttaggtcggtcccggatgggttctagacctccagcgcctattcctttggattactcaacatacgtatctcccagctggtttattccctcagacagttatctcggggatgatgaagccagcgtcatgatttgagactttgctagggccgaaatagagagtcagggtaggactagttttattgctttttcgctaagtgtatgttgttctcatgaatggcctaacacttaacttatttctttgttgcagcagccagacccatggacgacctcttggctactcttgctgaggcttacaaccccgatgcttctccgcctccagctgcttcccagttggttaccccaggaggtcctcctccaacgccccctcaggcacaatcgtcttggtggacgaggaggaggaagttgaagaaggtgaagtggcggacgcagccgcccttgagcgtaagcgaaagggcaagatggtggaggcgaaccttctaagcggacctggaggggggacactccggcgctcagcaatgactctgggattccttccgaggcggaggaatacactgtgccacacgacgtagtgttcactccggtgcctgtagatgaggagaggcaaaatctctgcgtggccaagcacaactacgccctcgacgagtacagtcggaggcatgcttaggtgaaggctttgaagaggattttacgggaggagcaacagaacactctccacgaggaagccttccagaatccgtgggacctgaacatggatctgctgacagactggttcaaccgcttcgtcgggcccactctgcctccttttgcctcagagatgactagctagttcgtcccccacctgacgcaattcctgcctaaaagatatgctgcttgcgcctctctgaactctatgtaccaggtccaagacattagctctgccatggctgcggtgagtactctgtaatttattccatcccttgatattttttctaaggcatctgatctcactcttgtctcttttttcagattacttctgagaccggccgcctttccaagactttaattgaccacgacttcgtcatgtccaaattcgggggcatagacgaggccgtgaggatccttcgggacttgtctgccaaaaggcaggcatttcaggaggaggctcaacggacggaggccgtagtggaggcaaagcttcgagaggaggccaagcagagggaggccgaagtggaggcgaggcaccaggagg

SEQ ID NO: 32712 - DNA, 1729 bp, Cannabis sativa
ttctatttcaaaattggttagaaaagatcttgatattggtttgccatctatcccttttgtcaaagataaactttgtgatgtatgccaatttggaaaacaaattaaccactacacctttgcaattgcttcatattgattcatttggtccttctataattactagtcttggtggtaaatactatgcatttgtgattactgatgattttttgagatttacatgggttattttcttgacactcaaaagttatactttggaaaatcttgttaaattttgcatgggtgtgcaatatgaaaaaggctattctattacctccataatgagtgatcatggtggtgagtttgacaatgataccttagaattgttttgtgatgaacatgattttaaccataactttttggctccaagaactttaccacaaaatggagttgtcaaaaggaagaatagaacaattcaagaaatgactaggtcaatgctaaattaaatttcacttccaaaatttttttgggttgaggccgttaatacctcttgctatattttgaatcttgttttcactaggatcaacacgaataaagctccttatgagctttagaaagggagaaaatctaacactggctattttagagtttttggatgtaaatgctatattttaaacaccaatgacaactttggaaaatttgatgtcgaatccgatgttagaatttttatagggtattcaacacatagtaaggctcatagaatatataacaaaagaactaatattgttgacgaatctattcatgctacttttgatgagattaacccgcctacaagcaaaagcttagatgatgatgttatagttttgggagatgaggttcaaaatttcgatattggagagtcttccaatgctccatcacaaactcccaaagaggaaccacccatgaaaaaggtaaatgaaagccaaggtatgaattctaaccttccacatgagtgaaaattcaaaagtgctcatcctatagaccaaattctaggtgatcttcttaaggtgtcactactagaaacttccttagaaacttgtgtaatttcattactttcatttctcaaattgaaccaaagaattttaaagaggctgaattccattaattttggcttctagctacgcaagaaaaaataaatcaattcataagaaataatgtttgagagttagttccaagaccatcacatcaattagtgattgaaacaaaatgtgtctatagaaacaaggtagatgggcatgggataattgtgcgtaacaaggctagattagtggcccaaggttacaatcaagaagaatgaattgattatgtggaaacctttcccttggtagcaagacttgagtccataagaatgttgttaacttttgcatgccacaagaattttatcttgtactaaatggatataaaaagtgcattcttaaatgggtacattatggaagaggtctatgtctcttaacctcccagctttcaaaatcacaaataccctaaccatgtttataaattgaaaaaggctttgtgtggtttaaagcaagctcctagagcttggtataaaaggttaagcacttttcttatttcaaatggtttttcaatagataaagcagacaatacactttttataaaaggaaaatcaaaagacattattatagtacaaatttatgttgatgatactatttttggtgctactaatgataccgtttgtgaagaattttctaagtgt

SEQ ID NO: 32713 - DNA, 3438 bp, Cannabis sativa
  modified_base (736)..(736): a, c, t, g, unknown or other
ctcgcatataaagtcattgaccaacaacatatccacttcctgttttagtgccccttgtctctcggaatccaagggtctccttttttatctttttgctaggtactttggatcaaaatttaaatgatggcagataatgctagggtcaatccctatcatatctccatggctccaggcaaattgatcttggtttgccattaggatacttattagaagctatttgagctactcgtctaggttcttcccaatgtatacacactttgtgggatttcttgggtcgagaataacctcttccaattcttcaattggttttaataggtttttctcatcttgaactcgtgggtcaagatcttcatctttccattcactgtcttctgccaagatcaccatcaattgatgactggttttcctaagctgcaactctatgcgatagcaatcgcgagccagcatctggtctcctcacaccactcctacaccttctagtgtttggaacttcagggataggggcttgatggagctaactgcccctagttcgatcagtgtttgacgacccaacaatatgttgtaagccgaaggcaggtcgacaactaagaagtcttgcctaaaagtggcagataggggtgtctcgcccaaggttaatacgagctcaattatgcagagactagcaatactgtctccagtgaagccgcaaagatttaccatacatggcctcaatttagctttttcgagccccatcttncttagcgtttccttataaaggatatttaccgagctcccgttgtctattaacaccctctttacccttttattggcgagttgaatggtaatcaccaatggatcaatgtgagggtatctcacgtttttctcatcttcctccgtgaatatgattggagattcgtcagttttcaccttcttagaagcatctggggcaaatgccgactgctcgttctttgtctctttcacatatctcttttgggtgttattgctttcccctgcgatatgtggccctcccaaaataaccaggatgtcctccccttcaacagggagaggttgtaacccctacttgtttgggttattgggcagactgggctggttgcatccttggccctgtctttccatatacaatttaaagtggcctcaagggatgagactttctatctcatctttcaattggagacattcatcggtcgtgtgtccaatatccttatggaatttacaatacatgttgggatctcttttgctcctcgcattcctcatgggctcaggcttgtcgaaggcaaaattttgctaatgtgtgaggtaaatattctcttgagtttcattaagctcggtataaatagtatacactggcacatacttatcatgtttcttttatttctttttatcctttgacggttccttagaaccgtcctttctcttcgagccagaagcccccgagttatcaattctctttaagacaggtcttggttaaacattgctgggtttgctttccgagcttgttttcaacaaattcatttcttttcgggcttcttcttttcgaacgaatatctgagccctttcgttgaactcagtaatgtttcttactgggtgaccctgtaaatcatcgcacaactcgcccccagcggttgatgaatccatagagatccccacttgaagggctgtaagttgtgtactgtcatccaaattcctaaccctagccgcagtcgtgctaaacgaattaagtatgccttaagtgtcttgacgggttactgctttatattggttagcgaggccgcttcgggtcgtctatccctagcagcctggaattgtttcttgaaatccctaggcagctgttcccatgaagtcattgaatggtgagtaaacttgttaaaccagctgcttgctgctacaacaagcgaggtggggaacaagatacaacgtaaattgttcgtcacattactcgctcgcattattgtattaaagtttttcagatccgagaccggatcactggttatgtcatacaacgagacatgcaggtttttgaatctcgaaggaaaaggggtattcatgatatcttggtgatacggctgaagttcctccttcgagtcgtatccagattgtcttcctagttcccccacttaatatctcctgaacttgtcctccaacttgtctattcacaattggatgggatcctcttgctttggaccgagttgttcacggaggtcaggtttctttctattcaagtgctctcgtagatccggttgggagtaattgctgacagatctcatcttactcaaagatcgcgtcctactcacaaacttcatcctgctcatggacttcgtctttgagtgactcgcgaatttactggtttccatgctctctcgagcattagctcgtcgagtactttctcctcttcgagttgatcaactgtgggtgcttgattgccttgaggtcacacttgcttcgtcacgctctgttctttccccctgaatgtggttgtcgtatttcccccattagggtctgtacgaatccttgctctatgggtttgggaagaaagtttgtgattccttgcaggtgaccttcgttctccaggctaattcccaagatcttccttattttcatgaggaatttcttatccgtcagtttttggatgcctcccattgtcatttttcgtgtgagggttctggttgatcattctgattttcaagggatatctcattttccctggtttgttcttcctgggcattttcctatctcctggttcgtgagccaggcctcgtggtcttctcactccaggtttaggttgattttgagcattagtgccctgtgctgtcctagccgccgctgcatcatgcgctaattcagcgtttcgctgatgcgcctcttcgagacagcgtctaaggcagtatttttccgtttcataagtatcctctcccataggcagagtacctccacgattgggctcttcatccctcgtcccagggttctggccactcccacgctgagttctccttgagcgtgttgttgcgtactaggacgaacgtcaagttgggtcctttgggaatgtgtggttcgagtgctgggccaccttcaggttgagtcctcctggaacaggtggtctgtctggactgcaggttggtagaccttctggagcccatgtgctctttcccaagatgatgatgagtttcctcatgtggggtattaacattttctgggttttcagccatgaaggaggtggtttttcttcgaaagaaaggaggtttttttttttttgagctttttcacagaggctctcaatgaaagcaccaaactgtgaatgcagatttttgttaaccaaatttgatcctaacagtgacaatcttgcacagaaaaaataaaggctgaaaaataaaaagtatgaacacacaacattttttacatggtttttcagttaaaattcagcatagtccacgagtcaatctt

SEQ ID NO: 32714 - DNA, 1845 bp, Cannabis sativa
tctaaaaatctcaattgcacttgctgcaaacaaaaagagtgttttggaatcatcactgaaatcataatcaattttaaagtcatgccctctcttgtaaacaaaggcaaaagtaccagaaaaaaaaagctagtgagaaaatccaatcggagaaactgaatacaatccagtgattagctctaactaatcaaagatatactgagctaaaaacacaccatgatagttgtaatcaacaattaaaaaaactaattaaaacataataagtttctctgcataagtggactaaacagtaaatagaacaaattgcagactcgagaaggatacagccagatgcaactagaacataatctgttattgaggttttgaggttgttcttctttgattgctttcgacaatgagaagtttgttatagttgttattgtattatatttgttttaaaaagaaaacagaacaacaggttttagaatagtcttctcccaaagtcaatatataattaactatggcccactaatatttattcatagttaaacctacatgcagttgcctgcatatattgtgaatgtctaactacagtaaataatcactagtgtgtctctcggcctcactgaggaggtaaagaaggcattaaaggggctttgaaatattttgtttgaactttataattatgctatacaaatccataatcatgatttgtatgcttttgcaaattcactgtcatgttttataaggcaaccaataccatcctactccacctgttagctttgttggtcaaagaaatttactaacaggtttaagacaaaacttcatactagacagagatggaccaatataattgaaatgataacattttcttgtcattagtacaatgctaaaataaaggaatatatagcataataattaaagaaaatcaaatgaccaatgttagggacttttcttttcatttcttgtgctattttcttagtagtttagaacaactaagatggtactcaaaaagggacgaccttcttgctataagcacatggagtcttctaactgcacattctttcaataaacacactcctttcccaaggtttattttaactattcagaaagggaagttagaaaccttaggtgatcaaattctattcacagacaaaaacaactaatttttcaaagatcacacaaactattatcagagtgtagaacccaaaattaagcaataaatgaataaataaatcataaatcaatttaatgctaagcaagaaaaaattgtaagaaggggttgataagggtcgtgttctaaaagtattgctctgtattgaaacccaaaaaatccataagacaatgaatcaaaaagtattgttcaaactgaactaaccttatttgtcaccttgtcttctctttagaactcaaatctggagtaagcccattacaattcaaaacctaattaaagtaaatcagaaaaatgaagataaagaagaagaagatgatgatgatgatgctgatgatgatgaagatgagaagagttgtaaatactttctaggaagaagaacaagaagatacctgattacactgtaggatagagagattacattcagagaactcgttctctttttttcgtttgagaatttctgctgagtttttaaaaattcaagaaacatcattttgatgtttttcagtttttttgttttttttttaatccagtttttaaaaacgattttaaaaatttcagccaaacactatcaattagttttaaaaaactatttttagtttttaaaaagtgaaaacagtttttaaactacaaagccaaacaagctctaagttttttgggtttttaaacccagtggtcgcgactatcataggtctggt

SEQ ID NO: 32715 - DNA, 2106 bp, Cannabis sativa
  modified_base (288)..(288): a, c, t, g, unknown or other
  modified_base (452)..(453): a, c, t, g, unknown or other
atactatctatctccaaaagagcaattgacacctcatctacagttaaagtagtctttccaactaaaagtttagtcactagtgtctcatatgattttggtaaggatgccaacaaagtaatagcttgatccccttcatcaattttgatctctacacttaacaattgagttatgcacttattaaaactatttatatgatccataacatcttctcctttaatcacttttaattcatataacaccttcttcagatattatctatttgttagggattttgacatataaagcttnctaactttttccataactcagacggacatgtttgatttaatacactatactttaattcaggagccaaacttaagcaaatagtacttatcgctttcgcctgcaactcctcccaatcttcatcactcatactctcaggcttctttccttgcagtgcctttaggagnncttgttgtaccaacacatctttcactgtgctctgcgataaactaaaattattcttcccatcaaaaagcttgatctcaaattttgtagaagacacaatctttgacatttttggtgtagatcttttggctctgataacacttgttgggaaaaataataaacttcaagcgcagcgaaataataaagaaacgaagcaaagcaatttactcaatttggtacaactaccgaacccacaaagagatatatttcacttatcactttaaaattacatatactatttatctcaatctctccacccaaatctcaatacaccctttgcttcttcctcactctcaccacacacaacaaactcacacacacctctcttttcacaactcagtattttttttcatacacatacctctttctcacacaaagcacatatttataaagttataaaacttggggaccaagacataccaaatcttcgttaagaagactcatcaaaacttggtcaccaagactttcttttttcacaattaataattactcaaaaagaaattacaactttataaatataaataaataaaaaaagaaataataatttgagtcaaactctaacataaagcaaaaaccagttcctgaaataactaaattaaaaaccaattccttgaattaattaaatcaaagaccagtttctaaaataaataattcgaccattttctgtaatgactaaattaaaattagctaagacataaatcattagtaaaccaacagagccttcatcttcattctccataatccaaaatcattcataaattcgtggcaaccatgattacgaaccaagctctgatataggttttttctaaatcaatcaatgacctacgatgtaattatactggaccaacaaacatgaagttaagaacaatactcccaaagaatcacaagaaccaaataatggattaaactagtaaaatagagagaagacaataccatgtttaacgagtttgagccttgtacaatgctctacatctcagttggaacatcaacaactatatttttattgatatctgtgttttcaaggttacaataatcctttcaaactattacaaagattacaagatgaactttctctcactagtttagactctctcactctaactttgcacaatcacaattttctctcaagcttacaatggtttgatttactatggattacaaaagtgatagacatatatatatatagatttccatagttgttaaaattagatccaattctatcgtgactaattaatgctgccttaaattttccaagtcagtgtcaacaacatatatttttacgtcagcttaagaaatgcactttttgaatggacaatttagaagagtcaatccggacgagactatccggatgaatacaagcactccctctagatggacgtttaagattgataacaagctatccggaaatacatcttcgaacttatgacaagctatctggaagactttctttacgaaagacaagctatctagaagaaccatccgcactggccacaactttaagaaaaaagctttctagttgcacactaagcttcatgtaacttcttttcggagtaccaactagcttcccggatgacgaaacttgtaaccataatcaacaaaaccaattagttaccttta

SEQ ID NO: 32716 - DNA, 1372 bp, Cannabis sativa
actttagggcataaaactcaacactctttccatttaaatggagcaccatcagcttggttccaatggatggagaaggcaggcagatttatcgattggcattcctttcttcgtgctcttcggttatgtttcagtgcttcaatttatgaggatccacttgggaggataacgaagctcactgaaacgggcacagtttcttagtttcgtgtctaatttgaggaactaatgactcgagtcacgggagtcttagatcaaatgtttttaattttttttgtatgggtctaaagcccgagaatcgcagagagctattgatgtcgactcctttagatttggcagatgctatggccaaagcacagttatatgaggatcagaatgaggatttattcaatcgttctcgtggtggaaatcaaacgtccaggatgggtttcgaagacaggttcacctagtctagtatcagcttcacatccaggtacaacaatccctccaggttccctagccaattctgccactgtgacttcaactaaactaggtattacccttttactcatgaagcgtttaacgcctgctgagatgcgcgacaaaaggaaacgtggtatttgttttacttgtgatgataaatatagttttgggtataagtacaaaaacagggtcatgttgctatgtggaacaaatgagactgaagaggaaataagtcaatcagagggattagaagctcatgattcagaggataatgcgatggataaggtgagcttgaatgctttatcgaactcctcttacccgcaaatttttcaaattatggccaaccatagagctgagacattggaagtcttaataaatacacgtagtaataacaatttcattcaaaaatccttggtcacacaattacaatttccctgggaggagacaaaatgctttaaagtttatatgggaaatgagaatttcttgctctgttcaaaagtttgcaagggaggggagttggtgttatagggccacatctttattgttgatctgtatattcttcctatacatggcttggatgtggttttaggcatgcaatggatgcagaacttggggccttgtattcatgatcataagacactgactatggagttctcctagaaaggaaatgtggttaagttagtctttcttctatgacgttcattcatatccttgttattcttttcaataacttgaatgagtactttattttgttccattagttttttgaattgatcatcacacaattgttttgcctttgctttttcacacctaatggtctttttgctagaaaagtatgttagaaatttattatgtataaactggaatatatatgtttatgtataaaatgcggaattaaatcaaacatatatacact

SEQ ID NO: 32717 - DNA, 5993 bp, Cannabis sativa
  modified_base (3282)..(3286): a, c, t, g, unknown or other
  modified_base (5531)..(5531): a, c, t, g, unknown or other
atatttagtggcatttactttttatgccatatttatcataaccttaataatttttcccatatttttgaaaatagccctaaaaaatatatacttttatctttttttctttattaaaaaactatatattttccaaagcccttgcaactgctcggttaataatacaggtgtgtgcatgtgacccttgcagctttctccatcagctttgggagagttcatcgatgctcctcctagatattctactaccagtgtcggtagggaagcgctgagagggtaggagcttcaatcactggtttcggtgttggagcttggccgatgacgaagatggagaactcactagttcggaagctggtgtaggcaatagagatttatcgatcgcccaatattgtaaccatgctattacatcaaaaggcctaaacaattggctttcctcttcattgctttccattatctttttttttttatatatatataaaaagaaatagtgccttatctttgaaaagtgaaagttttgaacttatacctgtaagaatctggttggatattattattaaattcatttataaacatgagcagcttaggaaataatgtgtttttcatgatattgttagattaattcccaaatctacttgtaggggtattcataaaaatttaaaaattgaaaccgactatctaactgaccgaccgtaatcaaatttttgatttcacgtcatcactgaatttggcagtcgatttcggttacgttttttttttttttttaaatggcagtcgattttggtttttaaaataaaaaatggttcaattaaaaaacagccaaaaccgcaataaaccgcaaaaaactgccaaaaattatccaaaattgtcaaatcaaaaaaccactagaaaccgtcaaaaaatgcacagtcggttttataaccgatcggtcggttataaaattgtaaaaactgaccataaccgaccgattttcacccctaactacttgtttctagtgtttttttagatttggaaaaggttggttgtttgatcagaattgttttgagttctgtacaatttttgctacatgaaattgtttcatttccaagttaaaattagaggtggacgcctggtggtagactataggaggttgaggaggcttaggaagtggttgaggtagtggaggtgtaagcattgtgggagctagaggtaggtgaaggaacaaaagactcgttaggatatgtatcaggcgcagatgatgtaacagaatatactaacagatcatcatcctcgtcctaatgagtaggagtaggtgaagatgaaaaataagatgcatttttcacaaaagtaacattaatataaagaagacatttattaagatcaggacaataatacatatactctttctaaagacaagaataaccaagaaatacacactttaatgacttaggatctagttttgtaacatgtggacgaacatctcgagcaaaacaaacattgtcaaaatattcgaggagcaattgaaaataatgacttactaggaaaataattttaaatgggatctcaccattaagtatagaggatggaatgtcattgataagaaaacatgctgtaaaaactgcatcgacccaaaaaggtttaataactttcatttgaaacaagatggcacgtgcaattttaagaagatgtttgtttttacgtttcgctacaccattttgggatggtgtatcaacacaagaagttttatgaagcataccattagaggtcatataagattaaaattgagcagatatgtattctttgacattatcactttgcaaagtacgaacaaacacattaaattaatattgaatttcagcaaaaaaaaaaaaaacacaaaaatatagaaaacaactcagaacaatttttcaaaaaataaaaccaagttacttgagaataatcatctacaaaagtaacaaaatatatgaatatcggttaatttagacaaaataggagaatgacccaaacatcagaatgaactaactcaaaaggaacactatcacgtttattgactcgaggactcaaactaacacaatgatgttttgcaagctgacatgactcacaatttaatgaagataccttagtatattggggacaaagtttcttgagcaaatgaaaggatagatgacccaaatgataatgagcctcaaaagtggaagcaacactcggacaagcaatagaggttggtggaagtggatcaagaacatacatgtctcctgattcatgtcctttaccaataatcttcttcgtcataagatcttgaaataaacagtgattggaaaagaatgagatgcaataatttagattacaagtgagttgactaatataaattaatttaaaggacaaattatgtaaatataagactgatgacaaagggagtagaggtgtaagagcaacaatgccatatttaagaacagaagatggtgatccattaactaaggtaacagtagaagtggtgactatgagactggaaagtgaaaaagagattgaaaaattatctgtcatatgatatggtgacaccagaatcaatgacccattttgaagatgtggagagaaggcatgcattagagttacctgaatcagtaatcgtagtaatagaaggagatgaagagttaagtgattcctgataccttgagaacttggcaaattcatcagcagaaataaggatcaatttgtcatatgcatcagtagtgcttgtaatattagcagagtatttttgctaatttttgaactgtaacttcttacactcaaacttggtatgacctagtttcttacaataattgcacataatgctcctaaaatttggtgtttgattattaggtccttgtgaattacctcttttgtgcccatttggagtggagtttttccatggtgcaaaattgttacgactcaccaaggtgctattgagaggagctgaataggtagttcctgtgcgaagaacaagagtaaacacatcttgtaaagaggagacatcagaaccagaaagaacctgtgactttgaagagtcaaatttagatgagagtcttgtaagaaaactcataatagccatttgttctcgttggtgctgttgaacgttcatattaattttaaatggaagtaagatattaagctcttcatacgtctttttaaatgtcataaattaattaataagagaccgatcttgtttctctacctgataaaaagttttgcaaacatcatacatacaaaataggttgttattgccataatataaaaactccaagtataccattagttctttaaccaattcacaannnnnaatcaaactaattacttcattatcgattgaattttgaatttaaggaaacaagtgagcatcctcaggtagccatattttttgtaaatcgtctttttctttgggaggatcgtcagtcagatgatcatctttatcaatactcctcagataaagtcgaatcgtcttactccattataaataatttaaagcaatcaatttatagtctgtgattttagacatcacatgaaccacatcagaaacaactattgattttaggtctgattttgtctttgtcataatcttgagagcaaaatataattgatggagaaaaggaagaaagcgaacacccaaatacaaagaaagaagaaataccaaattcaaacctgagacagatgcgagtaggcttagaagaatcaagaaaataaccaaaaaaataatgtcgtcatacgcgcctccacgtgtcgatgcgtggggatgtgcgcaaaagcttcaggcagtgcgtgagccttacgtgcagagattttagtgaccggactttaaggattttgagatcggcgactcgataagttgtctaagtggacgatgagaatagaaaagtactctaaaagggttttccaaaaaaagaactccttaagaaaagaaaacctccaactataaactctaattttgtgacaacccaaattttgaattttgaattttgaattcctattctaaagtggctctgacatcatgtaaacaatagtgaagagaataatttacttgtatttcattgagaaaatatattagtatttatacacaacctatgaagttaaattaagaaactaaagaataaaggaaactaattagcctaattttagctaattttacaactaatatacatcactaacatgggacaaggctttgatttggtgggattcgacgtcagaggatcgctacatcagtagaagcttccagagcgcctcttggaatgcccttctagttgtatcccatatgctcattcgaagggtctcagctgctccttcgtattcagacgagaagtcctactggatttggagaggcacagtctcgaatgtaaatttattggatctcgaatggttgtgagctcgatttctctatataatcttggcctattatctccttgaacttctgagcgagccttaattgattaatttttgtatatggaatgccacatgtcttccttccaaaaatatagataacaccatgtatttacaagtttatgcttgacccgaacacgacccatttaataatcgtgtcaaaatatgaaatccaaacacgacccatttataagcaggttgacacgacacgacccgtgtaatccatttacaaatagattttgtttaaatatgtcaatttattaatatattaacgacatgcgtgtatgcgtgtatagtgctttaaaaaaaatctaaggtggtgatggtatcatatgtagatgagaaaattaataataatgatttattctcacgctaaacttattggtggaagtagtagggtaactaagactaacgtgttagtaatgtattttggttaattcactttctaaggttatcataagagtacaatttatttattaaaatgtaaaatatatatttgtatatatattgtgaagttaaaatatattttatgtatgaaaattgtctcaaatttggaacaagtaatattccaaaaataagatataaattaacaatcttaattaacttaattaattattaatgaagggttatattagtatataatccaatatatgtatatgtgaatatttgagtttaagtccatttgtgtgtacaagggcatttttctaattttgaccatgtgagggtaaaattataattttattagactatgtgttaatatactacattattatatagtgtggttgttttgaggtgctacaggtaatttttgataaattagtgcggtataatcacaatcgagtatttttaaaatagtcaacaatgtaaaataaagagttaatactattttgaaccttatgttttacaaaagttactaacaaaatattttgttttgttaaattataaattgaaccctgtatttattaaaattgtataaaatagtactttgagtttaatttttaattttttttaataaaattaattttaagataatttcaagtatgaataaataaaaaaaaatataattaattttatcataacacgtatagatcgagttattattaagtttattttgataaaaaatcaacttataatactattttgtattattttanaaaatataaaatttaatttatcatttaataaaataaatagttcaaataaataaaagtagaacagaacaaataggctcttaaataaacaataatatgcaattaatagggataaattttataccaccctaaaaaaaaaactaaaaaaaggataatttttataaaacaaaatttaacttttattctctttcaaaaaagaaaaaaaaaacttttattaaacaatactacttttctgaaatattatcgctcatacgttttttttacagagctaatttgatgtcaaattattatttttctactacttttttaaaaaaatattatttttctcatgcctttttaaatgtgacgtctacttacgtcacaaaaatatataaaataattaggtggcgtttgttaacacttttttaataagttttttgtttttaaaagtaaaaaagtgaaaatatttttcaaaaacatattcta

SEQ ID NO: 32718 - DNA, 1664 bp, Cannabis sativa
atgaagggagtcacttctgcaataaacagtttgaagcactcctatctagatatggcgttcgccacagaactgctctaccctaccatccacaaagcaacggccaagcttaaatttctaaccgagaaataaagatgatattggagaaaacactgcaaagatcaaggaaagaatggtcacgaaagttagatgatgcactgtgggcttatagaacaacgtttaaaacacctatcgggatgtcaccgtataggttgatatttggaaaagcttgccatctgctggtggaattagagcataaggcctattgggctatgaagaccctcaacatggacttggaagctgtaggaaagaaaagattgctgcatttgaatgagctggagcagttgagaaatgaggcttatgagaatgcgaagatctacaaggaaagaacgaagaagtggcatgaccgaagcttagtcaaaaaggagtttcaacctgggtagcaagttttagttttcaattcaaggttgaaattgtttcctgttaagttaaagtcaaggtggtcgggaccatttacagtggtcaaggcgtttccctatggagctgtagaactaaaaggcgaaagccctgagacttttaaggtcaatgcgtagcggttaaagctttacttgggaggtcattttcaccaagccaagtctgccatgattttggcgcctctttgaagaactcagtcaacgtccgactatatgacgaaaaagacagcgctattgggaggcaacccaagttttcatggtgttttagttgaactctcttatttttttttagttttaattacttttcttgtttcttcttgttggtttacgtttattaaacttgtaaactgaatattggttttttttttatttttgtactgttaaaaaaaaaaggaaaaaaataatttttctgggcattgcccagtggctgcggcgagcacaaccttggccgtggccataagtcgattacagaaagcctatttttttgaaggctatcttgccgcagcgagcacaacctcagtcgcggccataagtcgactacagagagcatgtttttctcacctcatctcgccgcagcgagaccacttgtggctgcggacagaatgccctaacgcttttaaaaggggcaatacgatttttcaaaaatcataacccctttcacaaccctaaaacacctcctccgaaaactcattcaccataaccgaatttcttcaatcttatctcatcaaaaccctttttcttccaatcttttcataattattcatccccaatctctctaaaacactttttctctcatcaaacactcttttcctctcaaaaaccatatccaaatccctaaacttcacccaaattcaaaaatctcactattcatcatcatctacctcaagaacttcaaggttttcttcaatggaggtagagtgaaggagattctcattgaggtaaacaatttcttataattatctatgcaattgttaatagataatttggatttttggaggatcttgtgaaattggtgtaaatttttttggaatattgtttgagaaattactgtggagagttgtttgtgaataacattgtgaaatttgtgattgggttttcacccagaaagtggaattttaaggggagatgctgtcaaaattttcttgaatttttggg

SEQ ID NO: 32719 - DNA, 1476 bp, Cannabis sativa
atatatatatattcgttttggaccctttattgtatgtgggttgggttaagttagatgtaacaaaaaaaaagtataaccatgttttgattcgatgcacgaagcaatggatcatgatatcaaggatttttctttgatatttttcttttgaaaaaattaaaattgatgattatagtctaaaaaatcttgtgagactatgaataatggttgtgaaatttatgtgttaactaactttaaaatgtggacaaggaggcatgcaaattatggactgagtatttgactttcaacttttcacttcgaacataattaatagcaatctttgatttttattaatgtattaacttcgtattaaaaatggtcccatgtcttaatattgcattgcatgcattaacaagactccacttgcatatataataattgttccctttttatttattaatttaaccaaaaaaaaaaaaaaaagtgggcatgaaagcaacattaattgtttaacgaggtaaaagtacttactcagacaatttgaaaaaaaaaaaaaaaacttacgtagacagcatgcgaatataattaagggaaattatttgtttatattcctaataaaaaaaacccagagaatcaatattattttacttagaataaacatttcagtctgtcgaagcacctgaataatcttgattaatgtaaactatttttatatataatatgttgtttaatttgcatacacaaaatctgtcagtgattgttaaacaattccaaaaatgactcaattaatagttattacaaagaacccctttattaataactttcagatcccaaatgtaataattgtgttgatttagtagtatcacgtcacaaacttatcaaagtcaataagtaaaactatataaatagatcattcatttatgctctcacacactttacataaataatgtaggtacttggaccttagctattattatttttttacaaaaaataaaaaataaaaagagaacaaaataaagatttgactctttgcaaatgatcatgcgcaatgccgtttaccaagctaatatgacaccattacacatttgtacttctataattggaatcaatttatttgattataaaatagtcttaattaatgagaaatgctaaagggtaccagtagtgcttagcaccttcttatatatcaatatcactattggtttaactaagtatcaggtgccacgtaatttaatataatagcacaacgcgacatatcaagaaagtgttaagcaccactagtacctaataacaatgctcttaattaatttgttaaattaaaataggtttgtaaatgaaaaatacagttctctttaataatgtcgttttgaattacagcaaagcttgcatgcgtgaccagtggacatagaattaacacaacacaaacatatgcaataataatttcatattattagaatattttatatatggaagttattttctaattaaggaaatgatttt

SEQ ID NO: 32720 - DNA, 1679 bp, Cannabis sativa
  modified_base (658)..(659): a, c, t, g, unknown or other
gttttgcaatgactcagagatcatgtatataaagttcaagaagtgcgagttctagttatcacaagtgtccttcctagggcatatttttggaaaagacagaattatggtcgattagggaaaaattgagtcagtcaagaattggctgaggccaatgacaattactgaagttcaaagttttctcggattgtcagggtagtaccagcattttgtgaaggattttctaagatttcaatgcaactgccaaaattgactaagaagcaccaacggtttgtatggtctgataagtgtgaaacacacttccaagagttaaaacaacagccgatcacgacaccagtgttagcttcaccatcagatcaagaaaagtacgtggtatattgtgatgcatctagatagggtctggggtgcgttttgatgcaagctgacagcgtcattacttatgcttctcatcaattgaaggagtatgagcaacgttacccgacacacgatttagaacttgttgttgtgtttgctttgaaaatttggcagcattacttgtatggaggaaagtgtgagatctatatagaccacaagagtctcaagtagttctttactccaaaagatttgaagatgagacaaaggcagtggttattgttagagcttattttactaggatctaganntactaacatgtatgttgattatagtactataatctaacatcctaaatgtgaattttctaagacaatgaaataaagacatataaagttatagaaaatcttacattggtggcagtggaatataatgtctccttccatttaaatctctaatccttgatcttttctgtcccagagtatgattaagatctaaacatggatcttcttttgttattagaattcttcacagtcttccacaaaggcctgagtattggcttgaattatgtgggcaattcctcaactcactaaaggggtttcaaaaatatgaagaagaaaggaagaggatttttaattctaagaggctctctctttattttttaagttgtctgacaaagtaaaactatgttagaaaataagagccatctctttctatttataagataacttttagggttaggattagaattatacggaattaaaaaaaaaaaaagaagataaaataatggcttaattgaaacgttgttggccctataggttttaattttgcaattttattttagaacttatcttttctttcacaaatgttatattttaattctaacttaataaatgtcaaatctatctatttaataattataattaattataaaagtaaattgtcatttaacttatttattaattagacattacaaagtctcttaattaataaataaaccctaaattctctctttctcaattaagcccttgcttagtgaaaattcacaaacaagatataatcttatttagaattctaattgattaattaaaaccaattagttgactctacaagacaatattattccagacaatgtggggactatggcctatgtaaccaaactcccactaagtagatctaaaatttaccaagtaaattttctaacttattaactactcctgactccactatagatgcagaattgcactcctgattacatagaatgctctatattttccaaatatagatacactatgaattatcttttgtttcaatccaaataatcatagatc

SEQ ID NO: 32721 - DNA, 2326 bp, Cannabis sativa
tgaagatatcaacaccaaattttaccctaagggagttacgaaaaataagctttgggttactcgcagcggtacccaccgggctccgaaaaatgccatcaccaccaagagttaattttcactgttagatcatcatctacagtcaaaaaacatctaattttttatttttttctatatttgtgggcctccttcacctataaaaagagagctccctaagctcatttttcactttcagaaaagtacccacaaggtcaaagcttctctctctagtttctctcgctaaaagttagaacttctaatatttagtctttttctgtaatatcatattgtgagaaataaaaactcaaagtagacgtagctccattattgtcacgatatagggagtgaactactgtaaatttacagtgtctctcttataattagttaactacttttttattcttgtcaatctagtgagcgagtgtggcttagaagtctagtccagatttttgagtcaatatttgtcaataaagtctctcttttatgcatacacttcctaagggccattggaaaacattaaagaaaaaattgagatatctaaatggtactctttactttggcttgcatcccataccaacttctcaacttactttaatagggttttgtaatgtcgtttgggaattagactctgatgtcaggaagagtacctttggattctacatttttctggtatctaataccatctattgggcctctaagaagcaaagaaccatctctcgctctaaaactaaagcaaaataccacaccttagctcatgccactaaagaattgtcctggatccaagctcttacttttgaaattggaatcaagctccaactacctccaaatatctggtgtgacaaccagagtacaatacgcatgtctaccaattcgattcttcactccgcacccagcatattgagcttgatttgtactttgtgaagggaatagaaactgttggtgaagcacactcatatttgtgatcaattggcataaatcttaactaaagccttgtctagcacacgatttacttttctaagggacaaatttagcttagtttctttggctacattatgtttgaggagagttgttaggcaaactatagttagttaaatttttagttatagtttgttataattctgttgtaacaattgtattttaaagctggtatttgagctcttttgcattgtatatatactaagtttgagctcctttgttgaatgaagagaatcatttttacaattttgttattgaattttaacaatgtctattatatctatattatagagtcatatgtatataaaaattaaattataatttttcaaatacaagtgcacactaaaatacttcttttagcgagtgtaatataaagttacccaaatatataaacccgatcggttaagagaaatcataagacatgttcacttaattggaatgaaaatcataggtatcgtaataattcttatttaattgtatactaaaaaaaaaagaatgagaaaacctagataaataagaggtaacttttcttttaaattttttttataagaatactgttaagcgtaatatgattttaatttatttttttttaaaataaaaatattatattactattttgtcatttgaaatatatcttacaactagcttatattatatattaattaaaaaaataataatttagttttaagcattttatttatatttcttaataaattaaacaaaataaaagtagtatgataccattctcaataattttaataaataatatattgtaaataattgatttggatttttccatatttagtcagttatatttctctattaattttttattattgtttagtaaacatacaatattatactccataattactttccacaccatgtaaaaaatattaaataagaaaaagtataaaagaaaaaagaaagagaaactagtaaactttttttattattattttgatttattttaaagggagaaacaattaagcttcaataccatatttcttattttaacctttttatatcatctcatattactatattatctattacaaaagaccaatccatacaagtttgaataggtgaaacaaaaataataaaagaaagagaaagagaaagagaaaaaagagaaagagaaagagagagagatgtttgggataagcaaataaaacataggaacctttgcttcaaatatataataaaaacaaaaaaaatataatagaataaaggaagtatagaataaacaacaaataaaataagtaaagaagaataaaaataaaaagaaacaaataaaagaataaaaaatttgtta

SEQ ID NO: 32722 - DNA, 1814 bp, Cannabis sativa
  modified_base (1783)..(1789): a, c, t, g, unknown or other
caaatgagtgtttactgctaaactaaattacaaataaaactcaagttctttattttatggtattttggactggaggttgtgggatttggaaggtgtaatctaattaatagttcgtatttacaagagcatatggatagtcaggtttacagctttgagcatggattattattttttattgctttcacatagaatattactttcaacattctaacttctaatacatcaagcaattgcattcgcatatagcagaatattcttgcaatttgtgtgtttggaattttaatattttctcatgatggtacagtttagtaaaataattttgtaagatgatttcaacctaagctacaagacaaacaaactcaatctttgggtatttgattactattaacattttgggtatagcatcaatcaggtgggtttaaattgactgatgaaaataaaatgttacgttgtttaataaatttgatgaaactcatagagaataaatctatggagatttatccaaccacacaggatgatacaaaagttgtagcaacactttaccaacttctggttttcctttctcttatactacatacatactcaaaaacattgctaacaccacaaacataataatctatgtagagtgaggcaattttaatacatggggtggaacaagtgtggtggaattgaatttaaatttcattaattcttttatatgatcaggataagattatcaacactgattcattagaattgctatatctttaatggaatccattactatatcaaacaacacccaaagtattaaatttatgaaccaaaagcaaaatcagcaaattcagcaacatcccatggtagggactcacttaatggtttccaaagttatggcccagtgacagattaagaagagtattaacaatgttattaccttgttcttgttgtttgtattgcaagtctcgaaattatgaccctctttcctgccgccagaacatctcatcttatggaatctcttcctaagtttcttggtacctggtgcagcaacatgatctaattcaattgcaagtcaatgacagaactcaaatcatttgcatgaatattcatatgcacacactaagtttaacattataaacattaggaagagtattaataatgttattacctggtgcagcaacatcatccaattaaattctcctattttttttttcttagcctgcctggttgtacttttccaacaggcttgattagttctaccttcccagtccttggccattcatctagttttcttaatggatagatttgtggggagtaagctttcctgtagtattccttagtgtaccacttgctaacatacttctctggatcctctcaattacaccaaattgtagcaatggcatgactacaaggaatcccatttaattcccactttctgcaaaaacaaatccagtgattcaaatccaccgaaaacatgctacaatacatgttctccacttggtaaaccaaatttcctgaaagtgttggcaaatgaccccctgcgtcaatcttgttcttctcgagttgttctgaaacttttggtgctatgttagacggccacatgactacagagcgtctatttttagaaagtctttccattaagtacattcgaatcctctcaagcatagacaagatgggcttatctcgagctgccaatatggacttggtgctattattcaatatccataaagaaatagaagtatttttcattcatttgtgtatttttttggttcatgttatcaattacttttctatttgatttataaattcnnnnnnncccttttcacatttatattcttgtt

SEQ ID NO: 32723 - DNA, 2305 bp, Cannabis sativa
  modified_base (592)..(593): a, c, t, g, unknown or other
  modified_base (625)..(626): a, c, t, g, unknown or other
tacttctgtttctttattgatgtaaaataaaatagattacattgaaataaagttttatttagggcataaaacccaacagtaaggtcatattaataaataagttaaatgataattttatttgataattaaatataactattaaataggtagatttgacatttatagagttagaattaaaatatgtcgtttgtgaaagagaagataagttgttgaataaaatagcaaaattgaaactagtgggatccacaatgaggttggccacttaaggtttactaaagccatttttttttatctttttttaattctatctaaattctaaacctaaccctagaaggaatcctataaatagaataagatggctctagttttgtaaattgacttcagactactttgtcatacagaaaaatagaaaacaaagagagagcatcttcttcttcttctattcgaattcttcttgagattccttcatagaatttcgaagcctgtgtgaattgagagtatgttcactcatgtcaaagtaatatcttgcatagtgaggaagattgtgtctaaccaaactaaaggagaaaagatataggttcaaatattgatnnaaagatataggttcaaatattgataatgctcnnctacagaaaggaatcaatggctagcgatttgaatggaaggagtcattattattttgatgtcatcagtgtaaggatttctcaatctcttatgtgtttatttcattattttaggaaattcatattaaggatgttagattatagattataatcaaacatatatgttagtaaatctacatcctgataaaataacttctaaaaactggcctcggagccatggtaatgatttaatttcatgaaatatggatttaaaatggtgattttgattatttgaatgtgttcattttggtttatgtacttaattgatgattgtttgctaattacaaattttcaacaaaaaataattttatttttgtactggaataatttttttttttcgaaaagtagatgaaaaattaatcaatataggcttttacaaaactcaatttagatttaagttgaattagttataatttttttaagtcttaaaaatattgggctagggtttccccatccacgcgctgctaattgtgatgtattcgctcagatcggggatggatgaccaagagtacatcctccaatctcaccatgtagagctagatcgtcgcaatagaaaagccatcgacctgatgaggtggtttaatgaaagaactactagaagaggctaggatctccactccaaggaagactagtcaacagatcggggagggtctaccaacaggctgtccaactaggttcttcaggaaccaggacagcccttcctctacccgaaggaggacaggcttttccacaaaggtataatggctagaacagccagatctcagcaaccaatagcctgggggctggcgagggatctcaagctcagtaactcccccattagccaacctttggccagctagccctctggaggtgtacctctggctagctaagggagtgaactcccttcctaaggcatttgggatcaagtaacctagagaccaatcttcaaccagccaggtctgggaatgggtggaaacacccaaaatagcaacttgagaagtgagtctaatcacttcaagtatctatattcacctaactccagcaactggtgtgatccacccctgtcaacacaccggctgcaccagccaactagggggtcacgggcagccaggccctgcccagcacagggttgactggccatgagcaactacccatcataggcttgaccgaccaagatcaatctccatacctaggagtgaccaaccaaggccaacacccaagctcacggttggttgaactccaccatacactctcttagagtatgcccagccagcccctactatattcagggctgcagtctccccaaggaggggcagtcagccaagtccttacaacaacgaatccttttgtgcaagcacatttggaccaaataagggatatgatcaagggcctagctggtccaaaacctttagaccttgaacttgacaggtcaaggggatcaccattctcgacctacataaatgccttacccttgcccaagtttaagatgccggtatggaagatgtatactgggtgagaactggcacacatcaagtactttgagatgcaactcgatatccagaagatcactggtgatgtgtagtgtcgcatattcctgacaattttgtcagaaacaacttagcaatggtactttgagattgccctaggaagattcaattcttgga

SEQ ID NO: 32724 - DNA, 5343 bp, Cannabis sativa
gacttttttggctctgatcatcggccattaattctcaccttgcatcaccctgcggatcaatccaagcatgtcccgagattcatctttgataggctttggatgtctgagcctggttttgaggattgccttcgtgacgcttggacgctgaacaaccatactcatcattctaattcgttgactggattcaatgaaaaattgtataattgctcgtcccgccttaagcaacggaagcaatctttgggacctcctcttactactcaaatttgtgaagttcaatctcaactcaaatttgttcattctctccctcggcccactaatgatcaattagattagggaaggaatcttgaaaaggaattaaacaatttgttacagaaggaggaagaatactggcaacaacggtcccatgtcgcatggcttcagctaggtgataaaaatactcgatacctccatcgtgtagctttcatgaggtgtcaaaccaacaaaattctttctcttcaatgctcaaatggttccacggcaaatgatacaacttctattttgaccaccattgagcattattttgcccacatgtttcaaagtcaatcacctggagatgatatcattgattttgtactctcaggtattacagaatgtcttaccgaggaagaaattgagcttctccaggccacattttctgctaatgaaatcaagaaagctacattccaactttctcatgataaagcgccgggtctagatggtttcagcgattgtttctttcaaaagaattggcatttgttgggtaaggatatcaatactgctccccaaagctttctgaatggagatgcggacttagcggctatcaagaagacgctcattgttcttatccctaaaaggccaaatcctgagaagataacggactatcgtcctattagcctctggtccacgttctacaaaatcatatctaggattctggtcaaccgtctcaaaccaattcttagtcgcataatctccccctcccaaagtgctttcctcccaaaccgtttaatctctgataacattatcattggtcaagaggtcatgcattccctttctcaccgtaaatcgggacgactgggatggatggccctgaagcttgatatggctaaggcctttgatcgcgtcgaatgggttttcgtccgtagagtaatggagaaattttcttttcctcagcgcttcattaaccttgtcatggcctgtgtctctactgcaactttttccttctccattaaccagcaggttcttgggcaccttaagccttctcggggaattcgtcaaggggatgcgctttccctatacttatttctttcatgttctgaaggtctttcctctctcattcacctcaaaactcaacaacgccaaccccgcatacaatcacttggaattaaaattgccaggagagccccaactatttctcatctcttctttgttgatgatagccttctctttagctctgcttctcttgaagctgcaactgtcatcaagcaaattcttcatgattatagcctcgcctctggacagttggtaaattttaccaagtcagctttgttcttttcgccgaataccattgttgagatccaaaacaccgttgctactatacttggcatacctattagagatatcatggacaaatatttgagccttcctcaaacttttggaagaactaaaaaggatgccttcaattacattaaggatcgtgtttggtctcatctaaataaatggaattccaaacttttttcaaaagggggtaaagaagtccttttaaaatctgttgtccaagccatcccttcatatgctatgacttgctttaggctccctgcctcctttcattctaagcttgaatccatgatggctcggttttggtggggaggaacggagtagaaccggaaaattcattagaaagcatggtcttccctttgtttctcaaaattccatggaggtcttggatttcgatcaatgaaagctttcaatcaggcgatgttgggcaaacaagcttggcagcttcttcagtatcctcactctcttgttgccaccctcctcaaatcccgttactttcctcactctagtttccttaattctggaaagggccataggccttctcttgtttggtctagtatcacttggggcaaagaacttctccagtcaggtcttcgaagatcaattggtgatggtaccacaatctccatcttcaacaatgcttggattccaggatatggtaaacttcattaccttagacaccactcagatgccaatatgacagtgtcagatcttttaacacctaccaaggaatggaaccttgcccttctccaagccaccttccctgaagatgtttctcaagctatcctgaccatccctcttaccaacatctctacacctgatgcatattattggtcccttacccctcatggcacatacactgtcaactcaggttaccaccaagcccatagtcagatccaccaaaatgacccaacaccttcggatgcccatagtcagatccaccaaaatgacccaacaccttcggataacaaaccctctcaaacatggtggaaacagttgtggacacttcctttgcctcccaaactaaaacactttctttggcgtgcttgtcatgatatccttcttaccaatcacaacctttttaaatggaaaaccctccattctccacattgctgccgatgtcactatcatgatgagaccctagagcacgctctttccagatgccccgctgtccaggaggtatgggaattaactagtattcatgattttattactaaaaatatttcactaacttgtttggattcattacaccttgctgccactttgtttactgctggaaattatcacttctttgtatgcctattgtggaagatttggaactgcatgaacagttggctacatgctggtttctcttcttctcctgctcaagttctacgtgaggtaacagactgcatcgaccaataccaaagctgcaacaaaaaggtttccactattagacagctttaagatgtttcgttgatgtccaatggaagtgcaccatctgctcctacttacaacctacagctttcagtggatgtcgctcaagatacacaactcaacaaaatgggttttggtatgtccattcaaacaaacaaaggggaggttcttttaaatttggcaatgtcatggcgtggaattaacacacctttgttaatggaagcacaagcattacactttgctctttcttggtgtcatgctcattccttttatttggatagtattgtttcagattgcaagattttagtggattatatttgtaataatgatacttacaatctgcatctcaatactttcgttacagaaattaatagcttgctatcttatttccctaaagcttttattagctatatccaaaggggggcaaatgaagctgcccattgcttatctattgagtgttacatgaaaggggataaggggtcaatagtaaattttatagttagtataagtatgtaaagccatttcacaaatagataaggaatcaatgaaaatgaattacaattaggagtattcctattgagagatttacactttagagattttattattggtgctttaacgggttctcctcaagactggacaaatctctaaaatgtacagacagtgccaatcttccgataggaatactcttaattgtaattcattttcattgattccttatctatttgtgaagtggctttacatatttatactaactatacaatttactatcaccctttcatgtaacaatgagttagttagttgaagtgtttttggtcgttaattcaatacttctaaagatgaaaagtagtacttttttcttcttcttcttctttagtatgctttgttagagcttttcatttcagctttcattaatcaactttgaacctatgaattcttttttatgttggtgctagaatgtgtgggactgatgttaattttgttcatcatttattatatctacagagacctactattgaagtaactggtcacaaggcacatggggttgttccggagcctaaatctattgtaattggtcgagtaagagcatctccaatggtaatattttggagaatgcttgatgatgtggaaagcttatgtgacaaaatatagaaatgctataccattggagataaaagaatgctattcttgaaatttgcattgatgccacacaatagcattgatgctttgtcttttttatacaataaaaaattaaaagtgcaatatatatataatagtttaataaagaaaaaaacttatatatatataataatatgtaatatcataattatagcatttttaaaaggtattataccattagagtgtttttaaaagtaaaggtgtcaaaaataatgtggaagaaaaataaaataaaatattaaattttgaatgatgtgaagatatagaacatcttcaaaaaatgctaccattggagatgctctaagtgactcattttactgagcgatgcacacatgtttattatgatctctgtcaaaagggattagcccttctactttaataactggtagttacttggttttcttacaaaatattctaagaattacaccaaagtatttgaatgcctttaattttgtttatagtattctcttgtcttgtattttgaatggcttcgcttgacattatgtgtgtaggcacaaagtctgtgccagataaatttttcggtataattaggtaattgacagttttaagatttttttgtactattgagttttgagctagaataatattgggtacatcctctttataatttagtatatatatatttatatatatatatatatatatgcatgcatcatactggaaaaacaaaaacagagaaaatgtttctaagtagaacatattagaccatttcaaggaatcaagatagacattaactatgtctagtgttatgtcaaaaaaaataaaaataaaataagagtgtaaaattttaattcgatttttttccatgttttcatattttttttttatttgctattagcaattttttattatacacacatttgtaaaagatgtgtgagagtattagactatacttatgatttaagatatcatttagtttctttataagtatttttgttagtaattaattacgaagttactttataatatacttattgaataatttttaattataaaataactaaatactttataataatttatgaaattggttgctataataaattttgtttaagcttatgattttctttgtgaggtgtttaagtttacaattttgttaatcttgaggttttttttatcttttttgaaagtgttttagttaatacaaatactaaa

SEQ ID NO: 32725 - DNA, 2756 bp, Cannabis sativa
agagactcgtgctgataatgtattataaaataatatagaataatataaaataaataagaagaaaagcataagaagatgaagagagaaagagaaactgaatgagaatttcctaattgtttattctaatagggtaaacccctatttatacaaaagtattgactaaaggaatgagaaactaaatcagtatgtaataaaagaaaatacaatcaaacattacgggtgattattaatttggtgatttggacatctataaataatatttcataatagtagatattttatataaagaatttttaatttaaatttaaaatacttaaaatattatataagataatttgtataagaaaattttaatttaaatttaaaatacttaaaatattataatatttttaactactttttttattttttacttttattggtttaattttgctcaatcgagaatataacgattcaccatgatatcttacttgaattttattctacatataaaatacgtatatatatataatcaataggtcacataacgattcaccacaatatcttacttgggttttattctacatataaaatatgtatatataatcacatacaaaaggcacaccaatataaccacaatagctaaaaaaatcttcaaagataaaaatctcaaaccacattttaaaaataaaaaaaatacattacctaatttaaaataattaaacatacatgtattgcacttaaatcacttaattaaacctaattaaaaaagaaaaaaaaattatacgtgcattgcacataacatcaacgtagtatatatatatataccgatatatgttatacccaatttttaaaagatcaaaaaattcaaccttgcaactttcacaaagactaacaaatgtcaaataagttaagatatcctacttgaggaccccatggcatctttaggagactcgaaaaaattgaccaactatttggtgttggaactcacacacccaagtgtgcccaaactagggtttatgggccttcgcgagtattttcaccctagagacctcaatccgacaaggagactaacaaggacttaactcatttaggcataaaatggcttagacttgaacataaagtcaaaattgtagaacaatctcatgcaacatggcctatgcgaccactgccacatgaagatggcggtgctctccaattttttgaagagcactgccacaagaagatggcagcgctcgccactcactaaataccaaagggaatttgtcaaaatgtttttcttcaacacccaggagtgcaacacaagtgaaagagactatttctcaccaaggaacaagcctagccaacaactgccatctttgtggcttaaagagtggcagtggtcggccacatcaaatggggatgagatttttttttaccaaaagtactttttcatcaccaacatgtcaaaaccatgtgagaaaatccaccaagtggtacataaaccacttggccgaccactgccacctttttggcacaaatggtagtagtggtcggccacaacatattatgaggagtttgtttggccaaagtgtagtgtatttccaacatccatagatcaaatacaagtgagaagagtcacccaagggtccataaccctcagaagtgaccattgccatctttttagctaaaaagatggcagtgctctcttaaccaattggccaagaactaatgtggtgttagaatttattttaccaaaatctagatttactaatatctatgttgattataggactagattctaacatcctaaatatgaatttcttaaaagaataaaataaacacacataaagttgtagaaaaccttatagtggtggcagcagaatataatggctcctctggttcagatctctaactcttgttcctttctatcatagagtattgccaagatctgaacctagatctccttcagatgatggattaattcttcacaatcttctacactatgattgagtattaacttgaaatgtgtgggcatgcactctcttcactataaagtttgaattcaagaggggagaagagaagggatttcaaaaattataggagcctctcttatttgtttaacaaagtgaaagtaggttatcaacatctatcaaataagagcctataattatctatttatactatgcatgttatggttaggttaggtttaaatatagattaaaaaaaaagataaaatggcattaaaattgaacccttgtggccgaaccccttgtgggccctatgagtttcaattttaccactttattaaataatttatctttctttctcaaatactatattttaactctaactctataaattaattttctagtggacaagaatttgcattattatcattttgaaagtgaatctacgtttttagcaagaacttctatggaagtattttgtgaaatccacacatctagaagtgttttcctaaaataaaaatattccacacatctagaggcaaaacgaaggtgttcgtttattatttcatactatgaattcaatttaacaataaatttcattctatgcgttcaataaatatatcaatatcaatatcaatatatttatataaaggagagttttaaagtgatgatgtagcatcttatatttttttataggatttttactattttgtgagagcttcaggttttgtctaataaaaaaaagtctactaactttgtaaaaaatctcacattgtttaaaaagtattgtggttttctatatctaaactataaataagcttttctttg

SEQ ID NO: 32726 - DNA, 3059 bp, Cannabis sativa
taatcgcagcagcaaaacattaaacaaaccaactctgttatgaagagacgctgctacaaatacaatggcttccaactctgttaagtttttttaatatttttaagctaacgctaacgatccacctagaaaaacaatgattcacctctcttttcaaacatccatccacctacaaaagcgttttttttttttttttccaacaacgattgtgaaattcaagataaatcaaaatcacacactcaattcaaatatgaatttttctttctccaatcgccattgaactcctcaaccacagcttacagcaatgaatttctctttgattcaattcccaataccagacctataccctaactttgagcaccatcaatggcggtcacacgcgaagacaatgtttacatggtcaaatctcgatgttggtgggcacacattcgaggagcgaaacctattctccgttgcttacaagaatatatggttggacctcgccgtgcctcgtggcggatcgtctcttccattgagcagaaggaggagactcgtggtaatgtcgaacacgtgtccaccatcaaggaatacaggtccaagatcgagaacgaactcgcctccatattcgatgatattctggatctgcttgagagaaagcttgtcccttctgccaccgccgctgaatctaaggtcttttacctgaaaatgaagggtgatatccacaggtaccttgctgaattccaaaatggttctgattgaaaggaggctgcctaaaatactctttctgcctacaaggctgctaaggttaggccttttggtttgattcgattcatttcatttggatccattcacttttagtttttctgattcgatttgattcatttcatttggatctattcacttttggtcaatcgaattccacctctggtcatgggatgtttttgggatgtcaatttatttattttgcatcatcttaaaattttattttagacgattgtgatacatgaaatggattttgtaataatgtgtaggtaggaagaagatgtaaggaaaggctatgatgtactacttgagataggttccaccttgagagacatggcatctctctcttttgaatattctgatatgccttaccagaaactaattaaatggtcagtgcatagcttttatgcttgtgttactttatctaattgaggatagcagcataacaactttaattgaccatagatggtgttgtattgctctgtttaattttgcaaccatattcaattcatatcatattagtacgtacaactcacatctacatggatgaggatgtttacatgcaataaatatttttagtctgccattatttccttctccttttcattacaatgtgattcttaacaagaaatgtctctctctctatctttctaggggttaactcattttgatgagattctacaagaagcagatggtatcattctctctcgtggaaatttggggatagatctgccaccagaaaaggtcagcttttttgttgcagcttttgcaacagtgtgtcaaaatgaaaaagaattgatcatgccctttaattaatgttttgaataagaaataaggtatacagtatgtacatctctatatgatgagatgagaaagttattttgaatatagatgagtgcatgactttggtgagtaatacagcaaaacccgaacatttactagcatggctgaatgaaatatatgatggtgcacaaaaatagtttcgtacttcaagaaattgatttcagtgttgtccctcaatttcttcttccaaagtttttacgaaaaaaattgtgacaagaattctgctgaaagattccctgatcttgattaatatggtattaaaaaaatgtagtctttgatttgaaatttcgatcataaattacataattttttgctttttttttttcagtgcttaaagaagtatatgatgaactgtgacttggtaagctaactttctttctcgtttttttggcttcatttggttacatatgttttcccttgatttgtttaattttttttgtctttatggggatgtaattgactcttctttgatgggttctttctctttattttatatcccttcctgaggtagcatttaaaagttagtttgacatagttttctttttttctttaatacagatttatgactttgaccgagatcacaaggatgttggagttgctcttttcactactaaatattttgttgtctgaaactgcctgcccaacgcaaagttagatatgcttttatcagcatggaatcctccttcagagtggggaaagtatgaacatttttcataaccaatactcaaaaatggtgccaataactattttcaattgatcagttattctacatctttttctttctgtttctttattcctttcttttgtcttgattctttctttgaagcaatcagagtgtagatattttgcataaaaaaaaaggtgtaaattagaaattcttttgaaattatgtgctgttaaatttcattatctgttttagttcttttattatctgtttttgttagattcttttattatcaaagatctatgatatacttacggtatatatttttatttttccacttttaaaaacaaaaaattgattaaaaaagtgttaccaaacgacaccatagcataagaaaaaataggcacagaaacgaatagccacttaaatctatggttagtctttacctttatccaataatgagccacttagattatggttagtcttttctttctaaaaccttattttaataggcttaagattttatttaatatttttttcttctattttaagatcgcacattttctttaattttcgttacataatatttgcttaaaattttgcaaaatacatatattgttcctctaaattctctataagtagataaaaaatattattttcatatattgttatgacttatatatacacaattatattttactaaccaaatataataacacaaatattatttgaagaaaacaaatcattcacataatcatacttagttacagaaatgaaagaaaaataaagaactaaactttaaataaaattaata

SEQ ID NO: 32727 - DNA, 3097 bp, Cannabis sativa
acaacttttgccggcgcatgtcaccaaatgcgccggcaaaaagcccttttcttgtagtgtcaccaagtcagcgcactttttacctgtgtgagtgacttatattgtggaccagtatgccaaattgtacattaaggaaatagtgagactcaatggtactccgaaatcaattgttacagatgtgatcccaagtttacttccaagttattgggaagtctacaaaaaaccatgggaactaagttgagattcagtacaacctatcaccctcagacagatggtcagtctgaaagaaccattcaaatattggaagacatgctgcaagcatgtgtgatagattttgagggatcttggagcaagttcctacccttgattaagttttcatataaaataactattaaagtaccattggcatagcaccttacgagatgttgtatggtaggaaatgtcgattgcctatccactgggatgagactagagagagacgttatcttcagcctaaattggtccaaaggactagtgaggccatagagaagattcaatctcgtatgcttgcttcacaaagtagacaaaaaagctacgctgatccaaagcgtagggatattgaattttaagtgggagactctctatttcttcgagtatcacgtatgaaaggagtacgtagatttgggaagaaaggaaagctgagccctagattcatcagtccttttgagatattggaccggataggccagatggcctatcgattagccttaccacccgcgttgtttggggtgcataatgtcttccatatctctatattaagaaagtacgtgtcagatccgacccacattttgagttacaatatatcgagctctagacaaacttatcttacaaggaacaacctgtccagattctagaccgaaaggagaaagttctctaaaatatgacgatccctatgggtaaagtactgtggaggaatagtaaagtcgaggaaacaacttgggaattagagttgaagatgcgggagctgtatctcgagttattcaggtaaattttgaggaagaaaattttataaagaggggatggttataatatcccaataaccttaatggtaaataattagggtttatatttatattatgggttaatcaagtaataggtgggattatgatcctactaatctatttcagcataaattttaaatctgttataagtggataaataaacgtaatttattaattacggagatttatatggcatatgtgaatgtaatatgagctatttgtgtaataaaaatattttcaagtttggcgatcttggagactcaattgggggtcaaaaatatttaactaatagatttgacaagaatattatgataagttgatagtgtaagtattggaataattaagagtatgtggaatttgacttaatgccctaaaaatatagatttcttagttgttaagaaataataagatgactattaataataaagttttgattaatattatgttattattatattatttttattatataaacttatcaaacgataagtttatatatatatttttaagtttataaactaaacagtacaaatagaaacccttcgtcctccgtcgacaaaatccttatcaccctctatctattttctttaattttaaacctgaaacctagcaatccaagctccggtagtagcggaatagcaaaattttgaagagagaaagcttaaggtgaaaattgatttcattttaagctaaaaataattatctttagtggttttgtgaattggaatagttatggaggttctaaccttatagaattgttcttgggtagccatgaaactaacttcgatgttttcttgttgaatttgatgtgattttgagttagaaattgtgtttggaaccttttacagcttaagtctaaacattagtggtattttctatttaaggactccatattaatttctattatgtaagaatggttgtacttatggtatatgtgtaccgtgtgaagtttggagtgatttggataggtttcagtagtatttcggtgagtgcgaaatttagaaattgcaaattttattcccctgcccaatcagtccaccggttgtgaaccagttaaccggttctggtggaagcggttaactgtttcccaaccggtttaccgtttttgggtagtctcaagaaattgggaatcgtatttttgctgtaactttttactcgggtgtccattttggatattttatatactgtttcgaagcttgaaacgatctctacgatatggtgtgtgttttagagccaaaactaactttcattttagttataccttgaggtttggtaggaaatcctaagtctccctttgtaactattaagtagtgttttgggatgaacactaattggtttatcattgttataacatagggcctgggatccttgatcgttctccaagcaggtcgaccaacatatctgaaccgatacttgaggtaagaaaagtataacgtaccacatggcatgataggttctgtaattatcgattgtctgattaggcaatgataatatgatgacattatggatgtgatatacgggctcacctgattaggtgatacgatatactagcgtcgtaccttattatgtacgggcgacagtgatatgagaatgccaggttatggatagactgaaatcgttgttaggtttctttttggcggtgtaacttattagatacagacggcagggatatgtgagtaccaggctatggtacgggctcgtctgattaggtgatgcgacatatatatattggtgttaggttgtggcacgggctcacttgattaggtgacgcagtgatattatatatgatgttaaattatgacacggacttgcctgattaggcaatacaatatatgagtatttctatttctatgcatatggttggctatataatatgcttttgaatgtattgtttaatcattttatgataatgaaatatgtatagttagttatttaatgtattattctttattacttttcttgctaagtctatgtgactcacgggtgctctgtggtgcaagtaagggcaaggaaaagttagagcagccatgagatgaccgtcttctccagcaatgtac

SEQ ID NO: 32728 - DNA, 2901 bp, Cannabis sativa
tgctcacacctttgtggcatgcaccaaaatataccaaattctctcagcaatctacttcatagacaatggttgaatgggcactcaagaaataaacgtgaaagagattcctcattactcttgcaacaaacataccagcatgtagaaagagcccgatatggccttctcttttgcaatacctcgtgaacattcacctttttcattgctagcagccaactaaacaccttgactctagacggagccagctattccacaccatcaccatcttagcccatctttccttagttatagaatgattagaaactaagttatgaaaggcactcttacaagagaaaatgccgctagaacctggagaccaaactatcgaatcctccaacaaaccgttaattggtttctgctcaagaaattgcagcaattccttctaaaatgaaaatgacatccagagttaggagctgtcaaaactccctcccaaccaccaactcctttatgcttttgttcctcccatttgtaattcgtactagatcaggagataaactcaagaagggttcatttcccacacaaacatcctcccaaaatctgattcgttcatcgtttccaaccttgagccgaaccaaagtaaaaaatacatcatatatgcagcaatactcttccacgaccctctgtacgacaaagagtctcccatattcgaatcctataagttacgagctttcccatatctacttttgatcattttgtgccatagagtcttatcttccaccagaaacccttacaaccacttcattaggaaagccctaaatgtcgactccaactgaccaatacccaaccctccttggagaaaaggcatgcatactgtttcccaggccaccagatggtcaccccttgccaaatcacttccttcccaaaagaagtccctcatcatcttttctagagagtttatgacacttttaggtgctctaagcaatgaaaggaaatgtgttggtagcaatgataggacagattgaataagagtcaatttgcaccatcgagacaactacacactcttccacccatctagcctgcttgcaagtaatcaataagattttcaactagagatttttctctttgcttgttgcttttcaaatctttccatagtcttcgcatggtgtcatatttggcccaaagaaacttctttaaggtaggatcataaactacatcgatctattcttggtgttcattgagtttattgatgatggaatcaatagggatctcattttttagtaggacttcttttttcttgtgctttctgtttgcctagccttcaacaagtatttcggcacttgaaaattctccccttgtgtaacaaattttgctaacacgggctcccaaaaagcttgtttcttaggatttcctctcagaggtaaccccaagtatttcaaaagccactgtcccacctcatatcccaccatattagccaaagattcaactacctctcttccatgttcaagcccaaaatttgacttttatgcatgttaattttcattccaaataaagcacaaaaagtctttagaatattcaacaacttgtgaacggaatcatcattttttatgaaaaatatcgtatcatcagcaaattgcatatgacttaccgacactttctccttaccaatgagaaattcattataaagagaagactcaatggccctatctaccatcctcccaagtacatccaccacaataatgaacgagaatggagagggatctctctgtctgagggggccagccccaatgatcttccctcttggtctcccatttataaaaatagaataagaagcagaagataaacatccccttatccatttcctccatttttggccaaaccctttccttgataatgccaagtctaagaagtcccactcaacatactcataagctttctcgaagtctatcttgaaaactaacccaccttttcccttgcttctatattcctccactgccccaatagccaccagtaccgaatgtataatctgtctatttcccacaaaagcagcctgagtttctgaaatagtatcagccaataccccctgaagtctaaggggcaaaaccttggagatgctgtgttatgactaatctaaaacaaacagctttttatgatttgtacaatacatttctgtgacttccctgttgctgcacatgtcattggcctaattgattttgatgcatagagtttgtataaggtatattgttatgcaagaaataagtttgattgatgagagtattttgctttgggtgtgtagcagttgtaaacttgtattagatctagttgtcaagttcgatgaaagaggtttgtcttgtattctttctgttggcatatatagatgtgggatgtttgcctaaaagatgaaatgcaagtaaatttcttagtttaccatgatagtttttgtctgttgacttttgttagttttctttctgattgattccaagctgtacatacaggtggtacaagcacttcatcatctaaatcctcgaatggtagtcaaagatcttttcagcagcattcaaattatcaaacccctgcctctgctttatatgatgcttccgagagttcaagtgctttctcaacatcatctgcaggaaaagcgggtaaaaaatcgtcattagttttttgtctgtttgaaattaaaagaaatttaagatctatattcttattaaaagtacttctgcatgcacatgtaatatttaggtgactacagcgcaccaacgggggcagatcctattgcaatgatggaatattatgtgaagaaggctgcacacgaagaaaggaagagacagcctaaacagtcaaaagatgagatgcccccgcctccctctcttcaaggttcctgctaaattctgattgaaaccattgtttcttttatttgggaggttt

SEQ ID NO: 32729 - DNA, 3642 bp, Cannabis sativa
tatcatatatgttttaaatgattattgatttgtttaggtgaagaaaaaaaaaagaggaattatcaggacactacacgtgtccttagtagtaagtctgttaagtggtaccaacggtagagtttaaaaagtgagattttgagtattaatgccacaatttttaaaaattgggtacttattagcaacaaaatgaacaaaatgagtatttatgccgcaaatttctcattttttttatattattttgatattttttattattacttttatgttgtttttttattttattaattttataatttttttttatgtttttataaaataccatacaaatatataaaaaaaataaaaataaaagtgaatataaatatatatctattttgtaattatccctttaatgaaacctatagtgtccaacaaatttaatggattgggtagagctctttgtttggatcgcaagtttgaatctttgcctgagttttgcaagtcataacttttgcgggctaatggggtatgttattaccctgactatcttaagaaaaagtggaattacatcttctatggcttttttgaaatagttatggtttttatgggttttgtctaaaattgtttatcaatatctataacatatataatagaggatggttcaaatgaatatttcccttccgcttcatttcttttttattcattcagcaaaatatcttctttctcatttggagcccttttttagtttatggttcttctcttgaatatttgagtatttcttttttcacttttggatatttattttggctaagcaatctcttcctcattgctattttcttttcccttttcttctcttcactctggtcatagtgctttttgagagttttttttgaatgggttttctgatagttcattcctattgtcatgattttttttttgggtctcaattttcagtcggcatagattgtggaaagttaatcgatgtttgtggatggttttttgatgggttataaaatttgtaatagttttattgttacttagttttttatcacgagttacattttgcatttttctttcctttttgatcattttgttgtggtttattttatctttttattctctaggagtcttagagcactcttaatagctcttctattcatttttaaaatacatcactaaaattctatttattttttttttttttttaatttcacatcaatttttttacatttctccatatatcaaccttactacttttttctctccatatcattaaatatgatattcaaaactttttattcattaaaataataataataaagacataaagtaagaaatagaaacaaaatattattacttttagaaaaaaaaaggtgaaagataaatattaaaaaaagtttacagaagctttattctctcgctagatgtactgcaaagtttaaagaaactgtaaaataaatttgttatacagaagttgatggagtgctctttcattgtctctctattgtatcttaaagaaaaaaacacttttacatcagctaatgctagtgtttttatgtctttatttgaattttttagttgattgtattaggtaattagtttctgtatttcatttttggttttcttattttacataactaggttccaaattttagtttttgatttggttatttcatgtaattaatttttatgtgttaatctttaatttggttaatatatgatttatttttattaattttaattagttatgtgatataattaatttttgtaatttaatttaaaaattagtgattttgttataagtattatctagtatatataaatatgggtaaccagttactataacataaattcaattgatattgtaatagtaattggttattaaatcaataaggaatgtacaaaaagtgaatatttaaatattataaatatgggtagctaggtactgtagcataaatgttcttagtggtaatttgttatctcatctgtaaataaaatatatgaaaatgagtaaccattactgtacatatggttaactagttactacaacataagtaagaaaaaaatattgtagtaattggtcatcacattggaaaaaaaaacatttgtaaaataagtaacatattactacaaatattattagccaaatatatgtttcgaaggaggtgaatcgaaaatttaaaaatctcaaaaaacaatttatgcatatattcaaattcagggcgattacatagctaaacacaagtataaacaaatattaaacttgaaatgtaaagagttagggataaaaattgtaaactctcgatttttacaaagttcggtaaaactaattaacctacatcctttgtcttcaaagctatagacctaattttgagtttaactatcgagtcaagttaacgggcttgattgacccttacaacagggtaattctacactaaggtttttcccaaacctcacacaaagttttcttctaaggactttcaatctcaccggattgttgaagtgtcaatctctcctaaccatgttattttcaataccggtgccaacttgacctataaccgggttgtttttcaatactggtgccactctcacctcaatacaaaaaatatataatcttggaatataaagaaactctctctaataagataaaacacaatgccaaatcttagagattaagcacactagagaagataagaactagttgactcaagtgtgtgtggttgggatgtttataaaagaatgatgcaaagtaagtttagagttaagtagtcaaaaatgtatatctattaatgcaaaaataaaagataaaattaatgtgatatatctttatttggaaatattctagtgttgagttaattttgtaagaaaaataatattttatgacacaaataaaaaaaaaagaagataataaagaaaattcatattattgaagaaattacaaattaattaaattttaaatatattttcatgaaactaaatgcgatgaattttatagaaatattttgtttgaatctaattttatattgacttgaagtaaaagatagaatttatgaaatacaaaatgcagaaataaagaatggcaaatatatggcccaaaattatgaagatttagtatttttgaaagaattactactatcttagaagtccaaccaagaggcccaaaacacgatcaaatttctccacacactgccacatggaagctccacattctttttgcatgcggatcccacagtgcaacaccttgtcccccacttcctccacacgtccttgtgacacgcactctccattccacaatcccatgtgtgacttacttgcttagtctagagtgggttttgtttgtgagacaaattggaagaaacatggaagtctacgtcgatgatatgttggtaaagtcgataaagagtggagatcacacaactgacctcgcggagtgctttgagatattaaaaaagtacaatatgaagcttaacctgaaaaagtgttcctttggagtatcctcaggaaagtttatgggattcatagtcaacgtgaggggcattgaagcaaaccctgagaagatcaaggctttgataaatatgccatcaccaaccaagccaaaggaagttcaggccttaacgggaagaatggctgcacttaaccgattcatttcgaagtcaactgata

SEQ ID NO: 32730 - DNA, 1200 bp, Cannabis sativa
tccttcaataggaggtggtacaatatgctctttcactaggaggtggtgcaatgtgctccttcaataggaggtggtgcaatatatatggtctttcagtatgaggtgacgcaatgtactcccttgatagcacttccatatctagaactaaaatctatgcataattatattggggttttgagggaaaatatttacctcccaagttgatcataattttataatattatgatggatttttagaaaaaataattctcatactttttaactctatacccgtaaatattggtattaccgagaataaatatgtagaagaccaccaatatttccaacattttagaaaactaacaataaaaataaaaatgaacaataaagacccttgttaggctatttttagcctcttcgtcgaatcattttagagttaattttcttcatcatggtcactttttgaagtagaattaatcttgttttctttggttttagttttaacacttggaatgtaaaaattggtcaaattttagaaaactttgtaagaaaatatagctaaaacttgaagcctaaatttaactatgtactgttcagattttgaaaaaattcgaaacataaaagttttagatatcttttttagctttccaatgcatcattaatcaactcatttggagttattatgtgaaagttatgtacattttactgagagatatcgaagcaaaatattgaattacggtcgcgacgagaccgtttttggtcgggagcaattgtggtcgcgaccagaaatgctctattttaatgaaaggggttataaattttagtggggaataagtgtgtggtcaaattatgtcccctaatggcaaaggcagggacattactttgtgagtgtaacctattatttcggattctatgacttaacttagtaacgctcactactacaaaagcctttttttcagcataataataaataacagatggcatagggttggaaatttttagaaggaaattttacgccacttatggcgtcggttatttggacataactgatgttccccctatgtcgtcagctattaccgatgccaaaagggtttataatcctagcccagccctttgtctttctcatttgatcagccaacccaaaaactcccccaaccagagaaaccccaaaccctctccgccaaccactatagaaaattacccccatttcaccattttttt

SEQ ID NO: 32731 - DNA, 1786 bp, Cannabis sativa
atctaagacagccattgcttaacatataccatacaaattcatcaaacaaattaattagttccattgctttgcctattttgtactcgatgttggccttggtaaacaaaacaaaactcacctattccattttatgagaaatcaagttcttattattgaagacagtcctcatttggcttgctaatccttcaagcaattaatggcgatttagatgatgaatgtttcctggaagaaacaaatcaatacgaaattacgatatttttaccttgaacaacttagctcactcaactgatcatatttgataatgctcttgctcttgtgtttctcttactgttgaaacaatcagtctttcagttgcacatctacctaagtacccttacattccttcatactttgcttcctcttcttcttcactctctcttgctccttcacttaaaaataatttagaatcaattcattaaacaaagaaaaatacaagggaataaagatttcacttaacatatgctaatttagtagttgaatcccactcaaaataaaccttttttttttgtttcctctactaatttaacaaaaacccagttcaaaaaataattcgaagtacctacattattcaaaacaacgatgaactcatcatcatggaaacacccaaaacttttcaatcaatagaaatatcagagtttatattcttgtcttcagtaaaatcagtttatggaaaaatttctagattgtatacattaacaatgatatatagttgctttaaaaagaaaaaacaatgataaatagcttcagtccatgacaaattttactcttttttttcaaaaaaaaaaagaaaagaattgttttttcatataaatcatatcagaaggaagtaattgcatgcatggtgaagataattacctacacacatatgatatatctaatctatccttgatttcttgtattctgcaatatattatcaggatattaacatcataagcgttcattttaattttatttgaaaattaaagcaaacattagacattgacgtttctacctcattttcttcttcttctttgttgggatctggaattaggtacaagtgttgaatatgagaaatcttatcgcaatcttcacatgtattctttttgcatctcttcaataacatgggacaggaatcaatatgtcagatcgccgcagttgaataactttgttaagtgatttgaggttgtggatccactctggaattgttgtcagactatcacaatcacgaacttcaagatactgcagcattgtaagatgttggatacccataggaagaacagtcactatatttggcaacttccttagttctaatgattggagtgttccatttagggattgccacataaagtcataatcatcactaatagcatgtcccctaacccctcgcaatttctaatctgtagatgtcgaagtgatgagagatgtagaataccaggacacaaatccttcaatttaggacaaccatcaatatccaagtgattgagagaagtaaggctcttgaaggagtctggaagacattctagatcatcaatgtctcttagagttaggctttctaatttggagagaggtgagaaagaaggagttgttgggaatacaaatccaacgttattgatcatcatcatcctcattcttaatgtctcttctaatggcttccaactagtcttcctcaataacaaatatccttccaaacgtgggtaaagtggcatgcaagtcagcttaggacaatcacgtatacttaatgctaaaagagaagggagataataagaca

SEQ ID NO: 32732 - DNA, 2315 bp, Cannabis sativa
atatgagtttttattctgggtaaaaaaaattgcttccctagcttttaatttgatttttgggtttgggtttgattttgtaatcttttgaatagggttgtgcaaaactagaaaaatctccaaaaccaacagcaaacccccaaaaaaatatcaaaactcaaaaaatctcacccgaaatctaagtttgctcctcacttgaagacgttgaagaagatgcaatcaatcgatgccgaggtctgagatagagaatcttgaacgatggtcttctctggagaagatggaattgctagtcttctccccaaagaatttgcccctctccattgtgttcctgagatttttttttcaatcatgtttttgagtttttgttggaaagaaatgataagtttatttagtttttgtttttgagtttttgtttctaggttttacaatttatattttaaatttaatttaattttagcttttgtttcaattaatgtattgattttacaattcagattttaggtatataaatttatattaattgtattcatttcttttgttttcaaatatatttgttagtttaacttaaatttatttttgaataaaattgttcacacgtggatagttagtaaaatgatgtggcattattttaaatgacgcgtcttgccatttgtcactcagcgtgtcagaaaacggcaaggtacctacggaacttccaaaactgtaacagaatgtatttttactgccaaaattttaacttaggtattaaactgcaaccaatagataaacttaggtatttacgccgcaaattactcttaatttttttaacactaattttttttttactgggggctatagctcccacactttctttactgcgtccgtcactgcagtggcggacccaagatttaagttgaggtggggcgacatttttttttataagtgaggggtgcatctttttttttctacattgcataacatgttaaaaattaatttaaatttatattttagtattaaatatagtataaagttaaaaaaaaaaaaaaacaataaaatatatttggttcaataattaagacattaaatataagtattattagtagaggttcaaaaagtaaaataaaagtattaaagtaaacatgctttcattgaaattagaactcatgacctcatttaaatgtatgaaatgattttaccattataccaaagcttattttatgtgtatagatatcacttttatttataaatatatgttgtaactaactaaaatacatatatatttttttctgatttttttttcagggtgggcgactgccccacctcgtctctatgtgggttcgcccctgcgtcactggatgtatgtatgtatgagaagtgatatcgtcaacctcctgttacaatttcttagtcaacctttacgcctaaaaatacatgtcggaatattttttttcaaatttttttacgagaatgttcattatgcttacatcatcatctctataaatttttgaaaattttcgaataatttacagtgccaaaaatatgtttgaagttttttaaacacgcgtggtaaattagaatatcaggaactctgttttcagtactgtaaactattcgcaatgtttcaaaaatttatagggatgatactatattcataacgaataccgctatgaagaaaaaaaattgaaaaaaaatattttaacatgtaattttagacgtagagattaactaagaaattgtaataggaggttaattagcactcctcaacatgttacatgcacatcacgccacactacattacacttgtcttaacaagccataagtctttataacgttttttcttcctactttacgtatttagttggttgtacaaccttcttgtataaacacatgtttttctacgagactagtacaaaaaacacacatttcctcaatattaaaaggaggagttttaattataatctcatagttaatttttacacttgaatatgaaatattttttttttatttttttcatagctgtattcattatagttacaatatctcccaacaaatttttaaaagtttcaaatagtttacagtaccgaaaatagactttttgatattccaatttatcagacgtgttaaaaaaatttcaaacatatttttgacaatgtaaattatttaaaagtttgcaaaattttaccaagatattgttgtattctaactataaaaaaataccactatacaaaaaattgaaaaaaaataaaaaataaaaattgaaatgtgttttcgaaaattgcataagagattataattaaaggttcgtgatagcactcctctacaatataaatatatatata

SEQ ID NO: 32733 - DNA, 2046 bp, Cannabis sativa
tagttagggtgttacatagctacttacaaatgatatttcagtaaactaatataattaccgaaataagagcgctttcattcatgtcgttttagccaagttttaaggaatccatcgtttcacttctcaataactattgaagttatacatttaatatctatgattaataatcccactcaattgtactaccgaactcccaagatttatgtatgggtttgtcctatgggtaagctggtaagaaacaagttaaaaaacttgtatactacaattaagctacaacttaaatatctcaattaaatatctcaggattgagatcaattgatctaagatcaactaagtgacatcggcttagaaaagacataactgtaagtttataatatctttccactgtcaatatctgtccagtccaatgtatagccaatacatctaatacaagtttacttttctaatgcactgtgaaggacatttcacttatacaagtgtaagcaaactacatcactgattatcacgtcaatttaaatctaatgcactgattaatagtggggctaaatatttgaaacatataatcatgattaattctactatgttgacaacactataatcatgagtaactatatattcgagatttattagaatttatatattaatcatataattattaaagtaatatgggaactaagcaacataaaattatttatgaccttttattaattagtaaataagattacattaaattgggtttttattagggcataaattctaacaaactctcagttgcattaatataaaactaaatgtacattttaattaatctaaacttcttaatgttctaatcaagggtagtatgtaatgttaccttttaataggatctgacaagttgtattcattgtcaatcttctcaactattacattctctttagttacaaaatccttgatattgttgaaattcctatttatatgtttactcctccgagggttctggattctttattgtttgacaactacatctatgttattgtgaagtaacattagtagttaacccatgattgggataacaccaaccgtagagaaatttctttaggatgaataattgtgtagtagccttcaagactactttaatattcagtttcactggtagagttaaagactccagatagatttttacacttcttccaaaatcactactccaactccagagtaatcaccatcctaaatgtagacgcatttatgcaagtcttgaaatcttagttagtgtagcctaaaaggttgaaagcactacccaaatagactaacttataggtcctcttttattcttaagttttatttaattctcttacaatgttcctatactgattaaattgataccaacttataactccaaaactcaagtgtatactggaacataaatgagacttctcattgttgatgcttaaggaattcttcccttaacttttatcttttctcgaatagttaaaattttaccttagataaataaactctatgtctagaagtctagtgatttcctttaaagttagtcattagatagcgttctagcatcttacaaatgtaagctacttgtgaaggagtaagtaaattaccaggtataccagaaggcatgtgtttagatgttctcatcaaacccatgttactaagaacggaaagtttacttaagtccatttaatagatctattaaagtttcccttcttgtccttataatcaaaacttttggttgctccatgtgattggttgaatcaaaaatcgatgtaagaaaagtgttcaaatgcacatgtgcacatatttagtacatttattatattgccttgtagctagtatattagaagtagcagtatgggtgtacatagagtttctctaagatattgacatctaatatgttagtcaatgttgaatagtatggattaatgctactaacataagtgcgactagagtgctaagattaggatggtattatggttaatcatattataggtacgaatgttcagatctcagtactctcgtttgatgagattagtagacttatgataattgggt

SEQ ID NO: 32734 - DNA, 2858 bp, Cannabis sativa
  modified_base (668)..(673): a, c, t, g, unknown or other
aaccacttcggcagttgtagggactccagggctggttaccctcttcttccctttttgatccatgatatcttcataacctcccatgtctgcaaaagaagacaaagcgttacaattattaaatatgccgatgaaaaagggaggaatacaattttccacctaagggatttaccaaagtcactagaaggcgagctatcactagacgaaggggtagaaggaccataatatccactaaaatccctacaacctataatcttgaatatatcaaaaggctcaattggttctaaatcccagcttgcatctatatgacctaccctatcttccatagtatcgtattgctcagttataccataatatgtcttatgacagttaacctggacgtggaatctaggataccagctgtcaaacttatgagcaatgcggtccatgagaagggaattccaattataaaaattaaggcaggagtcttggaaggtgactaatgtactacgttcagccctaagtacagttggagaccaaaaacattgattacctcaagatgctccttcatcggattcccgaggggcagtgttttaaagatattgtgcttgagccaagcgatcccaagccttatcctcggttggaacagtaatctgctgccaagaagaatacttgggaatcttgtaatcacnnnnnnattccttgtcagcgagaaggcccaccgatcccaggttggcctcattcagaaggaagtcgcatgaccaaagaccgtaggggagagttatcaggcgcttgtgcctactgaacatctcaggggtaggagtaggcctcatcaaaagagctgtcaaaaaaaatagaacattggtcagaaaattgaaaaacaaagattgatataaatgagcaagaagagagcaaacacttacgaagtttgcgaaaagtggttgtgttgatgggggaaagaccatatgtccagaagaagttgttcttgaaggatactttatttggcaagtccacagtaattttaagctcgctagaatgagtaccgaggtagtagaagcccactggggcgttcttccttgacggaacgaccttaactgagtaaagatactcaatctctactcgtgtgggacacccccagttcaaaattctgtataagacatcaaactatcgagaatcctgtaggagatgggagtcagttggaatggggcaactgtaatgtgatttatgtagtccttgaagtagtctcgaagaggaagcatggcccctgcgctgatattcttaaggctctaggcgcccataccagtcgaaccactagtccccggtttactgcttgaaaaacacgcaggagggtaacaactgcactcaccctcccgtattgatctaacttagcatgattgcccaagctcgaccccgcaggtctttaccatctcgcccgtgtagtctgagatagatcacaccttcgactctatcaacttagcctcaaatgtgacattggggtcctggggagtctttgatgtacttggcttgggaggtataatttcaaaatccaagtcacctggttcaaaagcaatcgtgacgttgggtaaaatcaaggctttgccacagaaataaaggacacgttggaaggttttggccaggctgcttctcgcaagaatcggtgtttgccttcgaagatttttttacaagaaacacctgtagcgactagcaatatcttcttggtggattcccactatgtgttccctaaccctagcattattaaactctaatttggaggtgggttttgaggggatgggtttatatgggatggctgattttgtaggaaactcaaattctaaaacttcttgacgataaattcttgaaccagagtgggacattactgtaagcaaaaagcagtcccaatccttggagagaattttatcaaaccctaaggtaatgagttggagatcttaaaacaacctacatagtgcctgaaccctagtatagacctagatacagtttaaccctaaaaactatcaaaaccagatgagatgacaacgatacaaacaaactaagtagcaaatccatacaatgtaacaagcatgagaaagaagaaagaaaattactgtttggagttagggcttgggggaatgtctggttactctgcctgcaaatcttcaaacgtggcgaggatcgctttaagaggatgaagtaagaggaaactcgtagaaaaaaggtcaaggacagagatggcatgcaagtccttggacaaacttaatggtgattcttgacaaagaagcttaagagtttttttagactttctaaaatggaggaaataacgcaaaggtggttccttttttcttacgttatacccttgatgttggcttcgttagatcagagaaaggtttgatcctacggatataattcaaagcagattggaaaagatgttcatttaattctgatgtacctcaaaattgcacaaccgccaaaatcaaaggacatgtgtcttttcaaaaagaggatcatgacgaaaataccctttgtaatcattaaaaagctctttttattaaaaaagaactattaatggggtaattattatacccaaaattcggtaagcacatcaaagaaagacacgtgtcaagccaggaagaacgaaggactgaaacacgcaatcgtaagtacacttggcatgggataactcgttaaaaacacaatttgcagagtaagtttataacttggctggttgaatagtcttgtgcgagacaaaaatgtactaactgttaatgtaattccctaggattaagagaatggattagcaaatacctaactagttgattgagtattattgtgaaattatattattatataatttcatatatgtgaattaatatgagatttgatatgtt

SEQ ID NO: 32735 - DNA, 1149 bp, Cannabis sativa
tttttaattatatatttatgggggttctataaaaaaaattagaatataacataaaactaaaaaaataacattcaaacaatattaaaacatcaacaaaaaataacataaaataacaacaaattaacaagattacaatatcaacaaaaagaccttactttttgtaaataaaatcataaaaaatcgtaaaaatatttaaaatcccatacaaccgtatttttataatttttttttgttgtttttgtgtatttgtgaaataatcgttttctttttattggaaaccaacttaaataaatttgggaaaaaaaattcttttgaaaccaaataaaataaatattaggctaattaatttggattttgactttcctgaattttgacatgtaccaaattatgtcccttgaacttttttttttcattaaaaattctccctgaactttgacatgtacaaaattaagtcccttgaactttcatctattttggactttccttactaaaattgaaaaaaaaacaaaaaaagtcgttaaattaaaccatttcaatagttcagaaaaaaattttaaggaccttaaaattttaagatatataatttagtacatgttaaaatttaaagggtaaaaattctaattattttttttaaggataaatacttattattataaattaaactagtaaatcatttataataacagagtaaataaatggggaaaaaattttaattaacttaaatgttagaagtaaatttcttttgggagtttttaaataaaagaaaaggagaatttagtaatttgaagtaaaagttattataataatgaaaaaaaataaaagtcggcatgcatggactgatacagtgtacgtacgttactggatcagtcgtggggatcataaaaaagaataataaaaagtacaaaagaatgagatattctattttaattttaataatttgattaatcataggctaagcttacgcttttctcttcattccacgtgccaacagggctacgtggcgccatttccttcgttttcaatttcttaaattaaacatattaaaattaattaatcataaaggttagggttgacttgatcctaggttgcggaccaagttggttactcgctaatcataaacataaataatataatataataaaattaatt

SEQ ID NO: 32736 - DNA, 2085 bp, Cannabis sativa
caagactttctccacttatgacaagaaaggtcttaacgtgggagacttggtcacaacggagaactgccagatggccaagcttatctctgggagccagaaagtgaatgacttcaacctctcaaaggttctttgccaaaacatttgtattccggccgctgagaaagtgctccgggtggacatcatagcctcgccagaggaccggtaccagaagtacctctttaggagggaacaggagttggcctatatcaaggctcaggctgccgccgggaggacccttcgtgtggaggcgggcacagatcggatgccttctaggcctaaattgctggtcctggttcccaatactggggctcccgacgccagtacatccaactctggtaagtctcctttaacagttcatcatgttccttctgtccaagaatattcccagtgtaagcctatagaattcgacgagcatcttcttaaatttaggatgccccccactcggtggggggatcatgccaaggccttttatttttcccacttaggtcattttttaggccggtcctagatgggtttcagacctcctacacccatccctctggatcactgaacatatctgtcttatagctggtttctcctctcggacaactttcttggggatgatgaagccaacattgtagttcaagactttgctagggctgagttagatagtcagggtaggactagttttactgttttgttttcatgtgcatactttcttatagccattctgagactttgcttatttctttttgaagcagccaggccaatggaagacctcttggcgactcttgccgaaacctacagcccgaacccttcccttcctccagtgcctgcccaggtggtgaccctggggaggtcatcttccaacgcccccttaggcacgatcgtcttgatcgacgaggacaaggaggccgaggaggaggaggaaggtgagattatggcccagctggaccggaagcgtaagggcaaaatggtggatgccgaatcttctaagaagcctaggagaaaggacactccggccgttagctcggactcggggattccgcctgaggcagaagaatatgttgtacctcttgcatcatcctcacttcagttcccgtcgatgaggagaggcagcagcttcgagttgccaaacacaactacgccatggatgagtacaacagggggaatgccgaggtggaatccttgaaaaaggtcttacgggaggctcaaaaaaattccttgcgcgaggaggccttcaagaacgcctgggacctgaacatggaccctctgattgactggttcaaccacttcgtcggccccgcccttgctcccttcgcctccaaacttactagccaattcgtctcccatttgacccaactcccggcaaaaagatacgcagcctgctcttccacaaacgccatttatcaagttcaggatatcagcactgctatgaccacggtaagtctttgttactgggttttccttttcgtttatgctctaccctgtggcacccgatctctcatacttaactagttttttgcagagactggaagcctctcaaagacttcgatagatcatgggtatgttatgtccaagttcgggggcatggatgaggccatgaagagtttgagagacctggcggctgagaggaaagcgttctaggaggaagcccaacaagggaggcacaggtggagaggaggcattacaggccaaggcagaggagctgaagatccaggacgaggccgtggccaaggcgaggcgcgagctgagggaggccaaggaggcggtcgaggatctgactgccaggctgaagtctatggaggagctgcatcaggcagacttgcagtcgacggccaatttgagcgttaaggtgaaggagcttagggattttaaagattaggccctgaagaagcctaaaagagatgagctcctagcccctgtcatttgcaatcattgcactaagggctttgatgacggcgtttttatggcttggcagactaatggccaaaacctcaagctcgacttctatccaaagcctgaggaagtccttgttcgcttctgggagaagaagaagaggcttga

SEQ ID NO: 32737 - DNA, 1007 bp, Cannabis sativa
caagttaattctttgagttattgagttgaaattctggttatagatttgcttgaagttgtgcaggtggcagtgatagttcaatcatttgaaggtttaattattgattgcattgtttaaatttagtttgagttttaattttactcgggggcgagtaaagattcagtttgggggaatttgttaggctatttctagcctatattttggataaattttatgttcgctttttgttgttttaggacggaattatgcttgttttctatgatttcaggtttctcggagttatggaggcctcgggatgcaaaagtgcaataaaagacaagcggagccaagaaaaatgccaaatttcgacttgacgcacttctggccgcggctagatcattgtcgccgcggccataactcgagaacagagaaggggatttttgaagtcccagtcaccgcggcgagatacaccttcgccgcggccataaagtcagagcagaggcgtagttttcagaagcccacgtacacattcgatggaaagataacgattcacaatacatccttatgggcgtgcataatttaatacaaaacctctcagtactttcatatatctttcaaaatgatacatccattgctattgcataggaccacataatctaacttctcgtggtaaatggacaactaagtgaattattggatcaaagaaagaaggtggaaaataatcttctagtttgcaaagaatttcagcagcttcagaatctcctctttgtctaccacacgctgacagaattcatagaaaaatttaaaaagtcgaagaattgtcactctacaacattcttccatcaaaccctttacagcaacaactaataattgccgcataatcacatgataatcatgagatttaagtcccgtcagcttttgtttctccacatctacacaattactaatgttagagctatatccataatataatttcaagtaaaatatgttggattaaaatccttaatatgggctcatatgtatattag

SEQ ID NO: 32738 - DNA, 1327 bp, Cannabis sativa
atgcatacaaatatatttttatatatttatatatatttggaaataagtgttttgtaatattaattgaactaaaataataccaacttaaagtcaaaaaaaaaaaaataataccaacttaaaattattttatttaaattttcattatctaatataaaataataagaaaaaattataacataattataaagtaggatacacatttttcatttgaatatttttgtggagtttctttcttcaaatttatcttctttttttttttttttttgaaaaactattcaaattatagtaaatatttctaatggcctccttagttgtattttattatgttttatataggtttctaataatgtagaactaatttggtaatatttgaaagttcttgcaaaaaaacatatgtataaaatttcgactaattttagctaattaaataaatatttgtaagacaactatacattcttaatcataaactatatcaacaaattattttttaaaaaatgaagacagtgcaaatgtagatgtacatttacaatgctatacaatcttttgataaaaattgataatttcttataccaaaaatatatattaattttatatggttatattattaaagaaaataactatcactaattaaaatattaatgtaattttttatttttaggtgcaccacaaaattcttttatatataattagggtttatgtaggtggaccacacaattttccaatttatataattagattttatgtatatatatacagagtgatatacaggggtctaaaaataagtgcactcgcatctctattatatttatatagctatgattttatttttatgaattttaatttatattgtgtactcaattaaaatattatgtaactattttttagaatgaaatttagagtaatttatattttaagaataagatttaaataacttattttataggaatattaaaaacaagtataactgcaacaatactatatttttaacgttaaaattatttagaatgaaatatataaatagaaactcaataattaaagtgtaacttgtcttaaaaaaaataatagaataataattatttatctgctgaaaatacaatagagatgtatattgtacaattattttttagggttcattcttagttttttttttatatttatatgtatatttttgagtagagatagtattcgccttacaaatagtttacagtgaagttaatacttaattataataatagcgatataatttctattatcttgtagtagcgttgagtatgagtaatattttttctcaatatttatattaggggtgtttataaaataaccaatc

SEQ ID NO: 32739 - DNA, 1457 bp, Cannabis sativa
aacgggctgctacacagtcaaaagtggctaccaatttgctgcagaatctcatgacacttctgctcctggttgttctggctcctctatatattggtggcaaactttttggagcttgaaattaccataaaaaatctaaatatttgcttggaaggcttttcatgatgcactaccaacagcagcagttctgcattatcgacacattgcatcagactctttgtgtccaatttgtaagctccaaaatgagacaattccacatgctttactcttctgtaagagagcaaagcaagtatcgaatcaatgggatcacttcccaggtttgcatctgtctaggatcacttcgatttcagatttcatgatacatgtctcccctatcctctctaaagaattatttgaggtttttataactattatgtggtgtatatggagtgagaggaatgctgaattccatggaaaaaagaccaaaccggtgcagttcatttaagattatgttgttaagtatttagatgattatcgacatgcccaagttcgaccatcaccatctacatagcagcatttatcctctacttgtacccaggtgcctactgctacatccacaacaataaagactcaagcaaaatggatcgcaccgccttctggtaaacttaaattaaacactgatgcttccataaacatgtcttcaagtttgattggtctgggtgctcttcttcgaaactcccatggggagatagttgctatgacaacatcaatcaaagggcatctcaaaccagaagaaatggaggctatggcactattctggagtctcaaaactcttcttcaacttgaactatcagtgcatctaattgaaacagactctcttttggttgttcaaaatttgaagaagtcatctacaaatctcacactttttcatgccattcttaatgatgttcaccttctagtgtccaatttcccacgagcacagatctctcatgtttacagatctactaataacgaagcccacttgttggcaaagtttgctcttacggtggatactgaatgtatttggttggaggaaattccacctccacttatgactgttatgtaatttatttccaagttaatacaatagtcttttctcaaaaaaaaaaaaaaaacactaatttttttttgggtaggtttaacacacctgaacacaattttatattgtgtggttagcctttcaaaatagacttaagacaaaggacagattgtagaaatttcaagttgttaatgaggctgtttgcagattatgtttacagtaggatgagtcaacaaagcacctatttttcagctgctcttactcactggtttgtgtggaaaaaataaaggaatggctggcatggagggctgagaccacagaattatctcaactgctaaaatggactcacaaagcaaaaatctagaagtttaaaaagaaggtgatggcagcagctatagcgaac

SEQ ID NO: 32740 - DNA, 1758 bp, Cannabis sativa
  modified_base (379)..(380): a, c, t, g, unknown or other
tcttacatactatgattgaggactcacttgttatgtgtgggcatgtactcaatcactaatggctgaattttgttttgtgaagaacactgagattcaaaatataagagaagaaaagaagaagaagaagtctcaaaaaggagaagcaagataaagtttctgaagtttggagagttaataaagttggcattggagcccttgttgagaccaatattaaaggagaaaaaattcaaaaaatgatggcaagtagctttttgtgttgggacttttattcaagcaataaagtggaaggtcagattctcctgctctggaggaagaattttgttaatgttgaaatcattgaggattctaagcaacatgttcattgtcatatcaaaatganngggcagaaaaaagattactttgctacctttatctatggaactaacaccatagaaggtaggagtgatctttggactggcttatcaatgataaatgtttctaagcttggatcatccttggtggctttaatgcggtttttcatcatgatgacaggcagggggaatgatattagtaactcagagcttgttaaatctaacaatggattgctcagtcttctgtggggcctatgaagcgcacgggttcgactttcacttggaccaataagcaggataataggatattttctcgaatcgatcatgtgtttcacaacgaggagtgggttgatgatttttgaatacttctgctcatttctcttgggagacatgttctgatcactgtctttgtgtggttcattcggttgctaagttatggtggggttagattacatttgatatctttaataatttgaaaatacccagaagtaatgacttttgaatgatagtggtcagaatgcctatacttgcatgaccaatcctgagaaaacaacttgcaaaatctattaaaacaactctaaaacaccacaaaaacaaatgaaaaataattaagcaaatataaccactaaaaaaatagctacatacctcaacaacctctttacgaggaagttcctcaaaaacttcatcagatggaaaattgggaatttagtcttgccctacatggaacagatcaataaaaaaacaccgcgacaactgttaaaaaacgtattaaatcatttaaacataccaaacacacacataaaaaaaaaataacacactaaatagtgttcattgaaaagcctaaataaagatagaaacaacttaaaaaataggacacaaaagccctaaacaaattcaaaaacaaacgaattaccttgtgaactttgcgaatttcaaaatattcatcttcaagctcgaagtcagaattcgaatcttccaaaataggtcgagatcatttagacttcctcttgtctaaagcttcaacaacgaacttctgtttgggagcaacagtggacgtaggactagggggtggtctttgaaatttttcttcccaattgatgacggggtaaggttatttaaggtttttctgagtttttttttaataactgggaacaaagaattagaacatgtaacaactatggaaatgaaatgagatgaatatttataaaagtaaaagtaacaacgtatggggcgaaaattagagggaaaatagtttttgaaaaataaaaaactgaaactaactaaaactaactttcaacagcaatctacaaataaacgtgactgaaatttacaaaaacgaaagaaaataaaaataattaaaaaaaaagatgaagaagaaaaatttaacaagaatagcgataaagagttt

SEQ ID NO: 32741 - DNA, 1445 bp, Cannabis sativa
ccccaaggcgacacactaggtcgagttgaatcctagatcccagccatccccctaaagttgtatcttcagctcttttaattctacaggagccatacggtagggttcctttgacacaggttttgccccatgtatcaagtcaataataaaatctatctcccattgtggtggtagtcctggtaattcttttgaaaacacatccaggaattccttatccactttaacctcctcaggtccgagtaacacaagttttctagaattaattacaactgctagaaatcctacacacccactgtgtagtaaatccatagccttcagcgctaaaattcttgagacacgagaaccttgaaccgaaccaaaaaaaaaacaaatgattcctcattctctggttggaaaattaccattttctgtttgtaatcaatactggcagagtatttggacaaaaagtccatttcgagtataatatcaaactcggtcaaaggtaactccactagatcagcacttagttctctaccttcaattctgattaacacagatttaacccactctcttgaaataattaattccctattaggcaacagggttccaaatcccatttcaaaaacatcactaggcctaccaagctgattaagtactctcattgctacatatgagcgtgtagccctcgaatcaaataatacagtataagtaaggccgttaataaagagctgacctgtgaccactgaagggctagcagcagcattcgcctgagttatggcaaacacacgcgctggtacaggcttagtttctgacttgggttcctctttcttcagctggggacaatctttcttgaggtgcccaaccgatccacactgaaaacaagcccaccggttacatggtccggggtgatgcttcttgcagcgcgggcactcaggataggagtaggtctggcgtccccctttaccatgatttctacaaaacttcttgctttgcctgaactccctataggtgggaaagttctcttcttctgctcaatagtggaatcaccactctccttgccaagactagaaatagagagagtaggggttccaccagccctaggagcccctcaggtttcttgcagaaactttattgttctttcaactcgaagagccttgtcaaccatttcagcataggtcgtggtgtcgttggtggtgataactagatcgtgcctgatcttggcattcaaccccgccaagtactttttctttttactgaaatctatcggcacaatccctgaggctagcttggccaagtgatcaaacttgatcgtatactcggtcactcacatactctcaccttgtaccagttcaacaaactcgttctcacctgagactatcttaatcctttgtatttattttgtttgtgatcaatatacatttctcttactagaaaaatatattattgctctagaaattaatatatatata

SEQ ID NO: 32742 - DNA, 1754 bp, Cannabis sativa
  modified_base (496)..(500): a, c, t, g, unknown or other
tcttgctgaacctcctccatggcagcaagacgattgttcaccagctgaacctcattcttcacttccggaacgtctgcagaagcagaactcgaacttgcaccaccagcagcagcagcaccagctttaggacgctttgtaaaagctccatcaaaatactccgagggttgaaagacggttctagtcagtggaggcttaagagtttcatgagattgggccacatctttctgagaggacaaaatcttaaagattaaatttggaaaaacaagcttaaaattgcgcttttaacctcttcgaaatgaaataatctgattcaaaatgttggaggccaagtctatggatgctcccgaggtgatacgaaagaggaatgaagccacatcttgagacaccacggtcttgtttgagttgggaagccaattgctaagtgcaaacctcatgagtgcagcatgagcataggtaagatgtgtaatgcaaagactctcccccgatttcaattcannnnntgcaccagtgagttcagtgagcatcaagtgacgatccatagacattatagcatttggtacattttctggcagttgcaaggcttgggaaatgtctttttcagagaaggaaaaccaatgtcctctaataaacccttttcgaaaaagtctagaattctcatcaagaaaatcatcagataagttagcatagaattctttcacaatgtttttaatgtaccctttgaaaccagtgagagtgttctcccattgatggtattgaatgaacttaacaataccatatattctatgagcatgcaaatcataattcctttcactctcaaacttccgtgtagcatacaaattccaatcacgctcattatcacgaaagtaaaaacaagaactacaggagtgagatgtagggatagtaccagaagatgaatccttcatgggctgcttgcctttggcagcagcagacgccttcgctgttgaagatgtacgagacagcgttggagcatatttggtcaagggaggctttggatcgagttcagtgtcttcactgtcagaggaggctcccatatcttcaggaatctttttttcagaatggagagatacggatttatcagaggaattaacagatggatcttccatgggttcttcttcttcagaacttgaagcaaccgaagggggattcgtctcgagcttcttcgtaggagaagctcgtttgtcatggcttcgttttgagcgaagttcctactcgatggagcgagtggaaggaccagttggggttgatgtagaaactcctttctcagttgcagtaggaggagactccttcgaagacgatgaggatgaagtccaaaatttgtatggttgcacattttttcgaacgatctgtttaggaatctattttctgcttgggcttcactggctgagattcacgctgaggaagcgatgaatctcctagtttcgaagtagttgcagcagcaaggagcaagattggagcagtaggaggatcattcgagggggtggcatcggtttcttctaccctttttggttgccctaggttctttgctctaaccattgtgatctgaaagagagagtgaaaaacaagacggcaagaaaacaaagaaagagaatcgggtatgtgctgagaataaatgacaaggaattggtttaaataaacatggaagtatgaagcaaaaaggaaactaattttgaatttttgaaaaataaccgccagcccatgaacaaaagggaaaccgtgttgggttttatgcccta

SEQ ID NO: 32743 - DNA, 1791 bp, Cannabis sativa
ttttttttttcagtcaagaccaatttatttatttattttaaatgttgtaaaaactaaaaagaaaaacgacaaagaaataagttaaggaaaatgcggtatttattagttgtatcatggatgtccaacagttctaataattgacggattcaatgacaaataataattaaatgaacattaattaattatttaattatcaatgctctttaacatattttataaaactatgtcaataatacccctcaattgtatttaaacatttttaataaagttatatctatatgtatatgctgctcgttaaaagagacacatattaattataaactatgaataatataaagaaaaagataagtttttgccttagaattttacttttccgttgactcctttattaattattcccaaattatctggatgattcaaaaaatttcaattttattatttttattggaatggaattgtatactcttttaaggactatttcaaataagatggtaattaacaaaatttgactaagtctataagtattttattagtattgttataatcttttatctaaccatgccctcttctctctttttttccttagagaaagacaacacatgaaaataatttcaacttttttccagaataaataacaaaaaccaaccacgttctataattaaaattgactcacgagtcatgatgatccatcatcacaccactcatcttttataaactcgtgatgccgtacttttaagtcattttacttagtttttttttgggggacttgtaaaaacttaaccagcagaaaatattaataagaaaaaaaacaaaaaaatccaaatctccattcggaaaaattaagataatgtcgagaacgtgggtatatatatatatctatataactatatttatatataaaatgacaaaaatacccttgattgcagaaaactttaaccgccaaacggtaaaggggttcgttttctcctttgaagaatcacaagaaatgcctctctctctctttctctctctagactcagtgaattgcgtgcatttttataaaagaagcgtccactgcaagaaaactcaaatccctctctttttttaataatatttattataaatataaatatggaagaacaatagaaagattagttttttaagagaattgatctcatttcctttcttctcattttcatttacagaatccaatccccttctcccaaacgattcatacccatttcatctctcttcttcatcttcatcttcttcttctttcctttttggaaatttaataaacaaaaagtaataatctgagtctctggattggattggactgaatctcgttacttcccgtttttacaaaaggtaaatgcgtttttttttccttttggaatgttaatgcatgttttactgattcgtttaattattgaaactaatatttatggaagttgcagtgattatttcgattagtggtgaatatagaaaacgagacattaaagaatgttgggggagttgatttccagaatccttgtgtaagttctttcaatctattcgtgtttttcttttctttctcttacggataaatcttgaaacactttttggattgggttatagaatggtttttgggtatgcataccctgcgtttgagtgttacaaagtggtggaaaggaacagagcccaaaatgaagaacttcgattttggtgtcaatattggtaagagcgattccctcattctttaactgaatttggaattttacttttttttttatttaattgttctttatcactgattttcatggaatttgtata

SEQ ID NO: 32744 - DNA, 1164 bp, Cannabis sativa
  modified_base (1137)..(1138): a, c, t, g, unknown or other
atatatcattaaataatggtaatttgcagtaaaatcatataattttgtttgttgtatacctctcaaagaaatcagttgttgcagcacaattgactataaagtcaacatctttgaacatttggtccctcaaattgggattttggatgcctaataagtacttttcatcactaatgtcaccacacacaacttccactctttcccatataaatgaatcaaacttcttttcccattttgcccttagtaacctaaacaattccttttccatcacctaattaattaaataacaataacattaatagtaagaatacacaaattaatatacgattaaattaacaattcatatgtaatataattagcagtatattgttaatcgtctcatactttttttaatatattaaaattaattaataaatgagtcaccccttaacaaatatatgatacttctaataataaaatataaattatattatattaattttaaataactaacatattatgttatttgtaaattaaaaaaattaaaatatatttttcaatattatatatatgtttatataatatttatattgagcagcaacacctttacttgacattacatatatttgttttgcaaatattcatgataggataggatttggttatttacgtaaatattatcgcactcatgcatgcatgcatggattttataatttcaaacttccatgtacgtacgtactatatacgtaaatatatttatacataaatcatatatatatttaagctaagatatttgttaatatttgtgtgatgcttgcatgttagtcattgaaattttattaattaatataaagttatttaattaagttaaaaataaataaataaataatgatattatttgaataatatataactttcttatattaaatgtggatatcgaatggaaattattgattttaaatcaatcaattaattattattattattttgaaaaaaagtaattttaaatatataaatttaatttatttattaaaatatgacttagatatatttaaaaagtattaacaaaattaaataattatttttataacagagcatatctttaaattaaacattgaattaattaattatatatagctaatatatctttatatattaaanntgcctatctaacggcaattcttggtt

SEQ ID NO: 32745 - DNA, 1643 bp, Cannabis sativa
  modified_base (284)..(284): a, c, t, g, unknown or other
atgtgtaggtaagggcaaggctaaagttgaggagccgtgagagcgagcaggtgaagattgtaaatttcagggcagttaggcctggagcgtacgatcctcgagacatcagggcttttgctgtgtagtcgctaggcgacaaatgttttgtatatgaatagtaaacttttgtaactgtattttgtaaacgggatcccgaaattttataaatataatatattacgttttgattaagtaagcaaaattttaattatttacaatttccaataatctcgttgattagcaangagctgcacagtacgttaaaaatcccgctaacacgcctataatagttagggtgttacaactactttgtgtcctgtgacattttttggtgaacatattacaggtatatcaccaaaatgtttatgtgagcaaatatacaaaatggcacctataaatccttgctctaaaatttaaggtcaaattctttcaagtctcgtaatgaatccacccaaggttaacatctctcgtgttctttctatttatactttatatgtgagacaacacattgaaaacttttggtagacaatatgaatagtaagaactaaaggcggcttaggccacccaatgtttaaaaaggtgtttttgaggtgcgccttaagctgaggcgtttgaaaagtgcatcaaggcgtgggccttgctgagaagaagttaggtgtacacctcaagtggtgaggcgttgagttgaggcgtgaggcgttgaggcataagaggcgtgggcctcaaattttgtgtgtaaaatgggctatttaagccctaaaaaaaggtccaaattggtattttacattttgttttctgcagcctaacataattaaaaactttaaaaaagcccaataaacattaataaaaaagcccaataaaatacttaagtgaacccaaataaaattaaaaaaatcaaaccctagtttatctgcttcatagcaactcctctcttcttcacagcagcacacagctgctacatatttcttcaagttcaacccatgaaaaaaaaatcttgctgccttcttccttcgaattggtgcactgccctgcccctgccttccttctcactgctcctccattttcactgccttcctcctggattccatcttgcctttgccttttccctcttctcatcatagaaaaaaaaaaccttgctggtttgctgctgccttgtccgacttaggtgcttgttggttgctggtgtctttctttgttccattcgtaaacatttgaatattattttgtttttctaattcataagccatatttagttgttctttggttcattaggtggtgatttattatttggttattacattgttttgtgtagataacaaaatgaatagaaagtcaaaattgagtggtattggtgttggaagagctagtggcagtggtactgttgacggtaataataataatagtcttggaaatagaaaagattcgacttggaagaatggtgttgaagttgatacttgaggtggaaatattgaaaactagaaaaattatatttacatggagtgtaaatactgtagaaagcttattaggggaggtgttgcaaggttgaaacaacaccttgctcacactaggaaaggtgttgaaccatgtaagtgttgggttttatg

SEQ ID NO: 32746 - DNA, 1036 bp, Cannabis sativa
aactctggggttacaactgagtagtttgcatagcgatttcggatttcttgatgatattttttttatggttggctagtattggttggttcgacttgattattcagcttgataattttcttctccgcttgaattgcaagggactagcaataagctggttgggggttgtgattggtggtgaaaaatgcatatttattggtctcaaacgttaaaataaattacattttaattaatattttcaagtaaataatgaaatatatttttacaattgaaaatatttagtttgactttaatttggtttattttgcaagaattatgttgcactctagtacaagtgatttctatttattgatatttgtagctgtcaaaatgctattaacgatcatcaccccaatcatctcttacttaacgtatttgtaaatgaactgaaaagtgcgaagataactcttggttagagtattacttctcacatacttatgattaacttaaaattatagaaagcaacatgctaggaatttttatgtcaaaagaacaaagactcctatttgttctcaacagtttgtctcttgagtacagccaatttgttgtattcttcttgatcaataatcagaactcatctgacatagacaagcttgatgctgaattgtgtgcttatgaaaagacattgtcaaatgcaaggaggtcattctttaacactacaaaccatgaaaaaggaataagtgagaatattgagaaagaaccctctgacaatactgaaacttcaagctcagttaaaaagattgggaaaagttcttctactttctcattttatcttaaacaacagattgaactagcaataagaacaatcaaagaacaaataagcagacatattatccaatgttctcactgtggatagaagggacattataaatcaaaatttcccagacttctcaaccgtaagaacgaaggtagtgcttttgtttttgaatcgtgtgttttagagaatgacaaatctgtttggattgttgatcctagatctacttgttggaaattattttac

SEQ ID NO: 32747 - DNA, 1298 bp, Cannabis sativa
tttatatgtgttgaataacattagacatattttaatttttatgatatgtaaattatttgaaaacttaatctgcatatttttctagactgttatggggcactgagtgccaaatatatttttatacaaatatttatgcaggttatgatttttgagtttattcaaaatacaactgttatgctaccgaattttcaaaaataaaagtaaatatgctctattattattcttattatttgcctgctttttcgttatattgatgagagtcatgttgatcatgatttgtgcatattgttatgtcacgacctagtcactatgttatcataggtagatcaggtgtgcactcacttataggtgaaagacctagaatctgtacagaaagtgaattgaattcgagtcccagtattatagtggttatcaagtgcgactacccaatttttgaatgtcattttctacgattggtattgagagggggtctagtggatggtgtgatatgtatttgacacttaattttgtgattattgtggtctctttattttatttacacattttgataatggtgatgagatgttatacttttaaaagctagatgcaggaatttttattaaaccaagggtcattggatattagttgttttttctactgggctttataagctcaccccctattttctctcattctaggaactcagtttgatgctaatggataaggatgataccgttgaggaaaaaagtcgttcttagtttagtctaattctatttatcaaactttctaatgaaaactgattttgtatttaagcttgaatggatggtatggatgacttaaattagttatgtactagttaaaaatgaggaatgatgaatgctagatattattttggtattttattaacttattaaatctatctattcgttgactatataactatgaggatattattgtttttttttatatatatatatttttgagtgatcttgatttggttattaatatttttttgagtttttttttttttttttgaataagtattttgtaatataaattaaaatatcatttataagtattatcttctaacaatagtcaaagtgtgacatttgaccactcaagttataaatattacatatctgtcacggcttaggactcgggtcgtgacagtaaaaattgatataaaaatatcacaaaatcaatttttgtactagatatagctcaactttaacatctcctattgaagatggtcttataaagcttatgtgtcgactgatgctaaatttcaagaatcagatgtgaaataattaattagggtg

SEQ ID NO: 32748 - DNA, 3262 bp, Cannabis sativa
ttcaggttgtgccatgaacacatcctcttcaagtgttccatttagaaaggcattatttatgtctaattgccttatgtcccatcctttagaaactgctatggcaagaataattcttactgttgaggctttaatgacaggactataagtctctccaaagtcaattcctagtctttgatgaaatcctttggcgaccagccgtgccttgagccgttggagagttccatctaagttgaacttttctctaaacacccacttgtttccaattaaattctgactaggtgcaggaggaacaagacataagttttgttggtctttaaggctgcgatttcttcattcatagctttgttccaacctttctgagcaagagcttcagcaacacttgtcggttctctagagttggggttctaaatagcttgtccaatgaacaccttcggtttaaaaaagccagactttgctctggtgatcatcgggtgtcctgcagcagtagcaggttgttcaattgcagcagcagtaggagcaacaacaacttcatcagcaggttcaggatcaaggaaacttgctgcaattggactagaaggatgttgttcaagtaatcccctttcactacctgaaggagagtcagcagaggagtgagacatgataggagaatcaggagtgtttacctgaaaattgcgagactgaggtgttgaaggttctgcctcttgagagcttgaggatggattggcagatgtgaatcgagaacctgtagcaggtgaaacagatggtaaaacagaccatgtggaactttgaatgataacaagattttcagattgataattgttaagaaaacttatttgaaatggaaattcgagttcattaaaaaccacatctcgtaagatatagatacgacctgtaggacttaagcatttgtatcctttatgtgcatcactatagccaagattcacacatttgatggagtgaaattggaacttgtgtgcttggtaaggcctaagacaaggaaagcaagcaacaccaaaagttttaagaaacttgtaatcgggtattttcttgtgaagcatttcaaatggtgttttgtgatcaagaataggtgtgggtaacctattgattaggtagacagctgtggaaaaggcatcccaccaatatttaagtggcatgatagattgagctaacaaagttaaccccatttccactatatgtctatgttttctttcagctcttccattttgggaagaggtgtgaggacatgaatgatgaaaattgatgccatgagtgacaacaaaatcagacaacacttgatactctccccctccatctgttctaagtgccttaattttcctttcaaattggttttcagccaaggatttaaaagcaagaaaggcatcacaagcttcagatttgtttttcaatggatatatccaagtaaatctagtgcaatcatcaacaaagtgaacataatatttaaaatcttggttggatgtgatgggagaagggccccataaatcagtatgcacaagatctaggacttttaaggctttactgttggaatgcttaaagggaagagagtgagattttccatattgacatgcatcacagaaatgatcaacttcatttttcgaaattttaacattgcaagtatttaaaacttggtgtaaaactctaaaggatggatggcctagtctcctatgccaaacatcttttgtggaaatagcatataagttttggactgttttacatgagatctggttttaaaagctaaaccagtaaagggattacaatcagaaacaataaacttagatgttgaaaatctgagataggctgacttatttcgaggagtttggagttggtagagtccatccttaagcatcccttgaagcagaaccctccttgttgctatgtccttcacaaaacaagaattggaatgaaattcaattatcacatcattatcagtggtaagtttagaaacactgaggaaatttttagcaataataggaacaagtaacatttcatttaatttcagccattgtccagttttggtgtacaacttgccatttccaaaatgagaaatgacaagcttatcaccatttcctactgtcactttctccttaccaccatactcttgcttctgaggtatcacagatggatcagcagtgatgtggttgctggcaccactgtcagcaaaccaagcctcactgtcaagaatttctggtgtggcgatgaaggctgagggattgttgttgttttggccggttttgttctggtttgaggagtgtggatcagaccccatatagctgtcatcaaaccaattgtagcaaactacagcagagtggtcatattttccacacacttggcatgtaggtttggagttgttggttcttcctcgaccacgagatctgcctccatttcctctattgaaatgtctgcctctgctattgttgtttcctctacctctgcctccttgagtgggtcgatgagaatagttggcatgaggatcagtgaagttggtgtgattcttgccttgagatgagcctccttacagcctctccactttgctttcgaaactgagaagtagttcttgaagttcttgccaactggtttttgttcgagctttaatttgcagaacaagggtcagataattaatatcaagtcgagaaagaacatttgttaccaattgagcttcaggatatggttctcctgcaagagcaagagaatctgcccaactcttcttttgtctgagatattcgatcatgggagtgcctcctttcttggttgtctgtatgagagttcgagtatcatccattttggattttgagtgtgcaccatagagctgctccagggcatgccacagtcctgctgcacttgttgaccccatcacttcagtggctatggtttcagtcatagaactgtacaaccagcccatgagtaactggtcattgacaatccagttctcaaactcaggattattgagagttttgatagttttggaggatccatcttcagtggaacctgtatatacatattcagagggacaaacattagtaccattcaaaaaaccgtcaaggcgatgacctcttactatagtggagaccattgtcttccacaaactgtagttgttcatgtcaagctttagagaaaatggctgctttaaggtactgaaatggtgtgggacatggagctgagggttggtggatcttgctcctgtatttgtggaaacggcagcagtgacagtagggtttcctgcattggttgacatcttggctctgat

SEQ ID NO: 32749 - DNA, 1930 bp, Cannabis sativa
  modified_base (1537)..(1540): a, c, t, g, unknown or other
  modified_base (1864)..(1867): a, c, t, g, unknown or other
gcataaaacccaacagtaagtccctatccgcacaaacgtctacatagggacttgggggtaaatgttatcctaatgcccacctgacctatcgtgcttacatggacaatatcaaggccacatagaagtacatctcaccaataagaaggtcaagtcagcaaccaagccaacgggggtcccgacactcaaacgggatgacaagtgacaaccagccaccccaaggggggctggtaggccagcctttggacagcacaaggctagctagcttgctttttttaggtgcctagttggccaggtttgactggcaggtgtctagtgcataactttacacgtggactataagctggactgcgaattgggccttaatagcccaataaagtagatagaaaatacctttgtttaaggggtattttagtcttttgtatttagtcaatttaatatgtaaatatctacttattttatttgtaaattaaggtttaagctctcttatatatagagccttaactcaaccctaaaaatcctaagtcattaagtctcatcctaagcagctaagcctcattctaagtttaataactcactccactctctctctctctctctcacgcccaccatagcatatctcaaaacttgagatttgccacctttgattcctaatttgtaacctcaagagagctatatcagatcccacctatagtgatctgaatagtgttatctatcggtatcaatacaaaacattacccgctaactaaggaggtcaaacctctataaaaatccttgtgttgaattactttcgagttctaattgtgtaaggcatggtaagcattagtttagtacgagccccgatgtcagttggccaatttctgaggtcaacacctctatagctatttcatttagtaattgttctaatcatacatcattggactagatggattaagatcatttacttatgatgttgctctattttctttatagaagatgagtgacgcggatgacttattctagatatcctatccaagaaatgatgattaacctcattttttaggtattgaatctccttcttacagtactaatacatatcgactgaacataaacttaagattatagttctgaaatcaacatctagtttttgcaagctgaacttagagttataatagtgtctcaatggcgatccaagctagaataataattcaatttctagattacataaacactgtgtttaactttcacaagtttttatatccattttagtggatcaaactatgtgttttgatatccacttaaactatttagtatactctttgttgtaactagacctaggactcatatacatcaaagtatagtaatgactattgtaatgccctaacaattaggcacgtcacgacaaccaattataaaacccctaatcccataaactgggattactagaaagaaaagcgcatgaaatttaaactttaaacgaaaacagaatgaaaataaaacttgtaataactttaactttacaataaaaaattacaggtttcgggatcccaaaaatattttnnnnaatattacaagtcttttcactagctgacctaagcggcaaaattagagttacaaaagtacatcactagtagaccccaacacgcttggtctagtgtggcccgaacatgtacatacatcgcctagatctcgtactcatggctgataagagacagatttaccctttcctgcacagtagagcacccgtgagacaaccccaacaagacaatataaaatatcaataatcataataacacatcatataaacattaatgccatttcacatttgtctctatgacacaccgcgtgttgcgctcacacgcatatttatgtctatgtggcatagacnnnngtgttacgctcacacgtctatatacaataagaccttagaatggttcatctcagttctggttac

SEQ ID NO: 32750 - DNA, 2001 bp, Cannabis sativa
tgttcacgtttcatgagcggttataaataaatagatcccaagacaataactatcactctacatatctataaatagggacataattaatggtaaaaaggacaaccaatcgagaaagagaaaagaaagcaagatattattgttattgtattatgtatcaaaatattatatctaataagatggaatcatggaatatgaagaattaatttaaaaaccatgttaaaaaatttatgttatttatttattactatagtcaattctgtagtttatttattacaaaaatgctaatatttttagttaacgaaaatctgcattaacagtttggtacattcattgagagcctttgtagtaaaaactctgaaaataccctccacagagacacaactcaaaatctgtacttatggaaaatgatactcagtgtgtaacaccctactagtttaggcgtgttatcttgattttaacttagttgtgcagctcgttgctaattaacgagtttattgaaaaatgtgattaattaaaactttatttaattacttataaataccaaaataaatacatatatataaccggaatcccgttagaaaataattacaaatgtttcatatgcataatacaaaggttgtcgcctagaaacttgacaaaatacaaccaactgtcccaaagatcgtacgctctaagcctaatcgccctgacatgtataatcttcatttgctcgatctcacggctgctcaacctttgccttgcccttactacgcataaaaacaatatctgtgaatcgacagattcaataagaaaagcataatcaatagcataattataacccagaatataatacgtgccaatgtacccaatcataaccctatcctagtgtcccacacaagtactgagtccagaatgttcaaatgacagtactattgaccataatatcagtctatactcggtacactagtcatactctagtccactaatgtgatactgtcaagtattacagtattattgatcataatattagcctatacttggtacgctagtcatactctagtcgtaccaatgtgatactgtcaaatagtacttaagctagcatacatttatcgatatccaatataatactaaatatactgatactgttattctaatgtaatctaataggcttaacaaacatgtacgctaaacatgtaaacacatatgcatatcattatactagtcttacctcacttccgaattcaggtgtcccgtccaacctgagtggaactgctgcttgataatttacaggcccctaaatcacattattcgtaaaactggtgagtgatacgctaaatcactttttggggactgaaaattgaaactaaaagtttccctatcgatggataacatgacaataccctaaatatcacacaaaaagggaaaaactaaggttaccgaaattgccccaactggcagatcggttccccaaccgaaagaccgattctgtggggtttcctggagaccaaccggaactccgattcctaaggccctactgaaccagtcgaccagttcagtgcaggaaacacccaaaacgacctacacacctcaattcaaacccaaacctcaaaataacttccacaatacctatttacatcgtaatgaacataattcatgcaataaaaccaaccatcacaaccagaataaaaattcaccattaaagagcaaagcttgagtttataaattcaaacattgctcaaacatcaaaacatatcataaatccagctcaattcaacataaacaactataatataacttcagaatacaaaaacaagcaccttctaacaccactgtacccaaactctcaaaaatcatgcacaaattatctttaaacataagaaaccaaaaagaggagagagctaaggtgctaacctttaattggaacactacaatcttgctagaaaatcccagaattaagttgaagaaaactcaaacactagctgtgtaacaacctaactagcataggcgtattacgtcattttt

SEQ ID NO: 32751 - DNA, 4217 bp, Cannabis sativa
  modified_base (3551)..(3551): a, c, t, g, unknown or other
tatacttaaattaaaatatttttaataattttttttatttattaaataacttaaaaaaactaaaatatacattactaaaataaaaatttaaaatataactattttttttttttgagaaaaaaaaatataactacttaattagtatatatgtattgcaaataatattaaaaaaaactatatatacaaaattaattatcttatgtcaattattaaaattacaattttgtatctatttaatatcttcttataattcattatctgaagattattaatttagttattactgatcatattgcataatatttctgtttaagtctttcatcaatctataatatgtgcaaaaaagattcatatcttttataaaaaaaaaaaaaaataagataaaaaagtatgaaaaaaaaaatatagggtgactaattatcaaagtggtcacttaccttatactatttttctcatattttgtttaatttttttattcattctttcttctaaaataaccattttgaaagaaagaaaaaaagttatatttttgcaattttttgctatataaaacatactatatttcttattaatcaacagaattttgcaatcccatttctgttaatttataatagattataatatatataaccaataagctttgtattcaaattgaagtagagatagattgacaagttgttacaaagcttttgaacaaaaaaaagtcttgtatgacgatttatggctctgtttttaagtgatatttatttgacttgtataggaatcttaatgtttctaagattttatttcccaactttatgtaaaaaaaattagtagtggggttaccaaatttagatttattttggccattgcctaataataattttctttgtttcaaaaaaaaaaccataaaattttataaaataagtaaaaaaaaaataaaaaaattacaaaagaagaggatcagattaagactatgcccagcgaaagcatgtatggactatgggcagagtattttttgcacatattttgttttgtcttttttactataattatatattagacttacattaatatttatatcgtaattaggcttctcaatttaattttatttatttaataaatataaatgttgcaataattgataaattaatgaatataaaattaatttatatatttaatatttttgttttcttttctttgacaaaagttgcaatgtataattgacaaatcttctaaaataattgtttagtagaaacaagctctctagtctctaccataactacaacttgcattagaataagcagtaatcattaaatcattaatcgtttaacaaaaatacaagaaaaatattgttgatcactgaaattagagtatgacaatctaaaataattaaacttaaagaggataaaatttgagttgaactatgaagagcatcaataacgcttttacaatccgattcaatcacaatttgagagtattcttgttgtttgatccaacttagtgctttcttcaatccaatcgcctcgcccaacaccagttgaacacgacaaggtatagtttcaaagaatgatagaggacagttcataatagtcacgagcaaaccatccaatcctataaaagttaggtctaaaaatgacagatgtatatacatatcaactttaatcgtatataacactcgaaactgatcaatactctgcactaacactagcaagaagctaatgtgtttgctaaatttctatgtgcatcctattccatataaagtaagacaacgttgcagccaccataccatattagcaatagaacttttactttgtcacacatttcaagttcgttaaagagaccaacaaatcataacaatttaacatacactttcaacttagaaaaactcaacatgccatgcctttgctatataagcaatcaacaaatatgtgaagaattaattaattctgccatgaatttgagacattaaaaattaaacaaaatattattcttttaatataatataactataattaattaatatatggtataatgcgttacattattaatgcatattatttatttgaatggtattaatgcatattattgaacatctccaataaatatttattcgtatatatataattaactattgattcaggaaattctaatatatctttggaaatttaaagaaatatatatagttatatatataagagagacattgatcagaaattaaaaatataaatcaaacaacattccttgtttgaaaaaaaaaaattaaacacccatgatcacaacatttgggtgaaaaaaataaaataaattgtcttccatatatctaatttttggtattaattaaacaatatatattagtaattaaagacaacactttcacattaatttgtaattaactaatataatcgatgatcatgcatcatgatgaaaggagattataatatataaaccgtacgtcttcttaagaaataaaagaaacattatatatatataattaattaatagttataatgaaaaatattgtagtgtctgaacgattgaggaatggacggacgtgattgaatttgagggaaaccagtagatgagatctgatgatcatgaccgttgatctctctatatattaataattattacagcttaattatttggtctcattttttaagcttcccttgagaaggaaactcttattattaggctccagaccaaatcccatggcatcagatttcttcatgatcctcagtctcttacaggactcaacaaacatcctgaaaaaattaatacataaataaaataaattagtattaattaattatacccaaaataattattttgtaaattatctataatatgatcaattaagcaaagtataatttttaaaaagaaaagcaataatttggttttgtatgcctaccgacactattatggtacgaattttctcatgtctgggttaatatatataataagtggtccaacaacatatataaaaccgaaagaattaaaaagatttatgttgattaagaaattaaattattaagtaggaaaattaagaataataatgattaatagtattgaactagggagcagaatttattagactaatttgtaattagtctgactaatttgtaattagtctgactaatttgtaattagtcttgttgacctaatattaattaatgttaagaggccacgttttgcacaattagtaagtggttatgattgttgtgtttaactttatgatctttttatgtctatttgtcaagtcttagtgaacacgcctcaagaatgtttgactcagttgggtccgttgaccagggtcaatggccagcttgctcaataaatgaatttgaatatatattttctctctacacacaattaatgatctcaatattttgctctaattaaattgacctaaagcacaaataatgtacagtaacgatatatatgtaaaaaaattagggttttttcatatttacatctcattataaaaaaactgttatttttagtgacaattttttagttataatataaattttttataactaaatgtaacttttagtcacggaccttttagncacaacatagaaataataatttataattagtacttacaatttttttttatttttatttttagtcaccagttttgttgtgactaaaaataaaaaaaaaatatataaaatctatagcaactaatatgcaagttaaattacaatccaaatttacataacatactacataacgaccaccaaaacaacctaaattataaaaataaaaaaaatacaatatggctaattcccctaaaattaaacggtttaataatatatataatattttgaggtgttatggcattggtagtggtgttgaaagatataaagaataataaagaagaggttggtggaatggaaagagacttactcccagggaacatctcccactagcatccagtctccatctttgtcttcataaattggcacaaattcacagctctctccatccttcaacccctctcctgctcaattaatcaaatatactttcaattatttaatttcccatataattttttttaattaattttcttaaaaatgattgatgaaactatatagctagaattgtgttaaattcttcaaggaaattccttacatatatatataattattatattagacaattaattaattaatttcttccgttcaaacgcatatatgcaattaatagacatatcatttgctatatatata

SEQ ID NO: 32752 - DNA, 1398 bp, Cannabis sativa
ataggtcaacatctctctagctatgttgtccttccaagaagtccaaacgttagatatttcgatatgtgtataatgattattgcctaaactttcaccttcgtcagaataatcatccttactttcctctacgacttgttctagaggatctacagacatttatcttataattaggttgtgaagaaggcaacaagccaaaataattcgacatatagtatgatcgacctctaaggattgtccatcgtcactttaatagtccaaatgctctctctactacattccgagcagaagaatgtttcatattgaaaaattcaacatgagtattaggtgggacattccaactgtttaaatgatatcgttgtcttttatatggtactaagaagcattcaccattggaatatccaacatcacataagtaataatatcctgtatatggattgacaaaattgtaaatctattatgaaattaacttgtatatgtatgatattacacatggaagaaaaagtataccttgtggaactttcaatccatttggcatagatatagcatctcacaacactctagagtctgcggctgatccttcccatctgggtaagacataaataaattgcatatcttgagagactacacctaatacattagtagcaatttcaccctttctagtccgatacctaggcttatctacaacaggcacattgactttaatatgtgtgccatctagtgctcccaaacaattcttgaactaattttacctctcatcagttgaactattaagaattggttcaggattttttaataatagcacgtgaagatgcaacaaagcattcaaaataatattaaattgtctactcaccgtttaacccaaacgtgcaaattgttgtctcacaattctattcttattgccatgagatataatatgtaaaaatatagcaaccatttcttcaacatccatattcgattctttgttcctttcaaacccccgatagttctaagttggtgacacaaaataccaaatgttttcttatccatgccagtattttctatacaagctaagtcactagcatgtatcattctaaaaagatttagttgacgtaatttgtgcctacgaaaagaactttcaagaaacatatttctacttatacgcctcttacaacaaataataattatttggagtatgaaaggaagtgtcatcttatttaacatctccatatattgaagtaaaattgctataattttttttttctttgtaaccaatggaagacgagtcatatctgcatcaagttttgaaatagtaattcacttatatgcattaccatgtaaaataaaaagtatgtaaaaaaggaaaattacaaaagagaattacattcaaaaagattacattcatcaatgaaaatctcataa

SEQ ID NO: 32753 - DNA, 3616 bp, Cannabis sativa
ttagtaataattctcaataaataaatattacgaaaattacttaatttatgttggtccaaaattaattaaaataaattttcaactcaaatttaattttctataaatatatatggctaaatttgaaatctgatgtatttaaagataaacacattttcgaaattatataaaataaaataaactaaattctgaaaaattattctaatttatgttgatctaaaatttattaataaattaatattcaacacagatttaatatttctatttaattaaatttctaagaaaaatataaaatatttaagtatcttgaataaaatcaacttaaagattaattttctatgtaattaaatataactagaaaataccacaggtatacataaactaactatctagatttttcattaactaattacttattttctaattaaaatataatatattttagtctacttattttagtaaatcattaatgaaaaatttacttcatctaagttggtctaaaattaatttttaactttaaactatttttcaatattttaaaatatttgcatttaaaaaattaaatgcaatttgaaattaataaaaaaaaatgattcataaaaaaaaaaaatacattttgaaaattattctaatttaagttgttctggaattagaatttccaacttagatatatttttcttgaaaataactaatatttaagtgtctagattgaaatcaacttaaatatttaatttttaatttaattaaatgtgttgtctttggtttttcctaaaatacgtggacacggataagggtgacacgtggatcttaaagaacatccactcacgaaaatcaactaagtcttgaacaaaagaaagaacaccacagggagtgggcctcccggaggaaagcataaaacacattttttctctgggaggctatagccatgctaaggtattttcgggaggtaaagagattacttgaacaatcacttcgaatttaatgccgcatgggggaagacgtattgaaacgtccataaaagatgtgacagatggcgtaagccctttttacggcgatttgattgcgaagaattcaccaacttctgcaaccaacacggagtcgttaaaagcttctccacggtagcaagagcacaaataaatggacaagcagaagccgtcaataaaatcctaaaggtcactctaaagaaaaagttgttggcctgcaaaaacaactggcctgaagaattgccaaaagtgttatgggcataccggactactccaagaaccacaaccgggcactcgccattctcaatggcatacggttgtgaggccatggtcccggtggaaaccttgttcccatcccacaagagaacgacatatgatccggtaataaacaaagctttattacaagaagcactggatcaaatcgacgaactcctagaagagtctcaagtatggatggcagcttatcaaaagaaggtggctaaacacttcaactccaaagataaagacaagaaatttactattggtgatctagttttaagaagagtcttcccagccactcagaaacctagagtggggtacttgggccaaattgggaaggaccatatgaagttgaggatgagatcggctctggaacctacaagctaaaaagaatggacggaaccacggtgcctagggcctggaatgctgatcacctccgaaagtattaccaataatcaaaaaagcaaggtttatgttctgtaaaggaatttgtaccgaacaaatatatgcaacctctaatttaattttgtaagactaagtgacttaaaaactgattttcatgtcacttaggggggtactaaggcatatcacacggacaaatataaacagatcaagtataaggaaattaaaaactaaatatattcaaacataatgtagattgtttgaagaagaaaaccttaaaaagaaaaggcctagggacgggccataaaagtctccccttaagaaaaagaaaaaattgtcttagaagtaaggggaaggacaggatatataaaaacaaaaaaaaaatgataataataataacaaaggagatgagcaaatgatttaatcagcccgaggaggaagacgaggacccctgtgctcctccagcactgcatccaacctcttcttcttctcccagaagtgagcaagaacttcttcaagcttgggataaaagctgagattaagattctgaccgttggattgccaggccatgaagactccatcatcgaagcgcttcttgcagtgttgacaagtgactggggccaggagagcatctctcttcgccttggctgcctccttttgagcatgctccttaaactcacgaagccccttcacttcaacagttaggttggttgtcgtttgcaaattcgcttggtgcagctcctctagagacttcaacttggcggtcaattcctgcactgcctctttagaatcccgaaggtcccgcctcgttgtggccacagtcgcatccttggccttcaacgccttgtccttaaccttcagcgcctcctggtggctctgctccataagggcctctttctgctgggcttcctcccggatagccctcttttgcgcctctgactcccgaagactcttcatggcctcctccatgcccccaaactcggacatggtatacccatggttaattaaagtcttcaaaagatgaccggtctctgcagcaatctgacaacaaaaaatatatatgaatacatgatatcatgtgtcaaaaaaagcttaaaaatatctctaaatagataggaacttaccgcggtaagggctacgctcacgtcctggatttgatagacgggattggtagaagcacaggccgcgtatctcttcatcaggagctgaaccaggccgacagcaaagtggctcatcaattctaaggcaaaaggagccagggtaggtccaatgaagcgattgaaccagtcagtcaagggatccagatttaaatcccagacattcctgacgtactcactacgagtaaaactatcttgggcctccctcaaaatctttttcagggtctccacctcggcgttcccctttgtgtactctgtcgtggcatagttgtgcttggcgatccggagttgggttctttcctcatcagtaggaatgggggttaagacgatacgaggaggaacagtatactcgtccacctcggacggaatccctaagtcaaagctgggagccggagtgtctactcgccttggctttttagcaacctcagtctctaccatctttcctttgcgcttccggtccaagggagggagaatctcgccttcttcttctacttcctcttcctcgtcgattaaaatgactcagtccaggggtatgctggaagaagacctcccgggagtcaccaccgggtcttgggtttgaggcagaacatgttcgagactgtaggtctgggcaagagcgttcaggagctcatccattgacttcgttgcttagagaaatagataaataaaggcgttagagcattatcaaaaatccatgcatccaggaataatgtaatgaaactaatcctaccctggtgatctaattctgccctagcaaaagtatgtatgaaaaggctggtgtcgtcgtcccttaggaagctatccgaggggaggaaccaa

SEQ ID NO: 32754 - DNA, 1260 bp, Cannabis sativa
caattttatgtaaatatatgtatacacaagaagtcgtggaaatatggtcgaaacaggaggcaatcggggaggtcaaaatcccctgaatctccgtggacgcagcaaaagccgtggaagatttcaaagtggtgggcatgaaaatccacgaggataaaaacaacagatatgtacgtgtggtacgtcctatatttccaaaaacaaaatatcatatttttccgattagtaaagttctcttgcaaaataataataagaataataataataataataataatggttctgtattattagttaataaaaaaaaagaagggttaattgtacttggcatccccaacttactatgtgtacagaggtcccctattttcgtatatatagggcattaatttagtccctcaatctctaccatttggctgattttatttaaatactatatttcatcaaaaatctattaaaaaaccaggagctaattaaaatgatcccaaagaaaataaagtataattttggccatccaaattaaaacttgcttcagttgaagcttggtgatgtgtatttcctataaccaaaggaaaagcgcatcttatattggtagattagtactagatcgaaaacttgcaaggttatttacaacaattaaaggacaccaattagttgactttttcaaatactttagaaaaataattgttcactataactacagaatgataaagaagaacattgtttatttactataattaaaggatatttacaaaaataagtgttcacaggtatacactaacaggttagttgaaaacttgtacaaacttgaaatgagcagtacaaatgactaatttacaaaaaaaagaaaaaagaaagcattgttattagattacaactatcacaaaatgaagcaatattatatataaataattagtaatattttataataattattaaattaaaatatatatgatctgacgcataattaataacacgccacataattatataacaccttatcattgggctgtttctccaatgggtaggttgtatatttgttagttaagagaaatgaaatgttagcttatttactaaacaaaataaagaaaagtcataaagcatagaactaaaaaagtttattgacttttgaaacaactttaacaaataataattcaaatacgtacacacttcacaataatttaactacgttcatctcttatatatatattaattaaagttgttcctacaaatacatgtccctaccataaaaatactcaaaatgta

SEQ ID NO: 32755 - DNA, 1275 bp, Cannabis sativa
cacttaaattttagcaacccgaactttagattgggttagaaaatatataggataaaccgcccaaactgaccgatgtacaaccagtcgtacatctggctatcaatccattttccattgtccgaaacaatcttgtggagaagtccgaaccaaaatattatgtttttcaccacaaagtccaacactcttttagatgtgatcgttgctaaaggctcagcctctgtccactttgtaaaataatccactgcgaccactgcatattgtactctgcccttgcccttgggtaattgtgcgatcaaatctatcccccatatggcaaaaggccaaagactttgcatttgtattagctcgttgggaggtgcaagaaggatctttgaaaatctctggcatttatcatatttcttcacgtaggccttgaatcttccatcattgtcagccagaaatatccttgccttagtcttttcttcgacagactttgtcctactgcgtggttagtacaaaatccatcatgcacctcgaataggagtcgtgcagcctcttcttgtgttacacatctaagtaatggcatggagaaacctcttctatacatcacaccttcgactatgatatactgtgcagcccgagcatcttcttgtcattgaagttctccaatgttgaggtaagctggatgggtgtcatcaagtttggtgttgtgtcgatcattttgatttcttctgcacaagtgatgacgggttcttctatgaatttgatcgagactaggttggccttatctattactgtgctactcataagtcgtgctagggcatcaacagttacattttcttctcttgaatctgcctaagggtataacccttaaattgtgtgagaaggtcttgtatcttgctcagataggccatcattttctctcctcgggccacgtactctcctgaaacatgattcactactaagtgtgaatcactacagacctcaatgtattcggcatgtacttcccgagcatgtttaagtccagctatgagggcttcatactctgcttcattgttacaggccttgaacccaaatttgattgctccatgcaggttttgccccaggtgtgtcgagggaaattcctgcaccagaaagttggtctgtagctgatccgtccatatgcaatttctaggtaagtctgtctaaattcttttctagtagggactcttgtaccggcttcgggttgtcccttctgttgctttcttctttgcctgtgcactcaattataaattctgccaaggcctgtccttaaac

SEQ ID NO: 32756 - DNA, 17218 bp, Cannabis sativa
  modified_base (674)..(680): a, c, t, g, unknown or other
  modified_base (1068)..(1070): a, c, t, g, unknown or other
  modified_base (13931)..(13935): a, c, t, g, unknown or other
gtatatttttgaagaatataaattgaaagaaaaaagttaaaaatacttagtacaattaaagatataaattttatataaaataaaaactattaaaatagggtgcacttagaaatttttggggtgtaaataaaacttcccattaaaaaaataggcacactttatattcatacccattatacccttctctcttctcttctatactgatagtgatccaatgggggtccgatggtggcccgatgctactcatttttttttttgtttttgtacataaaataagtagcatcaggtgaccattggaccaccattagaccactatcgggccaccatcagaccatatctacatttatagatgtaagctccattcattaagctcgttaggaaggcatcgggccaccatcggaccccatcgaaccatatcatcaggctaccatcggaccttcgtcttcaatctttactcattttaacaataggaaggtatcagaccactatcggactagacaaaaaaactaattttttgcccaaaactcatatctggccattttcgatcctaaatctaacatctactcacaaataacaaacattaataatacaatttattaatttgacaacattgtcgatggtgaagtcgttggctccgtagtggtcattgggtccgtgggtccttgggtctgtgnnnnnnntggtcgtggagagaagggaccaatgttgtgggtggtgggttgtgggtcgattgtgtgctcctccgtgtgcgtgtttacacagagagagggggctcttcaaatgagaggggtagaatggagttttaggaaaaatgatatttctaccaatattaaatagtttaggtttagaaaaaaaatttagtttgaataattagtcaaattttccttttactaactagaaattttatttacactttaaatttttttaaagatatcctattttaataatttttattttatataaaaatttatatattaattgtaccaaatgttttaattttttttttaatttatatttttaaaaatatatctatcaaataaaaataaattatattttaattattatgannnaaattaaaataaaaaattatatgatttttttaaaaataaaaatatatacatacatgaaaaaattataaaaataaaagtaaaataattaaaattagaaattttttttttaaaaaatattaaaaataatttttaaaaattgtttaaatttatatttattttaataataaagtgtatttatcaaatcgaaattcccttagcatacgactcgctgtttctgataggtaacgcagaggcaaagggcaaatttaggaaacaatatatatttctttttcttttaaggggaaacaatttttttttttttttttaatatagatagaaataaataaaatagaaggtttcgactttcagaccgggaacacaacgagagagcgaaaccaaaaaaaaaaaaaagaaaaaaaaagagagaagatattagagcagagtgcgtgagagagaaagaggaaaagtttaaagaattggagagagattgtatttctgaaaagggaaaatcttgattttctaccattaatttcaacaggtttcttgatctgtttacgcgaaatctgtttctttcgcatgttcttaggttcgtagctggattctcacgccgatctcttcgtttagttcttcaatttttctcagtaatttcctctgtcttgggcttttgttgattttaaatttttatggggatgactttgatttgctgagcttctcgcttctgaagttttgtgtgtttgttcgtgtatggaatagtatgttctgtgcgtgtgtgtgtattttttgctgaaaccctacattgggcctgtgctgatgttttctctgttgaatttgtggaaactagggttttgaattggagcggaggattcaagagggatagagtgtcaagcgaatcgcagcatgagcatcaatagccccggcgaagaagagaattagggttttcgaattcgctaaaagttgggctgtgatttccatgggcgatggaggcgtggcatgcatgtctttgcagcaaaacaacatcatggacaggtttgcgattccggagaaaactgtgctttgcggaagcaagaacgctaataacaatggcttcagttccaagtcgctcaaaaataagagaatgaaggcaaaaaaagaggcttttgctcggaacggggagtctgagaaaggtgaagtgatattgaataaaggtggtaaggttagttttgtcaaggaagttgagaatggtgatagtgaggataaaagagatgaggtagaggagggtgaattgggtactttgaagtggcccaagggggaagtggagaatggggaatttgtgccagaaaagtttcgtagaagtgaaattgagaagggtgagatagttgatgagaagtggaggaaaagtgagttggagactggggagttcatcccagggaagtggcgaagaggggatgtggagaaggctgagatagtttcagataagaacagaaaagttgacgttgaattttcttcgtggagggctccaagggatgaaattgagaaaggagagttcattccagatagatggcaaaaaggtgaatatcccagagatgactacggttatagtaaaatgcgcaggtacgatccaggtaaggacaaagtatggaaatttgaacgtgaccgcactccgccttctgggaagtattcaaatttttgtgatgattcttttagaaggaaggagtttaatagaagtgggaatcagcatggcaagagtactaatcctaggtgggaatgtggtcaggaaaggattatgaggattagctcaaaaattgttgacgatgaaagttataaaaaggaattcagcaacggtaagaatcatgggagagactactctactgggaatcggttgaagcgttatggtgttgaaccagatattggtgaacgtaaacattacggagattatggggattacgctggttcaaaaagtcggagactttgtgatgacagtactcgtgctgtccctgcagaacactatacacgtcattctgtggaaaggtcatacagaaattcttcttcttcttccaccagaatttcaactgacaagtactctgccaggcattatgattctacattgcctgccagagctgtccctgtttttgacaggcatggacgaagtccaggccatttggagcgctccccacgtgacaggaaccgttattatgatcaccgggacaggagtcctgttcgtcgagaaaggtcaccttatggtcgggagcggtctccatatggtcgtgagagatccccatatgatcgtaatcgtcagtatgatcacaaaaatcagagtctttccccacaagatcgagctagacatcatgaccgaagggatagaactccaaactttatggagcggtccccgcatgatcggagcagacagaataaccatagagaaatagttaggaaaattggaccaagtgacaagcggaactctcagtatgttaccaaagggcaagaagataaaccagtccagaaagaacctgttgggaaagactcacattcttcagctaaggaatctcaagataaaagtaacaatgctctcaatattagtggttccacggaagcaagtgccaaatgcgagactcacaaagaggagcctcaaagtccagttataaattgccaagaaagttctgatatagttggagtttctctggaagagatgccttctatggaagaagacatggatatctgtgatacaccgccacatgtcccagtcgtttctgacgtatctactgggaaatggttttaccttgattactatggtgttgagcacggaccttcaaaattatgtgatcttaaggcattggtggaagaaggagctctgctgtccgatcacatggtgaagcatatagatggtgataggtgggtgacagttgaaaatgctgtttcacctttggttactgtgaatttcacatccattatgtcggactctataactcaattggcgagccctccagaagctccgggtaatttattagctgatactggggatactgggcaatatggtgctcagactactgaagaaagaacaaatgatagtgaagcactttctgagcctcttcaagatctccgcatcgatgaaagggtcggggctctgtttgatggctttacagttattcctggaaaagaattggaagctgttggaggtactctctctctgtttccttttttttcttctttaaaagaaaatctgggaactatttttttttcttttcttttatgtaacgtgtttttgtattccttaagttttttctcactttgcccatgtatttttttcttgggtaatttattatcttgcagaagttctacaaatgacttttgagcatgcgctgtgggaggaatggggaaaatctgaaggtaaaagtttatttaagttgtacatataatatacacgctcacagtaactagcatttatagatctcctttcattatcactagatgatccttaagatatatacatatatatatttatatatttgttggttaacaatgttgttcgagataatttaatgctttttactgataactcttttttattgttataatattgcctgataaatgcttgtttgttgtataattattacttttcttactgtattgagtctattgacagactgtttatttctacaattcttgcttccgcatttgggtctaggtggtaccataagttttttcattttttttgtcctagcaaagctgtatgatttataatatcacattgcatttttggtagttgggataagagccgtagaaattgattaattaaaattttcatacttaccgtaatgaaaatttctatatattatatgtatatttatatttatgttattgttactacattttgagccaaaaaggaagggtttagattgcacatatcttatgcataactagggttgtgcagttttacttttaaattcttgtctgaataagttataaatattttcaaaacataaaattcaacatagtactatgtaataaaaaccttttcaatttattactcaactatctttaagttatcatttttctttagtctgcacctacactaagaattttcatgcattggacgttcctggatatgtgcaggtttcattttgcatgctggccagatcaatgaaagggatgaacagagaaatgatgaaccatcaacacattctgacatccaattagtagaaggtgcagaatctaggttcattgtacccttagacaaggaatatggttttgattgtggtgactctggtgattggttttctggtagatggtcatgcaagggtggtgactggaagaggaatgatgaagctgcccaagataaatctaatagaaagaaactcgttctcaatgatggtttcccactatgccttatggccaagtctgggtatgaggatcctcgatggcatcggaaagatgacctgtattgtccatcccagggaagaaggcttgatttaccactttgggccttttcaaccacagatgagaggagtgattgcagcaggaccacccaaagtaagcttcttatagttagaggagtaaaaggaactatgcttcccgtcattaggataaatacatgtgttgttaaagaccatggttcttttgtttctgagcctcgcaataaagttcgagttaaggatcgatattcttcaaggtctgctcggtcacattctgcaagtagtgatggcaaaagatcttctgcagaaggtgatattcaatcaaaaagtgttagtgagcatggttttcagggctcttggagaaacacttcatctattaataccccaaaggaccgtatttgcacatttgatgacttacagttgcatttgggtgaatggtactatcttgatggtgctggacatgagcggggaccttcatcattttcagagcttcaggctttggtagatcaaggaagtatccaaaaacatagcagtgttttccgtaagttcgatagaacttgggttccagttgcccattctgccgagacttctgaacagatagttaaggctcaacatgggaacactacaacatctggtgattctttagaacctctttcacaatttcagggtatttcacatggcgaatctaatgcgaagccaaatatgttccacaacctacatcctcagtttattggttatacccgtggaaagctacatgaactagtgatgaaatcgtacaagagccgggagtttgcagcagctattaatgaagttttagacccatggattaatgcgaaacagcccaaaaaagagatggataagcatgttaattggaaagcaggtacagtagtttccttaaatgtggaagcactgcttttcattacaaatatttttgagttattttaattttgtcattttcatcttgattttgatttacttttgttgtgtgttattttgtattcaaccccccatagcctcttatgtttcatgtaaaatagtttttcaggtcctgtattttgcatctaacacgttcttaaatatttatatttaaatcttgtactgtgatcagacatcttatcagtttattgcaaaccctatgactattaatggtgtagatttttgccttccatttggttagcttctaacttttgtaatcaatgttatcgttttctcttttgtctcttttgttaaaatataaatatcttgtttttgcatttatccatgttgttatgtgcatccagatttagtatagtactcattatgaagttgcaatttattgatttattcatctctttgctgaagtaggggatgcacgtgccatcaaaagagctcgtcttttggttgatgacagtgagggagaaaatgaaatggaggacgatgaacagactctttcgaaaaccgaatctacatttgaggatctgtgtggtgatgcttctttctgcagagaggagagcatatgctctctctctcaaatggattggggttccttggatggtcatgtgcttgcaagggtctttcattttctgagagctgacctgaaatccctcgtattcgcttctttgagctgtaagcattggagagctgctgccaggttttacagggacatttcaagacatattgacttgtcatcgttaggtcctaactgcactgactccatcttccttaacatcatggtaggtttttcatatattggaatttggttttccaagatagcgggagattattgcttcatcacaagtttacaattttttttcccttgcagagtggttatagcaaagataaggtcaattcaatggttttggttggttgcatcaacatcacctccactacgcttgaagagattcttggttcattttcttgtttgtctacaatagacaccagaggttgcagtcagtttactgacctcactctaaaatttcacaatattaattggatcaagagccggaacttgcgtggtacactgaactttgaggattcacattctaaagttaggagtttgaaacagctaactgagaaatcttcatcagttcttaaagtgaagggtctgtatgggaatacagatgattttggtgaacttaaagagtattttgatagtgtcaataagagagactcagcaaaccaagctttccgacgaagtttatataaacgttcaaaactcttcgatgctaggagatcttcatctatattgtctagggatgcccgtacaagacgatgggctattaagaagtctgaaaatgggtataagaggatggaggaatttcttgcttcaagtctgaaggacataatgaaggagaatacctatgatttctttgtacccaaggttaatcattgatttatttgaatttattttaattcttaaataataaacataattttcttcatttgtgttccttaaaattctcttttgattccaggttgctgaaattcaggagaaaatgagaaagggttattacattggccgtggattgagctctgttaaggaagatatcagccgaatatgtcgggatgcaataaagtatgtactttgtagtctttatacattcctttagtttaaaaaaatgacgaaattagctttttctttttaaaggaatttagttctttttactaagtgttctggtaactttctctatgcagagcaaagaatcggggtgatgctggaaatatgaatcgcatcatcacattatttattcaactcgccacacgtttggatgggggttccaagtcttctcatgaaagagatgatggattcaagctgtctgaagatgattcattttcattactctcttcaacctccaagtacaaaaagaagctaaataaagtgagtgaaaggaagtactttaataggagtaatggctccttctcattgaatggtggtttggattatggagaggatgcatccgatcgagaaatcagaaggagactatccaaactgaataaaaaatcaatggattcagaaagtgaaacttctgatgatcctaacaggtcttctgaatatagcaagagtgggagtgagagttccatctctgatgctgaaagtgacagatcaggaagtcgaacttggcagtcaagacctgatggatattttacacctgatgagggtctggatactactactgatgatcgtgaatggggtgctcgcatgacaaaagcaagtttggtccctcctgttaccaggaaatatgaagtcattgatcagtatgtagtagtagcagatgaagatgatgtgaagcggaagatgcaggtatctttgccagatgattatgtcgagaagcttagtgcacagaagaatggaaccgaggagtcagatatggagcttccagaagtcaaagactacaagccaagaaaacagcttggtggtgaggttttagaacaagaagtttatggaatcgacccctatacccacaatcttttacttgattctatgccagatgagttggattggcctcttctagataaacatgtgttcattgaggaagttctcctttgcactctgaataagcaagttaggcactttactgggacaggaaatactcctatgatatatccgctgcagccagttataaaggaaattcaggcgtcggctgagaaggatggagattttcgaactgtgagaatgtgtcaaggtatctcaaaggccataagcagtcgcgtcgatgacaaatatgttgcctatagaaaggtagatgctgttatcttgagccccattttatatagttctttttctatgttctgatctacaatttatccaacaatgcaactttatgatgctggactccatttgttctgacaatttttttttctggttactttgatcaggggcttggagttgtttgtaacaaagaagaaggctttggggaagatgattttgttgtggagtttctgggagaggtattagcttattgttcttggatccttttgtttgctgagaatatttattctggatgtttgaaagttgggttgacgaaatctatgccgccatattctgaagtccttttcttttcttcatataatttaatttatcttcttcttgtgattttgtgctttaaaatctagtttctgaaggcttcacgggacagttttttttttcttcttctttacaatgtctttacatcttttaataggtctatcctgtttggaaatggtttgaaaagcaagatgggattcgatccctgcagaaaaataatcaagaggctccagagttttacaacatatatcttgaaagacccaaggtacttttgactcttacaaacaattttaaattttaagtacttctgcaaacaattctttgatcattcattattttcctgcagggtgatgcagatgggtatgatttagttgttgttgatgcaatgcataaggctaactatgccagccgaatttgtcattcctgtcggccaaactgcgaggcaaagtaagattttccataatatttatcttagcatttggtatatacatttgctatcctatcccaccccctaaacaaggccatggccttgccaattgctgtcctgccttgaatacaaaattaggtcttttgttatctgatgtattgttgcaacatcatctgattatcatcttttgccacttataattttttttttttatatatataatcctctgtgggcttagtttccctattaataatgcattactagttttattttattgtgtgtttatatatgtatatatatgttcttaactcttaattagtgttgtgaattgtgggaaattttaatttcatttgtcataccatgtaaaatgagatactttaaagcagtttattgttgttaatgttattatagttttcttgtggatagttcttcctttaaattggatgtgccataatagttgttgttgtcttttttctttctggcatcctagtagatgtaatatcttcaatctgttaaatgcagggtcactgcagtaggtggtcattatcagatcggaatatatactgttcgtaaaataggccatggtgaggagataacattcgattataactctgttactgaggtatggccctttttcctgtcccttcacacacactatctaaattttattccacttggttttccatctaactgtttattcccgattatttttgtgacagagcaaggaagaatatgaagcatctgtttgcttatgtggcagccaagtctgccgaggaagctatctgaatttgactggtgaaggggcatttcaaaaggtatttgaacagagcaataactgcacttcatgtgaaatcttgtggagagcccaacgatttcttggctcaaactcttggttttctgagggtggctgttgcaacaaattgattttatgtttgaatcttctgtttctctcttgagctataactcttttaatctcttttatctgtgtaatgtctatttttcaggtcctcaaggattggcatggagttctagatcgtcatcagttgatgttagaagcttgtgaagctaattcagtatctgaagaagattatcttgagttgggaagggctggtttgggcagttgtttgcttggtggattgccagattggttgattgcatattcagctcgcctggtatgtctaaatgttgcctacttcattgactttcagaatgttttttgtttttatttcatgctgttataagcctttttcagttgtcatttaccaaaaactccaatgtttgaaggtgagatttataaactttgaaagaacaaagctcccagaagagattttaaagcataatttggaggaaaaaaggaaatacttttcagatatttgtctggaggtcgagaaaagtgatgcggaagttcaggtgaatacttttgtattacttatgcatgcattttaacttgttgtgcttctatggctgtcccctggtgtaatattaacttttcaaaatccatctgcttgacaggctgagggtgtgtacaatcaaaggcttcaaaatttggcagttactctggacaaggtgattgcatttttatttgtagaaagaaattatcaccatatttgattcttttcttggcttcttttgctgttgttgttatcacagaaattcttattattgttaacttatataattgtaaaacgtgtgcatataccaagttgagtccaagtacaatgacaagactgggtattttgcacattatacgctttggcattgcaatgattattttatactttgtaatttgcatgtgatcctgacatttggcttataattatgctgaatgctgtatactcaggtgaggtatgttatgagatgtgtttttggtgacccaaagaaagctccacctcctctagagaggttgagtcctgaagaaacggtttccttcctctggaagggggaaggatcacttgttgatgaactccttgaaagtttggctcctcacgtggatggagaaaagcttgatgatctgaagtgcaaggttcatgttcatgatccaatagggtctgaagactttgagagagatcttaaaaggtcattgttatggtaagtagcatgcatatatttgtttctaaggttatccattttttgttttttgtttaggagagaaatagtttccgttattttgttgaaggtgtatgcttttgtcccttgcaaaatttattttggactatttattttgaaggttgagagatgaggtcaggaatcttccatgtacatacaagtctcggcatgatgctgctgctgacttgatccatatatatgcttatacgaagtgctttttcagaatacgggtaagtctcatttcttggaaggaagcaagggtttgagaatgtctcttacgacttacatgattttcttttcttaattatatatcttcaggaatacaaagctgtaacttctccaccagtatatattagtccgcttgacttgggtcccaagtacaaagataaactgggaacaggttttcaggagtattgcaagacatatggggagaattattgtttagggcagctgattttttggtacaaccaaactaatgccgatccagattgtagccttgctagagtgagtaggggttgcttgtcgttacctgatgttggttcgttctatgccaagattcagaagccttctcggcagcgtgtatatggccctaggactgtgcgatttatgctgtcaaggatggtgggtttagttttcttgttgaattttgttaaaaaacgcatattggattccacttttgtctgattcatttgctaaacttgtttgcttgattctccaggaaaagcagccgcagagaccttggcccaaggacagaatatggtcgttcaagagcgccccaaagattctcggcagccctatgctagatgctgttttaagtaattctcaattggatagggatatggttcaatggttaaaacacagacctgccatatttcaggcgatgtgggatcgatgaatttttgcaagcagtaggaacaggaagcagtgtcactggtgaaagccgtttaattgttttggaatgattctcttagatttttagttaaccgctgctccttttgatggtgggcaaaaatcattccaaagcgccattcgttgtgctactttctcattattctgtacagtttttcatttttgtaatttgtaattcgttatctagtagttagagcatttgttttccctattctaatttaagaaaatatgaaaggaaaaaaggaaatatctatcgcctttcttcaaatcccactgctcttactcaaaatataattatatactagcttaatcttctgtgtatatatataacacgtgattaatttagcagaagtaacatctttttgtccctctctcattttgggcaacatgaagcccttgcatatatttagaggatactaatcgtgtaacacaaataacaatataaacaattaatcaaatattccaagcttgaaacgactgattctagcagacgtctaaattagtttgactgagctcttccatctttgctttctattctttttgagtataaggcctagtaattggtgtctaatttgaagctgtggcagattaaatagggttatttggtttctcagaaaaaaaaaaagattagatcttggaatgattttttgttatattcctgaccaaaaaaaaaattgaaaaaagtatatgtaaactgaaacctaacacatatttcttcaatctggtaaggcaattatccgagtatgggatgatattccagcttaaattttctatctaattataattttttttttttcatttttacattatatgggttggggttgtttcgtcggctggaaaaaaattaagaaaaaaaatcttcggcaaaaaaaaaatataaaacaaaattgggtttgacttaaatattttgtatttaagcatatttttgatagtgtaaaaagaaattattttggcattttttaattaagtagctaaattaagcacatatattcaaactttttttaattattcgtcattgaatcaaaatctaataatttaatatttttaannnnnatatttatagttaaatttgtttaataaccatccataagtaataccagaattgttccatacatttaattttttttttttaaataaaaactaaaagtgacaatggtaaggatcaaatccaagacctcaacattaatataaaacccaagttccaactaagcacttgtgttacaatacttttatgaaatttattaaactaaaatttatatgttatatttcattttcataaatatatatatatataaaatataaattttaattttttggacctccaaaattgtgaggcttgggctaggcctcagttgcactatcttatggtcggccctgatcaattgcaagagcaaagaaaccagatgattgcgatcgcaatagcataagattttagtaataagataaatattaaatttggtgtgtttttttaaaaaaataattatattcgaacatagtattacacacatgctaatattggtaagctggagctttattcaatttttttaaactgaattgggagctttatttttcggtaattaaaattatttaaatttggtgataatgtaaaaaagacttgctctggtaactactataaaaatggaaataaattaaaattttaacactatatacgtgtataaaagaaaatataatttatgatgataatacaataaaagtgtgcatgttgatttggagagagcgaaagacagagcaaaacaaagttgaataatagtgtactgtagtattgattgtatgaatgagattacaatttactaataaatagatcagtgtgtatatacagataaagtagaattagttagagataaagattagttacaaagttagttataataacaactatagtaactaaacagtagtaaccgaaacaactaacaacattaattaattttaacaatattaacaaatcttattctcaataaatcccctcaaacttagtgtggatagaaaaatcacactaagtttgtctctgaaaaatgggaacctagtgctggaaatcgcctttgtaagagagtcggcaagctaatcttaagcatggacatggtgaacttgaagttgatgttgtaagactttgtcccttataaagtaaaggtcaatttcaatatgctttgttcgagtatgaaaaattggatttgcagccctcatcacaatacttaaatcatcacatcaaacaatcggaggagtgcttggaaaaatatgaagctcagataggagagattgcagccatgttatctctgtgacaacaacagctaggctacaaaattcagcatctgttgaagatctcgatatggtttgttatttcttcgacttctaggcaactaaattggatccaaataagacacaatatccattagttgtgtgcatgtcatcaagatccaaagtccaatcaacttcacaaaaggcagtgatgtcaaagtgagatgttttctgcaggtgaagaccatagtcaagagtgctttctaggtaccttagaatgcgtttaacaactatcccatggaactccaagggagattgcataaactgggagaccttgttaatagaatacgcaatattaggcatggtaatagttacatattgtaaggcacctataactgatctgtaaagagtagaatcaagaacaatatcacttaaaaaatgagacagcttgaggccactagtcataggtgtactactggacttggtaccttccattgtagtcttgcataagagatcctacaaatattttgtttgagatagatgcatgcccttacctgttttagttatttgaacaccaagaaagaaattaagatcaccaagatcttttagagtaatggaagaactgagcgtggagatgagtctatatacctcaagtcatcactgccaatggtaataataccatctatatacactagaacatatgtggtgtgttgaggaagaagtctaagaaataaagaagtgtcagattttgcatgattaaacccataacagagaatagtagatgataatttctcaaaccgagcttgaggagcttgtttgagaccatataaggccttttttaacttgcaaatcatatttggatattgaggttccacaaaacctagaggttgacacatgtaaacctcttcttccaaatcaccattaagaaaagcattaattgttaatgtcaagttttcttaatttccaccctttgtatactacaataataagaagaactcgaatggtttttggtttaacaactgggttgaaggtttcattaaagtcaaaaccactttgttgatggaaatccttagcagctagtcttgccttgaactgatttgtatttccatttgcattttctttaattcgaaagatccacttacaacctataatggaggcaagctaactagaacgcaagtgttgtttttctttgaagcataatattcagtatccatggaattatgccatttgggatctttgagagcagatttgaaattaataggaacaaaagatacagtaagaactttgagcttgtgtatacatgcttggcactggtttgcatatggtgatgattggcaataggtggaggaacatgatttggtgtgagtataggtaagttggacgaagaggtttgtgagtttgagggagtggagaaactgtttggtgatgaaagagaagcaggtatttggccagcaaaactatttgatgtagatatagactgtgaagatggtgatgatgggatggaggttgatgaaggaggaacaagagttagagaagaaacatgaggtatagcagtggtaggtgtgaaatgttctacaatgggagcagaaacatcaataggagtttggaaaggaaaaatagtttcatttaatagaacatctctagatatgtatattctactattcttagcaagacatttataacctttttgagtgagatataatttagaaaagtgcaaagagtggatctatacttcatcttgttcctattatagggtttaaggttggaaaaacataggcagccaaaggttttaagagtagaatagtttggttttgtatgaattaagtggtagagaagagtgagctagaggagttgaattagattctactatatgcctatgttttctttcaactgctctattttgttcatgagaatgtggataagaaaccctaatggataatgccacatgactcaatcacagaagtgaaagctctaaatttctctccccaatcagattgtatggcttttatttgatgattaagttgtaactcaatttgagttttgaacttaataaaggttggtaaggcctcatctttagttctaa

SEQ ID NO: 32757 - DNA, 1081 bp, Cannabis sativa
gctgccacgtattttgggaaaaatatgaggcaacacgtatttataaataaaataaagtttaaaaatatttttttaggaataatttatatttttttaagtaaattaaatattttttaactaatttaatattcttatcaattttttaatattttttgattaattttttctaaattaatatactattataatttttaaaattaatttttttactaaaacaaggcaagatttctatttgtcaaagtttagagaataaaaatattaatttttaaaagtaaaaaaatgaaacaaaagaaacataattatgtaagtgttatattttaagaattttttttcataaaccctactattaaaagttcagaaaaaaaaaatgctaattgttttttaagaaaaaaaaaagagaaaattacttcaggaaggccttaaaatcttctctcaaatgagagtgttaggagtccaacttgaccttgtgtccattcagtaaatcacttcttcgttcactattcctgcttccccattacctatctctgaaagagtcttctgctcttgtctggtgcaccttattttattcattgagttacctttccactctaatttttaagtcatttttgtgctctgttctgttggtgctttgtcatatattcactgttccattgataaagtttgttgctttttccttatgtctggtatgggggttattggtggaacctcgggggtcaataacaataatgatcccccacgtgaacccactattgaggatattgtacctaatgatgggacccctgaagtaatgacggctgctgataactctcaaccacctcatccgcttgatattactatgtctgagcctaataatgtccatacagaggatggggtggattctcctaatatcatcaatgcaaacaaaccagcagaagacattgaagtccttcgaaacaacttcttggagtccatgacccttgagttagaaccggattttgagctcacagctgaagtggtccgcactggagtgttagtaagttttctgggaggaaatggagtatccaaatctcgcctgaaagagatacttaatcagatatggaaa

SEQ ID NO: 32758 - DNA, 2963 bp, Cannabis sativa
ggagaacacaccgaagtagaggcatcgaataccctcttctatatagtttgccttcaattattgtgtagcgaggcactggatacaataattttttcacctcatttttgtcatttggaagttgccggtcgagtaagtaactgataataggagtcatccatgcaggagaactttctatcatcttgacgtcttccgtttcacatatgcctggctcgcttagtatctccactagaactaagtattattcttccaagttgttttgcgaggccagttttgctaaggcatcggcgttggagttttgctctcttggaatctattcgattttaaagtaatcgaatctttccaagttctttcaaactttctctaaatagttcgctattttcaaacctttggtctggtattccctgaggacctggttcacaatcagttacgaatcactatggcagatgaggtttttgactttcaacgcctcaactatctttaagccagcgatcagggcttcatactcagcctcactatttgatgcgtcaaattaaaatctcagagcatagtgaaacttaaagccttctggtgatattaatattaccctggcacccgaaccctactcgttgcatgcaccatccacatataacttccaagtttccgcatctcgttgaacaggcagaatttattctggagttataccttctatcaagaagtcggccaaggcttggcccttgatggatgttcgagggtggtatgttatgtcgaactgacccagttcgattaaccattttatcaatcttctagaagcatctggttttgattaaacttatctcaagggctgatcatgatggcttgtctattaatgccttgatttttttgagatttgcttcaatacccttcgcgtcaactatgaatcccaaaaaatttcttgaggagactccaaagtaactttttttttgggtttagcttcatgttatacttctttaatatcttgaggcattgcgtgaggccaatggcatgatccctactctttatggattttaccaacatatcattgacgtaaacctccatgttccgtccgatctagtttgcgaacatttcgttcaccaatcgctgatatgttgcccaagcattcttcagccaaaacggcatgactttatagtaatagagccccatgttggttacgaagctcgtatgctcctgatctgggacatgcatctttatctggttatatccagagtatgcatccataaatgacataagcttgtgttcaccagttgcatccactaacttgtcgatccggagtagtggaaaataatcttttgggcacgcgttattcagatctaaaaatcaatacaagttctccaagttctgttaggctttgggatgagaacaggattggctatccacgagggataaaacacctcgcctataaagtcattgactaacaacttgtccacttcttgttttagtgccccttgcctttcgaaatccaagggtctccttttctgtctattcgttgggtagtttggatcaacatttaaatgaaggtagataatattaggcgtcgatccctatcatttctccatggctccaggcgaattgatcctggtttgcctttaaaaaacttattagctactatttgagttggtcgtctaggttctttccaatgtatacacactttgtgggatttcttgggttgagaataacctcttccaattcttcaattggtttaaataggtttctttcatcttgaactcaggggtcaagatcttcgtctttccttgcattttcttctgccaagattgccattaattggtgaccaactttcctatgttgcaactctatgcgatagtaatcgcgagtcagcatctgattgcctcgcaccactcctacaccttctagtgtttggaacttcaaggataggtgcttgatcgaactaactgcccctagttcgatcagtgccgggtgacccaacaatatgttgtaagccaatggaaggtcgacaactaagaagtcttgcataacagtggcagataggggtgcctcgcccaaggttaatgcgagctcaattatgccaagactggcaatgttgtctccagtgaagccgcaataatttaccatacaacgccttaatttagctttttggagccctatcttcctcagcatttccttataaagaatatttactgatctcccgttgtctatcaacacccttttgatccttttattggtgagatggatggtaatcaccaatggatgaacatgaggatatctcacatttttcttgtcttcctctatgaaaataattggaggttcctctattttcaccttcttggaaggttttggggcaaatgtccactgctcgttctttatctctctcacatatcttttctaggcattattgctttgccctgcgatatgtggccctcccaaaataaccaggatgtcctccccttccatgggaagaggttgtaatccctggttgtttgggttattgggcagactgggctggttgtatccatggccttgtcttttaacgtactctataaagtggccttgagcgatgagactttctatctcatctttcaattggcgacattcgtcggtcgtgtgcccaatatccttatggaatttacaatacctgttaggatctcttttgatcctcgcattcctcatgggctcaggcttgccgaagccaaccttttgctcatgtgcgacgtaaatattctctcgagtttcattaagctcagtataaatagtatacaatggcacgtacttatcgtgcttcttctatttcttattatcctttgacagttcctttgaactgtcctttctcttcgcactaaaagcccctaaattatcaatggtcgtcgaaaccgtacgtaaacgttgctgggtttgcctcccgagcctattttcaacaaattcatttctttttgggcttcctctttttgaacaaatacctgagccctctcgtt

SEQ ID NO: 32759 - DNA, 1617 bp, Cannabis sativa
ctattttagaaaatacaaggtccattttatcatttaacaaaacacaggatccaattagtaacttttgtaaaacaaagttttttatatactcaaaactttcctataaatatatgagactatcacaaagccagcgataaactatagctccaacaaaacaaagaacatataccaagttatatatataaataatggaggtgagcattgtctcaagagaactaatcaagccatcctcagaagctcaccatctgaaaccatacaacctctgcctttttgatcaactcattcctgatactttcgtctctgtcattctcttctatcccaataacaaactcaatattattatccatgatgatcatcatgatcacctctccaaaaccataacccagctgaagaaatccttgtcagagacactcactttgtactacccactttctgggagaaccaaaaacaatctatacgtagatgatttctccactggtgttattttcatagaagccaaagtcaaatgtcaaatgtcagagttttttcagcgaaggaaaaacgaatctcagaacctactagtcccattccaacccttctgcaaagaaaaaacttggcctcctcttcccccacttgcctttcagatcaaccttttctcttgcggtggaatcgcgctaggcatttccatgtgccacaagaatgccgacgccgcaacgctaagcaattttctcaaatcctggacagctttctttacccaatctccccacaacataataaaacccgatctctcttctccttctcttcactttccttccaaaacaaacgagtttcttcaaaactacacttctttgatggaccgtatgtggttcggggaaggagattatgtcacaaagagctttgtttttcgctcaaaatccatcgaaactcttaaacaaaaggcgaaaagcgaacgagttcccaacccgtctcgcaacgaggccatctcgtgtttgatatggaaacacgcgatggcggcttcttgggctgtgtttggatcccctaagccatccattgctggccaagcggtgaacatgagaccccgaatgaagcctaaactcgacggagcggttggaaatttcttctggtgggcactagctgcgtttgatccagacgaatatagcattgagagctttgatgatgatgtggagttgagtgatttagcggtacaaatgcatgatgcaacttcaggattctttagtggagatttcattgatcaagtgatgagtggtaacaaagagggagtgagtgagattttgaaccagctggagtacatgtgttcgatcgagttggctgagcctgacttcattatgttcactagctggaaaggatatttcagtgatgttgattttgggtttgggaaaccgctgagcgttggaagcataggaaaggttggccctgcttttagaaatttggtcatattggttgacgctgatgatctgtacggtaaaggctcagtcgaggtattcattaccttaaaagctaaagaaatggctctccttgagagtgaccaaacttttgggtcgtacatctgaaaatcaataataaacatagtaaacgtattagctgtgggtgagcgtgatcaatctatattatatatat

SEQ ID NO: 32760 - DNA, 2156 bp, Cannabis sativa
tttcagggccaattcctcccaagtgctgatagaattgggtggcaaagataccaaccaagtcttggttcgctcccttagtgagaatgggaatagccttagcctgatggcatcgttgctaactccattcaccttaaatgtctgacagagttcttcaaagttagcgagatgcacgtttgggtcttttgttggcagcccctcaaactagactgaagattggaccatctacagtatggtcggcttgatctcaaaattattggcgtcaacggcacgtggtcttatacaagatctggcccctgtcaaatttggtagcaaatagtccctcaagctatggtcattgttgcgaccagtagccttgtcttctacaacacctctattgttaccattgttgccattgttgacgttatctaccatgactacgttgtactcaatctctattgcagccttttctagtcttttccttagtctattctgtctggaagtcttctcaatttcaggatcaacaggcaatctggcagttgcaccttgacatctcatactgaacttgagaatttgaaaccaacatgattagtactaaaattgaaaagaaaaaaccaaataaaaacaaaatttaatttttaataatattaactaacaatttctggcagcggcgccaaaaacttggtgattgcaatacgcaagtatacgtattgttttaacaagtattactaacaaagagtgagatcgatcccacgaattgtagttaagtacgttaaaattaaactcttacttctatttggctgaataaaatttgagataaaattaaactagaaaacaataagaacaataaaaaccaggatgcaagtaaattgataggcaaattaacaatgtagaaaagttacggttttcgattataattgtatcaactgattatggcctaatatgattattttcctatcacaaatttttatgcaatagcaggtttactaagataatttatagtcttctcacatatataaatctatattacatgcaaattttttactttcgtgataaattaaacatgtaatatgcattaaacacacaaaccctataagctatctaaattatataggtacactcgtcttatattgaaattttgttatcttgcatcaaaatcataaaacaattaactgatggtcacgcaattaaaagtaattaagtacgaataaaataaaatacatagaaattgagggaaaattaaatcatattagaactattaatcaatatcaaacaatctgcatctagaccctaattaactgtttagctattcatgttcgttgtagcgaattcacacatattaatttaagaaaagagaagaaaataaagaagaagagaatgctgaaaaccctctgagaaatgcctccagtactaaattcaatctttgaaatttgtacttccttgaatgtctctgatttccttccgaatttcttaccgaaatcaactgaagttcacttcttatatacatagccaatgagggaataaaaaaatagaaaagatagcacatgttgaaaatcctattcagctttgaattagataggaaataagcccacattgaaaaacttatatttatcttcgaactagtgggcgggccgcggcatgctcctcctgcaccgcggtccgtgtatgaaatttctcacatgctgcacgcttctcaggaacacgggtcgcgtcatgcttctacacatgtcgcggcatggcccatctgcacacttatccttgtatgcgatcttttgtcctttttctcatctttttcttttgatattttctaatcttcttctatattaaatctgcaaaaataaaagataaaaagtataaaattactccaaacacgagtaaaataaaatttaaattacactaaaattaatttaaaaataatactaaaaacaacctaacagcagccaagagtaatgtacctgtgtataagagtcataagactgtgggagaaggtccaatgaagacttgaggcgaggatgttacattgcttgttaatagaaggaaaatttctacaagtgatcactataggttttatgattttgtttgtaatatgtaagtgttattaatgtgatatgtgttggttgttgtagcagttaattgttaagttatattaataaatttcattttaataataataataataa

SEQ ID NO: 32761 - DNA, 1556 bp, Cannabis sativa
aagctaccttaattcatatagcaacataaaatcccacattaaacctaacttaggctaaaggaaaatcaagaaaagaaaggatagggagagataccttgaatcacaacacacaaattccaccagaaatccttgagatcattcaaacaattccaaccctagctgctaccttgaaggatcgaaagagagaaagagagttgtgaagagagagaaagatgttcctttttctaaagtcttttccttccaacgtaagtaaaataaacatttttatttttaattaaattctattctattattcagccactaatattcacaagggacaaaagaaaagtttctaacaaagtgataattttgcccttaacaaaaggacaaaaactaataacataaaagggtaatttggtcatttaaaaaaaccccgacacttctcgacattccccacgtctaacaatgatgtcccgctattacaaatattctaaaccaaatacaagcgtgactctctaatggcccaacgtcgctttccacaactaccgatcacaaccacaaaaaaatgagtaattcacatatatagcataattaatacatgttaaatattaataattctccacaaacatgcaaatcataattaataattaaatctcataaattaatcctaattatttaataatccaacatataaaacttaggcggtccttacactgtcaaagctaattcttcttcatccattgcgaatgatgtttttgcatcccattcttcatcgcttgttttttctgcatttgatgtggctgcattgccttctatagttttctttttaaaccaataacttttaggcatgtggccatactttccacagttgtagcatttttttttatcaaatttattgttattctttaattgaccaacccgtttatctttattttgagctctctctattcgggagctcccatgatgactatccttatcattatgctttctagaatttctactagtatttggtgaggatcgtcctttcttatctctactaaagagtgcttcttcgtcactctttaatgagactccagacatttgcttagataacacttcttgttcagctagcaagttttatagctcaacaagagaaggttggcttggccaatcttgtattgtagcaataaaagttctaaattttagccttaatccatgaataataattcttctaattctagcatctgacatgccaacacaagagtctattgtagatatttcgcgacaatgagattttaccttgatgaagtattggttgatcgtcatgtcacgctgcctgatttaaagaagctcgttctccagaagttgcaatcgtatcattcttctcggtgaacagtgatgcaaaagtatctaatgcttccttcggtgtcttcgtcgacttgatgtgctccaacatctcatcttcgactgtggtccgaatcgcaaacatggctttgcctactttaatcttccatttcttcaaagcggatgtgtcctccaattgtgtgacttcattaccaccaacgatctcccataactctttgttgggttttatgccc

SEQ ID NO: 32762 - DNA, 2484 bp, Cannabis sativa
  modified_base (2395)..(2401): a, c, t, g, unknown or other
aatatatggtgccaaatttagtactatttttaatttgtgtcaaatttattatatttttttagaatattattggagtatagttttttttaagagtatttccaacggagatacaaataagtagtagtaacctaaaatattactcatttaacaaaaattgtgctctaataatgtaccaaaaacttatataaatttagcacatagtaaattttgtgctaaattttacacaatattttctatgatataaaatttatgtcacaataaatacattactttttatttacatttatattatttgtattgttatatttaattatagcattaaaataaatatgaaatacttatatagggcttttttttatttttacacttctaaatggtttttttttttttttttttgcatttttacttaattctatataaaaacccttattgcaactagagctgcaacttaaattgcaacaaaaaaatcgtatagaaacctttattgcaactaacgttacaatcactttagaaacccaaaaaaaagttgaaaatagtgtatgggataatttccctattttttttttattgtcttacacattaatataataaaattgataatgaagttattagttttttattttttttagtgaaaatattaattaagtattaaatttaacatcaaagttttacaattgtgtattaaagcacaatcctaaaatttgatataaatttatcacaaaattattttttgtgctaaaatataataatacaccacatttttgccactacattaaaaatgccctaaatatcaattaatttcgtctgaacattgttaaaaaaaataaaataagaatattaaaaaactctgtcaacattcacatttcacagtcaatatggattagtccataccaaatcccaaccaaaacccatttgaaagagatgaaaagaaaaaacataaacctattgtcagtagtttttgtatttttattgtgaccatttccataaaatattcttaatattaaatatacatatctattacaaacataataattgggaagtactcaaataaagaatagtaaatttttttacaaaaaaatactattttaaataaaattttaatatttataaaataatttttttttcatatttctacaaagaatatttctcaagttttttattttttttatttaattttaattataatttttatttttttaattataattttacgacgttctaaatattaattaatttcatctaaacattgttaaaaaaataaaataataataataaaaaactttgttaacatttcacagtcaatatggattagtccatacctaatcccaaccaaaacacatttaaaagagatgaaaagaaaaaacataaacgtattttcaatagtttttgtattttaattgtgactattaccataaaatattcttaatcttaaatatacatatctattacaaacacaatagttgggaagtactcaaaaacataaaattttcagtaaaattttaatatttatacagtgaaataattttctatttatatttctgcaaagaatatttctcaagtttattatttttaatttatttttaattataattttctaattttaatttttttaattataattttacgacgttctaataaaaataacaagaaaataacattgttaccgagaaactgatcctggtgacatgaacatcaatgtttgacacgtggaaagaaagaaaacatcctggagttgagcagtcccgaatcatggcagtcgatctaggagggtgtaataaccaaaaatatttttttattattttctactatgtatatgtttattttattattattgttaattaactcgatgtggaaatatatagttgattgcttagaatatgttatttggtcattgaatagtattttcttaagttatgaaaattttgtcattttgataaactagagttttatagactactatgggcttttaggcagtccattaggtgttggatttatagaattaggatttaacattattattattagcacacgttagtattaagtaaatattaaagatagtaatatatcatcttaaattgtaagagagtagtaatagtagtattttttttttatttatttattttttttttttttgaagaagaagagttgcaaaatagaaacaatacaaacaacagccacgagaaagaaacaccaagtgttccccttaactatcctctctctacctgatcgcttccttggcaaggtgatgagcttgagcattgaattgacgaggtaagtactggaaggaggctgcagggaagttggagatggattgtctgatctttgaaataactttcgagacaaggttaagacagtcggcgaagataagattgtaggaatatgttttaccaggatnnnnnnntactaccatgtatgttatttaacaccctaaatatgaatttctaaaaaatataaataaatacataaagtttgagaaaccttaca

SEQ ID NO: 32763 - DNA, 2158 bp, Cannabis sativa
aaagttgttgtgcaattactaagtggtataatgagtaattaataattatttatttggatatggggtgataattatatataaatttgttgtattttgtttgataataggagctaaaataattggcgactccaattgaaatctctcaactaattctaattatgtaggtatagctaatatatggtgataaattgtataactaactctaattacacttcaatataattttattgtcactttccaatcttaccctaaatttatataacactagtaaggaatatgttttacttatataaacattgattattaaataaataaaaaaaatataaattaacactttatttacaaaaatattttaggtgtgaacaatatttatatttttttatgtgagtttaattaccaaaatatatcttacactatcactgtgattttaaaattaaaaaaagtccttaagtttaataccatatttatgtaaatttttcatttttcccataattttgtaaatcgctcttaatattaggaatttttacaaaaatattagatttttggcaaaagtttacaattttactaccacagggaatgttttacaaaaatactgtttttttataaaacaactgtaaaacaacaaaacagaataactaaagacaacattagaataactaaaaaacaactgtaggacaacaatgaaaacttaacacagtacacagtatgatcaaacttacacagtatttttaaaaaaacacagtatttttcaaaaaaaaaatctaccccacagtaaaaaagaaaaaaaattagaaatttcagtatgtggtgtaaaaatctctaatattatctcaattttagtaagggatatttacaaaatatgggaaaaaaaattaaagttttgatatatatggcatgcaaacttaattatactaaatataacatttttttcaacaaaaaaaaaaaacttaaaatatggaaaaaaaaattattatagataagaattaatgccataaaaaactgtaaaattgcgattcttatttttatcatataaaataatcagttatttacacaaatattgtaattataaaagtttatttttaaaagaaacatccagaagctaaaataatagcaatataattttggttaggcaataaattaataaaataatttcttccgtataatcaaaactattttcttaatgaaaaattcagctatacaaataccaaaactcataaatttttcatgtttcttataaggttaaaagcttgatcattaactcattaccaaaattaataccaacataatactaatattaaaaccacttacaaacttctccgaaactctaatactagaccatcaacccactaccaaagcattcactatccactaaagcataatattagccgcaaaagaaatagaaaatggaatgagagtatattcactagagttgttatcttaatgaaaaaaaaaaatagttacatataccaaaaaatatatataaattttacatgcttgtattctaaatattgtatggaatattgaacaaattaaatacaataccaaaataaaactagttacaaatttcttaaaagcttcaagacttaaccaccaacgcacaatactacacaaaatagtcattatccactaaaataaaatattagctgcaaagaaaaagtaaaaaatagaattagaatattcgctgaacttaattattattgtcgtcgaaaaattatcaaaaaaggcgtcagagactcagagttgtcttcattactgaaaaagtcaccggagttagacagtgaagttgtcactggcgcaagacgttgaaatttgatacactgaagctagttacaataatcaactagttaaaactatataactgagaaaccaactatttaaatcaaccgaattaaaaattagaatgttagagtcagttatataaaacaataaaaataataactaaataggggaaccaattaccaatacaatctaaaacaatcaatagataaattgaaacataaaaactaatttctttaaaaaaaaaaaaaaactaacaattaaattgtaaaaactagttacattagataaattgaaacataaaaactagtttcttaaaaaatggagagaaaccaattacattagatagctaattaaacaaaactaataattaatatagaaa

SEQ ID NO: 32764 - DNA, 2138 bp, Cannabis sativa
ttggaaagtggaagccacctaggagctagagtttgacatgaagattcaatatttgaagagattttgaggacaaaatcttttaaacagcgagataattgtactgactgcattttagaatatggattagtaaaggagattagcgttaattattgatatttttagaattatgcatgcaattatttaattgtaggtcccattattaaaagtgggcactagagttataatttctcaattctagagattttattaaactccagaggtattatttaagttaaatatgaattatgctatttttataatatttgcttggtgacgactgcaaatacggtggatggccatttcagacacataggtaagtctagaaccttttcttagtgggataaatattagagataaatagaatacggatttgatcagggttataggttttgaacattttacccctagactttaaattgcttaaattataagctaaaagggtattttggtaatttcaaaagtgggattaggtggctacatgggagagtggcagttggccactttatttatttaagcatgggattagttaattaagttttatttatcttaggaaaagtaaagatagttaagaaaataaagattttccctttctctctcttccttgctcgacaaccacaaggaccagcaagacttgggatttttctagagtaaattggagaatttttagctgaatgccagtggttttaagtaaaggtaatcctagaactctaacccttgtgttatttgaagttcttattttggtttgtgtatccaaattagtgatttagtgactgttagggtttcagtgaagtgtaatttgatttttaaatttaatttgcgatggaataggggtcttgttgctggtttcgtagtttggtgtgacggatgcacaagtttgagtttgaaaactcaagcttgtttcatccatggaactttttgtttttgtgtgaatttttgggtgctattgcttgaattatgttggttgatgttattataggtattctggaaagtttggtgaggtttggacatgttttgagtagattttggattgtttggggaaacttggtgcaaacttgttaaccggtttgctaggtcctgtaaaacttattaaccggttctgggacatgtttcctcaacaatccatttcattaattcgtgtccatttcagagccttggttggatgattccttgttgcttagggtattgttgctttagttatcaatagaagaaccttaagttggaggattgggtttcttggattagggttttggcgtattatttacctgattatgttatgtgattagggcatccatccggcacaaggttttttgttcaggtcggctaactcacttgaattcgaaaacaagattagaatagtgtagagcatatatatgggaatatatgtatgtgtgaaatatatacgcatgcttgttatgcttagtacactaccaatatttgtacggcagtagtatatagtgcattgatgtagtgtacaatgtttaagagtatgttacggtgttatcagcataagtacggaaaagtacagggtgtgtgtggtatagcacttagtggtactcatggtacgaaacataccctaccaacacttgtacaatgtcggtacgtaatgtatgtggcacaaagcctagatacaagtcagtattatagtatttgttatatgcttttgttactgagtttgtcgactcacagttctactttcatgtataggtaaaggaaaggcgaaggctgaacaggagtgagctttgatctaggatgatgttatacatgtcatggcgacgccacctaaagttttcggtctcgagactttggggttttattttgtggtccctgggtgaccaaactatttacattttgaatattttgtaaaagtttaaatacgggatcccgacttatgtaattaaatgtttaagagtttataaagtttagcaattaaatttaaagttttaatttgacacaattttcaaggaaaatcctttgattagcaaaggtggcactgtaattgaaaaattactgtagcgggcctaagtatcagggcgttacaagggcgccttagtatatttggctacctctactggctcaccatgcaaaggcctgttgggttt

SEQ ID NO: 32765 - DNA, 1842 bp, Cannabis sativa
cccaatatgttgtaagccgatggcagatcgagaactaggaagtctttcataacagtggcagactggcaatgctgtaagccttgcccaaggttaatacgagctcgattatgccaagactggcaatgctatctcccatgaatccgcaaatattcaccatacaaggcctcaatttggctttttcgagccccatcttccttagagtttccttataaaggatatttaccgagctctcggtatctattaacactctcttgatccttttattagcgattgaatggtcatcaccaatggatcgacgtgaggatatctcacatttttctcgtcttccttcgtgaatataatgggaggttcctcggttttcaccttcttggaaggttttcaccttcatttgctcgttctttatctctttcacatatcttttttgggcgttattgctttcccctgcgatatgtggccttctcttaaccgatgtcctctccttcaaaaggaagaggttataacgcctggttgtttgggttattgggcaagctcggctggttgtatccatggtcctatcttttcacgtactgtttaaaatggcctcgggcgatgagactttctatctcatctttcaattggcaacattcggtggtcgtatgcccaatatccttatggaatttacaatacctattaggatctcttttgctcctcgcattcatcatgggctcgggcttgccgaagtcaaccttttgctcatgtgcgaggtaaatattctccctagttgcattaagctcggataaagatatacaccagaacgtacttatcatgcttcttctggttctttttatcctttgacggttccttagaaccgtcctttctcttcgaactagaagcccttgagttatcaattcttgtagaagtagtacttgatgaaatgtttctgggtttgcttcctgagcttgttttcaacaaattcatttcctttcgggcttcttccttctaaatgaatacctgagccctttcgttgaacttaatgatgtttcttactggatgaccttataagtcgtcccgcagctcgccccctgcggttgatggatcagtagagatccccggctgaagggctgtaagttgtgtgctgtcatccaaatttctaaccctagccacagccgtgctaaaacaacttaattatgccttaagtgtctcactgggctggtgctttatattggttggcgaggccgctacaggttgtctatccctagcatcctggaattgtttcttgaaatccctagacagctgctccaaggaagttattaaacggtgagtaaacttgttaaaccagctacttgctgctctaacaagcgaggtgtggaacaaaatatagcgtaaattgttcatcacattactcgctcgcatgattgtattaaagttattcaaatgcgagaccagatcagtggttccgtcatatgacgagacatgcgggtttttgaatcctaaaggaaaaggggtactcatgatatctggatgatacggctcaagctcctcatctgagtcgtatccagattgtctctctagttcccccacttgatatctcctgaacttgtcctccaactcgtttaaccacaattggatgggatcctcttgctttggactgagttgttggcaaaggtcaggtttcttcctattcaagtgctctcactgatccggttgggttgggagtaattgctgacaaacaccttgtcttactcacagatcatgtcctactcatacactttttctttgagtgactcgcggatttactagttcccatactttctcgatcattagctcgttgagtactttctcctctttgagttgatcgactgt

SEQ ID NO: 32766 - DNA, 1621 bp, Cannabis sativa
tacatggtagtaaatctagatcctagtaaaacaatccccaatatccaacaagtggctacacaatggggagtgttactgagccagagatccctggccggccccctgtgttcctggttgccgatatctggttgttctcgttgtttgacctttgagaaaagtctgtccttcctctggtaggggaagatatgttcttgttccggaggaacttggtggaagtcttccttaagtggatctctaaggagatcctaacctcttccatcggttctttgttcgaactgtcttatcagatcgctggcctctcggttgcagcgatttaactcttcttgttgagatcgaaggatgtactcttggtcatccatccatcttaggaatttatgtatctactgagcaaaaacattgcaatcagcagcgcatggttcttcaattaggcttggatagcctatagcttctctgagtctggctaactcaaagtcttctccaaggttaagatggggctcgccaattggaggctcgctaactcctgggcctgtctcttcgacgtagaactggagacaagatccaattgttgttccatgaggctatttcccttgggtccttccttcagttggaggcatcaatagtgggtctactcttggagtcaagggcctgccacttggatctagtgggatgctcgtatcagtttggccagctgtagtggccaaactgtggcacctgttgtggtgacagggttcaccacatttgtagtgttcatggggactccagttgtgactggaacctgagtgcctggatctgcaatctgtgggtcttaagggagacctcaagatgcagatggtgcgataggagttcttctgttcaccatggcatttgattagattatgatatccacgctctcaatgaaagcactaaagtgttgacctcaaaaagtgatcaaccgataacatgttcgtatagatctgatgcttgccacgtgtttgcacaaataagagtgaaaagaaatagacacacatatttgttatacaggttcgacccccttgttaaagcgggtaatgacctactctcctttttgttgtattaataccaaaggttaatattatccagatcactataggtgggatctgttatagcacccttaggaatacaatgtatgaatcaataatggtaaaactcaagtgttgagatgatgctagtgtaggcgtgtgagagatgaagtaagggtgagagaatttttcaaacatagacttagagcttggaggtaggttttcaggcttagatgtaacttaggtttataggctaaggttaaggcctttatataggaggcctaaaaccctagattacagtttaaatccctagataatttcatagtttgttagataattacaaaagaacaaagtgccaatgaatctagatattattcggccattctgttgggctattagggcccaattcgtagcccatgagttgttgtccacatgtagaagtgcaaaggaaaccctcttggttgaccaggcccttgtcgaggccaagtaggccggctatggtgcagtcccaaggctagccagccaagggtggtcggctagctcttaagtgggaactagtctgtcacttgatgcccgtttaagtg

SEQ ID NO: 32767 - DNA, 1938 bp, Cannabis sativa
  modified_base (35)..(72): a, c, t, g, unknown or other
  modified_base (1902)..(1912): a, c, t, g, unknown or other
atgcaacataaaatgcgatttctaatctttattannnnnnnnnnnnnnnnnnnnnnnnnnnnnnnnnnnnnngggcacaaaacccaacaagaagatatagaaaggctacaagagattcataactgaagccttctaccagcctgagtaactaaccttgtactagttctaaagccaaacaagaaattgcgtgtatgtattgatttcactgacctcaacaaggcatgcccaaaagactgttttctacttctaatgattgactagctggtagatgctacaacagtcaatgaaatcttaagctttattgatgcctactcggtgtataatcagataagaatgcatccacccgaacaagaacatacaaggttctgaatagatttcggtttatattgttataaacgtatgtcattacgactcaagaatgatggggctacctaccaaaagctagtcaataagatgtgtttcttgaagtatgacatgcggcatttaaagaaggggattagcttaataattattttattgaaactccctaaagtagtcctgtcatggagaagcgtcttagaacggcaaaagattgagattgaataatacacgaaagcctacataactctatcttggcttcccatgcacaaaaggcaaatttcttctcccggacctagaggggtctaaacagggaagcttgcccagcgagtacccaaataagtactcgaagggcctaatgcagatgttgaccaccttggagtatcgtggatgtctaccttttatgcacgctagatcaccaatcaacggatatactttccctaacaaagataagatcttgtctactccgtccaagtatagtagtgtgcacacctcctccacctttttcctggacaggtgttacagacccttgcttttaaaggagaaagctttgggcaacacgtggcctctacttttaagggttaaagtacttttggatgcatgacacgtgtacacttcgtacaaatggttctccattgtctagctccggcacgcatgattacaataatttctaagggacccaatagttagctcttaatttgtatgtaattgaccttattagtgggtcttgagtagaaatcctaggcgggtcatggatatgtccatacccaccacttagcctataaataccctcccatttctaaacagagaggggatcatcacaaccaacatagcaaaaactctgccaaattttctctttgtcttcttcacaagtaacttagagcacagagtaaggatttcttgcaaaaatattgtaaacacatcaaaagcgccctaaaaggctaatagactgactcgtggactaaggttaattaaaacccaaacaaagtaaaataatttcatcactttatttctgtaatttattatttctttagttttctgatatttagtttccaaaaatctcagtaaatagttattattaagaaattataacaacattaaaatgtaatatctctccatatataatataataataatttaattaaaacctatacgattatattttaaaaatattatcaaagaatgtaacataaaaaaactataacactatattaatgtaaacttatattggaagaatatttgtcatgttcaggataaattttctagaactgatattgttaatgcaggtgcaaatgggaaatttagaacaaatctgctatataatagcaagttgccgcaggtagtctgggattatcgcaggagtgtttggtgctctttcattatgctaaaacacagatttatgttctggaaagctataaatgctcaactgctgacttgagacaagttctaacaatttcacatcgtgttggacaatattgattgttcagtttgtggagctacaactgagacaaaccaacctctgtgttggaaatattttacaaggannnnnnnnnnntaccatgtatgtttcattaacatcct

SEQ ID NO: 32768 - DNA, 1531 bp, Cannabis sativa
caaatccaccattaatgagtcaagctttttgtctttcttctctcaaaccaacataaccagcaataaataacttaattctattcaaaataacctcagaaatcatattagaacaaaatctaccctaaacagccactaattctcaaaattgcacagtcaaaccaaacttaaagcttaaacaacataaaaattagagttctggggtttaccgtgatgaaattcatccacaaactactgagaaacactcagaaaatagcaagaattactcagtacagaggagaagaaccctaggtccttagtatcttcttgattcgaaaaagagagagagagaaagtgagagtttctgattgttctggatttccctaattgattaattccaataattaacaaatttggctgaattaaaataaaatggctagcttccaaccaagggcaaagccacctaatctataatgcctaatatctaaaatgccctttgacttctaaattaagcaattataagcctaggggtaaatggtccaaaaccataaccctgtttaaatctagcattctaaatatctcttaagtttgttttactaagaactaggttctaaatttatcaatgtgactcaaatggccatccattgcattttccatcatcgacgagcaaaaatcgtataaattatatatttaacattttgcttaaataatactcttagagtttaataaaatctcaagaattgaaaaattgtaactctaatgcccatttataaaaatgggacccacaacaattgtaaaatcatacataattataaaatgtcattaattaatgctagtttcctttactaatccataatctaacatgcgatcattacaacccccttgctctaggatttcatcttccatgtcgactttgtcttggtggatactcttaggtatgacttctgtaaaaaaaagaaaaaatccaagcagttagctacgcaaactacctaatatagaaggggagcaggggagtcctctcccataaactgcttggagaggtcccaatatatcacacagataaaaaaaaccctaatcaatcaccaaaacttctaggagtcatttgttgcatggaaaaattttgtcagcacttctactgcaaaataattgataccaggaattctaaacagtggaattaaaaacaatgcggcccgtagtgcctaaatctactaacgacaacaatcacacagataaaaaaccctaatttaagttcaaagcagacatgcaagcacgacatatggtagtaaactcaaaaatactatctagaaagtagaggagatatttttttatcttgattcaaaattgttctatcatcttattctatataagatggtcccacagcctctgttgtcttggtacaaccgatgaggtcaataccacttatgttcttagatagaaagtcacgatagcttgtcgtagtgggagggttttaaggaactccccctgttatgactttggagacacttgtgattaaaatccattgttagtttaaaaaagtaatggatagtcagaataa

SEQ ID NO: 32769 - DNA, 1964 bp, Cannabis sativa
ttccatcattattctcactagttcatcaaaagtgcatttggaaattaattctccacttgattcacattcaacatagtttttgttgtcatcccaatgccccttgctctgtaccaaaattttagtggttccatttcctgaaataatgtaaattaaatattggttcagtttcagaagttacaaacaactattttaatctaacaaaaaaaccaataaacaactctttttagtgacaacatttgcaaataatatttcaatctgaacgactatttttatctgttaaatcaactattaaacaactattttgaagcatacaacagttaataaaaataaagtcaacatttcttgtttgcagatccaaaaaaacaattattttactggaaaatagcttataaacacctgtttacatattaaaactctgtagcatgtaattatatgcgttaatactttttttttgatgcaatctgttgttgattttttgttcagattgatcaaatttccttatcatttcctgttttcctcaatttataacacattctcaattatgtagaataaaagataggaagaggttcatgaagaaattgtattacctttaattctttctcttattcgattgtgggtgagtttcaatgatttccagatgtccttatcttcgattcctctcctctgaacgcggtgagtttttcattgtaggttgtttttgcattttttgtacaacaatggaggttgattacctttttgtttcctttttgtatttagattttttgggttttgatttatttttcgttgagatctacatctttttcagatctgatttccctagtttttgaaagaaaatggtggagatttagttgattggggtttctcggctgggtcacgaagaaggaggtctatcctccgttttttatgggttggccggtatttttgtaaatagaaatttttattttctatttaggtttatttttccttgttaggttataaatgtaaattgtttccctttttagtttattatagaaaaaaatcccttcctttgccttatgccataattatatatatatatatatacatatttactcactttcaatttttaactggacacaaaggcatgataattttttttattttcttttaagatttattatattttctatggctatatctcacttttaaagaccttttgtggcataaaaagtctaggtcaaagtggaccatgaaaaatatatagatcttaggttaatttgggcagcataatagtattaatttttttaagatatatatttttcatggctatatctcacttttgaagatcttttgtggctaaaacaaagcctagatcaaagtggaccatgaaaaatataagaaaaatattagatttattttagcggcataaccctgagtaaaaataagaattttcccctttatctcttggctatatctcacttttggagaccttttatggcttataaaacctaagtcaaagtggaccaaagataaaaagagaaaatgcattagagcaaagaaagatttagagtgaaaaacaaagaataaggatttttacctatcacttactgtgtagaaacctttgtagaaactcttgaagataaaaattttgtgcacaaagccttctctgtttcttattttctctcctgtttcactcttgtgtttacttctaaaactgcccaaaaaaaataaaatccaaaaaatctcctcttatgctgcttctctttcctttttatagagaccatttctttttatttttttattattttaatttttttactaaccaccaacttaacgtagaaatggtgagagtggagagaatatctcctaactttactctcattttgactgaccattttttttatcatattattattattattttatcattattattattttttattaaacaaattattcctttacattttaaatgacatgcacatgcttgagtttctctgatttaa

SEQ ID NO: 32770 - DNA, 3775 bp, Cannabis sativa
ttcaactattttcgaggaccaaacagaatttctggaggggcaaaactgggacccagtgcccaggttgacacctggggctgggctcagtgcctaggttgacttattgtcaacctgggttgttttcgatcaagttcagcataaagtgttccgagcattttttccgtcattagaattaacaaaaattcaagtaaactcggggagaaaaccacaattccgagtcactggaaacagggcctagcgcctaggttgacctagggttgagcctagcgcccaggttgacaatcaacttgggatgctgccttcaattgctcaaatgccaaatctgagcgatgaatttggaatggtaaaaaacggggcaggagacctcatcttcaagtttagaagccttctagaagttaaaggaacatttgaccaaggcttcaattttatctaagccggctgaggcagagccgttgtacctgtagttggcagtgtttgatcatgctgtaagtgtcgctctagtgcgggaaggacaggtccaactgccaatatattacacaagcaaaagattgttgggcgcggagtccagataccccatgatagaaaaactgtttttttgcttgctaattgcttttcgaaagttgagactactttcaagctcatgtcatcaaggtattaacaaatcaccctctctgccaagtgttgcaaaagccggtgtcatttgaaagactactgaaatgggccatggaactaagccagtttgataccaagtattagccccgagttttgatcaaggggcatgctttagctgactttgtggtagagtaatctagaatgaacgatcacctagacgagccagtcccgggactaccagtcaggaagatttatgttgacagagcgtcaaacgaaaagggagccgaagcatgaatcatcttaatttctccacgagacaccagctccaaggcgctctccattttgagtttcccgcctccaacaacgaagtagaacgcgaagccatgctagctggcctgcaattggctaaagaagtggggtcccagaatgttgaagtgtacaacgactcccagctagttgtaaactagatatctggagaataccaagctaagggtgagaaaatgactacctatgtaaagctttaaaaactacaacatccgccaagtcccaaggtatcaaaactggttcgcggatatgcttgcaaagttagcaacagatccagaaattgtgcaataaggagtggtacttgtcggccatctataaactccgagtattgaaacactgggggtaaaagccataatttgtcacttaaactcctaaataggtttgatcttctagttcttgaattttggagagcttctggctgacagaccgctgcaaggaagattcagtatcaggcttctagatatgtcatcttggactaaaagctttaccgcagagggttgtctgtaccatatctaggtgcatagctggaactgaaatctgtcccattatccacgaagttcatgggggtttctgcggagatcacactttcagaccaagtctttcaaaagattcttctcagtcagtcctgctccacctcttgacacaaagatcagatactgtccgctgcgtcagaccatggtagtgcgtgcaccaccatacaccctttttgtccgacaactttgctgacacctttgtctgacaggcatgatctctgtgcaacgcgtgccctgcactaaaaagtctcctctctagtatggtgccgttgccccacgagctgaatatttctagtgggcctcgtagtcatgtgtttatatattttaccccaatagtgggcttgcttttacaagataaaacccgaatgggtcacgagtatgcgcggactcgaattctagcctatatagaccacattatatcttcatgcaaggggaacaaaattttgggccaaggttctgctggtttcactctaagctttttgcttttccaagagaaacttataaaaccaccttaggacaagggttagagttttttgttataaaactcatttgtaatacatttcaaagcctaaaaggccaatacactaacttgtggattaggaataattaacgcccgaactacgtaaaaatcctccatcttatttatttaagtactatctaatttcctaaaactcttatttaattatttttcgaaaatctcggtaaacaaagctaatatattgatattgaagtgataagagaacaagtttttaggtgtcgggaaggcagtgagtcatggcgtggtgagcacttagtctctatggatgaagtttgtagttgtcaggaagagggaaggttgggaattggaagattggaagcgcagaacaaaaggttgcacatgaaatggttgtggagatatcctttggagccaaaagtattgtggcacaaggtagtggcaagccgttatggtaaagccgaaaatttttgggatatgaaaattaactcccgtttgtctcccaaaagtccgtggagagagatctcagatttgtacgaggagtatctgggtttggtacaattcaaagttggtaggggtgacaagattcagttttgggaggacatatggttaggtgcttcttcattgagtagcgaattccccgactagcattcatatctaagttaatgaatggaagcataaaggatcacatagtcgataaaggtttaccttggttgggtagaaagttgggacctgaattttagaagaaatctgttggattgagaagttccaaatatttcactgttgatgcaaaaactggaacatgtaagagtgcttaatattgccgaagatagttgaatttggaagcctggtacctcagggattttttcttgcaagtcagctctccgctgatttatttcggattcactcattggtgatttgttttggacacaaacactttggaaaaactgtgttctgtccaaagtaaaagtgtttggatggcttgtgtcacttggtaaagtaaacgttcatgaaaagttgcaaaaaaggaagtgccttttccttacatctcagttggtgcatttgttgaaaagtcagcagcgagggagtggaacatctgtttctggagtgcctgtttgttaggcaattttggtctaacatgctgaaagaatttgagttaagctgggtcatgctgagatgtgtaacacaactaattgttagtaaaccgagtggcggtaaacaaagatcaaagttgtgtagaacatcagtactggcaattatttgggttgtttggttggaacgaaacgctagaatttttgaaggagtcgaaagttcggcatcagatatttgggaaaaggtgaaattttggacagccacttggatttccaaaaccaaacattttagaatctgtcctttttagacctatgtagagattaaaatgcatttttgtaggaattctgttcttgattaatttttgttttctgttgcagtttgtagtgtttttgttttggttttacctttgtaaccacggttttcctttatcacaagtgagagtttgtatttatatcggtggtggggctagtctaagacaaaggcctcatgctctttttcgaaaaaaacaagaagtgctaagagaacaagttgctgggtattcgagagacccaactctctccgaagagctaaagctcactcaaccaaatggttcaccccaaccctttctaatacactcctatatatatatatatattacctcaagacccattacaatgacccatttaccctctttatttaatatctgatagaatttcttagattagaaatctgctatcaagta

SEQ ID NO: 32771 - DNA, 3682 bp, Cannabis sativa
  modified_base (56)..(63): a, c, t, g, unknown or other
ttgttttagaattcatattagggtatcaatcaaagatacttgttagtaaatctagnnnnnnnnaaaataatttccaacacttagaccaaaaactggccccaaaattgggactaagacccaaaactcgacccagactcgagacacaggacctgaccttggaccccggaacccaagacctggctacctggacataaccctgaacccaaacccaaacccaaacttaggactcggcccgagactgagacttagattcaagaccgagatccacatctagacctgagccttcgacttgacctgtagtcagtgtttgaatccaggaccggaacccagatctgtacccaagagaagacccaaactgtgacccgaacccgatcccggaccagacctgggactataacatgacccaaacctaaacccaaactcagaccagaacccataataggacttggaccaggaccgggacctaaaccaagactgggacctagacccaaacccagatccaaaatcgggacccggacccaaaactggggccagacccaggacccaagaacaaaagtcagacctgagacccaaaacccagaaccaaactgggactaggacccgaactcggacccgaacccaaatttggacctggacttggaccgggacttgagacttgaacccaaattagaagacgaacttggaccctaactgggaccaatgacccaaacatagatgggggagccaaactatggaatttggaccccaaacctagaccagaacttgggcctcagaacttggatcaggatccgagactcgactcgagacccaaacctggacctaggacccacctcaggacttgggatcgggaactcaatgcttggactcgatccgtaccccttgacttgaaattggaaccaaaacaaaaagcagatcgggacccaggaacaagaacaggacaatgacttggaccaaaactcaaaactgtaaccggaccaggaacaagaccaggacaatgacttggacccaaactcaaaactgtaaccagaccaggacccagactcgaacacaaacccatactttgattctgtgtttgggtttgggttcgggttcgggtcgaggtctggatcagggtctcaatcttggtctgagtctgggtccgggtttgggcctaggtctggatttgggtctgggtctaggttcgggtctaagtctgagtttgggtcccgagtgctgttccaggtttgggtctgtgtcaggatctcggtcaggatctaggttttgggttttgatccaagtttgggtatgggttcgagtccaggttcgtatctagatccttatctaggtcagagtttgtgtctcgtattgggtcccaaaattaggttcgggtctgggtctcggtcccggtctaggtacaccaccgtgtctgggcccaagttccagtctcagtttgggtcttgggctaggtccgagttcgattctaggtctgggtctgggtcctggtcacggtcctagtcttattctagggtcctagtttgacgattcttgttcaggttctaatttcaggtcctgggtctaggtataggtccgagttttggtcctagtccgggttcgggtcctagtcctgtttcccgagtccagatatggatccctatcatttactatgtgtcagttcaaagccctatttcgcgtatcctgagtcaagatctggatccctgtcacggatccacgtctagttctcgttcaagtcccgggtcctagtctgagtttgggtctgggatcgagactggggtgcggttctaggtcccgaccccagttctatgtcctgagtccagttccatgcttgggcctgagtttggatccaggttcgggtcccgagtccaggtctaggtggggatccgggtccgggtcccgattggggtctaggtctgaattcaagtccgagtgttggtcaaattacggttatggttcttggtctagggccaagtccggttacgattccatgtccaagtcatagttctggtcccgtattcaagtctcgatctacttctgatttttgttccaattttgggtcacacgttataggttctggtctagttttgggtctgggattcggttcaggtccaggtatgggttcggatcactgttttggtttgggtttggggctgggtccaagatctaaacaccgactacaggttcggtccaagccctaaatccagatctaaattccggtctcgggtcccagtctagttccatttcaggtgtcgggtaacgagctgggtcctaggttcaactctgggtctggggttgggtactaggtccttgtcctagttctgttgcctaggtccctatcccaattctatgtcccgaatttgatttgggtttgggtcccagtttaggttcgggtttgagtcctagtcttggttcatgtttttgtctcaatttgggttttgatttgggtttgggttcgagtttaggtcctagtcctagtccagctcaatttccagttgtgcaagttcgagtttgggtttgggtccgaattttagtctaggtccaaatcaagctccaagtgtcggttcgggtcgtgggtttgagtcaaggtccaggtccgagtcccaggtttcgatcccaattagagtccaggatcagttacgagtctaagtcctaggtttcgatctcgttgtgtgtttgagttttggttcgggtccgggtccaggtcttggtttgggtctaattctaggtttgggtcccatgttcgggtccaagttcgggtttagtcctggtctgtgtctaggttccagtcctagtttgtgtccggggcaagtttcgggtccgggtctgggtccgactttagattcctgtgtccaggtcaggtcctagtttgagtttgagtctcagattctgatctaggtttgggtttcggggcctaggtcccccatctatttttggtcgtacgtacaagtctgggtcctggttcgggcttgggtccccagtcttggtttgagtacaggtcccagtcttggttagggtccaagtctcggtcctagtcttggtcggagtttgtgttcaggtccctgtcagtgtctggatcctggtttgggtacctgcgagggtttaggaccaggtcaggtcaaagtcccagtctaggtatgggtcccaagtctcaggttccagtcctactcaaggtcttagtccatgttctggttcgagtttgggttatggtttcgttcttggtcagcatctgggtctaggttggggtcgaggtccgagttcgggtgcgtatttttcggatcccgagcaaggtccaagtttgattttgggtcccgaattcaattctaggtctgcgtctgggtctgagtctaggtcccgtgtttagatcccaatcttcgtctcggtcactattaggtttcgggtctgggttcgtgtccatgtccaagtctgaatcccagtcttagttaggggcttgttttgggtccgggatcgagtcccaagtttgggtttgagactcagtcctaggccgggtctgggactgggtctgagctcgagttttgaggcttggttatggtcttgttttgggtgccggtccaggtctaggtccttgtaacgatactggtcctgttccagggtcctggtcacattttggttcaagtttcagtttcgggtcccatgtcttggtctaggtccaggtcctggtccagctttg

SEQ ID NO: 32772 - DNA, 1423 bp, Cannabis sativa
  modified_base (58)..(58): a, c, t, g, unknown or other
aatcttaatagttcaggaggaatttttaacggtcaaaaaaattcagggggcatgattnagtacatgtcaaagttcgggaggagaaattgctaattaaccttctttaaaatatacccattttatagatgatgtccctattaaatcctttaggttaatgtaaattatatgatagatttaagtaaagagtgatagtatattagacaactcacttataaaagtcagtatattttataaaatataacatgacggtatttttaattaatagataaaaaaatatatacctcaacttataaaaaaaaaaaaagccttctatggactaatattcaaaaaaattcttaaagaaaaacaatatgaaggcttcttgggcttagaggtaatggtctatgctaactgtaatttcccacagtttaatggtaaaattaataatagaaattggcgtaggctgttgtgaacatcctttaaagtgatatatgatccaactttattttgtgatttagttttggttataatcacaatgcaggaatatttctaaaatggatgttggtggtcagattccagaagagctttggactctgacctatctctcctatctgtatgtgcttattcttctgacctttcaatgcttatcattacctcttcagtcaacattaatttattattacctacactttgttttttccatcatcattttttgtaggaatttggggtacaatttcttgactggttctctttctccatcaattggaaacctcactaacttacaatacttgtaagcatacttacatagatttggtatgatatattcaaatatttctctatacttgttcatttctttatatatattctctttgggattactactttctagggccttgagtatgaatgcattgtcaggagaggtcccaaaggaattgggactacttactcagctatctaaattgtaagttattctttatgaaatgtccattgaccaattcaatcacattattattgacattaaatcttggaatacaggtacattctatcgaataatttctctggtccgctgccgccagaactaggaaatttgaccaaattagaattcttgtaagttggtggtaacaatttatcttttgagatttcctattcaacttaatgagtaatggagtagtaaattggtctcaatatccaccctgattactttgcttttccttgtttattttatagtagtttttccagttgtggagttagtggcgaaattccttcaacatttgaaaatctccgaagcatgaaaacattgtaaactttttcttctatgtaccctctcatcatgatatgatatggtatgatttaaaataactttaaaaagtttgttgtctaattatgacacgatgatcttttattgaccagttatgcatcagataatgaactcacaggcaagata

SEQ ID NO: 32773 - DNA, 9833 bp, Cannabis sativa
ccagccggtggagcagcagcaacatccacagcaggacagcagggttcaggttcagccatggcagttgacgaggaacctcagccgcctcaacctttcgaatttacctcgtgaatctgattttgttagtgttaattttccgttgtcgtggttgtcatggtttagcggcagagattatgggcaccttcttttgtggagactgatgcaaattgttgcgaatactaccccgcaaccacctctactagttgtggctaatcccgagttctatttgccaccaatggctcggctacttttcttccctcagttatggttgatctccattaaactgtttttccatgattatttatacttttatgcttataagttggggaggtctagtagctccaattgcctttcttggagaagtgaaaaggaaaatgaaaagaaaaaaaaaagaatgtatactgtataatctccctccatccaatgggacattttttttaaatctctctgccatgactttgggaaaaaatttatgttctttttcttttctgcattattaggttttcatttttttacattattgctgcaaagtaaggaatatttcctcttaagtatttcatttccctattaaattagatgcatctatctattcaatccttgagtttgtggtgattgtcccaaatgctcttttgattttgtgatgaaatcattgtttgtttcttttaaaaagagaacaaagtgtgttataaggacttgtttggtatgagatttcctcataagatgctaatcttatgtctacagtaataatatttttatccttagtaaaataccccacaaaagatacatcctattaaaacattatttcatgcctaaattgatgagttatgattttgttgctagattgaaaaattaaagaattttttatttatgctatggctaattcgatgtggtaatatgcttagcttagcattcatttttcattctttttataagtgtgattattcattaaatgttgaatagaaatacaaaagaagaggttacatccatccaagaagttagccaaaggcatactaataagtagtgataagattgattatgcaatttgaactgaaattatttcttcaaaagctaatatatattttcattcattcttccgaattccttgtttaaaaagcaagccagtgatcacttgtatcatgtgatctcaacattgaattttctatagcttttgaatcataaaaaagcaaggcacacgagactagaaattagcaaaaattgattccctcgtcccattaagaattttaatctctattcccgtatattctccatcgagcatgaggcagaaaatccttgaatggggcaagtccccacacacccatggttttttgaacaatatgaaataattgttaagactattcttatatggtgtgatcagagccgaccttgaaaatatatgggcccaagacgaattaaattttggagccctcaaaaagatatataaaaaaaatataaaagaagagtgttatgagatttgaatacatgaccttggacattatgccatccacctcaactaactaagttataaatatttgttgcttataattcacttaaattttacttaaataaaaacctaataattttttttattttgggcccccggaaagtgtgagccctaggtacgggcctagcccgcctatgcctagagccggccctgggtatgattaagtaaacaacaaagtacaaagcttcttaggtaaaccagcaaacgcgtcatgatttattataatggtaatcgtaatagaatcatgattaccattacaatgtttggtttgcttttaaaaatgatgtaaatcattattacataagaaaatctcaattacaataaaaaaaattaggtaatgagaattacatcacaaatgaccaaataaagtaaactaatatgactctactaccttctctttatataaattttaaaaataaagtggggacaattttgtcaattcatcacttattctaatattcattccaataacaaattaaatatcgtaatcaattctcatttccattcttattctattacattactattaccattacattccaccaaactaacatcacttaagtgtatagaacatgtttcttcaaaattgctttctaaatgcacaaaattgagattttcccccaacattggcctagtttcaatacacccaacaaccgagatttcgacaaggatattactagtttactttctagtttttaccagacgttaattcatgttcggtgtttcgttaataagactgttcatgacttagttttgcacgcactcaaagtagacaagtaagaatgaagaaaaacagctaagatttcagatagcaccttataagtgacaaaacaacttaggaagaaataaacaaacaaggaagaaagatgagacatgatatactttaaagagatcatcaacatattaatacatctacatcaacaccacaaaacaaacatctctttaatatttacagacaagagttcacatgtcctctaaaatatttcttttctattgctttttaacaactgatatgattctgcactatatgcacataaaaggttccatctttagcctctttttagcaaaaaaccgaaatcagcaatacaaacacaaaattaaaacaagagcatatgtaagtcattcacaaaattagagagataaaaaagttacccatctctggtggtattgttgctgctcccaagcatgagctcagtaccctgatgcatagagtcgggggcttcacgacgagcaatgttagttgctacttatcgatcgagtagtctcattttacttttgtctgaatttcatctaacaaattccataattgcatcatcttctcatcagagaccactgctaagtcagcaacttcatcaaatttctttcgtagcttgtcatatcgttgtgcctcgagattgctagtccaatcatcataataaccaaccttgacccttgtatgacatcttttcaaatccttcctccatcgttgtaggatatacttttctggtacatttataacttccattttcaagagaaccgaaatcgcatgtttgcataggatccctctaaattgaaacaaaccgcaactacaatgagcttcacaattctctgtgttgaactgaacattgaaatgaacttgtttacgtttatctccaacaaacataacctcagaaacatcaaaatttccatctttactgtcaatacaagagacttcacaataaagcttcccagtcaactccttttgaaattctttgaactttgtattggtgtaagccacctgaaattgtttttcaatctcgaaaagggttacacatgggatccaagtactaaaacactggaaatctgcaaggtgttctttctcaaccttgttccttaacgccttgtcatattgttcgacaaattgttttatggttgtttttgagttaacacgcccatcaaagaaaggaacagagttttcatcacgttgtgtggttgacattcccgcccaaaacgagtcctttagaaaggctggaacccaacgattcctctcattgtataagctacttagccataaattatcacaaagattcaaatctttaacaattctttcccagctttcttcgaattctttcttcgtgaaagaatcataaatagcatcttgtagtgacattttcacttggtcatacaatttgtgaccctccaacttcactagtagcttcttcattacctgccacaaacaccaacgatgtctagtattggggaaaaccgcatcaattgcttttgtcattgagttgtgctcgtctgtaattataacatttggagcgcgtccagacatacaggcaagccaagtcttaaacaaccatgtgaatgtagccgtattctcatctgatagcaatgcacatccgaacaagatgggctgaccatgatgattcacccctgtgaaaggtgcaaggggcatatcatacttatttgttaagtatgttgtgtcaaatgtaactacatcaccaaactcttcgtacaatgccctactgcgtgcatcggcccaaaatatattcttgattctcgcatcatcatccatatccatcatataaaagaaatttgaattcttaatttgcatacgaacaaaatattcctggattgctttagcatctcccgcaaatagttgtagtcgacttcctttctcaaaataactcgtgcagtcgttttctagcatcgtgacattatcaaaggccccggtgtccactgattgataattgtttattacaccattcgatgtttgatcactcggggcaagctttcgacgcacaccaataactttttctcgattgcataagtaaaactgcgatttacttggactcaattcatgattatgctcaagtgcaacagaattaaccttacactttccatcttcaagtattgtagcattgatcctagccttgcattcaattcttgtaagcggatttggtgttaggtaattctgtttatgagatatcgacttccctgcacgagaacatgaaaggcacacgaatttcgatctcccatccattgaagcacgcgatgttttcttcttaactccaaaaccttcttgtctaccaaattgtctgtagtactcataaagggaatctgctgagtcaaaagtcatgccagtttcaggcggtttaactatctcataaagtccaaatcttttatccattttattctcatccaaagcttccttgctatttacatcttcaaatgaagacacaacctctttcattctaaatacctcagtcactggatcacaaaactaagataaatttagataaaaacaatctaaagatgagtactaggaagctataagaatataacacaagaccaactctagcccttagtaaaggttagaacatcaagatgagtaccttaaaagctatggcaaactaacttttatttgtttgaaaaacaattccatccaaaataaagcaaaactccataagttttcagtatagataaattatatcccatgaccaagagactgatcataactccaaaaaccacttacttttctcaaaaatcacacctttaatataaaacaggaaaacaaaccaaataacctaatcaatggcatcactaaaatccagtactgaacctaaaaaagggttacatgatgcatttagagtactaaaatcaaaacacaaaattcaattaaaactacccattagtctaatacctccaaaaaaaaaaaaatcttcattttcaagataacccaaaagataaaaaccatagctttgaagaaaaaaaaactttccatttccaatatgggtatgatctcaaatgaaaaatgcaagctcataaaagaagaaagttcaagaaatactcagaaaaaaccacgacataccaataaaaacagctcctttggtccgagttcagctatatacctgaaattaaacctcaatcgcgataaagaaggttgattttgagggggaaagaagatgaattgagaaaaaataatcgaaaatttcgcggggaaaatgtgtttgggaatgaaatttgtgaagattggagagatttagagaagtccgccggagagttaacggagttaacggtgggaaacggagaaggaaaaagtttgggtactaattttaagagtattgctaaacaataaaaatttaatattcacaaaaaataactccaaagatttttttttgatcccaccaaaagataatagtaatttgctgcataaatatataaatttaacttctaattgtaaataaatatttatatttaatttttagcagtaataataattcagttatatttctgaaattctgtaagtttaaatattaaataattaaatctacgtattattttttattggtatatttaaacgaatttttttttaaataataaaaatttaataatttggaccaattagaaattatcacatagtaatttatttaactaagtacctatagaagtttcaaaattataactcaattattattaccgccaaaaattaaacttaaatatttatttataactgaaagttaaatagatatttataccgcaaattactatttataaaataaataaataaaaatagattagtatcaaatcttttagaatagtatgaaactttccacaagaacaaccatcttctaagataattttatgaagaaaagttaaaatttattgactctaagagcactcataacagtttctctataatagaaaaactttaaaaatttgaaaaaactgtactaaaaacacgctacagtaaatgttctcattcttcattttaaatttttttttttaaatttactataaatatatgctttatatttatagaatactattcattgctttaaatatattttattaattattttgagttttaataattatttttgtatatagatatattatatattaatattatatatttgaaatgaaaaatgtattaaaattttaaaaaagtgaagttttggtgaactattttaaagaaacttgtgtatggtgtaaagtaaaagtgtgctgataaataaaaaaaaagtaaaattttagtaatgtattttaaagatagaataaaaaaactgttggaagtgcttaagtaactaaaacataatttggccccgataataaaaattaggctaacctataaaagagcattccttgcagtttttctactctattctttaaaatatttgaccaaaactctaatttttttttattttacctcacacatttatattatatcatacatcagcttctttataattttctttaaactatttaaataatatatttataatacacacaaataataaaatattgtatattacataatatttatttatttttacacttacaattaaatattacattataaaaatattaaatatattatagctaagcattaaaattaacataatacttagctatatatttaactaatcactattcataagataaaattttaagctattttaactcattagatatgcttttgtgacatttttttaactctttaactatttttaacttttgtagctattttatattaactattgcaagtgctctaaggtacaacatgaccacatacaaaatccaatgtagactagtactacttgatccatattttgaaatagactataaaatgataagttttaactagaagtatgaaaagcaagccaacacaataaacccatatttacacttttggctccttccatgcccatccatctcttcttttgattctatcctctctactactcaaaggccatagcatatgccccttacacaacaagaattttttttactaattaaaaaaaaggagatcacgtaatgtagatctctttctcatcccttcggtagcttaaataattttgggaaccatatatcagctttaggcacaaacaagagcttgaaagttaccacctactagcttagaaagctctaaaactaggggtaagaaaatagtcataacaaaataccttacattctaactttttatatatttatcctgctaattttaagatattaaaccgtatctaaataatataattggtcaaatttttgattgttactattactgagcatacaacgtgaaaatgttaaaattcaaaaataatatgcatgacacacttagaatctaataaaatataaattataactatttttgaccctaagacttattttctgcacatataatattaatgttaatttccatgtgagcattgtgtgtttagggctttatgggctttattatagtcgaagtgtctgaagctaagctagcccagttacatacgggcctgataatttcggcccatcccatttttacctcaactcacttgaatgtttatttcattattatcatttttctttcgacaaattatttcattatcctttaatttcttctgtattgggttttaaaaaaaaaaaacttgtgtatttatttataaggtccttataatcaattattatttcaacaaatatttttgtacgtaacatttaatgcgtttgaactttgaattgtccatgatcacgagatgaactcatatgaaaaaaaaagtttaatacaataaaatgagatattaattacattcaataataaataaattcaaaaaagaagagcttttacgtgaatcttcatcagtctaatatgtatatatataaatcttgaaaagtttaaatttcaaaaaataaataaataaaagagtatataattaagtgtcatggtgggtagggaagagcgttgttagcttgtgacacacttaaataaaaaggtggtgaaaaaagtgactaatttcagcctcaaaattatatgtgatcatcacctctaaatttaatcccctattggctccctccctctatatatatacatatatatatgtatgtatatatatatatatgtatatgcaaaaattacccaagtcttgattttcatcacttctctcaaattcttaatttttgttcaggtaattgtatacatatatatatatatatatagataatattaaaccccatattacatagattttgtgggatcaattaataattaagtatatatatacataatatatatatatatatattaatattattataagtttgttaattatatatttaccatgtaaatttcaggtagtacgttcaagatcagtgaccccaatagacccaccaagtttgtccttaagtgaaacacaaaaacaaaaaaaaaaaagaaaaataaaacttatcaacatcttatggagaaagaaaataactattcggtatacactatatatatagcctatacatatatatatatatgcaatataatatatatagtcatagtcatcattctcttcttgatttatacatattatataatagaaaaaatgttgttttgctatgatgaattattaataccaaattataattattttttgttgcaatttcaggctcccataatgccacctaataataataataataataatttttcttcatcattggataattataacattgagaatattcatcatcatcaacaacaattcatgaagtcccacatcgacgagagaagtgaagaaggagcagaacaaaatggagtcgatgagagaataatggtcaattatttactcaacaacaacaacaacaatttatctcatcatcatcatcaacacaataatcaacaattgagttttgccgatgttatgcagttcgcggattttgggcccaaattaggcctaaaccaaactgaagaaaccgacgaagctcaacaacttgaagagaatagtatggttgacccggtttactttttgaagtttccagtgttaaacgacgacaacaacaacaacaacaacaataatgatattattataaacgacgtcgtttgtcaacaacaacaacatgaagagatgatgaaggattgtgatgttggtggtgataataatgataatgatgatggttcgatgcaacatcttcagtttttgggtgaagatcttcatcagaataacggtaatggtaatggtaatagtaatggtaataataaaaataagagaaaaagaccgaggacagttaagacaagcgaagaagtggaaagtcaacgaatgactcatattgctgttgagagaaatcgaaggaagcaaatgaatgaacatttgagagttcttagatctctcatgcctggttcctacgttcaaagggtaactatatatatatatatatatatctatatatatatgcatgagtttttatgtttttgaataaatttattaagaatttaattagttaatattacataatgcatgctagttagaataataaataattttgcttttacacataaattatggagcattattgttatttgtcg

SEQ ID NO: 32774 - DNA, 3020 bp, Cannabis sativa
tatattgcccttaatcatcactgtcttcatacttggttaatcactctaaaactcattttatccttatatatgtagtccattgtttaataaaaaacatactttgtgacccaacattcaccaatcactcgaatacatgtctattaaattgcatctcaatttataagcctttcccccaatttgggtgagtatgtcttttcatcattgcttaataaggtaatcctttctcagaatctcaatagtctccttataaactagattgaccatctggtcaaatataaaagtattttccatcattaccgtatcaccatatataatccaggtaattttccttgccttagtgataccactactcctctgacattcttttatatgttaccctagcaatgtccccgcttcaagcctacattaggccccttacacccacagaataatgactcttatacaagagtgcatcactttagctacttcctagactgacgactggccctacagaccgatccaagagttttcaacattctttattctaactcgcacgcttcatggggaaacttcctaaatgtaatcaccccatgtcaaggacacttaactgtggagttctttcatgatgggctaccaaaacaggatactttttgctaatataggtagtctcaaacaattcattcaagtcctcaacaccatgtagtcccattcatacatcatctcaaaatcattacatacaacctttcccctaagaaatgtggattatacagctcctggtcattccttcccagatcacgggactctaattgtcacaccatgactcatgccctctgctagtgaatagatccacccacataatcgtcgcctttaattcacctagggttttgaacaatactcataatttgttccacttatactaacactagatcactttatatcaaaagactttgttctccaaatcaattagatggatactcccattaagtactcagatcatatgttccacttgggaatatcagcaaatttaactcatattgccatttttttttctaatctgtctaccttgtcaaatgagttatcactaaataacatacacgcactgcccattcagatatttttatatcccctcattgagtgtacaatgtttgatatcgatatcaatttaaacagcaactataatcttacacataaatttctaacttgagtcagtcaaaagaccgatacccaagtccccttaaatcataattagcacttggacatgactcgtacacttttcttctttaacatcagtctttcttaattgtggacaagttcttttcaaatgacccgctatcccacaataacaagatttggctctacattagcccaaatggcgcctttttacatcttgaacactcaagataaggttgccatttcttatacacactttgatcgctatcctggtcaccctataatctttcgttctatcccataatttgtggttcatttagtttccacctactgatttgctcttaagttgggttcatatatttcaccacatccagtggtacaacaggaagtgtcagtagtacaagaatagacacaagacgagcctgttgttctctcaattctcagatttgcttccccttgttgtctaatcacatgtttccagtattatgacaataaaaagattcttttccttaccgttttccccgagccctgacagctcgctaattgggcaaatcaattgcccttaccgtataacttgtcacatatttaatccacatctttcaaatactttaaactcagacagatatcaatatcaatatgcgtatacaatacacatattcttagtatagatagctagtatgctaattctttccatcatacacaataattgtccaagcaagtaaggaaataaccaataatataaacacttactatacaatgagtcaatctctcttccaagcaaatgtacatattcgaccagtcttcaggacctttaaaaccatggttgttctgataccaagttgtaacgccctatcccatagggacgccacatatgttattttataaactaatctaaaactaatagattaattagttataaaaaaaaaactgtgataatattaaaaacttgactaaaataaatgactaaaaacggacattataacggcagtaaaaaggtgttccggggatccctgttataaacagttttacataaacactatatacaatgcctcaaaaatataaaaccaaaatatacaatagatacaaccattctaaaacaacgcatggcaacccgaaacactggccagtggggtcaatatgtacattgttggagaaggcagtcacctcatggcagctctaactttgccttgcccttacctgcataacgtggcacccgtgagtcacaaggactcagcaagaaaagcaataataatgatcatatagtttattatttgaatattatcatttatacacaatcagaatcaaaccattacgcattgttcataagatgaaagccaaatcactactggcatctgccacgaataagcctcagtatacagatatctggttatacaaaactattacaccaataataggaatcatattcatataaaaataaaatttatatatatgttacctcataaaaaaaccatcttcattgcattacattgcctaataaggcaagtcgatgctttactgtgaaaatcctatattgcattgcctaataaggcaagcctgtgcaattgcctggcacccatatatcgcataactgcaccacctaatcaagtgagcctatgccaaaaacctgcacccaaatatcatataattgcatcacctaatcaggtgagcttgtgccacaatctggcaccaatatatcgcatcgtctaatcagacgagcccgtacctatgcccgatacatattgtatgtcactaacgcccgtacttacacccgataatttactaggaaaattacatcacctaattaggtgagctcgtacctatgctcggtactcatcatatatcactgtcgcctgtacttacacctagtacgt

SEQ ID NO: 32775 - DNA, 1474 bp, Cannabis sativa
  modified_base (319)..(333): a, c, t, g, unknown or other
ctaaaaaccaatatcaacatcattctgattttagtagttgctaattattttatttttttgttttttttattaattttgtcatctaaattgttctcacttggagcaatattaggaaaagccaaatacaatcatgatgggttatgtactagaaaatgttgcagtttaatgtgtatgtgatagaaacatttcataattagtgtcttccaataataaattaatgagaaaatataatgcaagaataatgaataatcaaaattaatatttgtaacatcttgtttactaaaattatctagaaatagaataataataataataatannnnnnnnnnnnnnnataataataataataatttatcttgtttattttattaggaaattagtataaaacttgcgtttcgtagcagttgttttaaacatttataaattatatatatgaaataatttatgtattttatttgatgataactaagtaataaaattagagtaattagcggcataagtacttaaaatttcaaatttgtaagtgtcataaactcaatgtttatttttagcggcataagtacctaatgtttgtaaaactgtaatttttctataatttcgccagtacaaactctgttattttcttaaacagaccatatataagttccagattctagatcattgggtctagacagaaaaatatgtagtatcagttacttccaaatgttcctttaataaatatacattaggtttatgctgcttacaaacttaaaactttaagtaattatgccgctatttacccataaaaatatatcaaattttaactttattaattttttatataaatttctttcaaaaatatgagaagttagatgcaaaatcaggtcaacccgacccgacctaacgatttagaattttaattttatttgtgtcatgtttaagacaataacagagttattgctgacaaactgatataaaattacagttttataaacattggatacttataccgctaaaaattatagttttacaaacattgagtacttatgccgccaaacattagagttatgaattgaaacccattgatcgaaatgttaactatttctccttctaatctctcaattgaagttgtaactaaaataaaattttatagtcatttgaaagtggtctgtactcatttgtggttaccacaattttcaaattttacggacaatacaaagaaccttcacttaatagcttcttaaacttaattagaaacttttttttttcttattgttgcatgcattaaaaacattgagtatttaataattgataaattgataaaaaaaaaaaaaatagcagtaaaggaaaaatatgaataaaaataataatcactatctcatcaataaaaattataagacttatcaattctctattcttcttatcagtatttaagtcgataagaaaataacatttcgaagaagagacaacgtaagttaagatatatatatatatat

SEQ ID NO: 32776 - DNA, 1265 bp, Cannabis sativa
tagagcattgcttatatatatgttatgcatatcttactgagtctgttgactcatcagtttactaccatgtgtaggtaaagggaaagctaagcttgaggaaaagtgagttggagctcggcagtgattgtacatatcgcggcagtgtagcctggagggtttcgatctttcaatattttgagttgtattttgtagttacctgtttaaaaaaaaaaattaaatgctaaggaaagtttgctattttgtatacagtaaaatgtacatttttaactacgtttggtaaagttcaggatcccgactataaatttttaatatttataatatatttaagttttcatgttttagtttagcaagttttaaattcgggtgttacaaatgttttccctttttttgtggattcaatagtatctgtggttgtattgtattatggggcttgggcagttgaaggttttaactggatattcattaacctaaaaagtaagatgttatgtttgagattgacactactttacagaagatgcaggaaattttgtatgaagagtttgatgtagactctctagtgtatgaactgaaagtagaggtgtattacatgtacatgaaaggtaatatgataccactggaagttttagtgaaagatagtcaagtaagattattcttaaaattaaaagcaaaaatgaatgtggagaacttgttgccactgtttgtgactaaggttaagaggcatacgattctggggcctaccccgccaactatcccctcaacaagtgttattgggagttttgtcaagaaacagaaccaatggtaggtttgaatgagcaagcccctactaatataaatgaggaaaaagttgacaacgtatttgaccaatttgatgagtttgatgtgcccttttacaacaatgatccttgtggtagatttgaaccaggatggtgatgtggagttgtaagttgatgaagttgtagaggtacctgctttgagtttggaactacgtccattatctccaaaaaaccagaggacagagcaataatgaaaaacccctcatagtaaaaaaacatcaaacaccaggcactagtagcaatcagctaggtttttctcatagtattgtaccatctaattttgaagtttgtacaaaattcaaacctattgtgtggacatgggaatacataaagaaaaataatatttatacaacttctgttagtggtacaccttcaagagaaataattgttggtaagctgtacacaaacaagactgaattgaaaaatgtagtg

SEQ ID NO: 32777 - DNA, 2648 bp, Cannabis sativa
  modified_base (2614)..(2623): a, c, t, g, unknown or other
ataaatatttattaatagggtaagtagtggacggagtggcagcggtattacaaatgtaatctgaaagacgtttaggtttggataatgttcttcctgtttttgaaataacaagagaattaactgttgactccctgggtgtggatgtacttcatcaggaggtgggacatgtgtgttgatgtctcacactttgaggaatgtcctttttatgagatgaagttacatcatggtcaggaacaggttcatgctcttcagatggatgttgagatggtcctgtagagggcagtaaagaatgtaagaataattgatttattgaattgggaaagttagtgtaggatagtgggaaaatatcttcatgaaaataaacatctctagaatgaataatctcttgagttgcaatgttcaagagagtgtaagctttcatactaggtggataaccaataaagacataaggatgagatcttggatcaagtttatgtcgtttggtttccaaggtggaagcgaaggcaagacacccaaaaactttaaggtgttcataggcaggagctttcttatagagaacttcaataaagtctttttgttaagtaatatagacggagttcgatttatgagataaacagcagtatttatgacataactccaataagataaaaataaatgagattgaaacaataaagctctaacgacatttaatatgtgttgatgtttgcgctcaacaacagaattttgttgagggcgaccaacgcaagaattgtacttcatggtacctttgctactgtaaaagcttgtcatattcagttctttagcattgtcacaacgcactgctttgatggaaattgaagattgtgttgcaataagcgaaaaaaattgtggaataataaaagagacatcagatttagagtttagcatgtaaacccaagtgtaacgagaaaaatcatcaacaatagttaataaatatcgataaccttcaatgctgataatatgaaaaggtctctatatatcaaggtgtattaaatcgaaagcagcagtggcaaaattattgttagaaataaatagaggtcgcttttgtttagcaaaatgacatataaagcacatataatccaaaggtttttcacagaattacaaaattttatttagtatactagtaatgttcacagaaggatgaccaaggtgaagatgccaggggtccttcaaagtacaagtagtgttagcaaagatagaaatattggaagtgagaaaatgccgcccttgttcaaagaaaaatagttggccaactttcttggctatcccaatcgtagaagtcaaggagggatcctgaatcaaacattgattaaaagtaaatgtgagtttattatgacaatttcaagataagcattaatagaaaataaattgaacttgaattctggaatatataacacatcggtcagtattagtttatcatatatttttacggtgccagatttgttgatgtgaatctgatggccattaggtaaagtaacaatattagcaataggattagtgtttagagatgtaaaaaaaatgaagagaaggacatatatgatgagtggctccactatctacaatccataaaaaaagggaaaaagtttatcattgccaaagacgttagagactagaggaagattttcactggtggatggagcgctttggatttgctgaatgagtaatgagatcaattgttggctgagctgtagttgagaagagccagcaacaggggcctcacgactggctgaaacatggtttgcccgagcagtaggtgtatttttctttttgtcaccatatcaaggtggaaaatcatggaggaaatagcacttctcaaccaagtgacctgatttaagacaattggaacatgtagggcgaggcttctttttctaagaaggctaattcggtttcaatttggcaggcagcaacaataatgtcggtgttgccaagacaacattggcgctcttgttgaacaaccatggataaaaccttggatagtggcgggagaggatcaaagaggatgatctgagcccatattccccagtaagattcattaagaccgattaagaactgaaggatctgttctctagcgtagtaatcttgaactttttgcatggcaccataaatgcagccacaagtgcaaggggtatttggttgatactcattgagttcatcccaaagggtttgtaactgagtgaagtatgtggtgaccaagttatcaccttgtttaacattgttaacagaggtcttaagttggagaatgtgttagccattacactgattgaagcggtcatggaggtttgtccacattttgcgagtagtggttttgaacatgatgcttgcaccaatttctcgagacatcgataaaaggatccatgacattacggtgttgttgcatcgatcccaagcaaatagagaaggatcattgagtggtggacggggtaaggtgtcgtcaatgaaaggagttttattttcggcagcgatattaatcgaagccgctcgtttccaagactgaaaattatcttgaccagtcaaaaggaacgaggaaattgttagaattatttcacagggatgtagatttactaccatgtatgttgtttaacatcctaatatgaannnnnnnnnnaatgaaataaacacataaaagttat

SEQ ID NO: 32778 - DNA, 1837 bp, Cannabis sativa
ctctttcctgctggtgtaaacttccctcaagaggctacagttgcagctggctttggatactatagagagaagccttggcctcaagaacctgtttatgcaagtcacaataagcttccctgtttaattttctcaacctctctttgaagagtttcagcttacaaacggcttgatacatttggttacttgaaatttccaagcaccaactgtcttttagtatagagtcatacttaggatgggatttccacatcctaaaatacttgaactgaacggctttttccccccccccccaccatttgaggatgcaaagaaaggatagctggagaatgatcgaataatccctcattaagaaatacagcttcagcaaactcatatttcccaatccaagcttgattggccataatcctgtctatcttggaatatatcctatcagtccctggttgcttattattccaagaaatttcactagctttaacatcttctagcttgcaaaagttcacacaagtaaggaaatcagaatcgggataagaccttaccctgtagcccactctttcttccttagctagaatgtcattgaaatcccccatcacacaccaattctcattagaagataaatcacacaagtccttccaaagtactttcctctcttccctgctgtttgaagcatagacaaccgtgagcatactattaaaaccttcaatagttgaaatcctcaaatgcattagttgactaataatttgatgatatcaacagtaaatctatcaggattccaagcaatcacaattttacctcccggatgccaagcaatgtttgaagaaaagaaccatccattgaaaacattagagtacaaggttccaagctttggagcctttaccctagtctcgaggagacccacaaaatcaatattttgagaaaaaataaaattcttgattagttgttgtttagattgatgattggctcctcggaaattccaacataacaatctatccattagaaagagacggtcccccccccctcttgtattgtcaatgttctcttcacccgtactgaccatgtcaaagccaacttcaccatgacttcccccattatttccatcttgttcctctgacataagtgcctgaaaagtgttccccgttcttactgcagtaggcattctttgttttcatttctgtccaatctcggacctttaacaattttagtgaaaccatcagcatctacctcaggaaggttgtgttttcgattatcattcttcatcacccactgttgctttgaaggagcagcaactttttaacattccccagcagaatgcccaatcccagagcaatgagagcatgtaatcggcctccattcatatttaacactcactgaaatgttaaggccatgttcattttcgaattttatcatgtttgggagttggtggtccatttgcacttcaattagcactctagcatagctcaatctctccctatccttagtaacagcatcctcattaagtggctttccaatttggccaacaattttaaagagagacctttggccccaatatttcagttcaagatcttcaagctgcacccaaattgggacacacttgacatcctctttcttgaaattagtattagggtcccaaggtttcaaaattacaggtcttcgattaaagaacacatagcccccattcatgacctggtctctgaattcaagagaggtgaattgaatgataaaaattccatgaaacaaagctttaactcgatccaccttatcttgccatatcctttttgcaaaacctttaagaatgtgcaatggtggatttacaccaagaacatagcacacaattgaaggtttc

SEQ ID NO: 32779 - DNA, 2227 bp, Cannabis sativa
aaaagaggtatgtttcaattaaatataaaattagaggtaaatttgatcaattaattaataaaagttgtatttttcaactttgttaccacactatatttaaaaaaaaaaaaaaaaaaaccataatgaattgtgtaagatcacccagattctccatcatgtttaatggttcgactcatggtttctttgaggcaaaaatgggcttaagatagggagatcctatgtctcctttgctgtttgttcttggcatggaatacttatcccgaatattgtaggaagttggagacaaaaaagattttatctttcatgagaggtgttcagacttgaagattaatcatttggcctttgcagatgatgtcatgcttttttgcaatggagattttaaaagtatctactatatgcttcaggggctgaaattgttttcattgacatctggtcttcaaccaaatcctcaaaaatcagcaatatgccacaggaggaggttagtagagtccttttagcatctggcttttcactaaaagatatgccttttacttacttaggcgtcccaatttgtgctaaaagaatttctggaaatgaatgcattgctttggctgaaaaaatgacagcacgaataagaacttggagctttaggaacctctcctttgcagctcgagttgttttaattaattctgtgctcatggctattcatgcatattggtgccaagtgtttatcctgcctaagaaagtgattagacatttagaatctatttgcaaagcttttctttggaaaggtcaagcttgtgcaacaggtccgggtctaattgcttgggagtatctatgccaacctaaagctactggaggtctcgggtttaggaaaatcagagaatggaatcaagcggccatggggaagtacatatgggcaatagcacaaaaacaggacagcctttggttgaaatggatcagcagtgtctatctaaaagatcaagaatggtggtggagttacaaggcccctgcccagggaagctggtattggaggagtcttgtgaacttaaaggatcatttcaaggagttggctgggcctcagacatgtacacagcagtagcattaccaggttaaaacagtatatttattattctgtccagttcaaaccaaagtatattggtctcagcaggtctgggggcgcttaaataccccgaaacattgtttcatttcttggttagcaatacaaggaagacttaaaaccaaggatagattaaggagaatgagaatgaacattgaggaacaatgtgaactatattcaacacagaatgagaatgcaagccatttattttttgcttgtagtgcatctgcttcctgcttacaagggataaagaattggctgtcatggcatgttgcagccgataacatatttactctaaccaggtggattgggagatcaaagattagcaagtttaagaagaatatctttgctgctgctcttgtgtgtttgatatacaatttgtggaaagcccggaatctcagcttgtgggaaaagactaaactgaatgtagagaagttgattgatggagtaaaaaaaggggttcttaatagagctactgcagtatggccaaaaaatgtatcaattgaggacaccaactggtttcaacacttgtaattgggtgtaatggagtttagtctgtatagtttaatatagattacacaagatttaaatgtatagctttaagcattttttagacccgtaggggtgctatttgtttgtacaaagaaaggttttgagcaataaaattcactaattcatcaaaaaaaaaaaaaaaaaaatcgattccctcttaaaatatcaaaaaaataaataaattaaaagtttgggaggggttaataagactcctaaaaatcgggataaaagcccatcttatcgtgaaaaatatcttttctctgacattgatgatgttgtatacagaaataaatatttgatttgggacataacaaagaaatgaccaattcaatatataatttttatttaataaactccaattcaatatacaatttaatatttgattgggatgttcactgtgcgggtggtccagtttttttcatttttttaaaccaatatgcacgtgcagattttctaatttcctaaatcgcactgcgaagctaaaaaaccgcagaaatcgcactgtaaaaaaggtgcggtgcgatgcgatttttgcgatttctgcggtttggactatcaccaataattaaactatta

SEQ ID NO: 32780 - DNA, 1557 bp, Cannabis sativa
tacggatggagaaacgtttgtcctctgacttctaagtaatggaaagacaacataatgcaatgaaatcgatagttctttcacttttatggtcaacctaagaaattaaaaattgagtcaaacaatagtaaatttcaaaaaatgtattttcatgtataaatctagtctagtgaaatttataataagtttataataaatttgataataaatttattattgtttctattctttaaaataataaataagtggtttacataaatcttgttaaatttaatatgaaaaaattcagctaattcaaaaatgtttgtcaggaatcaattgtcagcgttgtttatacgcttgtcgcagtacatccaaggacattgaggatttgaaattccattactaaacacatattttgtgttatgttatggagtgtttatttatattttacctatttgataaaattgttttagtagaatgataaaaaatattgaaaaaaaacttaagtaattaatcaataaaataccttaagcatacggatggagaaacgtttgtcccttaactcctaagcaatgggaagacaatataatgcaatgaaatcgatagttatttcacttttatggtcaacctaagaaattaaaaattgtttagagtaaaacaacagtaaatttcaaaaaaggtatttcgatatacaaaactaccctagtgaaatttataataagtttataataaatttgataataaatttattattgtttctattatctaaaataataaataagagggttacataaatcttggtaaatttaatttgaaaaaattcagctaattcaaaaatgtttgtcaggaatcaattgttagcgttgtttgtacgctcgtcatagtacatctaagggcattgaggatttgaaactcctaaactaaacacatattctgtgttatgttatggagtgcttctttatattttacctatttgataaaattgtttaagtagaatgataaaaaatattgaaaaaaaacttaagtaattaatctataaaataccttaagatacagatggagaaacgtttgtcccttgacttataggcaattgaaagacaacataatgcaatgaaatcgatagttctttcacttttacggtcaacataagaaattaaatatggttaagagtaaaataaacagtaaatttcaaaaatggtattttgatgtataaagctactttagtgaaatttataataaatttattattgtttctattatctaaaataataaataagaggtttacataaatcttgtcgcacttaataatgcaaactaatcgcacttcataactcaagtcctgctttagctccattctttcatagttcagcacatgtgatggatccgacatgtatttccgtagcctagaaacatggaacatattatgcgtctcagctaatactggtggcagtgccagtttataagttgcctgtcccactctgtccaatatctcaaaaggacctataaatcttggaattagctttcctcactttccaaaacgtataacccctttcataggtgacactcgaaggaacactt

SEQ ID NO: 32781 - DNA, 1309 bp, Cannabis sativa
acacagtcaccagtatcggttctttcttcgtttctctcctctcataattttaggggtggatcggttttcttctaggcgattttaggatttagatttttggtttttatgttttatttttatttagtaaatgtttttaattatttaatttaggttttatttatttaatttttggtttaattaattttttaaaaaaaaaaaagttttggatctcagccatacacgcgtgactaacgttactctaacaaaaatttgatagaataacacttttctaaatattgggtactttacccgctaaaaaaatactaggtctataccggtgacaaatttaaaattttaagtacttatgctgctatttatctcaatatgttcatactttcatttgttaaaatcataaagaattgtaaatattagagctttgatgatgcgcttacaccttataaggtaagtataattatcatttttaatttaaacaataactattcttttattatatacaagcagtcatgtatttattattaactagtgggattgcacgtgctccgtatgagtggctcctaaaaatatttaggaataactttttaagaaataattaatatttttttcttgtgaacttacaacactaccaaattatatcataaaaacgtacatcatgttgaaaaaactttgtgaactcttctatttacagagatataatatttttgttagttttcattttcttattattatttaaaagttgatgtgatattgttaattaatatatttttttcttggacattatttacttctaaatcatgcctcctcttaaaaaaaattaaaattaaataatttgtaataatttttttaaataaataaataacccttacctaagatgtattattggtcaattaatacattattgttgatttagatgtgaaacttgcatcttgggtttttatatttaagtgaagaaatttcggtaagaaaaacataaatatgaatttataaatatgaagaagtttgaatttggtttgttcaagtaaataaaatttttaaggaaaaaaataaatatttttagaaaagttattggatttttaataataataaaaaaaaattaattatcataaaattagtttaaaaaatgataaaatgagcataaatataagttaaagttcaagataataaaaatgttaattattcagcactctatacaaaaagaaaacaacctaataaaaatgctataattatgtaatgagaaaattttaacaatttatatatttaagaggcatgattttatagtgtctaggagtgtttataaaatagtcgatccaat

SEQ ID NO: 32782 - DNA, 1559 bp, Cannabis sativa
attgcagacttcacactatggagctgattgcatgagtgatgatctctgtatcgcacacgaactgcccgaattgcctcagagttttgaacttggtgcgcgccatgacagacatcattccgcactttccatatactctcaaaaatgcacaaagcccagtaatgaaatcttcgaagcttagagcgccaggcctattactttttgtccttgaaccaatccagccattcactccaatttccacactggctcaagtttgtcctgattcccataagctttcaaaccaaacagctttagcgaaattgcattgccatagcacatggaaagaagattccatttcctcatcacagaggggacacaaagtgcagggtatgttgaacaccataccaagcctctcacgggttgggagagagttgttcattatttgccaccatagcagtttcaatcgcgcatggatgggacaattctaaataaatttccaatgccaatttggaacattagcgcacctatgctttatgatgagatgataggccgatttaatagagaataaacctcttttctctcctagccattgccacgagtcttcctgcttcgtcgccggcagcccaatgttgaggatgttaattgcatccgtcgaatcaaaccaagggcggatcctggctacatgccatgtctgatcatcattaatgaagtaccttaccagattcgctccctgagtaacattcaacttcagactaggctgatggtttcctatcggaacccaggaatcaaaccaaatggaggtagacctcccatcccctatccgacgacacattccctcactgagcagaggtctagccttcacaatcgccttccacagtctagagtctgttgttttgaattgaacatcccaaaagctactttcttttaaatacttctccttcatagtcatgcaccaaagactcgatggatccataatcaatttccatccccagtttagcaagaaggccttattgatatcttttgtttgcctaaaccctaagcccccatggtatttggacttgtagagagaactccaatcaatagtgtgtatagttctcttcaaatcatgatcgccccaccaaagtttctcaggcatcggtcaatagaagtagcaatggtggaggggatcacctcagctgcagccgcataaattgaaagagaattaccaatcgactgaaccaagcatgctcttccagccttcaagagtaatctcgctttccatccttcaactcgagtttgaaccttcttgaccagaaatcaaaaatcacgggttcttttcttggaccgcagaagcggcaaacccaaatacacagtgtcagaaggcatccttttcgtgcctagtttactagcaatgaggttggcccgattgttggggacacctttcgagaaagagattgtagatttctggaaattcacagcttgtccagaccaatcacaataaatttgcaggcactggaggaaagcatccgcctctttgaccgaggcttggccaaaaagtattacgtcgtctgcaaacataagatgcgtaacaggaggggccgatc

SEQ ID NO: 32783 - DNA, 1757 bp, Cannabis sativa
gggattgcacagcttacccggtatttccccttacggataacaggactactgactatcacaactattttattgttcagaattatatttgatttttgtttttatttgtttttcaagagaaatatttgaagatctttgtttttggtacttttggtgattctgtaaaactttttgagacaaaattcggcaattttgaggaaaaagaaaacttttttaagtttggttgattttcttgttgccttaaagggatcaaaaattgcttttttagctcataattttatggttaagagtcaaagatggactctttccaagatttaagtgaaaaatgatgaaaaaagaaaactggccttaaacgcggcttggcatggaaggccgcggcattccctcgcttcttggaagaaaaaaatagacattgggaaactagaaatagcaaagcaatttaaaaatggaaatctcttgcaaggtcctggcttaggtttttgggaaactatactttttatgtatttaaaagggactaatggctaagttttgataccatttgaaattagagatcaatttgtagcataggaggaaggatggagtagaaggcaccattgacagactccaactagtgttctatctcctctatttttatctgtttaccgagatttttggaaacagaataaaaataataataattgaagaataaataatcaatagagaaagtataaaataagataagaagtttttaacgtggttgggacgttaactagccttagtccatgagttagtattattcagtaagctttctcttgtaaatgccttagaaaatacacagaatgtatattctcaagtttgcctgagcaaagtatacaagagagttctacacttaatccatgagattaatagattatttatagtagttttagaattacattaggttctctctttccctctattggcaaatttacagtaaagaatacccgtgggctttctcataaagtccagcccatggagaagacgaatgctgactaggcagattggattggaattgatttggtcaacaccgcatcactgattgtgagcaattaatctaaattaatcaccacaagaaaaattatttttaccagcgaaattattaggggcgggacaaattcgacgctaataacctcaatattaccagcggatatatgattctaccgctattaagtaattttaatattaaattaataataatatagtattagcagcaaaaaaatatttattaccggcggtacaatccgccactaataataaaatattttaaaaaactattagcagcggatatatttattattagggacgaatcccgcggctaatagtgttacacaaattaaaaaatttagttattggcagtaaatgaaatttttgcaccagcgggaaaacgaatactttcggcatatttttttttttttttttggattaatagctatatacatagttgttttcttcatcagttcatcttcttcatttttctctaaacccaaaaattttaaattatataaaactgtgtaaaacttccaaattcccaaagtagaacccccaccgattcactctctctctctcttcaatattttctttctcatgtccatttctctcactgtaagtatatatatatatattttctcttaaatgttatagtttaaaatataaatgttattctgcccaaattttgttaaaatttgagataataaaaaaaattaggtttatttaataaattttaataaattagtaattttttt

SEQ ID NO: 32784 - DNA, 1356 bp, Cannabis sativa
acaacgtcttagccttccaaccctctaactttgctgtgagattatcaagaatgaagttgaaatctgcatccttttgtcttgaacggaaaaggggcaagcctaaatatttgatgcatccttcaggagattcaatcccaagggtctccttgatctctctcctcattcccatgggggtgttcttactgaaaaatatagaagtctttagcctactaacctgttggccagaccaagaacagaaattctcaaggcatctccagaaaccattgacttcatttacattagctttgcccaccagaattaagtcatccgcaaagaagatatgggaaagagtcggaccacccctacttagcttaataccttgaatgtttcccagggcaagagcttcatgtagtaaccgggatagaacatccgccgcccatataaacaggtagggtgagagggggtcgccttgccgtaagccacaggaagggcttatctttccaacctgacccccattgagacaaatgttgagagtagtggtggaaatgcattgagatatccaattacgcaacttcaaaggtgtccctaagcattccatcacatggtcaataaatctccagctcatcctatcataagctttgacaagatcgattttgattgcaaatagaccttccttgcctttctttccattgaaagagtgtattatctcttgaactatgacatttttatcatggatgtttcttcccgaaacaaacgcagcttgagtaggacaaataagcgaaggtaacaaaggtttaattctattagccaggatcttagaaataaccttgtataccacaatgcaaaaggagatgggtctaaactggttagttcttttcgggttctagacctttggaatgagaaccacattggttgagttgatacctctatgcatattcccattagtgaaaaagtaaatgttgtattaaatttagtacaaaatttactatgtgccaaatttatataactttttgacacactattggaacaaattttttgttaaataagccatattttagtttttcacattaaagatgcttttattcaatgagttttatatataataaaacaatatatgtactagctagagatatacctgaagaaacaggacataaattactaactcaacatcactttccatgattgaaaagcataacctaaagaaaagaaaacaatgaagactcaaactaagcaccaaatctccggcctcattaaaatataaaaaccagacaatgtttgtgcatgcataccgaaggaaaattatcaaaattttgaacaattgcggctaggccaaagactccttggtgcgcgtctagagcaacatttacaaaaatactg

SEQ ID NO: 32785 - DNA, 1068 bp, Cannabis sativa
aattaggcaaaagccacaccttaccgtttcccaaatctgacactcgagccaaccaaccacttgccttgattcatactgatttatggggcccctctcatgttgattctaaacaaggatacaagtattatgttcattttttggatgactaaagcagatacacatggatttttccactcactctcaagtctaaagcctttgaggtattcatcaaatggaagagtttagtggaaaaacaattcaatctccctgtcaaatctgtccaagcagattggggtggagaatataggtctttcaatagattcttggaggatcaaggaattcactttcaacatccttgtccaagaacacatgaacaaaatggaatagccgagaggaaacacagacacattacagaaactggtttgactttgctagcccaatctggtttagacttaacctattggtggtatgcttttagctctgctgtctttaccataaacagactccctactcgagtcttaaactacctatcaccatatgagactctttttcacagcaagcctgattacaatatcttaaaatcctttggttgtgcctgtttccctcacctacggccatacaataatcataagatggaacttagatcacaaccatgtctatttctggggtattcatcacatcacaaacgttatctttgtgaaaatactgagggccgactgtacatagcaaggaatgtggtgtttaatgaaaaccattatcctgcaaaaggctctgcatctcaaactcaggtattatctgatcaaccattaccttttccttcaacttcgtttcatacagatcccactatcttacctactaatactattgtggttgatcctattgatgttacactcccctccactactgtctcacccgtgatcaaccttgagtcatcatccactcatgcaacactgccacctgtctccccatgtgttcccacctcattaccctatattccaccacctgttcccatctcacataatactatatcagcaacccagataccacctgtatccaacatttctgtccctgtgtcaacagataatccta

SEQ ID NO: 32786 - DNA, 3774 bp, Cannabis sativa
agtcttttatatgacgagtcagctgctgctatttgggaagatctgaaagttagattccatcagaaaaatggtcctcacatgtacaatttgaggaagaatctgatgaatcttagacaagatagtcaatcggtcagtatgtatttcactagacttaagactgtttgggaacaactttcacattatagacccaattgtgtttgtaatggatgcacttgtggtggtgctaagaaaattcaagaacactaccacatggagtacataatgtcttttctaatggggctttcagattctttctcccaagtccgaagcaatatactaatcatggatccattacctgaagttaacagggtttttcatcttgttacacaagaagaaaaccagaaaggaaattctaatgctactgctgaacctaatcctgtgtagcctttgcttttcaaggagacaaaggcaccaacaataagcctaattctcagggaaacaagtcgcatcctcccaaaagaaatcgacctttctgcactcattgtaacattcttgggcagacaattgagaaatgttacaaaattcatggatgtcctccaggatatcataagaatgacaaaggaaaggagggttctgcatctgctaatcaagtccaaaccagcaatgactcgaacatcaatcatgaaggacaagttttattgcctcagctcaatgctgcacagtatcagcagctgctgaatttgctagctgttcaatagacgaatgtggtaaattcagaaacaacaaacaattcaggtagtacaggtatcattctttcgagcatatctaatttcctttttgttgattcttggatcttagactctggtgccactaggcacatatgctataacaagaatctttttcaagtgtatatgcaactcacatcctaccagattattgcttcctaacaatgaaagcattgttgttagtcaaagtggtaccattgctatttctaatgaattaagtttgcacaatgtgctttatgttccctcattcagatataacatcatctcagtaagttgcctaactcatgacaacaacctacatgttcatttttccactgatgaatttgtgatacaggacaaaaccagcaagaagaggattggcagaggtgattccaagaatggtctctacatcttggactgcaaacctcatggcaacccgattcttagtgtttctgctcatacttggcattcaaggcttggacatccctcaaacaagcacttgaagcttttggatggaaaacttaattgtaatacttccaatttacataaagacaatccatgttatgtttgtcctatggcagaacaaaggaaactcccctttaaaaataaacctacttttgctgataaaatctttgatttgattcattgtgatgtatggggtccataccatgttccatctcactctggttttaagttttttctcaccatagttgatgaccactcacgtttcacttggatatacttattgagacagaaatctgatgtgaatactgtgatccctcaatttctgacatatgttgaaactcaatttaattgcaaaatcaaaaaattcaggtttgataatgcccccgagcttgtttttaaagatctctttctcaaatatggcattttgcatgattttacttgtgtagaaacacctgaacaaaatgccatcgctgaaaggaaacaccaacatttactaaatgttgcccgtgccctttgtttccaagcacacacaccactgagattttggtctgaatgtgtcatgactgctgcatttcttataaaccgcataccaactccaaatttgaataatatgacaccctatgagttattatttcacaagcaacctattacactaatttaaaaacatttggttgtcttgcatttgcatccaccctcactgctcatagaaataaatttgcctctagagcaagagtttgtgtttttctaggctatcctcaaggcgtgaagggatatcgacttatatgacatcaacaataaacaagttttcatctctagaaatgtggtatttcatgaacacgtatttccctttcataaactaaatagtgaaattggtcacatagacccttttaccactactgttttgccatctactagtgttgatgatactccagttgctgattatcctatttacactattgctatatctagcaataatttacctgtgcaggatcatagcactgacagcaacatacagatgcaaagaccaattgatatatcaaacacaccagcagctacatctgcaacaaatacaccaacagcctcctctgcaaccaatacaccagtagccattcctacaacatcaaaagttccccctcgaagaacaagcagaacaacaagaccccctgcttatttacgcgattttgagtgttattccgtcctgcaagacaaacattctacacctcactctcttgataaatacatgtcatattacaaattatctgaatcttataaggcatttattcttgcagttacttcactcaaagaacctcagacataccaacaagccatccaattcaaacattggctcgatgctatgaatactgagcttcatgctttacgcaacaataacacctggatcgttgtacctctacctccaaataaaagagctattggatgtcgctgggtctataaaatcaaactaaacagtgatggttcagttgaaagattcaaggcccgtcttgttgctcaaggatacacccaacaagaaggcctcgatttttttgataccttctccctcgtagccaaaatggttacattcaagttacttcttgccatttccactataaaaaaatggcacatgctacaaatcgatatcaacaacgcattccttaatggagacctcaatgaagaggtttacatgcacttacctcctggactaactgtatctacttctgctcctgcaggttctactctagtttgcaaattacaaaagtctatatacgacctacgacagtcatccagacaatggtacaaaaagcttactgatgcactcattcacgaaggtttttcaacaatcccaagccgattatacactctttactagaggacgggaagacaatttcattgccctgctagtgtatgtagatgatatagttctaactggtcctaatctcagcattctacaacgacttcaagagtctctacataatcaattcaagctcaaaactcttggcaacctcaaatatttcctcggttttgagattgcccgaacaaaagacagccttttcctttctcaaaggaaatataccatgcaactccttgaagaaactggttatattggctgtaaaccagccaaagctcctatggaccctcgacagaaactcgatgatcaacaaggagaagttctcacaaatccttccagctacagacagctcataggaaagcttttgtatctgactttatcacgtccagacatcacatacgcagtcaatgtcttgagtcaatttatggcctcaccacggactcctcatctacaagcacttcatcacctcatcagatacctcaaaggcagcccaggacaaggaatcctttactctgcaaactcatctttaaatctcagaggcttttcggattcggattgggcatcttgcccaatcacaagacgttctacaaccggtttttgcattttcttgggtgattgcctcatctcatggaaaactaagaagcaaccaaccatatctcgtagctctgcagaggctgagtaccgtgccctcgctgccaccacaagtgaaatcacttggctgca

SEQ ID NO: 32787 - DNA, 2885 bp, Cannabis sativa
tacaatacaaaatctgagaagtgaatattgattatgctaaagtgaatagacacagatttcgatataggacaagagtacatatatggtttgtgtagcatttatgatttatatccttaatgcctcatatttgttaaatttatcacgagagtttaaagtttgcatatgggttgagatttatatgtcctaaccttaatataagtttctttcgtaaatcaactattgcatgaaaattggaatttgaaaattaaattatattaaaccatataaagtagattcaatcgaaattaatcaccctaagctttaataattattaattttaccttaattattttttttacttgaatttaaacatcttttcttatttttattgtcaccaaatagaattataaatttaattgttcggtaattaactaaagcccttataggatcggcctcactcttgtaagtctattacttgtaaacgatatgtatacttgcatgttggaattttcacaataaatttttggtgctgttgcttgagactgtttttgttaatattaaatcaattacattttattctaatttggtttccctttctactttttgctaaattgtttgtgtcaacttcttattatttcatctcaggtacctttggtttatgtgatgtcaatgaccaactgcaagagtgcctgttgatcttaaattgagaagacatgtaggcaaaatagaagaaatgagaggttagaaagagttgtaataagggttgaattagaagaagtcatggctcataaagagaacaataagggtgtagtggaccaagtattgcccataatccacctgacagaagcttgagggataatgtgctacccaccacgataggggtctagtttgtataagaccaactgccattgaagcaaacaattttaaaaccaagccagtcattctttagatggtttaatccacagtctagtttgcgggactaccttcagaaggcccaaacatgcatttagaaaacttcatgcagctttctcaaacattttagatgaatggagctagtgtcgatgctattcgcttgaggttcttcacattctcactgagcgaacgagaaaagagttggttagtgtctttgccacctaacgcaatcaaaacttaggatgaactagcactgaagcttctctctaaattctttcctccaacaaaatctgccatgctgagaggcgagatcaacaatttctactagcttgacaatgagtctctctatgatgcttgggagagatttaatgacttgatcagaaagtgtcctggccatggaattgaaaagtggatgttggtcaataatttttacaattggttgtgtggtactactcacactctcatttatgttgtagctggtggggaattcatgagaaagagtgctaatgaagcttatgagcttttagaagagattgccatgaacaatcaacagtggcctagtgagaggagcaactcaaaaaaagtggtggggttgcatgaagttaatgcaattacaaaactaatttctcaagttaaaggcctaactaaattgatgacaacccaagtacaacgagcacaacaagttaaatgtgagttatgtggggggtacccattgttatgagcaatgtcaatttgttgatgttgatgaactgcccatggagcaggctcaaaatattgggaactatcctcaaaactataatcatactcaagggattgtcaacaacaagggttctatcagcaaagatacagacattagcaatcccaacaatcgcaccaaccccaacaagctcaacaggccactcaacaacaacaaaattttgatgcaagttctagtgtccaaattgactttctattacaatttatggctgaaactatggcttccattagaactctaaagactcaaatggggcaattggttgctaaattcgccaatagcaccgaaagtaattttcctagcacaacggaggtaagcacaaaagagacttgcaaggtaataacgtcaaggagtggaaagaattatgaggggctgagtgataaatagaaggttgaagagatgaagcgggatcaacaggcacatgaagatgaagataagatgcaaggtgaagaaaaggttattgatgacctatctggtaaagacgaagctacacaaccaattagcattgagcatcacataaaaattccctatcaacaaaggctctgcaataacaatctggacaattagttttaaaaattccttgaaatattaaagaaattgcacattaatattccctttgtagaggaacttgagcaaataccaaattactttaaatttattcggaggctttagcaaataagaagaagtttgaggaatatgagacggtgacactgaggagtgcaatgaaatctatggaaaaaactgtttggattttatgccttaaataaaacctatttcaatataatcttatttgctatcaatagaagattagaagtcatttaagttaaaatgtgattttattgattatggtttaatatacaatatctgataaacctagaacatgttgttattcataattacagtgatgtcattacagtggaaagtaatttttattatatgcttcaaagtttatgtctcatgattcattagtgtactggatttacacaaatgtgataatcagcggtaaatcttacttacaccttgaataagtgttatgttctttctagggcattggtaaggtatgctagtatgggacgtatggagtatacattgaacttggtaaagatatcaaaaacttattgttctatctttctaattcaatataacttagttgatcttagatcaatatatcttaatcttgatatggttaggttcgatctcaactgtgtaatttatttttttagagttgttcgttaaagct

SEQ ID NO: 32788 - DNA, 922 bp, Cannabis sativa
tttattaaatcttgtaagatccttcaagcccatgcctcccttgatcttagccttacaaagtttgttccacttctcccaatgaattttttgcttggtatccgaggtgccccaccagaattgagccatcatggagtggatatgttttatcaattccttaggtaggcgaaagcatctcataacatagcatggaatttcttgagtcacaacctttaggagcacttcccaacccgcttgagaaaaaagcccagccttccacccttggagtttgttttgaatcttggtacagattgactcaaacacctccttcttccgctgtcccacataagccgagtggccgagatagcgagtatgacattccacaatctgcatatccaaatttgccgctaacatgctgcgcatctcaggtttaatcttacagccaacacagatttccgatttttggaaattgttatagtgagatttttctcacctagaaactcgagaccagactcctatctaaaaggacacgtgtactccatttccccgaggaaagttgaaatgtcaatgagagactcctcgaagtatggacctcgcctgaaccagactcagcgagatgatgcgaatatgaccaagtctaattgcattcgcatgactcgcattatgtaggaccaaggaacgactttagcccgcatatatcaagatatatgcgagtatcttcgcgatcctcctgcaaaaacatagagatcgattctctatattgcgagctggtcccgatgacctaacagcctcgataaaccgatatagacacgcatgtcttggttctatcagcctgatatatgatgtctggaaaagtgactttacaaggacgcatgcatctcagactcgactagtctcgaatgcatcttaagcctgcgagcttatgcaagaatatgaacaaccaact

SEQ ID NO: 32789 - DNA, 1297 bp, Cannabis sativa
  modified_base (1244)..(1244): a, c, t, g, unknown or other
ttgttgttcataaaaaaaaaaattgtaatttaatatttaatgaaggttaattatgtaatttatatagagaaagcctaaaaatattctcacttttatagtagttatagattaaattttggttaaggattcatatttatactgtcacacgataaaaaaaaaaaaaatatattttaactgtcttggtttttttttattttatactgtaaacaccgaaaaaaatgaggcttccatcttccacactcataaacagaaccgccacagtaatatcagaacaaccaaaaaataaccattaattctgcctagataaaacagaaacattaaaactattaatattgaggttgtcatgatttttctaatgttgtttttgggttgttatattattttttgtatgtttaacaaatgttggtttcaaattacacaggataaaccaaccactgaatatttatttgagataaccagaataaaagaatcatagtcagtaatagtcttacctcccattgaaagtgtaaatctggaagaccaaataataaaaaaaaaggatgaaagttatttggaaaaagaaacaacataacaaatgcagcaaaatgtagagagataggacacaacaagagaacatacaggagaagacgtcaaaaatgaaaagaaacaggacaactaaaaaacaacaatgcaataacacagatgaaaactgaacatatattggggcataggataacgaagaaaataacttacatttaaattttattattttcctattactattaaaaatagagtggtacaataatatttgaaaaaaatgtgataaataaatgaagaaaaaaaaacagtaaaacaacaataaaataatacaaaataaaccagttacagaaaatggtaagttggagaaagagggtggacttggaagcacggtagagatggagtcaacgctttgagaccaaagagactgaaaaatatgcacttagtgggagtttctaaaagatttatacacacacaaccacactcttatcttttcttcttcttcttcctttaaatactcttttttttttttttggttacctactacaaaaggagagagttaacttttatttgggtaatgttgtagacttggaaaaaaatgaagaagaagatgaacaggggagagagagctcaaaactcaaatacaatgaaaaatagatgatataaataaacacatatataatttaggaataagagatcacctgggtgttgggctttgtgccctaaanaaaactctatttcaatgtattcttttctattcaattatcaataaagaaacaga

SEQ ID NO: 32790 - DNA, 1664 bp, Cannabis sativa
cactgttgattggcaatttgttgaggatcttttgaggtctctttgcttcccctcgcgctttattagttggattatgacttgtttggaaggcactcactatcatttattgttgaacggtagaatccaaggcaatttcaaaggcaggaaaggcttgcgtcaaggagatccaatgtcccctcttctttttgtggtgattatggagtatctcactagactttgtagtcactttgctgggaagaaagggttcggctaccacccgatgtgcaaacatttaaaactgacaaacctttgttttgcagatgatcttgttatattttgcaaagggaatgttagctcggtcaagttaatccatgaagctttctcttgcttctgcaaagctactggtttggcagccaatacttccaagtctcaaatcttttttggaggagttaatgttgagactaggaagcaaatgctagatctagtcaagtttgaagaaggagggttccctcttaaatacttgggagtcaaccttcgccctaccaaatggaagtttgctgattgtggtataatccttgataaaatcaacaggaatctcaattgggctagtagaaacttgtcctttgcgggtagggctcaattgatccactcagtcttacttggcataaggaacttttggatgagcatattcattctcccatctaaggtggctgctattgataagagttgccgagattttctttggggttctaatggcaacaggagtaagcttcatcgagcctcttgggataaagtttgcctccctaaaggtcttggtggagttggcttccgtgatgggaaaaattggaacaaggcgcttatggctaaatttctttgggctcttgcaagcaaacaagattccttatgggtcaaatggatcaactccatctatttgaagggcagagacatatggagcgtctcaaagactcaagacactagctggtattttaaaaagatgctgaagcttcgagactctacagatgaggccaagttgaggcaggccgtgaagggaaccaaatttaaagcaaaggttttttacaacttccttgttgagaagccgaaagttctttactcaaaaggcatttgggacaaccttctgctgccaaaacataggtttgtttattggcaaatcatcaacacccaactgctcactcgtgactttcttagcaagtttattctgattcaaagtactctttgcccggtttgtgataatgaagaggaatctcatgagcacattttctatagatgcatcttcactaagcgggtccaacaagaagttaactcttggctaggaaactacagttggccgaactctaccattgatcttagcttcagatgtgatttcaagaagcatgacctccggaagcgcctcctgaacatggtaactgctgctgtctattatcagatttgggctaatagaaattgttgtttttttgacttgacttgtgcttcccccaaaagtataagtttggaagttagaaacattgtgcatcttagagtgttgagtaaagggccctttaaaaggagccatgagaatgcttatttacttgatgtaattaagaattggtagtcctttgcttgttttggtggttgctggtttagtggctgccgtgagtcttttgtaggcttgtgccttgtttggttgt

SEQ ID NO: 32791 - DNA, 2205 bp, Cannabis sativa
ttaatcatacatatatgcccctcaagtaattttaaaggttttactctttgtaatcacttgtttaataaatgattattttattcacaactggaattcaaaatattccatcagtaatgtgatttacaatcattaatctgagaaaaacttccttagttcaattatttattttatcaatcttccaggagcatctggttttgataaaacaggttttgatgtccagggtcaatccccaacattctcttacaactgtttcaatactcagggccgatcctgtaatataccagggttccagatagagtaatcctatttttagttctgtcttcgactgccactggttaacgtctaatgatggcaaccatattgagccagcatctacttaggttggaattcttttacaagtttgcttttatcgaactgcctttcgtacttttgcgacccgatccctctcgagataaccaaagtgcccttcttctcgtggaagagggttataatcttcagttgctcgagttattgggcagatcgaactaatcataggcatcttcccacccctttatatatcgacgaaggtgtccttgcgatatgagactttctatctcatctttaaactaacgactctcttctatggtatgaccaatatccccatggtattcgcacgtttcataggtgttggctcgccaaaaacggcttcttgtacgtgtacgaggtagatcttttctcaagtttcattgagtttggtgtattcagtataaagagggatatacctattgggtttcttgtcattaggaagccttttggaatcatcttttttcttttatcccgaggcctccaatcaaattttccaacagtatcatgccctagttgtctcctaggtttcgtgattttatgtactctagacttattctcaaactcgctcattcgcaaatggaatgaatccttttgtcttgaactgagtcgctaatggaggccaggcttttcaggttcagatgctctcgtagatcactcttgtcatgattgtggtcgggccttgcccttcttctcagggttcgactcactttttacttcataaaagggtttgcatcaatttctttctcatgagcctgaatagggggttaacgattttcgttcgatgctccttgtatcccaagttgtacacctagactctcctcagtttcctcaggctacatctcttgagagttctgagcatatctctgggtcaaatcctgccccttgacttctgagccacaaggttttcctcgtaaatctcttttccaaaggtcagattgtttttgggtaccatctcccagtgctgcctctacgacagctatttcacgctcaaactcggtattacgtcggtttgcttccttcaatcaaggcctaagatgacaattttctaattccacgatcagtatgtatctggttgtgtcgtaagcgccatcctcataaacttgattagggagtgaccgattgttgcacttccaagttctgtcaagccaggggccccaatactgggtcttcctggggcttgcatatggttcatgcaattatttagcagatccctagggactcaatggttctttcccaggacgatgattcattccttcttgaggactattacctctggtgtcatccatcacttttatgtcaggaggcttcttttctgagctttttcacagaggctctcaaggagagcaccaaactgttaaggcaaattttcgttaaccaaattttagcctcacgacgataattaaacacaaaataaataaagttatagaaaaataaaaaatgaacactagcattttttacgtggtttttttagggcctctcacataggagtgtttttcatccccccctctttgatcctgtctgccactatttataattgcatagtgacagttaattacaaagctggacaaaattcatttacagtaattataccaaaaattgtaggatttgattacaaatcaagcaaaataaatgaggttcttacacagctgtgaatatcccccctttattgggccgagatgaacgcataattaaagatatacggtaagctgtatctcatagggatgcctcgcttcagagggatccaaggtcactttgatagcgagcaactacttgtcattttagcttcttgagactaatattatcataattctgataattataattctttggcgtcgggaggatcttcctacaagaaaaaca

SEQ ID NO: 32792 - DNA, 3382 bp, Cannabis sativa
tgtcactaaaaggctaaattgtagtggtgtgagttgtatgtgcttagaccatatgatccattatctctaaataatgaattatttaacatttctacgactagcaaaggttcgataacgataaagaggcttatttgtagcacttgtgtcttcatcacatttgctatgataggataaagagactaacgaaaaatgatcttttacgtgatctaactgtttgtgagtaattggtttgtgaatattgtttagaaggaaaaatgacaaaaattcctttctgtgcaaagggatattgtgttgtacaaccacttgaaatggtgcatttatatgtctatggacctttgaatatgaaattcaggggtggttatgagtatttaatcactttcataaatcattactctagatattcaagtctttacctaatgcatagaaaatcggacacttttgataagttcaaggaattttaggcaatgactcaaaaactaattgagcaaaatattacagatcttgcgaactaataggggttgagaatacttgaatatgcagttcaaatatcatttaaataagcttgaaattcttatcccaattaatatcccctagtactccgcaacaaaatggtgttggaaaaaaaaaaaaaagaaattgtagtttgatagaaatagtaaggtcaataattagctacttaactcttccaacgtccttttgtatgctatagaaacaacgaatgacactcttgatgttgttccttctaagtatgttcccaagacaccactagaacgttgaaacagtaaacaacctagtttatgatatttcaaaatttgtaggggtcccactcatgtccttaggaaaaaagatttgaaatttgagtctcgcataaagagttacatgtataagaatttttcttccataacttattctttatgttaacttgtaatttttatacgtttaaatattagatatattaacttgttaatacttggactaattataaaatatttgtgtaataatagagttactcaaaataaatacatttaattatattgttattttttttaattgtatgacatattaatttaaataatatttaatttaaattaattaatatttaattgaaataaattaaattagtgaaattataaactgaaaaaataaactgatttttatacccaatggtgtttatacttacatatagtttcgtttattttaccctatgccttcggttattgtataataaccgacaacatacggacactatgacgttggttcactactacaaaagacacttttggtgtcagtttgagtttcgtttaatttacaaaattgacactaaagagtaccctcaatatgaggtgtcttctgtttaaagcccaatagtgtcagttagtagtctgacattaaagaaaaaatcgaggaaaaaaaattaaaagaaaaatttaaaagaacaaaagacccattttgtctcagtttaaaaaagacatttaagaggatgctatttgttttgttcttttttttttcaaaaaagaaaaaaaatcacatcatatgacatgctccctctcattttctcatcttctttgtgaaccaaaccctcatcccaagctgcctgaaccaaaccctcatcccaaatggaggtggctcgttcgttctcttcccctctccatctccccctctctgttttacccctaaaaccctgaaaccctgaagcccacgttgtcgctatttgctcctatgagtcacgccgcccctcctcacaaatttcatcccaacggaacccaaattgaccccatcatgtgttcaccgtctctcctctcgaactctaaccccgacactcctctctctcagagaaccaccatatatcaaaaggttttgatgcttttggtcttactttcatcatggatatattgatatatatttcatagccattttgtatgtgtttatgtttattacgtatatcgatacactaattttatttattgtgtagagtatctttgatctgactttagggttttctaagaattaaaagttagtttgggttgtgttagatcaaaaagataagctaaatttttattggaagacctgtatgcaaagcagatgaaaaatcagttcaatcttacaatgaaatttctctcaacatgatcaaataatgcaaataaacaagtagaacaaatatgtattcgtattatgtgtcaggttgttgtagcttgagtaaagtagtgtataatatttctaaatttggttaaattaaatttataaaattacatgaattttgctttaatttttagataaattattaaatattaattataataccaattaattttttcattagatattttttagttttgttaattttagtaatttttttattttttaatttccttaaatgtcggtttaaactgacactaaaaggagttttagtgtctgttataaaacgacaccaaaactaaatagtctcagtttcaaaccgacgctaaatgaaaagatatatatatatatatatgtatacattaggtgtcggtttagaactgacaccaaaactcagtagtgtcggtttagaacggacactaaaaattagactttttgtctcggtggaataggtgtcagttttatgaattgacactaaaagtataagtgtcagtttaaaatcgacaccaaaaatgcagtttgtagtagtggttattatacaataaccgacgccatagggcccctctatggcgtcagttgtgtttgactctacaacgtctcgtagatcagtgtcggtaacaaattttgccgaaacgacgctaaaataccttaaaaatcgcctctaaagtccaattctatactagtgtagattagattaagtctataatatactaattatatatgttgaagtttagaaatatttaaatgtgtttggatataattctttctagtaaaagaaggatctaaaagaaataattctatccataaagtgtaagaggtgaacaactatatataaatactcgatcaagaattataaatggtgtaaccaacacccaaagccaaatatccaaactatatcaataaagcttactacctattctcatacttctcttttaaaccaaaccattctcatatatactaaaccattaactactccataacaccaatactttactaaatcattaaacacttattccatgtttccatctattcaaatctaaactaatacaaataatttattttcaaatcatcaatatcgattgcccttatataatagatgcatcacatgatgtaatggtttatttaagccataatatttctaaaattacagtaaatttgtagtgagcggaataaaaaggaaaatgtgtggcacttttaaatggctatctagctacataaataataaggtaataatttcaacctggcc

SEQ ID NO: 32793 - DNA, 1359 bp, Cannabis sativa
aatatgcaagagactattcttccctttaactagttacaatcattgaacctgcaaagaaaataaaagaaagatacatgcatcagagaaaaatttagacatttgtttatacatagtacatacaattttaataatattcttgttgtatcttgtaagctcatcttagtaaagatatcctctccaacagccagagctattcaccagataatattcaagtttattttattgccaataagaaaagaaaatcatgatattgtatttcttaagaaagatataatgaacttactaatgtgggtgttttcatcttcatttaataaatattaagcattgatgcaatgtccccccaccttgtatgcagcctgtagaaacatgtaaaaaaaataacaaaggggtatcactcaattaacgaaatttgataatgagttcccatccactcaacactctgctcagaaggctaccttacaaaaaaatttcaaaacaataatctttttattttacctttaatgttgaagcattttcaacacagttgccactcccataagccaagtgtgcctgcaataaaactgttgatattgttagtagcacttcagttcaaatattttcatattcaaataaaaggatgctgcaaatttaaacaaaattttacataaataagagatctctgtttcatacaattttgagaaaattaattgtaagaaaatatattttctaggattacaaaaaggtgagaacacatattttatttaatgaaataaatatccactaactactccagccttcagcatctgttccaaacacatgttttatttaatggaataaatatgaaagagcttgtattctcgatcaaagtagagtaaactgctcctaaaaatcaaataagggaatgtgacatatgaaaggagtactgttgatcaacaaatacatagtgtgccaacttaagctcaccaacagctccaacaatgatgattgagagttgtatcattatgaaaaaagagaaaaacaattcataatttgctaagaattaattcctaagaatcaaatatcaaaaaccaagcaataaataaatatagaaacaaaatgagaacaaataaattgaaatgcgaacttgtctggcaagatgatcaatattcaatggttcgatagaagtagcgaagaggaattcgttaatcgattatagtttccaacctaatttcaaaaacctaattgcaaatatagatagaaataaaatgagaacaaagtaaaatcaaaactctgttacgcaaagcaacaatgtatattaaagtactgtctagatatacatcaattaaaagaaaatcaaaagtgagcgagactaaaaatttctatgaaatagagcaaatgatt

SEQ ID NO: 32794 - DNA, 2639 bp, Cannabis sativa
tctgctcggtcacttggggggcacctatacctgtacaaaccattttgtaaagataaagtgaacacaattgcacgatgattataaacagagaatgaagttcattaaagataacaaaagcacgtaataccgggattaaaagctgctcggtcagcctgttgtctgtaaaatgaaaaataattccaagtttaaagaccgtttggccggtcatgatgtcttagaaaaaggccttatggccgaataagatatatataataaaaagaaagataaaaagagaagtatttaaacagctggagtcctaggctctcggttcgggtcttctaggccggtaggagctggaggatttgttatctgagtggatgaaacatcagcattttggccagaggtagaagtagtcgccttgggttcaccataagccacttgggaagcgcaatactcgagatacatgtctttggcttcgcccaagtaatcaaaatttgcctgagggtttgccttccaaaagtcataaaagatctcgagatcggctgtctctaaggcatgaactttctcttccagcctcgccaccttggctgtaaatgcctcctccttagtcttcttctcttctcccagccaagggaagaaattccaaagaactcccctttcctcttgaaggctattcacttctgccgacagggtgcctatggtagcttcaagctggttggaggtctcgaggtccttagtcaactcaactattttcctctcagtagtaaaaagcttcttgttgacttcacccagctccatccggacagctccaagttccacctttgcgtcatcagcatccttcctagccaagtccacctccgccttcatggtgttggacatggcaacatatttggaggcagcaaatttagctcgggaataggtataagcaaacttcagaccagtctacacagagaaaaaactttaaagtctgaaccaagtaaagaaggattaaaggaaactatcaacaaagacttaccttggtgaattccctgaagactcctgccatcaaaagctccagggaagactcgttgtcagcaccggccagctgctaacttaccttaggaaccaaccgattcatgtaatggaaagcatctctttgcctttcttggcctctggaagcactgtaaaaggtggagtaggagcccgcatctgctcagatctgctcttggccagctcggatacaccctttgattgttcaggcctgtccaagcttcctcctcgagaatctttggacttagcaacttttggaatagaaggatccgcaacagctagctcctcataaaggtcaataacctccccagccggtgccttttccttggaaggggtcgtctcaccgcccctagatttcttggtcagaggagatgagctttagcttcctccaactctcttcttcagagcatcgagcatcttttgagacatgtctgcacgaaacaaaaacaacatggttagaggaaaaagggcatcagaatcataaagcatgatagtcaaaatgtttaaaaacaagacggaatatcctgcaaaacgattctctgagaaagactcgagagtccatcatcacctgacaagtcccttatctccgccatggcagctttcccttttgggctccctaattcaaatggcatgttcaacgggcctaggctgggccggatgtttctttcttcttttgagcggagtcacctgctcttcctcaacctcatcttcaggattcaagggctcatgagcatattgtatggcccttgcacctcccttcatttagcttcatgcttaagttcaatgagttcatcctcctgatgagctctctcagcccgttcagcacaagatttcctcttcctctccttcactggcttaggaatgaaatccttgagatagagccagtacttcacaaagttgtcctcggaggtcaactgaatgatatttttgtcacccccccacagttgagcaagcctttgagctcaatctctaagggcaagagtgaagggagggcggtgatatatggggatctgctgaaaccgagtatgggtgatgcccatgccttccacaatgaagtactagtcaacaaaacgcccaatcttgctaacgaccttatcttcagtgcccgtcaaccacttaaagtctggttaagagaaatagaagtaccttgatctaccttgcttaagggtggacttcaaatagaaaaaccaacttacctcttggggagtaaattgggtcggacagaggacgaagaagtctgccatattcctaaagtatgggtgcaaaggcaacaataccccttgctgggcatgagcacccgaaaaggcgcacattcccctttcagggtttgtggctcgattattgtgggcgggaatgtaacagtgtaattcgctcaagtagccatcctggttgagatcccgcaggcgcgcctcagtaaccttggatggagggctcacccacctagcacccaaagtaccttaccttctatgaggaaccacagcagtaagttcctcactggcgtagtccacgcactcaaccagcatgtgtccatcagcatcaactggctccccggcctcattgtatcccccatagtttgggggtgcaacctcctcctcttcctccaccttggagggactgctaggatggacatc

SEQ ID NO: 32795 - DNA, 2417 bp, Cannabis sativa
gtggacgcggtagaggtcgtggtagatttcaaggaggttgttatgaaaatctaccacaggctcctcaagattgggagtaaaggtttgcagaaatgcaagcccgaattaattagaaagatgaagagatttagaggctgagacaacagggtcctccaactatgcctcctcaactagtgccacccgctttagttctagtggtgccagtagaacaacctattgctggtaaccgcatggcgccactgtatgagcaattccgcaaatagatgcctctagcctttctgggaggtcctaatgtcacgaaggtcgagcagtggctaatagtaattaaaagaatcctaaatttttatgggtgtcaccagtaatgaccgggtaacctgtgccacattttagtctaggaggatgccttcgtgtggtggaaatggtgtccctcactcgggacattaatagaattacatgggaagaattttgggatctattcaatgccaaatattacaacaaggcaattcgtagtactaagagaaaagagttcactgacttggttcaggaagagaatatatcagtgactgaatatacaactaagtttgatcaacttgctaagctggcttcaagtatagtatccatagatttcaataagaaagagaaatatttggcattgaattccaagatcaaacacaatttggttatactaccaatgacaccactacatatgccaagatggttgagaagactcttcgagccgaaggtgcagtggagtttttgcaagagccccgagggactctaagtgttggtggggccaccacccttcttacttctagttatggtagggatggtggtgattctaatattgatcaaaagagagaaactttttcgacatcaggcagctcaaattagagtaagagatttcatgggaaccaaggtagaggtggctgccagacttattcctaccctgaatttccaatcccccatattggaaaccatgccttctaccccattaattttagaagtggcccacttgctgaaacagtagaagccattgtcgtggcccacgttttttatatcatagaagtagttgaagtcctccatcaaaggctcccttcgcgcatactccatgtacatcgcataaaacccaagggctatgcaataactgtttggggttaactgaaaaggagaaacatcatatcgcttgaggatagtagtaataaatggatagataggtatcgacaccccacatcgaagaatgggtatagagacaaccacatcctctgtggggattatcacaggattggtgaagggaagatgcaacctttgagtagagcaaggacacatggtaccgagtcgcagcaaagtcaacctcgtaaatgtattgaggtcagatttggtaacccacaagactagatcctcgcatgagaagggttcgttcagctgggtattgtccactgaatctgtcccgcttccctcggcatcttcctcttctcctgacttgcggtcaggaatctcccaatcttcccccatttcctcgtcttcgatgtcgggggcatgccaggagtgaacgaggtgttcacgggcagacaccgtggattcgctatcgcgaatctggattgtccttggtttagcgagttcctgaaccattctttctatgtcttcggaagataacgggcctaaagtcgcagttttggcgataggggtttcttcttcagagagtgaagctggtataaagctatcttctttatcctgctcgtcagcaaaagcaccacctcctgagtcgagcatttggctatccgacaggtcactcatctgaaagatagaagatcttttcagtgtggtgaaagtgcgagaataatataagtgacctcacccgcacgaaaaacacaacttaaaatttttagaaggttagcttggcccctcaagaaatggctgggtgtctctcaataacctaatgaccatgtcgattacatgagtattaaggtattgagacacacccatcatttcgagaaatccagccaactctcccaaggtgtaagttgcacatgtgcaactgatagagtgcctcaaaaaatggttgggagtttcccaatgacccaaggagcatgcgttcttgagcatgaccatggagttactgggaaacacccaccatttcgaggaatctgaccaatcatgacatgcgactacatcgcgcatatccaactagcaacgtatctctagaaatagctgaggagtctccagtgtcccaaggagcatgcatttctcgcataaccattgggtcaatggaaaatcctcactggttcgagaaaaccaactagttaaaacatgcgattaagcagaaaaagagaaaattggctgtatctcgcaaatggctgggtgtgtcccagtgactcaaggaacatgcgatcgcacgcatgaacattaagttacagtga

SEQ ID NO: 32796 - DNA, 1457 bp, Cannabis sativa
aatcccggtattttattttctccaatatatttcccactaagaaatagttttctaaacttacctatgtgatcaaactagttatacatcacatttttcgttgtgaccgagcaaaaattacaaaattagcatatttcatatacaattcataaaatacccctagagtttaataaaatctctggaattgagaaattataactctagtgcccaattctaacaatggggcccagaaataattaaattcataaatagttataaaaaaatgtcaaaacttagtgctaattgcctttactaatctaaattactaaagcggttattacactgcccatcttcagaaaatgagaaaaaggcgtcatcatagatatcgccttttgagaagcggtgagatttccattaagctcatcaataacccaagggttattccaaatttgaagtttacttgtaaaatgatgttctggtttcattttcaagtaaacatcctgcaaaaataaccatttataaaaatgatttaaacagtgcaaaaaataaataaataaataacagctaaaaactaataaaaacataattaaaaaataactgtaaccataaataaagaaatacacataaaaagaaaataaaagatatatgtaaaaataaaaactttaaatacttaccacattagaaaaacttgtgattttcttaataaattcttcagaaattgaaggactagtaccctttgaagctacatattttacgccagaacgtgttacacgacgtactggttgctttgaaacatcggtatcagcctacccattctgtgaaaaataacaaaaaagaaatatatacataaaaaaatatacatacacagtaaaaataaaaacaaatttataaacatctattcacctttttcttttggctgcggattttcctaacattaggctctcttttatcttcaactggaacatcagagctggttccagttacaatagggtcaacgaaatcatcatcagttgcatcaacagttaccttgaaacatagacaaagaaatcaataataaaaagcttataaaaaaaactttaaaaaatcaaaatgtcacaaactgtttgtaatacaaacaaaaaaacccaattctaatactaaaacaagccatgaaacacagaagatttgaaatacattgttgcccttaatttcgcccaaaatacgtggactaatatgacaatgacacgtggatctaagaagcacgactattagatgaatcgactaagtcatttttgcatcaggagtgtcaacgagaatatgcctcccggaggagaggtgaaggctccacatactcctggaaaccaagggaacgctaaggtatctccaggaggtacaagaccttatttgaacagtcacctctcatttaatgctgcatgggagaaaacgtattggaactgccataagcgatatgtctgacgactgttacgaaaattattaaataa

SEQ ID NO: 32797 - DNA, 2140 bp, Cannabis sativa
tgcaagccagaattaatgaacaagatgaagagatcagacgcttgagacagcagggtgcacctacaatccctgctccagaaatgcaggtagctcctgcccttgctgtgtaggcaggagcagttgctgtagtgaaccgaatggaaccactgtatgaaaggttcagtaagcaggcacctgcagcctttttgggaggtcctgatgttatgaaagccgagcagtggctaacagtgattactagaattctaaattttataagcatcaccggcaatgacagagtggcctgtgccacattctagttccaagaagacgctttagtttggtgggacatggtgtccctgacccatgatgttactacgatgacctgggaaaagattcaggagttgtttaatgcaaaatactataatgaagcagtcagaagtgcaaaaaggaaagaattcacttagctgactcaaaaagaaaatatgagtgttactgaatacacaactcagtttgaccgcttggctagattggcctcgggaatcgtgccaaccaaatttatcaagaaagagaaatacctagatgggttgaattcgatgataagacatgatctaatgatcactactgatgacaacaccacctatgctgatatggtgggtaaggaactgcgaactgagggtgcagtggagtgcacccaggagtctcgaggtacttaggttgttggtggggctcctactcctcctacctcaggctttagtaggggaggtagtgactcgaccactgatcagaaaagaaaaacacctactgcatccggtggctccagtcagaacaagaggttccgaaggaacgagggtcgaggcaattgtcagagtagctctgaaactcgatacacttacccagaatgccccagttgtaaaaagcatcatctaggagagtgtagagggcagaagtgcttccaatgtggtatgccaggatattataaaagggattgccccaaactcaagaaggaagaacagaagatttcagcgaaacctgctccagcaagggtgtttacgtcaactcaggctgatgcagaagctatccccttagtggtaagaagtcagctctcggtcaacaactcttacttctctgtgtttatttgactctggggccactcattcttatgtggtagacagaatctttagtaaattgggtagaccgcatgatagttatgatacagggtttagaacctgactgcctgacggagaattagtcatctccaaaaggtggattaggtctatgctgatcagaattgaggattgggagttgagtgctgacttaatagaaatgggtttagcggacttcgatattatactgggaatggatttcttatccaagtactcaaccagtattgattgtaagcggaagatggtgatcttccaaccagaaggtgaggaatcgttttttttgttggatcggttcagggatctcggatcctagtgattttagtactaacaaccagggaattattacgggatggatgtctagggtttctggccgtggtattggataccacacgacttgagtcaattcgaccacaagacatcaaggtggtttgggaattctagatggttttcctgatgaactttcgggtttaccaccacagagagaaattgactttattattgatttggcacctgcaatagtaccagtttctaaggccccttatggaatggctctagcagaatttaaagaactgaaaattcaactttaagggttgcttgacctagggttttcatggcctagtgtgtcaccctgaggatctcctgtactgtttgttaagaagaaagatgggtctttgcgtatgtgcatcgactatcgggaactgaataaactgacagttaagaataagtatcctttacctaggatcgatgatcttttcgatcaacttcacgggaagacgaccttttcaaagattgatctccgatcgcgctattgtcagttgagaatctgagaggaggacattccaaagacggctttccacactaggtattggcattaagaatttctggttatgtcttttggactaaccaatgctcccgcagcttttatggactttatgaatagagtattcaaggatttcctcgatatttgtgttattatatttatcgacgacatccttgtg

SEQ ID NO: 32798 - DNA, 1928 bp, Cannabis sativa
  modified_base (1895)..(1897): a, c, t, g, unknown or other
tcattaccgtagtttacttgtagttgtcactattgtatttctcaaatcttaatcttaatcttaaatttcatctcaaattttatacattttttaacatttttaagacaatattggagaaattcattaattagtttgttctgttattatcaattaatatgttttaaaaaagtaattattatttttgaaatatctgaattaaaaaaacaaaaaatataaaaaaaaaaaaaatgtgttattttagttatgagaaatgctaaaaggcagccctagctcattggtattataccactattagtgtaattaagtagcaagtctcatataactttaaaaaaaaaaataagatttagggaatatcgttaatcaattgtagagtgctacctataaaaggtgttggacactactggtgtccaataacaatgctctttagttataattatgtaatgcttgacattaaagttactatttcgtaaaagacgtaaagtagacttttgttaaaaattaattaattttttaaaaaaaattaaatgtaataaaaaataattaaaatattatttcaagtatcacgtacaactgattcttttattattattattatatcttatttttttaaaaaaaaaaaaaaccaaaaacgtacacattagagttgttattattattattattattattatatcttacttttaaaaaaaaaacaaaaaaagtcaaaaacgttaaggtatatatattgattgataacagtaaatttttattattattattatatatatttttattttctaaattttttagaatattttatatttttatagaaaaattattaaaataacagtaaaatatcaatttgtagatttatgctttttttatagaaaatttattaaaacaatagtaaaatatcatatctaaactgttgtgtttgagactttcccaagtgcttcctgatttattagttaatcaaaatcaatgagcttctgtttaagggagatccattgctcataatgtcatgattcttcaagacctcttgaagaattataaaaggaagaacatatccccaagatgtactatcaaagttgatatcaccaaagcatatgacacagtgaattgggagtttttggaagcccttcttaatacttttagtttgcctgccaagtttatctcctgggttatgacatgtttgagagcaacttcctactctatatattaatgaatggaagagtgcaagggagttttaaatgcaagaaagggttgagacaaggtgatcccctctcccttctattatttgttttgatcatggagtaccttactagaagattgcaattggctacctgtcaatcatattacaggtttcatcccatgtgtaagagcctcaaaattgtaaacctttgctttgttgatgacctgatgttgtttagaaaaggaaatttacaatcaatacaggttctaaaagctatattggatgagtttagtgctatcttagggcttgctatcatcactaacaaatctcaactctattttggagcggtgagagaagtagaaaaacagtctattctgagagaggtgaccctcttagaaggaaattttcctctcaaatatttgagagtccctctaagacctactaaatggagagctaaagattgtggagtgattatcaacaaaataaaacaaaggcttcatatttgggctggtaggcacctttcctttgtaggaagagcccaactcattcattcaatgttacttggtctgcataactactggatgagcatctttatacttcctcatagaatcactaaggaaattgaaaagttgtgtagagggttcctttggggttggaatgggaacagaagcaagcttcatatggcaacttgagagaaagttttgttgggctttatgccctaaannnaactctatttcaatgtaatcttttccattca

SEQ ID NO: 32799 - DNA, 3844 bp, Cannabis sativa
  modified_base (901)..(903): a, c, t, g, unknown or other
  modified_base (1094)..(1096): a, c, t, g, unknown or other
  modified_base (1456)..(1458): a, c, t, g, unknown or other
atgtcatccacatacacttccatgtttcgtctgatctggtcttgaaacatcttatttaccaatctttggtatgtagctccagaatttttgagaccaaacggtatgacctcatagcaatacagacccatatctgttcggaaacttgtatgttcttagtctggtggatgcattttgatttgattgtaccccaaataggcgtctataaaacttaatattccatgccctgtggttgcgtccacaagctgatctattcctggaagtggaaattagtctttgggacacgccttgttgaggtcggtgaaatcaatacaaactcgccatttcttgctcggcttgggtacaatcacatgattaggaacccaagccaggtagaaagcttcgattatgaaatggttaatccataccttttctacctcttccttcaaggttagggctcgttccttgtccaacagtcttcacttttgctggaccagccggaactttggatcaatatttaggatatgtgaaattatagaaggatcagttctgaacatatcctcatgtgaccaggcaaaaatgtctaagtttgctctcaaaaattttatcaactctaattttacttcgagcaacaaaccctttctaatgttaagctttctggtcagaatattttagtcgatttcaatctcttctaattcttccactggtccaacaaagttgcttaggtgccaaagtcgaggaaccacatcttcatccctgtcttgggaggttccctacttagtaatgttttttaccttgtccgaactcttgctagaggatacttcctgttgaccttgcttttagccaacgacaatgagtcttatttagtaagcgataagtgatttatagcgatcaatatatagtaaagtaatataaagacacaagnnntttatagaggttcagccccgagcatttcagtaatagcctaatcctcgttatttgtattgactcaagaataaggagaaaagttcattttcttatagctcttagaacaatatctctgaatatgaatccttagataatatctctacggtaaagtctcaactaaactgtttgcgaccttttgcccagtgaacatnnntcactatttatagggctgtgaacttggagaggaattctttcccctctcgctaccatggatataaacagaaaagatcgtgggataaatgcagaatacaaagatcgtgggataaatgcataatacactgatcgtgggatcgtgggtatgccatatctctgtaacctgatccccaagttatagggattttgtaggtgactcacaatgcaaaagtttaatttgctaagtgttggttgctctgctcagatcgctgatcgctttgcttcgggtatgccagggaggcatactgttcggactgtactctccgagcagatactcaaaattgattttacttgtcaccatcgtgtgatgccacgtcagagnnnaaaaattgggataacatttgcccttaagtctgtacgggatttccaaagttgcgtgtagactttatccgagttgcttctgcctttcaatggggacacgtgtcgggcgcgtctgtctgagactcgatgtaaggatgactgggcgtccctccggtttttggctaattaatgctttgacaattaatatttcgaagtccaattttctctcacaatgattgacggctgcacttgattattttttacttcccatattcgcttttaagggggaaacgaggtggctgaggtttctttgaaatgattacccctttttcgtgactttcctataaataccaaagagcattggtgcataaactcattttcaccatccttctttgctaagtgaggtcagagcgaaaagagaggttttttctggtctcaagtttgctgaagtgccttcatcgaaactactcgttggattgacgttgcttgaatccagatatctgaatcttgagtcagttctcgatttcctttatgcttatttttgcatgtttattttttttttcgaatgcactttcaacttcgccgtagatcattcataggaaaccctaggttccgaaactctacgattcttctctgtcatgatttcatacgattttacagtccataatgcttgctttctgaactgcataatgcttgtcttttatcttgcttatgctaagctttatgaaattttttttgccctaactcgagaaaatttcaaactttttgagttgtgacttttctttgaacattcttgttatataatatattgagtactcctagtcggcatatttgcttgtttatcgctcgatattccggccaaacactcatcttgtgtgttgtcttttgtagatgaacctaggtgagttttgggaaagcgaacatcgaatcgaccaggacctgcttcaatgtgttatcccaaattttacactctgacgtggcatcacgacaatggtgacacgtggagtccacttggagcatctgttcgggaagatagacccagcagggtgcccgctagcacatctagaataagatattcaacgatccgtgcagagaactcaacacttagcgaattcagctttcgtatcatgagtcatcagctcgatccctataactcaaggatcaacttacgtggatacggcatacacacgatcccactctcagtgtacctagcctcaatcccacgatccttgcattcaccattgatcacacgatctttctgttaatgcacattgtaacgagagaggaaaatcttcctcctcaagtttcccagccctataaatagtgaggcatgttcactgggcaaggggacagagagattgaaagtcgatacgcagctaagctaagactatattattatctaagaattatatattcagagatactgttgtaagaactataagaaaaggaatcttcttccttgttcttgagtcaatacaaataacaaggattaggctattaccgaactgttaggggctgaacctctataaaattcttgtgtcttattattgctttattttttattcgttacgacatatcgttcatcacttatagaaaagactcattgtcgttggctaaaagcgaagtcaacattttggtgctttcattgagagaagaatcacaaatcgctcttttcgacgatcaacacgatgctgcaaactcgtagagacttgtctgacccagaaaattcacagacactggatccgacattataggaccaagggaggagttcaagagttccgcctactgtcaatcctggacagacaggaagcgtggtgaatggtgaaacaactcctgttactgaaactgcgcctaatgtggcagagactgggaataacagttccgcacatagcgaggactcataagaccattggagacgcaatcgaattccaaaatctctgtgccgcgctcggactcatgcagagtcatagcaacactctgcgtcatgatcaggatgaactatgtgccgcagtatatctcgcgtttgaggaacaaaggcgtatgttcactgaatggagagacaaagagatggaggcattaagggctcaccatgcagagatcgaagatcgtagtcggcaagctaccgtgctgatacgaagagcctaccaaattgtaggtcagcaaacgccgaacgtcattcccctgtgagaaacggaggatgacccgacgatgaatgcttcccagacaactaatggtcagccgcccaatccccggttacgagttccactcgtgagcaaagaggtaggtgggcagaccttgtccaggaatccatcaggaggagccatacctgacggttccaactagaataatggcgttattccacctgtcaaccaagcgaatcaatcgctaaggtaaccaggctcttctgtgt

SEQ ID NO: 32800 - DNA, 1773 bp, Cannabis sativa
  modified_base (74)..(83): a, c, t, g, unknown or other
aaaatatttaaaatctaacaaactcataaatatcttaaattcaaatatccaactaatttttaaatatctagttnnnnnnnnnnatttaaattaattaaatatctaatataataatataacataatatcgtaatttaaaattgagatatttctaatattatatttcaaatcttataatttaataaagtaaattttaacaaaataaacaaaatttgaaaataggatattttatggttaggatactatcaatcttatttaaaaaaattaaataaaataaaatatcctaaatttgaaaattttatggttagaaaaatataaatatataataatgtaaaatgtcaaataacatttttcttcttataattaaaattaataaaatttattttaaaaatatcgaaattttgaaaatctgatatggttagcaatttgaaattttagctaatttatctttaagttttattaatattttaatgtcaaaataagatcatttcaaattttattaataaaataagtaaatatctgatattataattgaaattaataaaacaaacaattaattattaaatttcaaaattattaataaaggtaagtttgtggaaaatcaatttttcaaattcaaaggctattaatatctaaaaccaatttaaattaattaaaaaattaataaaatttattttattctgattatcaaatttttatttgaaaatttaaattctacacaagattctaccaaaatttaaattttcttcattgaaaaacaatttctaaaacttgaaatatcaaaaaaataaagcaacaagaggtgtatgcattgcatactccccgcacgcgcaaggggcatcatgggcaaggagtcaaggatgcatggtcatgatcgaggtgcttctctcgtccgcgcgcgcatgtagtgccttaggtttagatattttcattcaaacttcttcataactaattcaataaaaatccaaataaagttctataaaagcctaaattcattaatttttcatctactttgcagaaaaaatacttccagtaccaaactaattcacaaatattcatcaattaagcacataaagtaacacgaacacatccaaatcatcaaagtcatcgttttaaatctatatttcatgaaagtaaatcattaccatggctctcaggcgagttgttggaaattattttatcaagatctagatttactaacatgtacattgactatatttataatctaataccctaaacatgaattcttaaaataatgaaaataaacacataaagttaagaaaatcttatattggtagcagaggaataatatatctccttccactcaaatctctaacccttgttcctttctgtcggagggtaataacaagatctgagcctggatctccttcaggtcttggattcttcacaatcttccgcactatgattgagtacttgaattgatatgagtgggcatgttgtactctatcactaaaatgatggggttcgaaatttatgaagagaaagagaggagaatttgaaatttatagaaggaggctctcaatttctagttgtctgacagagttacaaactaggttatgaacgattggattagaatgagagtcatcttattccttatataggatttctcctagggttagatttaaattatatggaattgaaaagataaaaattggctaaaagaattccttaagtggccgaccatacaatgggcccactagttacaatttcgccactttattcaacaatttatcttttctttcactaatgccat

SEQ ID NO: 32801 - DNA, 2151 bp, Cannabis sativa
  modified_base (1739)..(1741): a, c, t, g, unknown or other
attaattaaaaaagtgttataaaatgcaccctatgtaaaatctaatatattttttaaaaaagtaagatctaatattgtacatttatatagtttcttttgggacgcaacgaaaccattacgagctcggaaggtatgagtatggtatagtatgaaaaaaatatgagtttgaatttcatatgataaatatagattcaagtatgctacaaaaataaaataaaataaaatatgagtacgtttaaatatgataagaagcacaaaaatacaataaataaaaaaaaaaaaatatgaattaaactcataaaaatgactattttttctttaagaaaacctaaagctagggtgagttagacattatttgaaacctttcaaccaataaatgctaatttctaatattgaggtctttgtcctatttaaaaaatatccaaaaattttctaaagtatatacttacaaattttttaatataaccttgtgggattatttcaaaatgtcacatgtttgactttgttgtggtctcttgaaaaatcgttcattatattcatactttcaaattcaaacttaaagggggtatattaattatagtctcacttaagaatatatgagaaacattataacatttttttttgagtgtagcgtaatggtattttacaatcatatattagcttaatagcttaaaagttctgggttcgaacccatgatctcttcctttttcccatcactccctcacacctaagctagccttagtggcttgagaaacattataacttaatattagggttgagttactcactagtaccaattaattttatgtttgaacctcaatctttaccaaaagaccctctctttcatgtgtaaatttttttaatctaggtgtatatggacaatattatagtgcactcttaaaagggtcgatttcttatattttttatctgtttcggcatcaatttaaattttttagtcaatttttcatgatcgctacattgtatttatttattaggattatttattaatttttttgaaaatttgaataatttatattactgaaaataaaattaaaatattttgttataggtgaaactatttttcccaatataaatagtaaataactttctttttgccattattttcaatttttttatgattactcaaaggtaaaccaagcaaatattatatatatataaaaatattgataagaaattattttgtagaaggtataaattaaacacccactatttaaatggtataaatatagagtaacaactaaagtgtactatataatttatttgtttttactctctccaacaacattaattttagaatggacatttgagtttgaggaactcactatactcgaactattttatttttcacagtggaaatgggtcatgattgaagaagtgaaagcttggccagcaaagtcggtaatcgagctattcgtggttaatgcgttgaacagatataattaagatggtgttttgttttaacgagtgtagcgtaataatattttacaattaattaatagtttaataatttaaatgtactagatttgaacttgtgacttctttttttttttttttttccatccctctcttaccagtaaattagctttagtggcttcaagatggtgttcaatgattatagttgtcttctcattaggaaattaatgaacatatatatatatatgaaacactttttaatgggtattaccaattgatgggtactaaataaatttaattataannnttaattttaaaaatattaagccattaaattttgatctgacgaataataaaagagaaatttgaatttctacgcttaaattagttacttaattaaagaaaatataaaaaaatacatattcttacactatataaaaaataagttgatatgaaaaatatttaagtaaaactcaatattttcttatcatttttttgctgaattttttttattattattttcttttcagccgatggaacaacctcatctcatataatgaaaaaataagagatttttataattaaattgaaaaattaagcataaaaactcaattttttttttttaatattacccattcatgggtaatacccactaagaatgcacccatatatatatactagcaaaagttacgtgcgaggcacgtatattaaatttta

SEQ ID NO: 32802 - DNA, 1909 bp, Cannabis sativa
  modified_base (222)..(227): a, c, t, g, unknown or other
cctgaggtgccgatgtagtcacatcaccaattttagtggctcgtgtgcccctagtttgatggccagttgttgtggatcttctttcaacacttgaggagcgtgttgcaataaatcaccaaaatattttttgacctcgcttttagccaatgacaatgagtcttaattgtaagcgataagtgaaataatttagatgtaatatgaaaagataaataaagaacatannnnnnttaaagaggttcggccccgagcagttcggtaatagcctactccccttgatttgtatcgacttaagaacaaagaatacagtgattcttctcttagagctcttataatgaaatctctgagtatactcacttagataattcttttgaccttttacctagtgagaatagataatcatttatagggctatgtgcttaagggaaggtttcccttctgtttacaatgtctttaattggtaagattacacattacatatatagagtacactgattgagggatttggatagcttgccatatctctgtgtcacgatcccagattaataggggttgctttttgtgcttcatgatgcaaatgctgaagttgctaagtgttgatatgttgttcgatttgtccactgctcggctgggaggacctcatccgtacaggtatacacggtgctcggctcggaacatctcctttgggcagatttggggaatcacttccacgtgtcaccaacatgaaattccacataagagtgtgaaaattgggataacatttgccccccaagtctgcacgggacttctgaagttgcgtggagacttcatccaagctgcctttacatttgaatgggtgacatgtgttgggtgcgtctgttcgtgatttgatgtgagtctgaccaggcgtctcttcagtttttcgctaattaattctctaactcaattaatgcctcgaaacacggtttcctttgcacgctttgacagttatttgaggcacttgattgctttctatttcccaatatttatttttggggggaaatcggagcgtctggggattttcgaaatgattaccccttttcaccagttggcctattaataaggttggaacttctttagaaattactttcaccattttctccacaaagcaaacccagagcaaacaaggaattttcttcaagtctgtcgtgagatttctatcagagacatccgagcagcttcatctagactacatttaggcttcaaacagtgagtaaattttcaatctttttcgcttttaactttgtatttttaatttttgggtttccattgtagaaaatacatttgttcttgtcttgttgtagaagatacatagaaaatctatgctcgaaactttgtagttttctctgtaactgttcgtacaacttcgtgatttttgacattctgattttaatctcgcaatgcttgattctcaccttgcttattcaaagcatcgtgaattttagcctttaacccaaaaaaaatcaaactcctgggctctggcttaatctttatgagttatttgcccttttaatctgttgagtagttctggtcggcatattttcctgtttattgtttgatatcccggccaaacactcatctcgtgtgttgtcttttgtagatgaacctggtgagttttggggaggcgaacaccaaattgaccaggatttgcttcaacttctgtacgaggatcaacctcgtattcgtgccagtccgtcctctttgagtaacggacttactaactcgagctttgaagatttggaagtgagtagtgatcattctcctactccagaacccgaagtgcaacaccactcttactccgagaagatcgcaggagaagggtacgatcgcttcatttgggaattgaagaagggctggcgacattatattgtgtctaattggatgtatattgtct

SEQ ID NO: 32803 - DNA, 2194 bp, Cannabis sativa
agagtagttttcaatttcccaacgaacatctaacccgttaattgaattgatgaccactctagaatcactctctataataatatacttccagccttcctcttttgccacttccaaagccaagcaacaagtagccgcctcgccacaaagagcatcagagaagtgcaatctattagtctgaattctacccacccttcccagatggttccttgccacgacagctacacacatgctatccagaccaactttaacttcacaatttagcttaatccaaccaagagggggaggattccagacagccacatcagacggggaagaagctggtaaaagcgaaggtctgtaatctgcataagagttgaaaatatagtcaacacactgagacatattggacattcgtttattatgtaccttgtccagaatagcccaattgcaggaaagaaataagtgttccagtgtttcctcactgctcccacataaagggcatgatacatcctcaatgtgaaatcgcttggccagaatagcccgaactgggatagcctttgaaagaatgctccaccacatcattttgtggtgctctagaattttactattccacatcttgttccagagagccggagccacgtcaacatgcggcattctatcacacgcttggattaaataagcagatttacaagagaatcgaccattactctccttcgtccaaatctacctatccgctccctgagtcgttggtttacccccttttaggatagccaccaccgtctctttctcaaacaaaagatttaatttctgggtatcccaatccccatcatcagacatgaggtcagagactttactaaggtgcgccgggccatctcctctcgccttggggaaaagtccctaccgtgaggtatccaagggtcttcccaaattcttgtgttcttcccatcccaaataactttacaagcccctttatgcagatagccttggttttaaccacatttttccaaaactaagagtcagtgtctttatacctgcaagataagaaatctttccctctaagatacttagcttccaatatcttacagcagagggactgaccaccatttaatagattccacccccacttagtcagaaacactaggttcatttccttagttttctgaaatcccatccccccacgagatttgggaaggcacaatttgtcccaagccttaagatgcaagccatggttacctttctcgaaaccccaccagaattcacgaaccataccgtctattttgtgcatgagacgattcggtagttttgtggtttgcatggcataacacggcatggctagacccacagatttaataagagttgcctgaccagcttttgagagggatttagctttcgagccttgcagcttcgaagtcaggttatccaatataaaattataatctgcatccttttgtctggacctaaagaggggaaggcctaggtactttgtattagtaacaatgtcaccaatacccaggtttaatttaatgtcagtttggacctgatcaggcgtgtttttactaaagaagatagacgtttttaacatgttgacacgctgacctgaccacgaacagaattcttccagacaattccacactcccctggcttcttgcacattagccctaccaaccaaaataaggtcatccgcaaagaatatatgagagaggaccggacctttttggctcagcctgattcctttgataactcccttccccaatgcctcattcaacacacaggagagcaattcagccgcccaaatgaaaagataaggagagagtgggtcaccctggcgcaagccacacgagggcttaatcttcccaacttgacccccattaagacaaacattgagggtagtggtagtaatacattggtccacccagttgcagaaacgtgttgggatatcatagcactcaagcacatgtctaatgaactgccaactcagcatatcataagctttcatcaggtcaattttaatagcgaacaagccttctttgcccttcttgcggttaaaggtgtggatgatttcttgaacaataacattgttatcttggatgcttctgccaggcacaaacgccgcttgagttgggcagatcaatctaggaaggataggcttgattttattagctaggatttttgaaatgaccttatacgtaacatgttgtgaaaattatattgattt

SEQ ID NO: 32804 - DNA, 1162 bp, Cannabis sativa
atcttataaactaaataatttaaccttctgctcaattttatttttttattaaaaaatttataattcaatagaataaattataacttaattctaaaataacataagtgctgacatcgcttttagccaacgatactgagtcaattaataagcgattaagaatataattaaaatagagaaaaaataaataagtaataaagaacaccagatttaaaatgatttggccccgtgagtgtggtaatagcctactccccttgagttgtattaacttgagagaaagaacaaagtgtttttctctctaaaaactcttacaatgaatctctgagtaattctcttagatttctctctgaagcaattctttggatctctttcacagtgaggctaagtcactatttgtagggccttaatgcataagagaaggttttccttttgcttacaatgtataaaatttattacataattatgagacacgaaatagaagattagaacaagttgtcatatttctctgattcaatcgcacgattgtaagaattgccttcgtgcctggacttcacaagatcattctgaagtagttaagtcctgataagtagttcagaaagccacatttatatatgcccggataatttgtctttcatcctgcctgggtaatcaagagttatacatgctggcatacctgttcggaacattcacttccgcctagatacaggaaatgcaggacatgtgttatttaagtattttgccacatcattgtgcagaaaataagataacatttgtcccacaagtctgcgcgggaccttcttagtcgcacgtggacttcactcggtctggatttttgtttgaacgggtggcacacgtccgaggtgtcgattgatgacccgatgtgactctaaccaatggtcttttcaatttcggctcatttgctaactgacatatacctcgattcacgccttagaattagcacgtgatgacagttgttcttcagataattgagtgcataacgtacacttttttgggggaatttgaggtatttcaaattttgaaattattactctcctttgatctgcttataaatagggttaaaaatcataatcaaccacttttagccattttcactctcgaagaatcagagcaaaaaaccttctttctttcaatttcttcgaagaat

SEQ ID NO: 32805 - DNA, 1220 bp, Cannabis sativa
tgacaatcgctacataagcagccattttttctccacgtgtatggtattctcccaaaacttggttgaccactaattgagaatcactgaagacttctaccctcgcagcctctacagctttggccagccttagccctaacattagagcttcatattcggcttcattgttggaggccgtaaatgcgaagcgtaaggtagcctagagccagagcccatctagtgatatcattgctattccggcattggatccactttcaattgatgccccttcgacgtacactttccacgtcgacatcttctaggctggtgtactggtgctggcttctacttcattacactttatgatgaattctgccaaggcctgaccttttatggagatgtgcaaaatgtggtgtatattgaactggcttaactccatggcccacttgaggagtctttgtgaggctttaggtttctgtaagacctaccggagttggtgattcgtaagtaccttgatggaatgggcctggaagtagggtcttaactttcttgaggccatcaggaggcaaaaagctaacttctcgattaggggataccgagtttcgacccctatcatgcatttgctaacatagtatactgggtgttggaatttctcttcttcccagactaaggccacactgacagcattctcggagacattcaaatacaaaaataagtcttctccgtgaaccatttttgacagtattggtggcttgaccgtgtgttcttttaatttttgaatgcctcctcatattcatcagtccatttgaatcttcgacacttcttcaaaatattgaagaaagggatgcacttgtcggtcgatcgggagatgaatcgacttagcgcgaccactttcccagtcaagctttgtacatccttgtgtttctttggggaaggcatgttcaacaaggcctgtatttttttcaaggtttgcctctgttccgtgttgactaacaataaatcccagaaatttcgccgatttgatgccaaaggtgcactttttgggattaagcttcatcccatatctccagaccacttcgtcgaagcaccactccgttgaggtcatctgcatggcccatgcatgttttggatttaattagcatgtcgtctacatatacctccatgtttcttcttatgaggcctttaatcatccggttaaccatccgaaaggaatgaccaggtagcagtatacccccttatcggtc

SEQ ID NO: 32806 - DNA, 1856 bp, Cannabis sativa
aacaaaagtagttacagaacgcatttttgtttttcaaaagtaaaatttttattttgtgattaaaaaattagaaaacaaaagtgttaccaaacggtacttatatatcttatactgcatcgtgtccaaactaataaatttataagttaagcttctttaaataaggtggagtctttgggaatttaggtggcgtttggttggaagtaatggaatgaaaaggaaagaaaacaatcttcattccattcttttgtttaatgcaaattaggtggcatttggttggaggaaatgaaataaaaaggtaaggaaacaatcttcattctatttttttatttggttgtctattaaaatgttggaatgatcttttcactatttagtagaatgacaattttattttgaaatgaaaggaaagatcattttaatgcatgattaaaaaaaatttaataatttttttatgctttttaaattttattctatttcattcctattttttattctcattcccttttccatttttgtttttattcctcccaactaaacgccatcttaaagtgttggaatatcttttttaatggaatgaccttttcactattttggtaaaataataattccatttttaaatagaaggaaaaaccattccaatgcatggtgagaaaaaatttaataattttttttatgtattttaaattttattccgttcctattttcattcctatatttttattcctcccaaccaaacgccaccttaaggctcataatcacaagatgaaattgtacaagtcattaataaaatcaggattcgtgttcaaagttcaagaattacaatcaattggaacgtgaagtttgatacatttagaaaatattgttcgaaaattttattccaatcattcatttgttgcttgaagctcctacaataatacaatgagatgtggtatatataagtcttgaaaactcataaatcaaacaattattgatcgttttactattcttgatatttccctttctaatttggttatggttactaaggattattggtattgggggtttgaattttctgacgagtataccgttgagagtgcgttaaattattataggcaaaacgtgagaatagtgtggacggggtgattatggcgttttgaaagaagttttggcaattaaaacttcctttagagacaaaaaaattgtatatggagggcggttagtgggtgtcttcctacaagagtttagttgaagactaaacatgtggatgcttctttgttgtgtctgatttgtcatggggtaggtgaatcaattttacactgtttagttgcctgtgattagggttgcacatgtgttaggttggctagattggaaatgttttaatggaccaactcaataaccgcgatttggaaaaactataaatcattcacttttttttaattgcacaacccaactatactttaatgatataagggttgggttgagattaatagtttagactttaatatttatattacaaaaatgataaaaatcaattgtccaaagtttaattttaaaaaactgtgaaatattgataagatattaagaagtaagaactattaaagttgaaaaaatatgaaaatattatgagtactcatgcatcctgacaatagaaataggagcatgcattataagataatcataattaaacttattatttgtaggaaattttagtcttttccaactatgccctacaccaacatcaaataatcagtattaaaccacggtcactttcgacctttaccaatgggaaatttcatttttaatgcttaaaaaaataccttctaacaaaatttagactcataattaatttatacaatttaatgctattgttttcaatttct

SEQ ID NO: 32807 - DNA, 1434 bp, Cannabis sativa
attttgaacaatgggatcttctatttataggcaagaatgaccattgaatctttccctttctctcgttcagattggttcacttgaatttttcctcttcatatcttcacgcgcactttcctctccgatcccactcttcaagctcttcaaactctcttccttaatttcttgagttctacttttcttcatgagctctgttccgttttcttctgtattccccttataatgaaatgatttgtttcatgtcgctttctgccatatgatcactttattagttttacttcaggtattataagtaaaattacttttatacctctaatgttgtggaaaccagtttcccaaaataattctcaagtgccaaaatgaatcttgattgattttaatggaataatcatttcaaatttttggaaaactatccttaccttttctaattaccctaatttctttattttaagtttaaattgttgatatttatttaaaaggaaaatcaataatttcagtaatttctttgatattttctcatcgctgatcttttatgttctttcacctttcttcgcctttatcctcttgctttgtttgcccttttactattaatttttttccttcttccttttgtgttttgcaactgtgacttcaaggacatccaaaaacaaaactaagtcacctaggagagggcttctcctttggctgacccaaatttcttgcataaatatgaatcaactttcaatgatttataaactaagtatcatgttccagaaagggtcaccagtcacatgttgacgaaagatgaactaagtaaaagtttggaagaacttgaaatgtccaatggtgaaatcttggccagcgggaagcatatggaactcatgtgtttccctattttcctttttttggcctatatcatttctcttactgaagtttcaatgatttaattagttctcaattttgtctagacagttttaggcgtggctgctctttgtgctctcaagggtatgacattgtttacttttgaatttttcacctgctttagaacaactatttgtacttctcgtttcatagccttaggggtgttcataaaatagtcaatccaatccaattcgcacaatctaatccaatctgcaaagtacatatatttgtacttgtgtagattggattggattagaaaatccaaaaatctgcacttgtgtaaattggatgttgattagcatgtaaaaataaccgatctaatccaatccacacatatttatataaattttttaaaaaattatatatacaattaatattttaatttaaaaaaaatagtaatttaaaaatctagcacatacaatacaaatatattttaatacataatttagtaaatgtgtattctattcttatatataatttaattttttacatatacaatttaaaataaaattaaatatttctttctgcatttga

SEQ ID NO: 32808 - DNA, 1568 bp, Cannabis sativa
  modified_base (1518)..(1542): a, c, t, g, unknown or other
agcacccctgcccgaaggccattctctccttgttggaggatcatcaatcatgggctgcctagctgatgcaggcactaaaggagggggagaaagagatgatccagcaacatctctaccacgggtggtctgagccacctttgcccttagacagctcaaaggctcattagaaggtccaccaacaagacctctcaacctggaagacatatctgtaaaaagaaagtagcacagttagaaagcaggtcacaaatattcaatgcaaaacaagaatataaaagatggtgcaataaactatcaaataccatcatcctctaaaaaggaatcatttgaatcctcaacaactgccttgatcttacctctaaatgtaggcaaggggcgagtaggtcccatagagctctagcctccaggcctattccaaagagaagcatcaccaattaagcccctgtaggccaagtgccgatggagggccctctctctcctctttagattttgggctatataagacagaagcacgtcatcatctaagtcaaggacttatgcatcattagtacaagctttctctgtagctagggcttcatctacacaaactgatgggccttgggctcctacaactccagaagcaggagggtacaagccatatttctgaaagttggccacactggccaatctaattatgtttttctcttctccacatgaagagataggatgtggtttgccctatccctcatctacaatgtagggatggagtgcttgtaaaatggcacccactggaactggaagtgtaggatcctttgaatgtcccaagcaaaaaagtagtttcgagcgtacccacctactttagacatgggtgtgctattggtgtcacccaaccactggtggccaacctggctaaagtagaattattcagtcatattttggtttggagcagacttcagatcaaagtagtaccaaatctcataaggagtgggctaaggccagactagctccttatacaaaataaacatcgctaaaaggtacttgacactttttggggtgatttgtgttggacatcccaaaataagcagaaatgtctctgaagtaagggcggagcagcaacactacccctgctctatatgactcttcgaccatgccatccaactgagggcaagtcggtgtgccctctgatctctagtgggtatctcacaatgaacaatcctcactagcccgctagcaagtatcctattaaaatatataattaaaataaatgatattaaaaatacattttaaataatgagatttaaacataggatatttgatctccaatgttggtcttgcatggttattgtttcaatgggacctcgagacactagactttgtctcccttatggatggttatccattgaacctttaacaccgtaagatcttgaatgataagtattttgtaagttttcttttctattagactctccccgacggtgattacttagaaataaatttacaaatattaaataatagttgaagctcataaaataagaataaccnnnnnnnnnnnnnnnnnnnnnnnnntttgattcttattttgatcgaataaa

SEQ ID NO: 32809 - DNA, 1813 bp, Cannabis sativa
aactattaattccgacgagattgaacaaaaacagtaaaatcaacgtcaaataaataatcatgacaaaacaactgtaaaacaacactaaaacaaatcaaacaaaacaaaatgaaaaaatgactaaaaaaaactaacaatcttctgcacagccttaacaccagatgcaatagcagctatatttgcaagtccattcctaaaaaatcagaataaaaaaactactaaaacaacacaaaaacaaatgtaaaacaataaaacagatataaattttagaaaaacataaaagaaccacacacctcaaaactcttttgtcagtgagctcgtcaaatgtatttataggagaaccaaaataaaaaaatcacaaaaataggcaaagataacgaagaagaaatgtatttatagcccccatcttccatacccacagacagaactaccacagcaacacgagaacacctaaaaaataatcattcattctagcgagatggagcaagaacagtgaataatccacgtcaaataaataaatgatggcaaacaactataaaacaacactaaaacaaataaaaaaaataaaagaattgctagcgatattctataacaattattatattaaatcaatctaacgaagaaattttttttatatataatttatattaaatcatgttgaatttgttatttaattgtatcaatagcaatataacattttgagtgttatctagcatagttagtgtctgcataattttccaacaatcgaactcttaatttactacgattaagctattatttacttctagaaaataccaaaaaataaaataaagaccaagacataaagtcaacatgttgcaatttcttttaaaaaaaaatatatttgaattatgagctcacatgcgaaacactttagaccccaactagtattctttacaaagtgctgacccacatgcacaagaaaccttccccttttaatttttatgctcttcctaagggtattgttatgaggcacctagcaccacataaaatttcattctataattagttagtaattttctataatatttataaaaataaaacaagtcgaaccaaatattaaatgtcaccaataataatattacatctcacaaaaatgttaagcacctgtcctttaacatttctctataaataaggtatgcatgcaatatcttattcattcttcatatcatcaaacatagcttcacttttaatcctttttctttctctcaacattatcatcttcatcaatctccaaatatgagttgtgctcagccatcagtttcatgttatcccgccggagaagacccatatgtggctccaccaccggttggttaccccaccatggacacctctgccgctgttgggcaacccgaaaacagaattgaaacccaatccaagggagggtgtaattgcttcttgaaagcattatggtaaatcatcttaatcaaatcctatacatatatatatatatatatatatatatatactgactgactatatatatatgatgtgtgattatgcagttcatgtgttggccattgttgctgttctgcgttgggtattgacttggattgctgctgctgctgctgctgtgatgattcatcataatgatttttatttgtactgttatatatatgtccagtagtgagtagactcttcaacgagttgaagctcttattttcagtcaaaaaccaaacctttaattattcagcagagttcttctgccacagagcaatcgtctccaatattcaaaaaattctaaaatatgtatattcattttaattaattcgatatatatatatatatggaagag

SEQ ID NO: 32810 - DNA, 2032 bp, Cannabis sativa
gtaattttatttgccgatttgtttcatgtacaaagcaaatttattgataagaatagtgataactataaataagatgcgaagatgacaatgattttaaatgtatcgatgactacgagtgatctaatgatgacaaataagatacaagaatttaaatatatagtggtgaatataaataagatttggtcatgacaatggttgtaaaatcatatgataagtttttttacaaattatttttcttcctttaaattttattttgtgtgatgatttattcttcaatctttaattttcttttcctatagcgtgcgaagatattaatatattagtctgagttcaaaaaaataaacaatttagtaaaatcctaatgaaaaaaattatattaaaaaatataaaaaattttaaatttagtataattttatgacttaattattttaaaataaaatacaaccgtatgcgaagtgtggtttattttttagttctacaatgcaccgtttaaaagtaatacactgttgtacctaatctatttcggcatccagcagaattttttaatctaatttttttcatgatcgtgtacgttgcagttatttaagatttccttcaaaaattttgaaaaatttagaaaaatttaacacgttgaaaacaaactcttttagttatgctcgtatgaaataaataatttgaacattgctttgtattttataagctatttaaaatttttaaaattttgtaacatattttaaataaataactataacatacgtgatatgaaaaaaaaaaatcgattaaaaaattattctgaataccgaaacaaacagaaatgtattagtgtactttttttatagggctacattgtagaatcagcctaactgttatatatttacaatttttacaacttatatatgtttatttgtaaatattatatatgttaatcgattctcgtaaatatcttctaccaataaatatattgtaaataataataattatgttggattaatatttttttcatgtgatttatttatatgatcaatataatgttaattaatttatttttcttcatatgattaaaccaacaagaataaaaaattaagacaaacagacgttaaattaacatgcatttttaatattgtcatgatttattttatgatcttttaactatcctaagatttcacgtggaccttcctcctaccttaaaaatgtgactagttctttttttttactacctataaacctaatattatttttttagctctaacctttttattattattattattattattattattattttaatcacaaattttgtggtgattataatagatacatgtctttactaaaatttatggctaactaattaagcggtattgtctagctagaaataattagcctaacatatatagctccattaatggttatcaattgaagtggtccaaattcatatttatgtgataattaataataataataataataaattattattgattttcagttcacatctaaaaagttatatatttcaactactaaggtatgtctgaaagaatcacttgaggctaggtcaagtggctataggagggtgtgtgtgttggaggtcctgggttcgagtcctaagttatgcattgtaatatataaacacttaattcaaaaaacaaaaggtatgtccgaaagattattttcattgtttaggattggtcatatagtcgacgccactgcaggccatgaactcatattttttatggatgcatattttagatacaactagataaaaatgtatgttattgatcacgagcatacaagctttattactaatatggggttgtattattataaagtcatgtcgttcggacaaaagaatctagtaccaacacctcgtgaatgaaatgttcgagcaccaaattagagtaaacataaacgcttatctggacaacatgttggttaagtcggcaaaaagccaagactatatgtagtcgatgttagagatattattacaatgaaagataaatcaagataagtacaactcaattataaaataata

SEQ ID NO: 32811 - DNA, 1387 bp, Cannabis sativa
  modified_base (502)..(503): a, c, t, g, unknown or other
  modified_base (543)..(544): a, c, t, g, unknown or other
  modified_base (573)..(574): a, c, t, g, unknown or other
  modified_base (601)..(602): a, c, t, g, unknown or other
acttcttttttctttctctgtaatactaaacttataaagtatgatatttttatcgtagtgacatgatacaattttttgtagattaagataaagaaaataggttgctgtcaaaataaatcaacacaactaattataaatagcaagtatgttaaaattgtaagatgcaaaggattcatctcaaaatcaatttataatgagaggagtagcctatacatcttatttatggtacttagttgtggctctttttattcacaacgactctttttttttttggctcactatccttggattacaagtagctctttcggctcttattttagactgatttttagattttgattggttactctttaaaatttggtttagctctgataccatgttcaaattgtaagatgcaagggagttccatctcaaaatcaattaccaatgagaggagcctatgcatcttatctatggtgcttagtttccatacattatcaatgtgagactttttaacattccnncaatgtgagactttttaacattccccctcaagatggtggnntaacattccccctcaagatggtggttatnnattccccctcaagatggtggttatttnnttgctcaccaatcttgcacgactcaatcatgagtggctcttttggctcacaacaactctttttttggctcactatctccggataaagtgactctttcgacttttctttttggactagtttttagatttagatcgaatactggttaaaatttggtttaactttgattccatgttagagttgtaagatgcaaagaattccatctcaaaatcaattaacaatgacaggagtatatacatcttatctatggtacttagtttccacacattatcaatataaaactctctaacataatcaaacgaaatacaacgacacagataaatgataagttaaattgagtaatttgtggcataaataacttctagttgcaaataaatacttaaatttaatttttaacgacaataatacttaagttataattgtggaacttctgtaggtacttaactattaaatgtcaagtaaattaccacaagataatctctattagtccatgtcattaagttttattcaatattaatttaaatataataacttcaggtaccgacaaaagtttcaaaaatataacataagtattattatcgtaaaaaattaaacttaaatatttatttgtaactgaaagttaaacttaaatatttagcgtgagaattactcatttaactttctttattatagggtataaaaatacaaaataagtggagcccaaagggtatagaaaggacgaataaaagaggcaaagaactctggccaactatgaaaagtgatatgaaaaatggcatcatcatcatcat

SEQ ID NO: 32812 - DNA, 1856 bp, Cannabis sativa
  modified_base (37)..(40): a, c, t, g, unknown or other
ttcctcaattatacataattatctagttagggttttnnnnatccatttcttaattccgggtattacagctgttgtgctgcccagcatcgcaactttaaaaaaaaaaagaaaaattaactttaatgtacacaaattgataactgttagtaaaaattagagtgtgggaatatagtagctatttgtagtattgttttagtattagagtatttttagaaaaaagttgctaataataataatgtaaataagaaaaaaaatattataatttttaagtgatgtagagtgtttttggtgatgctttgttgaacgggggagagcgagatggacagatttcggtaagaaatttgggcgttgaccactacttaagttaaaattagctaatgaagttgttacacgtgtccggtgggtgacaagagagtcattttcttttcctcatgctttgaaatttttaagtaaatatctaaaattatgtttgaaataaagtggtcccaacccacttagtccttgaagttgggcttagtttcaataggatcatttgtcgtgaaattgtttataggagggatatgactgtggtcatatcatagggctcttctggtaataattcacgtgactagagtaggcatacccagattatacaaaaaaagacaaaccaatactatcaaagtggattttctcatttttcaaaaaaaaaaagtggattttctcaaccaaaaaaaaaaaaagaaaaactatagaagtggatcatggaaattattacataaaaaaaaacagtaaagaaagaaacaaaatgtacaaactcacaaaatcagggagaaactcgccaaaacttatgtctcattggtatgttaaagaatctcacgttaataatgtgtagtagtgttagagcaaatgaaaaatctccaacaataaatattgtgtttaagtctagattaatctttctcttttacttaatattctcactagtttgttgtttcttccatcaattaaaaccaagattgagtccattgcaacatgcttaagtcacaatcttatttgtcatatatttttattttttaattaacttttacatataatttttaataatataaaaaaaaaaaaaaaaattggggactatggcacccccctaactccgttattactttgagcttgagtcttttaatagcactttagtaagtatgaatctttctctttacgaatatatttctctaattgccatgtgctgttttgaatcccatcattagcaaagacatcatataatggaaccttgcacacttgatcactcgagacacaactaaagtcacttcacatggaactaaaccaatcctatgtgacataatcaacttaactaaacttgttgtcatttattctttttcaactgacttcaatagaaacagaagactataaatacatttgatcgatctcattgatcagattagaagagcaagaagttttcttcaaattagtgagagaagctctaagattgtcagagagagagacaagaaagagaattagtcaattggttttctgcaagaaaagagagaaactaaattagattataatcgagagatcattgagattttcagtcaaagagtgtgacaagaaatctccatcattgttgtaactgtccaaatttggatcatagtggaaaagagatgttcttcctaaggagagctcataagaaatctgatcaaatgtatttattctataatgagcctataaataagtagtggtctccaaaaaatactagagttcttgtattctctcattcccatcaaagaaaatactttagagtgcaatctccaacaatgacttcagattagtgcttccattcattttattatcatcatcttcttctttaa

SEQ ID NO: 32813 - DNA, 3915 bp, Cannabis sativa
  modified_base (332)..(332): a, c, t, g, unknown or other
ataacatgattgactctttgtcaaacaaatcagaaaaataagaaagctcacataatttttgaattctttgtcttttcttctttgatttttgtgccctatagtgaaaattacttacccacacatttcaagtcaacacttaaatatagtgtggaagattgtgaaaatttctattgcctgaaggagaaacaagattcagatcttgatcatactctgtgatagaaagaatcaagggttagagatctgaacagaagaaatcatcatattctgctgccagcaatgtaaggttttttgtaactttatatgtgtttattttattgttttagaaaattcanatttaggatgttagattatagtcctataatcaaatatacatgttagtaaatctagatcctagtaaaacaagttcaaacaactggtatcagagtcatggtaatgatttattttaatgaattatggatttaaaatgatgtttgtatgatttggatgtattcatgtttgtttatgtgattatttgatgattgattaagaattatgaaatattcgatgaaaaataatttgattttcaatctggaattattttatttggatagttggtgaaaaattaagaaaattaccactttgcagaacttaatttcaattaaaattgagaaagttatgattttttgaaaattttgaaaaacccaaggctagggtttctaccctgcgcgcgcaaaagtgggccattcctcggtcgagacacactttaacacaaagcgtatctgaggtttctcgaatatatgcttgtctgaacatctccttgcgtgcggttacaagggtgccaacagcctcccccctcagtcaagcatccccattccgcgcgcggacagtatgcattgcatattgtctgtgttgcttacaagttttttcaagttttcaaatttgtatcattttttcttggattttaatttcaatttttttggtagatttcttgtgtatatttttaattttcaaatttcaaaactaattattagattaaaattaattattttttaatttatttaattttagttattagaagattttaaatttggaaatagataaattttacgaatttactattttggttatattattttattttaattataaggttagatattttatattagatatttaattaattatataaaatgaacttatttgatattgttatacccgaaatttagctatactccagaaactaacacgtgtcctacagaaaggatatgaatcaaccctaatgatatgacaatgttatatcattaaatgcagattaaataaactcgttattattaagtaagagtttgatagataatattcaaaactcgttgactatatagtcttaagcgagacaaggataataactatttaactgagattgatgagacacatgtctaccttagattacatagacaagaaggggatattcatccactctagcagaacaaatgtaatcatacaacagcctcacattgcacatagcgagatggtcacctcgcaatactaatacgaatgaaggggtgtgacgaggcaaactacccaaccttagtattttttcttattaagataaaaaaatgaggataactcatattaaacgagatgcgaccttccaagtcagcaataaccgtgtaaaggataaaaacaaagaacagttggacagtcattcggtattatcccatatgtgattaaataaacgtggagattgtccacgtttcatgaacaattatatttgaatcaatcctaaaaagagtaattgcctgcctatattcctataaataagggttgaatccatgagaaaagggatggaaaatttgagagaaaagattatgtattcaaaaattattattgtattctgtactcaaaaatatccttaataataaggactcgtggagtatgtagatttgaactacaaaactatgtaaaaatatctggtatttattaattatatatttatttctgtaatatatttattgcagaaagactgtttattttggttaatgaaaatttgcgttaacagtttggtgctttcattgagagccttggtgataaaaactcagaaaaatcccctcctgaaatggtgtactaccttaataatttctggcaacatgataaaaatataaccattgagaaagaaagatattctaaattgatgcattcttttgcacatggattttctattatctttgataagataaagaaagcgaaaggagaaggagaagaattggagtgcttttaccaacttcattacaagctcacacttgagagcatagaggagattgtgggttatgttcaagaaagtatcaagtatatctatgcaagagcatgaggacaagattatttctgaagacatgttggaagtggatctaaaatccctacttgagattaaagcagtagtcagaaaaaataatcataatatgaccacaatatgattgatgattcagatgatgattttacagaagatataatgaatgcctatcctgattcaccaattcaccaagaaatgttagaatttgaggaggaaaatcccaagatgtatcttgagtttgatccagagtctgcatagaagattaaaatttttcatttatgtatataattttgttttctttttctttgcttgatgtattgtcaaggaaggacttttattcactttctcaaaaaattagattttttgtttaggaatatcataagactttgaaataatgaatctaaattgtttatttttcttgaataattgtatggaatgataggatatagaacgttctctactcacaataaaattttcagaacacaatatgtcctttctcacactatgtttgttatcacaaaaccttccattggaacttattttactaagatcttaatttactaataagtatatttaattatgtacattataatctaacatcttaaaatataaaattcataaaataataaataaacacataaaagaaataggatcctcacattatttatagtagaaattagtgactcctgccgttcagccactctaacccttgattctcatactgtagcagagtatttctaagtgatgaatctggataactttcttatattcgataagcaatagtttatataatcttccacaatgatttgactaccaccttgaatattttgggttggtactcaactccctaatggagcaaaatttgagatggagaaaaggctacatttttaaaaaataatagaaaaaatagagagatttttcttgtcaagtttaggttacaatcacttataataactttggctgacaaagctctcatctctttttatatatagccgacccactagtgttagattaggtgagatgggctagaacaaagacaattgggcctaaaatcaaagccctcgccgaatttaaatacgtggccagagactttgagttttcccacattatttaatttaatgaaacagtaagtctttttctaattttttccatttatctaatctaatcatttaaatactaatttttatttaataattattaaataaaattataattaaaatatatttattaattagacccagaaagtatcttaagtaacaaataaactcttatttctctttttttctcaaatttgcccaaaattagtgaacactctcaaataagacatggtctatttttgaattctaattgacttattaaataaattaattgagtctataaggcaatattatctcttatagtgtggggaccatgggcctataaaatcaagctcccaataagtagatccgaaattactaagtaaatttcttaacttattaattcctcttgactccacaatagattcagaattacactcttgattacttagaatgctctatatactaaatatagatttgctatgaattcttcattgtttcaatttaaataatcaa

SEQ ID NO: 32814 - DNA, 4609 bp, Cannabis sativa
tttgcaattgttgcgtatatgactgtaataaaaaaaagtggctgtaaaaatattttatcttacgtttttgttgcagtagtatcattttttggctgttaaatactaaataaacttattaagtgctagttcagaaacacgtgacaatatattttttcatcttatataatgtgatctaattatatgtcgtcaagtgtttctgagttaacaaccaaaaaatgatacgaatacaacaaaacagtaaaataatgtacttttgttgccacttttttttttattaaaatcataggtgtaacaattataattgttaaaagatcttcgcccaaatatccctattataatattatactgtttactgtacaacgttgtgtggcatggcaatacaaaatggagcatgataaatatgaccaaattaaatattgtgatacaacagaaggttacttgttttttgggtatcaaataatactaaagagatagattgatttattaggaggaataggtcagagtccagactaataaatattttcacatgggtgacaacaactgaccagattatgtgatcatatgtaaatataaataaacagtaagtggtgttttttaataaattagtaggtacgtaatcggtgtttaaagtaatgttaaaagcaccgaccatccaattacttaaaagccttgactaattgaacaatcaaatatgttattataaatagataaagattgatgaacactacacagtgcgctatgttatggccgtaaactaaaagttatctactaaaaatctacatacattacttcctcataatcataccatattattattatactaaattatagattaactatgtataaaaacttgaaagaagaggtagtactagtagcactaacacttgtttttcacatttacaaatgttgttttttgatggcccaactcaaccaaaaaagcccccttctgaatgggccaatcaaattctggcccaacccctctactatatctgaactaagttcatgaagtatgtcattaatcatttgattagtttagagtaatccttaaaagtgaaaaaagaaaaaaatagcttaaacaaacagtctccctccactaatccaatactatatcagaagtaattattcatattcatgggatgcaaacacaacacgaccatttaaagaatttataagaattatgacattcattaggattaaattatgcaagttcttcagaggataaaaagcatgtattaccagtaatcattacaagagcaacggccgtccctgaagaagtgaaatctgtggttatctcgaatgactatttcgcggccatatatctgtgaaactagcttggcaaatgagtggcaatcagagcatattcggaggttcttgacaacccgaatcggcattccttgacctgtgctgataagcccataagccattgcaagtttctcactgtgtctgcttagaaaatactctttctcaaactcatccacatcgagcaacacattagccaaatcaggttcatggccagcatctcttagcctgcagtttatttcttccagcatatctgaaatttgactctgctctgggtgactatcatcagtagaggtgaactcatgaatagttccattaacttctattaggcttgtaccgggcactttggtgatccctttctccttcaaacgcaccctcactttcgccacatcagtccattttccaaaagatgcataaatgtttgacagaagtacatgaattccactcctcaactctttcactctttcagctgcataggttgccatttcgatattcctatgtgttcgacaagcggccaagaaagacccccaaattacatcattaggttccattggcatgctctttatcagatcactagcttcctttagcagccctgctctacctagtagatcaaccatacagccgtagtgaacagcctctggagagattccgtggagttctttcattgacttgaaaagttcctggccttgttctacatatccaccatgactacatgctgtcaatagtgccacaaaaactactccatctggtttcaccccttgcctaagcatctcatcgaaaagttccaaagacttttctccctttccattcattgccatagcaccaatggctgtggtccaagcagagacatctcttcttggcatgctattgaagacttgcattgcattataaggatcaccacacctagcaaacatgtcaactaaggctgttcccagccgtaaatcactgtgtatttcatttttttggcagtagctatggatccatttagcaagatctagagctcctagaaaaccgcatgcagatgctacctctaccatggtcactctgtctgccttaattcccttggtttgcattgcctgaaagagttcaatcgcttcctcatacctattttcttctacaagagcgccaagcatggtgttccaagagacgagatctctctccggcatctcattaaatatcctccaagttgattctacatcaccatttctgatcaaaccagcaagcaatgagttccacgataccactgtcctgtttggcatacgatcaaaaattttacatgccatctcttgttttccacaagtcatatagaggtcaataattgcattagaaatactatcccagccttctagtccgttccttagagcataacagtggcatccctttccagaaagaacatcacctaactgcgaacaagctgagattgcagacaacaatgtgaccctatctggtcgcaggccatgtcttagcatttcattgaatatatgtagaccttgtctaggtagtcctcggcgaacataatttgacatcattgtgttacagagaatcaaactcttatctgaacattcatcaaaaagcttatttgcagcatcaacatcaccacatttaaggaacatatctactaaagcatttaccataaaggcattaagcttcactcccgactcttcaatagaagcgcatatcctctcacccaattcaagatcacccagctttgcacaagcagaaataacacacaccattgtgactgaattgggcttaatacccgcgttcatcatctcaaaaaacaacgaaacagcttcctttggtaaatccctcctagcataaccgcaaatcaaactagtccaagacacaacatttctctcagccattccatcaaacaccttttgcccatgaaccaactccccacattcggcataaaaatgaataagagaatttctaataaacacatcatcttctaaacccatcttcacaacagctccatgaaactgaattccctcggaaaaagcctcaagcttggcacacccgctcaggacaaacggaaaagtatacttatcaggcaaaattcccatcatcaccatttgaacataaagtgaaatagcatcatcaccaagtccagctgcagagtaaccccttatgagagagttatacataaacaaagtgccattggtatctttatcttccttaaataactcaaatgctctacgagcgtaatccatgctttcaaaggtgcccatttcagcatatttagcaacaagctcagtgatagcagagagattgtgattgaggcctattttggtgatgttacagtgtaattgcttgagttcttccatggttttcaagttcttcaacgacccaattgatgaagtgtccattggtatggttttcgatttggttatgtcagtagttatggagtttggtgaggctgagaccagaggaaccaaatgtagggttgaagccattgctgttgtattagtttattcctgttactacactcgggtggttcctaacaactgttttgactgatatgtttttgttcaaattatgcaagttcctcagtagttacatacaaagcatattctaatttaattcaaagtaagtagctttgaatttttgaagacaaccccagagccaaaaacacaatctttatccaaatacgaaacaaaaaaaaaaccccaccattatatcaatagatagtacatagatattatatcgttatatcgtgtaagagaagctgaaagtggaaatgtgaagggggttacctgaagggtgaaattgacacggtatgaatgggagagagatgtgcctgggctgctgctatatgatcaatcttcttcttatgagagagagagagagagagagagagagagttttgtctgggtttaaaggaagaaggttttttcctttttttcttttttcggttttggcttctatttttttggtaatttggaattttaccctcgcaactattccaactacgtatcttttgaactagaagtggcaatttgtgttgacatactgtgttcagaatgcgttgagatcttaaatttattaaaaaaattgctgacccaaacacaatccaccacacaaaaaatttacaaaatatagacacaaacatgaataaatttcatatcgtgtcaaactctcaaaattttatgttgtgtagagtttttaaatttatttaagatgaccggcataaacacaattcgttacacaaaaaatttataaaacatgaatacggcccgcaaaattttcgtgacacgtcaaacctataaaatctcgaattgtgttcgtgttaactcgcgtgtcgtgactt

SEQ ID NO: 32815 - DNA, 2963 bp, Cannabis sativa
ttaataagtaaatctgattataattaaatgggttttatttagggcacaaaacccaacagtggaaagcaatcctttggacatgcctttttcaaatctaaaaactcgatacaagttctccaagttccatttagttttgggatgagaacagggttggatatccatgagggataaaacgcctcacgtataaagtagtgaaccaacaacttatccacttcctgcttgagtgccccttgtctctcagcatccaagggtcgtctcttctgtctcttggctgggtagtttgggtcgacatttaagtggtgacaaataatcttagggtcaatccctatcatatctgagtggctccaggtgaattgatcctgttttgccctcaaaaaacttattagttgctattttagtttttcatcgaggttcttcccaatgaatgcacactttgtgggatttgctggacctaaaataacttcttctaattcttcaattagtttcaataaattccgctcatcttgaatccgaggatcaagatcctcatcctgcttcttgccttctcagtcatgactgccattagctggtgaccaacctttctattctacaactctatgcggtcgcatttgtgagccagaagttggtcacctcgcaccactcccacacctatcgatgttggaaacttcagggatagatgcttaattgaactaattgcccctagtctaattaacactagtcaacccaacagtatgttgtaggctgatggtaggttgacaactaaaaagtcttgcattatagttgttaatacaggtgctttgcccacagttaatgagagctcgattattcctttactggcgacacactgtggcttgtaaatctgcataggtctaccatgcaaggttttaatttggctttttccagccccattttcgtcagtgtatccttataaaggatattcactgaacttctgttgtccaccagcaccctttttatccttttgttggtgagctggatggtagtcactagtgggtcaacatgagggtatctcacatgcttcttatcctcctccgagaacacaattggaggttcctcagtcttagcctttttagaagattctggagcaaaaactgactgctctttcttaacttcctttacatatctcttttgggcattattactttctccagcgagatgtgatcctcccgagataaccaaaatgtcctctccttcaagaggaggaggttgtagtccctggttgcctgggttattgggcgaatttggctggttatgtccatcaccttgtcgtttcacatattactggaagtgacctcacgagataaggctttcgatctcgtctttcaattgacgacattcctttgctgtatgccaaatgtccttgtgatatttacaaaattttgttgcatctcttttatgtctcacatgtctcatgggctcaggtttatgaaatgtgaccctgtgctcatgtgcgagatagatattttctcgagttacattaagctaggtataaatagtgtagattggcacgtacttgtcatgcttcttctgttttttttttgtccttaactgattccttagagtcatgtttcctcttaaagcctcttggattgtcaacctttgtcgagacgatacttgtcgagacagtgctgggtttacttcctaagccagtctttaacaacttcatctctttccttgcttcctcctttcgaacaaacacctaagccctctcattgaactcattgatgtttttcactgggcgaccctacaagtcatcccatagctcgcctccatcagttgagagatcagttgtgatccctgcttgaagggcagtgagctggatactgtcattcaaatttctaaccctcgcaccaactgtactgaaatgactcaagtacgccttaagtgtctcgcccgagtgctattttatgttagtaagagaagacgctttgggtcgcctgtctcttgctgcctggaactgtttcttaaagtctttagataattgttcccaagaggtgattgaatgatgggtaaatttattgaaccagctgctcgctgccccaactagcgaggtagggaataaaataaaccataaattatttgtcatattgttggctcacatgatagtattgaaattattcaagtgtgcgaacagatccgtaatcccatcatatgacgagacatgagagtttttaaatccctgggggaattcagcattcataatgtctggatggaaaggctcaggttccttgtccaagtcgtagctaggtagttttccatattccccatcttgataccttctgaatttgtcctccaactcgttgatttgtaattggataagacccttttgtttctgattgagttgttgatgtaggtcaggtttttttttggtttagttgattatgaagatctgattgttgttgagtatagttacttacaaacctcgtccttgagtaactttcaattctagatgtgcccatactctcttgatcaatactgcgacgagttctatcccctcctcgcgtagatcgactatgagttcttgtacatctagagctagaactggcctcgtcatgcactggcgttctcctttgagaacgagttgatacatgcccctattgggatttgtatgtgccccttccctatcagttcgagaaggacgttaacggtgtctgggtggtagcccacctgtcctaggttgactcccaggatctctctcgttaccacgagggatttcttattccctagtctggggttgccttctgcttacatttctacgtgaagattctggtaaatcacggtttccattcccctgggttgcaaatccccagggtctctgagccacttcttgatgatgtgtctggtcatttggttgctcatttggttgcaacggaatataatgtctccttccactcagatttcaagcccttgtatcctttctgtagcagggtatcaccaagatctga

SEQ ID NO: 32816 - DNA, 1108 bp, Cannabis sativa
gcatactccatgcacccaacccaatctttactttagccaatgccctagaaaggacatagcatttatccaaaaagtgcaagtaactatgttgtagattatcatatccgataaacacaatgtactgataaatctaggaatatacatttaatcatacaatcttgattactttccactgtgctgacgacacaataatcaagaacataaatgtgataaggattcggatgaatttataaatcaaataaacatataaatgataacatgaattaaatgacacattaaataagtgatgaaaatacttctatctctttattgatattcaaattatagagattacattgaaatagagttttatttaaggcataaagcccaacacataatgcctaatctatatatatatagataagaaacgattgggttacttatttaactttgataaatattattatttatatgggtataatataatagtgatatgtgtgattataataatattgatatttatcattaattattttgtataataatatgggtaaatattattattagtattatagtgtacgtatatcacgtaactagaagactgaacattgtggaatgagaatcgttccacttttagttcaaactgatctattttattattattagtgattgactcctatagtttagaagtcatgcgaaaggaagaatagagagggcgggtgatcgggactaaaataaagagtaaaaattctacgaacttttcgttcttcgggttgggcacagtctgtgtagattgggtgtttaggatctcttatttatgatctaaaaaaggtattatatggtgtagaaaggaaaagggatcactatttcgagtttcaccattattgaagcttgaaagatacgttcttgaaatgaacccggattcgaacgtgttttagttgttttggggatcaaagaaggttgtagttgagtttaagagaccctaagtagtagattaaacatagagaaacggtctgaaattgtccagaatgcaaaatcacagttttggatgccattttagttggtgtaccgtgttcagagaagacgatctcaaaccggcaattatgagacaaaataccagtggaattgg

SEQ ID NO: 32817 - DNA, 3308 bp, Cannabis sativa
  modified_base (1116)..(1124): a, c, t, g, unknown or other
  modified_base (3268)..(3273): a, c, t, g, unknown or other
atgattatattttctcaatatttaagtcttgtttcaatcaatctcatgtctatgtaaattttgtacaataattcattttgtatataaatacatataacaaatttctcattaaaaatatttgtttgcacaccctataggtcttaacacttaggttgtgtttggttggaggtaataaaatagaatggaatgaaaagaaaataattttcattctattcctttgtttggttgcatttaaaattattagaataccattccgatggaatgacatttccatcattttggtggaatgactatttcattttaaaatagaaagaaagaccattccaatgcaagatttgaaaaaatttaataatttttttatacatttaaaattttattccattctatttttattctcattcttattcttatattttcattccttccaactaaacgtcatcttaattagttcaaataataaataaataaataaaacttctattatgaattatgaacctacctaagcatgtctcatgtggtcttttataaaaagaagcaatataaagatacatgtactgaatattcttaaacatatgtgtttatggtgttggttgtactggtaggtgaccaacaagaatggcatgtttttctctgattttttttcttgtttagtgtgtgagcaatcatttcatggggcaactatgttagtttggtgtttttttagaattagacatggttcaatttaattgaattaacgaatcaaactcatttaatttgatctaattacaaaagttgaatatctaattagaattcacttgaatgttcaaaataagattctaaaggctcgtttggtatgccgtataagggtcgtattgtattaaataataaataacaccatgtttggataaagcaatatattgtattaattattacgactaaattttttaatacattgtatgttgtattatttaatatgcaacaaatggtttataatttacaaaagattcggggtcaacaccaatttctaatccgaacttgggacccagacttggacccgggaccggaaccggaacctgaattaaaaaatactaatacaattcaatatattaatataagtcaataccaaacatagtattnnnnnnnnnaatactaatacaatacaatacagtccaacacaatacaatacaatacgacatactaaacgaaccataattgaattaattattagatgttaatctcaaaatttaattaaaaattaatctaatctaactatatttaatatatattaaaaaaaacttatttatacttgcaaaaaaaacttatttatatttatacatatataataaaaatattaaatatatatattaattatattcttactgttctttttattgtatttgtaataattggttattgttgtagttgtttcaaattttttgttgcattaaacatgtaatatgatattattatatagtattaaatttaaataaaatatgtatatatattatagattttatgtatttttctttttatgtttttaagtttatattaaaaatgaagtgtgtaaataaatatctaattgaaaagtcaattaatccaatttgtaattgaattagattttgaggtttaattaaattgaatgatcagatgataatttccaaatctaattactaattggatttgatcaaactaagaaaaaaatataaatttagattaaatgggatgtctaactatgttttagtgaaaaaatataaaaataaaataaaataaaaaaaatgcaatgagtgcaagcatctcgaattgaagaaacaaaacagaagaagaagaagaagaagaaacaaagtatgctcaaaagagaagaaatgcaagaaagcttaattacattattgaatgattaagtgtttatacacacatgagaattacattcttttagaattaacaacccaagaagctaacaatagctttaactaacactaacaaactctaactaactgacacatcaattagttggttatcatcccccctcaaatgaaaaggggaacatacaactttgagtttgtctctcaagtagtgaaatcggtcttttggcaatgatttggtgaggatgttagcgacttgatcaacggagggcacatatctaacaaaaactttattgttgaggatatgatcacgaacaaaatattgatcaatttcaatatgtttgcagcgagcgtgaaatatagggttagatgcaagagcagcaactccttggttgtccacccatatggttggaacatcagctagcacaacgtgtaactcagtgaagagagagtgaaaccatttaagttcttttgttgtgttcgcccagtcagcatcaaagtgtgtttcaatagaaaaatgagttgctggtgaaataaacagatcgggagataaagtgccttttaagtatcgaagcaatcttttacaagcttcccaatgaacattggttggagcatgaataaactgggatagcttgttgataatgaatgccacatcctggtctggttaatgtcaaatattctggtagcctatgcttagtagccaataggctttaggcttgtaaatacctctcatggatctagtaaccatagagtgagttctagggagtgtagcatcaacattcgaaccaaatgaaactattggtgccaagatgttacatagatatctctccaatgtgttcagcattgtttggtatagggagacctgttgcaaatgagtgtgaatttggtgtgtcttgattcaagagatcaacatgtgtaagagatggagctgaaacagatgaagcaatttgtattgctggaacttctgcaggagcaaaatctgtttgtgcaggtgctagtggcacaggtgttgctaaagcatctgaaatagttggtgcaacatgagtatcaatagcaactctagcagctgttgcaataggtgtgttatcaacagattcatctgcacaatgaattatattaggagcacttgatgttgaactagatggtagggctgagcatcggtcggtttggtcggtttttttctatataaaaatctagaatttggttttcggtctggattggtgcaatctgaaaactgaccgaccaatccagaacctatcttaaaactgaccattttgaaccacggtttggtcgctttaaaccgtccaaaccaaactttttttaaaaaaatatgatccaatttattctataaacacattattttacatttaccaactacaaacatacaaattaattgttcaaaaactaattatcttattcttttaactttnnnnnnaataaaataataatatattattagtaactacaata

SEQ ID NO: 32818 - DNA, 1488 bp, Cannabis sativa
accaagttattgaattttttaatttttgctccttacctaaaggtatgtatcaaactaatattgtgcttatactgaaaaagaaatgcgtggctactatgaatgacttacggcctatttcattgtttaatgtcttgtgtaaagttattttaaaagtgcttgctaatcgtttgaaaaaggtgttgcctggtgttatttttgagaatcaatctgcttttatccctggacgtcttatctcgaataatattatgattgcatttgaggtgatgcattaccttaaatgtaagtgtaagggtaagacgggttatatgatgctaaagctcgacctaagcaaggcatatgatcgcattgaatggggttttctcaaggctatcatgctttatatgggttttcatggtcgttgggtggatcttatgttggctacttttatgaatgttgagtataaggttgtgcatggaggtaggagtatggagtcagatttgtggcgctttttagtgaaagctaaagtccccccaaaagtcattcatttttcttagaaagccattactggttgtctccctactcagacacaactttattctaagcatgttcctgtgcaattgcactgtgttttatgttccaaggaagaagaattaatcttccatgtgatggtttcttaacagttttcctgttcctgttggaatagatctggtgtaacacttggcatggtttctgtcactaattttggtgactgattgctagaggtgttaagtcgtggtcaacctacaatgtttgaggaagctttaatggtttcttgatccatttggaagactagaaacaacttgttatggaacaagaaaattaatgttgcagttgatgttgttgcatccgcacattctgtccttaaccagtagatttttgctccatcgaatcgttttgagccgctgcctgcattattgtgtaactacagcagtggtgagcaatggactacaccaaatattggttttgttaaggtgaatgtagatggagccttgtttgcagcatctcaatcatttggtgtgcgtggccttacccgtggagctgatggtcgtttgattgaggtcttttgcttgcacaaagctggctgtgttcatccaaacatggtggaggctattggtgtcaaagaggctctaagttgggttaaaaagaaaggatggcagcacactattgttgaaacagattcacttgtggtggttcaagcacttgaaagaaatgttgaaatgcaatctatttttggttctactattgcttattgtcttaaactaatcaaatctatggtccatgtttaagtttgttatgttaaacgatctgctaacaacgtcgcccattgtattgctcacggtgcttgttattggtcatattatatttttgttgatagtaatgtccctactgttactaacaaagctgtaattgccgatttgactattctatcttaatgaagttttctcttctcattcaaaaaaagatgtgaaa

SEQ ID NO: 32819 - DNA, 1389 bp, Cannabis sativa
acagatcaatatcgagagagatatatcataattttactaaaacatgtttctctaaaaacgaaaaatatataataagtctgaatcctaattcaacttctaacattaatggacaaataaattgtttcataccttcaatacttctagatgtatagactaagagacatgagatgaggttgatcgaataagagcacactgagtactatagatttagccaaaagtacagtggtaaggttgaagatgactgaagtttctttaggttgatgagatgaaaagaatgatactaattgtagggtaaataatatactgacttctttatttttaggttatgaataataataataataataactatatattattcaattaatcaatacctatgatttaaatttgaattgtatttaagccctatattctctccactcctcacgcactcactcatccctcttttgactgcatatctctctatatatcttttaaacatactactaatataacattcactaaccaactaaatcattatatatacgtgcataataagattatgaatcgaaacatataattaattaatcttatgaacacttgtacaaacacatatagttacacataatccatatcatatcataaaatatttttttttcttaactattttttttttaaattactaaaaataattaatgaatatccaatataactatcaaacgagtttcgagtttcgttcctggacgaaagattaatgagaatattctcattgcacaagggcaaaagcaagttaatttactcggatattacattgctatcatcccctatattttaataaattttaaatactattcttaatctcgatattacaggccaaccattttatccaaaaaatactattttgtatactaaaatcatgttatgcactcctttcacgtaattttttgtgtttcattttgctattttacataaaataaaccaatagagttcttattttaagtattataatcaatatttatgatgtatttgttaattctactacaataaaatgtgcaataataatttccttttatatctcttctaatatttaaataaaatcatggtagctaatatatacaataatagtcttttggcatggtggtaagtacttaactatataacttttttgtcacaagttcaaatctcaataacccgttttttctaatttttttagcctaccatatctatccttagcactcaacaatatctatcctatgtattacatcaatattattcttaattactctaagtatttaagggttatctaaatatatatatttatatatataaaaatattcttataaaagtaggttaaagaaagcataccatatacaaaaaattatatacttgacttcagataaagtcactttc

SEQ ID NO: 32820 - DNA, 2313 bp, Cannabis sativa
ttctagtgacactgattacacctacacaaaaggtgctcacgaacttagaatagtaaattaaatgaatcgagtttgcatctactactggagatcataaatacagaatgataaatcaattgtgtcatgatttttcatttttaagtgaatgaaagtctaatgtgtcacatgtcaattcccggagttgggagtactttgattatggacccaagttttgaatctagactacggcgtcaacattcttctcatgtatagcatgccctgcttttgggaaataggtgcatgcagtgttgcaagtatttataggtgcatgcagtgttgcaagtatttataggttaggtgcatgcagtggtgaaaactgagagctcttagatcatgacttgcaatatttgttcagaatttcttttgctgttaaatctttcaaagtttgtctgcatctttcttacatattcaccttttgatgtcaacatgtaaatgagtaagctgagaggctatggtcaaagcctaatcttccaaggtcatggtagtacaactgttggagatgcagtcatgactcattttaggagcataatcttgacgattctaaaatctgaggatttaggatttgtctctctgtgtgtgtagcaatttgctcccaccctctctctatggaagggatttgaataagtttgtctttgtcagattaatgggatgcgcaactgtcttgatatttctcagtggcaagaaagaatgttcccattcccttctgaaattggtttacttttgaagaaatatatattctcatagttggttgaaatcttttgaacatgggatataggaggtgggactaagtaccactatgcataccgtatagtactttgacagtacatagaattcactattcagctacatagggcattattgtttatcacctctggttttatagtttgaattttgtgacatattgcattttcaatttaaccttgatcagttcatttcttattgctgcagatccaagtatacacagatcgggaaacttttcaatcaatgggtgaggcataaattcatttgacaaggcacaaagtgtattatattttaataatttatatgctcaagttgtggatttttcaggtaaagaacatgctcttgtaatatgcaatcacagaagtgatattgattggcttgttggatgggttttggcgcaggtatgtagacagatacttcagggtcataaatcacatccttacactattactgatactgacattatcaacaatataacatcttatgaagtgacaagcatatgtttttatttactcaaaacacaacttgtgcttctatcattctttcttatgaggattgatatttttggtgccatcttgagttttttttttctaaatattgctctagttgattgctgatttattcatgcagcgatcgggttgccttgggagcacattagcagtcatgaagaaatcgtcaaaatttctaccggtatgtttcatttcgaattgaaatgtcttggcagcatgcttagattatctttgagtcctgactggttcttcttatatagtccttcaacattgctgaagtatccttgggttttactacttgagatattattgccctgtcatagtttcatcatggatacaatcatacatcaaagttgcatctttattcttcttagaaacttaactttattctggcacttcggtgtcattcatcttatgagaaatgttatggacaaatgtcatcttgttctttattttcaatttttaatgactgcctactaacatctgttaatcttatggaatttcaatcatctattagcatttctatgccttatttctaaacttatacctgcatgttcatttagggtaaattctatttaatatgttcaggtgataggttggtcaatgtggttctctgaatacctttttctggaaagaagctgggcacaggatgaagccacattaaaggtattgcttttataaatacgtgttaagtacatacgttttcctccactctgtgattcttagcacatgcttgtatttgctttgactagtctcattaatctcattgaacctttggagtgtatttgcagtcaggaattcgacggttaaaggactatcccctgcccttctggctggctctttttgtcgaggggacacgcttcactcaggcaaaacttttagctgcccaggaatatgctatctcaagaggtctgcctgttcctagaaatgttctgattcctcgtaccaaggtcaaattttcattccaactttcttaatctgcttattcatttacctataaaataaatatatgcatgagaagtga

SEQ ID NO: 32821 - DNA, 3483 bp, Cannabis sativa
cttggggtatgtggaccctttgaagaggcagtgatcgttttttacttggtctaacaaccaagggtgtcatgaccgaatctactctagaattgatatgctttcaagaatgaggattgggtggatttatttcctaattctatagctactttcagttgggaagaggtttctgatcattgtgctatagtcatctcttcaacagtaatggtggagatagtagtgaaaccttttaaattttttaactactagactagccatggggagtttaaaccagtggttagggaaaactggcagaaactagtgcatgctactggtcttttaggcatttagtgtaaactggctagacttaaagatgtgctgaaggtgtttagttcttctaggattggaagtgtggagactaactttcaaaaagctcgagataggtttattgaagctaaaatgcaagctcagaacaatccaggagatgagatctttgtgaatgcagagatgattgctgcttcagattttgtgcttcatgaaaaaatgctgaaaagtatgcttgtttaaaggagcaaagtcaattggctgaaccaaggagatgggaatacaacttacttctttgcttgtatcaagaagagaagggaggagaataaaatagcaagttacatggatatccaggggaacattgttgatagctatcctgaggtggtaaagcactatattgatcactttaagagctacatgggcagcaccaatgatgttggcaatcagcttaaaagtagagtgttggatgttgggaatcggttaactctctcacagcaattgaagttttcatcctttcaccaacaaagagatcaagaaggcaatgttcagcattccgagttcgaaaagtctgggtccggatggttataactctgagttttttaatgtgctttggtctgaaattggagctgaggtgcgtaatgctatcaaggatttctttaatactggtatgattcctgatcaactgaatgaaactatcattactcttgctcctaaggttaaaaatccgaagagagccattgattacagaccaatcgcttgttgctccacagtttacaagtgtatcaccaagttgatttgtaaaaggcttgctgaagttcttccttggttggttcatcaaaatcagggagattttatcaagaatagatctattgctcacaatattttgatattccaagatctgataaagaattatgggaggaagattgtctctcctagatgtgcaatcaagatagacttgagtaatgcctatgacactgtaaactggggctttgttgaagacttacttgttggattaaactttccagctaagttttttatgtggattatgaagtgtttgagaggcacctcttatactatcataatgaatggaaggttccaaggtaacttcagggggaaaaaggggctgcgacaagcggatctgatgtcacctctcttgtttgtgctcatcatgaagtatctctcaagaagattgatgttggaatcctctaaaaaaatatttaagtttcatctgatgtgcaaaagtctaaagttgattagtctttgttttgcggatgatcttattctcttcagcaaggggaatcctgaggcagtccaccatctcaaagtttctttggaaagtttctcggaggtcacaggattgatcccaaataaggaaaaatctttagtttattttgggggagtttcttctggtgataaagctgagatgttggaagatttacaagtcagagagggatcctttcctctcaagtatctaggagtgcctcttagaccaactaaatggaagagagaaaattgtgacactatcctgaagaagattaaattgcgactgaacacctaggcaacgagacatctctcctatgctggctgaattcaactaattcattcggtgcttttggggcttcacaattattggatgagcatttttatactggctcaaagtgtgatcacggaaatagaaaggctctatcggggtttcctttggggatccaaggatgggaaaagcaagatccagttggcttcttgggaaaaggtatgtcttcctaaaccttttggtggtcttggctttaaaaatggagctaattggaatagatatattatggggaagtttgtttgggctctcatgaataagatggaccttctttgggttaaatggctaaataatatatatatatatatatatatatgaagggtgctgatttttgggagtatgaattgaagggggatgttagttggtattggaagaaaattttccttctaaggaagagatttagcaagcacaatgtgatagctgctgttacaaatgggaagtttagagcttctcggctttataatggtctcttacagcagaatattgattgttatgataaggctgtttggtgtaatttattgctgcccaagcatagattcatcctttggcaggtggttcatggtcatctcctcacaagagacaacttttccaagtttcacattgagttagagactaaaggttgtcatgtttgcaactttgaagaggagagtcatagtcatttgtttttcagttgcagatactcaagaactgttgtgcagcgaatctttgactggtgtgggtatttgtcgtggccattggacttcaatggctggttatgttggctgtctagtaaaaatcctggtataatcattcttgtaattgcttcacagtttatatgatttggaagaatagaaaccactgtgtctataatgatagttgttatattgtgttgaaatcagtaaaggaaattaaagatatagttcatgacagggtgtataacatgaaggataggaaacttgtgcttgctgaaaaaggcttgtttttgcgccttcttcagtagcggtttgttttggctgctgttggccggctgtagtggttttttgggttgttttgggttttttttttgtagccttggtgtaattggttggttttgattaatgaattcttctctttagtcaaaaaaaaaaaattaaaatatgttttgaaaattattctaatttaagttgttctgaaataaaaatttctaacttaaatataattttccatctaattaaatttcttgaaaaatatctaatatttaagtgtcgtgaataattctatttaattaaatatattaaaattagaaacaaataattaagtatcttgaataaaatcaacttaattattaattctaatttaatatataagaaaaatattctaatttaagatgacctaaattaattaaaattaattttcaacttaaacatattttcctaattaattaaatattggaaaatataatttagtaactagaaataactatctagaatatattaaattaagtgtatttttctaaattaattttaaaataagctaataaaaaattagtttcatctatttcaaaattaattatgttgataagttaattttaattaggctaaactaatataattagcctaatacaattatttaaataa

SEQ ID NO: 32822 - DNA, 3245 bp, Cannabis sativa
aaataataagaggtaaagttatgatattcatatttaatacactattattgcataaaagaataacagctaaacatttatcctgatagcccgaaatggaagttgtgattattttaattcttaaaattggtttgcctaatgtagtttccttttgttaaagaaacttttaccgtgtttaagtttctaaagtctactcttatataaaaactttatattttggatttaggtgctgataattgtgtttgccgaacatctaatttgcgctctatctatacatataatgttgttgttaggtagggatggggatgtggcaagttaccatgttaagaacctaattttcttatttctaatattatggactttttttttggactccttcttttatttatttttctcctctattaattataatatagccttaaaaaattttaagatttttgtcttcctattgtattcaatttaatgagtgatcattcttgaaacattatttttttcttttgaaaatcggtttcatgcaaaacagctaaaggataccaccaaatttttataatatgaaatagtaatgggtaaagttaacattgaatcacatctaatacaccattattgcattaaaaaaataacaactaagtaattcattcaataataccatagtaatacctcattattgtatattttttttatctctttgattagtcattaagattactaaaaaatatacaatagctatctatactatacaaataatagttgtagaaagttaaaaaataaaggcaaataaaaaaaaatatggacttgatgaataaatccccaactaacccatgaacaactactataatcttgtttttttttttttttttcttttcatgagagtattctgccaaagctggattttcaaaagaaaaaaaaaatactattttagagattaaacccaaaacccattttagagaacaaagccaaaagagatttaatacaatcaaattttctacttctgaaaataaaactcggactcattctaaaccaatacaattaaaatctaatgaatcactaatgaaataaatatatgtaaatgtaatgaaatgtcaatacaaattttatagagaaatcttttatatcaatgaaaatttcaataaaacatatcacatacatcataaataattagctaaacacaaacaaataaattagacagatagatagaaatcaaaattaattaaatcacaaacagaaatcagacaatcaaaatcgaaaaaattaaatcacaaatagaaatcaaaattaaattacaaatagaaatcagacaataagaaacacacatttcaccaaatgaagaataaaaatggaaaaaacaaaaggggaaagagataattttctcactattttctgttgggtgtttgatctggtcaactgggttttcctgttttcctcctgcgaaagattgtcttcttcttcttcttcttcttggtcttaggttgccaaacgtcttcttcttcttggtctttggttgccaaaggtaataaggaaaagatctttacctgaagaaattgacctgaagccttagatcatagagaagagggaatagagaagagagaatcataggaaagaggaagtagagaaaacgaagagaagagaagagaaggatggggcaggagaaaggttaggagagatgaaaaaaatacggattaggttttttatggactttttttttggctcttttttttatttatttttctcctctattaattataatgtagccttaaaaaatttttaagattttttgtcttcctattgtattcaatgtaatgagtgataattcttgaaacattatttgtttcttttgaaaatcattttcatgcaaaaccgctaaaggataccactaaatttttattatatgaaagagtaatgggtaaagttaacattgaatcacatctaatattgcattagaaaaaaaataacagctaagtaattcattaaaaaatatcatagtaatacctcattattatatatattttttttatctctttgattagtccttaagattactaaaaaaatatacaatagctatctatactatacacataatagttgtagaaagtaaaaaatgaaggcaaataaaaaagagcatatagacttgatgaataaatcaccaactgacccatgaacaatcactataatcttgtttttttttcatgagagcatcctgccaaagctgcattttcaaaagtacgaaatactattttagagattaaacccaaaacccatttcagagaacaaagcaaaaacaaatttaatacaatcagattttccacttctgaaaataaaactcggactcattctaaagtaacacaattaaaatctaacgaatcactaatgaaatgtcaatactaattttacagagaaatattttatatcaataaaaatttcaataaaatatatcacataaattatagataattggctaaacacaaataaattagacaaatagaaatcaaaattaattaaatcacaaatagaaatcagacaatcaaaatcaaaaaaattaaatcacaaatagaaatcacaaataaaaattagacaataagaaacacacatttcaccaaatgaagaataaaaaatggaaaaaacaaaaggggaaagagattacaattttctcactattttctgttgggtgtttgatatggtcaactgggtttccctcctgcgaaagattgtcctcttgttcttcttcttggtcttaggttgccaaacgtattcttcttcattttggtcataggttgccaaacgtcttcttcttcttggtctttggttgccaaaggtaatagggaaaatatctttacctgaagaaattaacttgaagccttagatcatatagaagagggaatagagaagagagaatcaatggaaagaggaagcaaagaaaatgaagagaagagaagagaaggatagggtggaagaaaggttaggagagactaaaaaaatgcagattaggttttttgattaaattagttttttttttttaaaaacaaatattaaagcacaaataatatagttttagctagaaattagaaaaaattaagaaaattaggttcttaacatggtaacttgtcacatcaccatccctaacaacatcattatatataaaaaatatttacttagagctaaatataaatatatatcttaaactgttataaaataatataaaatagatgagaagaaagaagaagaagatacagagagaaagagaaagtgaatga

SEQ ID NO: 32823 - DNA, 2254 bp, Cannabis sativa
gaaaactccctatattcatatggtcagatttaatcacaaataaaacattaagcaaatcaactcataaaatcatacaaataatctagatattgttgtcctaaatcaatttgcatacataacaattagagcatattaaaaactcaccttctagaattttgattcgatttcataaataacaagtatagatgattggtaaataattacataattaaaacagattgcagggttggccataggcataggcaggcaaggcccgcgcctagggcccacttattttaggggcctaaataaaaaatatatattttaaaaaacatatattttttaataattttaaaaaaatactatttatctttatagtaaggacacaattttttttttttgcctatgatccatttcaactcagggttagtcctaacagattgtatgaaattgaattaagagaagaagaagaaattaaacaattacattaattttaaaaataaattcaagtggttcacataataatccttaaaagaaaattagctactagaagtcattctaaaacaataaaaatttaattaaaaacataaaagatagagatggagaagatagaacactgtttggagtcctccaatggtgtcttctgctccttgctctccttccacactcattattgttctcaatttttgaatgttcaaagctttgccttcagcgctcatttatagcacaaaattctaagtttcctaaaaacaccaaggccacagccttataaacgatttcccaaaataaattctttactgatttctttttctccaatttctattttttccagcgaacaagggtaaggttgtgaccttacttgccaagtcgcggccttgcatgccaagattctcttttatttgattttccacttctacttggaaagtttcatatttgactcttgaccacaaaattatgagttgaaagtgccatctttgacccatttaggcaataggaaatcaatccaagcaataaaagtttccttttttcattatattttctcaattttactcaaaaaagcttgcagaacaccaaaattatcaagattgaagatcttcaaacatttttcctaaaaaataaataaaaacaaaaaccaaacataaatctacacaataaaataataaaaatactaaaacacaccctaaattagactataaaaatacataaaaataaacctaacagccccgtccgaccataaggcattccattcaaaatggacctacaacaatcccacttaacgaggaaagaaagaccttcgacacaaaaaaagaagagatacaaagaaagaggatctccctgtctgaagcccctctaaggagtaatgcacccatgtacttttcccattcaacatgattgagtattccacagtagagatacactcaatgatcttgtcaatccatatagaatggagtcctaatttattcatgatgcgagatagaaactcccattctattctattgtaagctttagacatgccaaacttaataacacaaaacccagctttgcccttctttatctttaaagcatttatgcattcaaagccaatgagagcattattaatgattaggcatcccaaaagaaaaaattttgttcttcagaaatgatcatccccaaaacctcccaatctattagtcatgactttggtgataattttgtaaagcacattgcataaactaataggcatgaaattagaaggcttagaaggagcatcaatttttgggattaaacaaatgagggtacggttaataccttggagacaagtgtcaccattcaaaaaatccaacgccgaactagttacatcgacaccaataatctcctaattttttttatagaaacccgcacgcataccatcttcatcagggctcttagagggatccatttggaaaagggcatgtttcacatcttcagcaaaaaacgactgcatgagtttagaattcatagtgcttgtaactctggtgttgattgaagcaatcacacaagcatagtcttcctcagaaggccggttagaagtgaaaatttgagaaaaataagactcagaaatagcagcaatatcatcattttcatgcatcatgatcctattattgtcaaggatagaagagatactattcttagtagggcaaagcatcggtcgatttggtcggttttttttatatataaatctaaaattcagttttcagtctagattggtgcaatctgaaaaccgaccgaccaatccaaaacctatcttaaaactgac

SEQ ID NO: 32824 - DNA, 961 bp, Cannabis sativa
tttcaaaatagaatagtcattctgttatattattttataatataataagtatagattaaaatgtgtgaaatatattattatctaaataatgtatattaagtgtatgataaatgaatgtgtaacttatgattttaacttacatttttgtaacctacatgttgtaacttgaagaggagttacaatttattgtcactggtaactcttgtgttaatcatacattattagtgtaataaaagagttgttacacaattttatttaagggattcaaatttatgaaatatgattgttacaaattatattaacaggtgttatgtgttttgaatattcaatcaaagattaagaaaaactcgaagtaaaatttctcaccttgtcataggtccatgagaagtctcaaaccatcatgcgcaagacgtgaattccttccctctgataaaattatatgtttcatgtattattttcatgtctatgtgaaatatgtgaaagatggtaggtttgtctcaaaagttaatttgccttgaagttgcaaagatttggttcaacttttaagagttttgggtcatgttatttgctcatttattaagaactatgctctcttatttaatttcatatcgttggaagatgagctacttcatttattatatatggttggtagttgagattttctttctataaatatggagctcttagaagagcattaacaatttaaaataggtatctcaatgaaaagtaacaattcgagtacaactttgtacaatcaagtttattggaaaatttaagagagaacatctgtatagccaaacttggaaaacacttgagagatattattagtagaaaacaatcaaacatgtatctgtattatatttcttgctcagattaataatatcagttgcctctcatgaagtaggcgaattatcgagccatgtaatttcgtgtattttattgtttactactttgatatata

SEQ ID NO: 32825 - DNA, 2094 bp, Cannabis sativa
tctttgttgatcaaatctaatgaaccattaattcaatccgtaagtcgaggtacttaattaataatgtgtatatacttttaagtctcaacaaacatatactatacgtaatagctatattacaaaaaatagttacttttagagacacttttttagttataatataattttttatgattaaaatatattatttagacacaagttgtcactattttaattttagtcacgataagtattgtaactaaatatatatttagtcacaataatttgtgatttttgctattaatatctttaatcacgaattttttaatcacaatattagaataatgatttattattagtcacaattattttatttttagtcataaatttcattgtgactaaaagtaaaatattttaatctgctagctgatatgctgatatgttttcatcatgatgtatatggtatatatatatatatatatacatatatattaaacgagataatattatggtaattgactcctttttagtttgaagataataccacaactttgactactctactcctctaatttgctatagctaataagtaagtaagacacatagcactttgaaaatgaaatattgatatgaaatgtgtctaatttctcatcaatcaatattttcttttcttttgttgcggtggccaagatcgacctaattaccccatgtgtgtatacatatatagtgacaaaattatatataaatataaaataatatacctatatatagtactgcaatgcatggtctagctaatattatttattattctctttacgaaatgtgtataagctatagggttcaaactcagcccatatagataatcagtcttcatctaattcatttgatcaatcataaatgagagatcaatgcctcaaaataggtgaccatatatatatataaattgaaataatggaaccatgcattgagcctaattgttattccttgtgtcattattttaccatacataaattgaaatatttttttcttaaggaaaataaattagtcagtgtcatggaaagacaaaaactatacattgattaagggggagttgttaaaaaaataattaccaatcataatatgtagcgttttctaattggcaaacgaaagaaaaaaaatatattgagacatgtgaccttagtaattattgatgtttgaaagttgcttttttggttattccacaataaaataaataaattaataaaaattattcttatgctaacaatttagtccctgaaaccaaaaaaaaatcttcccgcatttcaaataaattattagaaatcgaattatataaatcaaaagaaatatatttctttattttttctcattagtcaatgccaaacttaaatgtaaataaaatgaatataaattaagttttgtcaaattagagacctggcgctgatatcatgagaattatggaatttcatttcaaaattaattagcaatgagtggagtactccatgttcttatatatggctcaatacttttacatttaatctatatggtacaattactctaaattcgattcgggcttttaatactataaataataatcatcaggcattctataatttaaaaatcaatacagaatagtaaattatattctccatataatgatcattaatataaataaaaggtactttgttaattatgagaatatactcatgaatttgtacacaatcttttgatcaaattttaacatgagcactactttacattgatttttttaaaataaataaataaaagaaattacaaagtatgatttcgaacctattaagaaactcaggtgagatttggatgtgtggcttctggtcatatttcgactgttagtccaattggtcggtccttggaggcaccgtagtcagctgagtcacctccaactgaagggatgtggttcaaacttaatattgataatgggttgcgaccttctaactgttgtatgggtttaaagcgatatcattaaagacttaataatttacaggatattgtgtggcgtctacagcgaccctaacgatgggtcttttagttccgtttgtcgttgaaactatggtcatatatactgcttgggttgtaatt

SEQ ID NO: 32826 - DNA, 1279 bp, Cannabis sativa
acatggggctcgtcaatactagggtcgccaaccccaagcccagtctcaccaacatagacacaagcttggcaatgccaagtccatgtatttttgaaatttcttttcaaatttttggtcaattatataaatttttcgagaaagcaggattatggtctctaattttagttactttaacattaatgatcttttgtactctttaatattttttaaatcatttatgtataaatttgaatagttcaataattttttgaaataataaataaagtatcaatgacatgaactaatctatctcaaaaaaaatgacatggactaatttgtcacatgtgcgtcatgtggctattaacctatagctaccaataaattgtaacgttaagcaaaaaataaaataaataagtactgtaaatttataaatttaaatatttttactgcaaattattaaaaaagaaaaaaaataagcgtttgagtaattttttttttccttaactgcgtctgaatatatcgattattatgagtgccccttcccttgtcccaaaagacatctcttatttcctaaaaaaaaaattaaaaaaaaataagagagagacttcctaggaccacaacgttgcatatatcaaaagacaattttaaccctcccatcccatgattattaattatactgacaaaataaagaaacaagttgtgttgtgacaacatttaatagaattgttgtttaattaattaattacatctctctaaccagtacaaattcgatctaaatgttattataaaaagataaataacgacatataataacatcaattgatttcatgcagtcataagtaataacgtaagatatatactaagatatatattatattaacaaccgggagaagtagatcttattgtaaggttgctataattagttttgtttattgacaaaattactttaataatcaaatcataatcctaatcatgtttttgtggagatggagacgtatgaccaataattttggacggataagttgattgtggttaagattggggaagagtcgtcaatacaaatatatcaaaaataatacatatatgtacaataatagaatatatatatatatgttagttatcgccaagtttttttattattgtaacaatattacaccatcttatgcaattaattattttagttcacatgtacgcaataatgagaattatagggttccatcttaaaattaattggtaataatgagtagagtagctcatgttttatatatggctcaaatctccaccatttattctatgtggg

SEQ ID NO: 32827 - DNA, 2573 bp, Cannabis sativa
  modified_base (2525)..(2532): a, c, t, g, unknown or other
atttgactacctagtcaaatattcctccaaaccaataattcacgaggatattcagccaacaggatgggaatgcgaagatgatgagcacaagctgttactcccatgctataaaccaaagaagtccaaaccaaatctcttcatgctaaaaggtatcaacgacaaattcccacttccatgcagctttatggatgaaactggaaaaatcactcaccagccaaaagttcttaacccaaacattcgagaagctgatggtaccttaaagaaaataaccccaactaaagcagtccttaactggcaaatggagagtatgctggcccaaaacaagaccctccaatagatagacgagaaactatctacgactacccacaaagttattcagatcaatgaagtattttcaaaagttgacaccgttatgatcagacttgtctacaaaatttcccaagtacacgaggaactactacagattgtcaaatctaagcaagttccccaagagatttttcttgcaaaggaagcagagctaaagggtctaaacacctagtatgtctccatgcaaactcaatctaaggacagactacctcttactgcaggcctagactccacatcgtggttgttctcaacattaccaaaatcagctcaaccgttagcatctcccccaaaaatgggagaccaaattcttcgtctaaaacgaatcctagatgaagaagacgaacttaaaagaaaaaaagaaacaaaaaaattaaggctaatgcagtactcaactcatggttgggaaaaggaacgacatcaccgacatcatccatcaacactgtctgaataatcttccacagaaaaacctcaaacaagcattcttggcgtctattctagaaccactcagagaagaaacattcagacttctttctgcaaacaacaggatgctgcaaaacacaacttttggagaattattccaaatggtgatgagagccttagacaagatgtgctctcaaaataagttcttgcaagagtacatgaagcaaaaaaaataactcgatggagcatgcaacaaaaagggtctaacaataaaatgttctaccaaagacacatgctcatgctgaaagcagaaaggtgaaaagaagaaaagcttcaagtacatatcctcaaagagcaaaaccccttggaaattccttcaaaaaaagaaaaatccaggaaaatcatcaaagaggtgtttcttatgtggaaaaaagggccactttgcaaaacaatgtccgaaaggcaaaactgccaaaatgataacacacatagaagacgccactggggtgtctctctatgataatgatgtagagtctgtcttctccgtcgaagatgaaatctccccaaatgctatgtgtgcattacaactgtgttatgattccaacgatgacagatttggaggactcttcaacatgcatccgttccccgctggccaacctatcccaattgcaaaaatgcatgtcatcccaagaaaatactcacggccaataaaagtagctgcattttttgatacgggagcatcatacacaatcataaattcggacattctacccccgaactatggaagaaaaagaagcaatacttccatgtcgcaaataatcaagtcctccacacagaactaattagcaagccgataaagctgcaattcttccccggatgttccgttgtccatagggtgattggatcaaaacttccaagaaaggacctcataatgggattcgacctttacacaaaaaagaaaggactttgaatactcccacaaggattggcctacaagaatttcttcatccaatgggagcaaattctgaattattttcacctggcaccagatgtattctcaccaatcaaagaaaggctaattcaaaaatcatgtgcaaactctcactcagaattctcaacgaaatgcaatcacccattatcaaaaaattaagaattctacatctccctcccattcaaacaaaatgaagatgtcaatttgacaaaagcacgccaccccagaatgaatccagaacatcagaaaatggcaagcgaagaatgctagcaattgaaatcatcacaaggaggactgatcgaggacactaactactcgccatgggcatgccatgccttttacgtcaacaaaagggcagagcaaattgaggaaaacaaaggctggtaatcaattatcaaccattgaaccattttttggcagatgataaatttcctctcccaaatagaaattcccttttctctagcatctctaaagcaaagatattttccaaatttgacctaaaggcaggattttggaaactaggcatcaaaaaagaagctagacccaagacgacattttacatcccaaatcatcattttcaatagacagtaatgccctttggtctcaaaactgcgccatcccaatgactaagatctacagtccaatcataaaccaagccctaatctacatcgatgatatactattgttctcactcgatgacaaggcccatacaatcctactggcccaatttgttgggttttatgccctnnnnnnnnctccatttcaatgtaatctttattctttaaatatcaataaa

SEQ ID NO: 32828 - DNA, 9708 bp, Cannabis sativa
  modified_base (503)..(526): a, c, t, g, unknown or other
  modified_base (1238)..(1238): a, c, t, g, unknown or other
tcatggaaagctttctcctcagaattccatgcacagttctcttcttctcgccaactccgattgcatttagaagacctggtcgaagtgaagaaaagatcaggagtacgaaagtagcaaggttaactgaagaggggaggttggccgccatactgggcgacattgaagtgcttggagaattatggaaagacattaataaaagtggcccagtaggatctatggctgaatttttataccgagcagataaattttatcaagctcgaagaagccattcaatgggcagatgtcgaacctaggccgggccaaccacaggtcccctttgcaggaacacctgctcaaagcccgcaatatcctagtggctcgacttcgagcggcaaaagatccaataacaatggcaggcaaggcaacgagaagaagggaaattttgcaggcgaagccgaacaaacccctagagaaaaggcctccaaattcactgccttctctgtcctaactgacgacctagagannnnnnnnnnnnnnnnnnnnnnnntggtctcgtacaaaaaacctgctcccatgaaaaaggacataagcaagagggacatgtctaaatttttttcgttttcttggagactatggccatgacacaaatgagtgcaataacttgaagcgggaaattgtattcctgataagaaaaaataactcgcacgtgcaaaaatacgtcaaggccgatcagaatcaacgggtcgcccaagtagataataatcaagacttactaatgcctcaaccagtggacgggcatttacaagtcattattgggggcccgcacattgctagaaatttgagcaaagctcgggagaggtatgcctgaactttacagcacgaacaaaaggaagtagttttggccgtaaaagaaaggaagccaaaaatgccacgggtaggggaacccactataaccctcactgaagaagatgttatccacgtttgcttcctgcacaacgatcccttggtcgttgaagtacaaatagcaaataaaacagtggcccagaccatgatagacaatggagcttctgtaaatatcctgttcaaaacaccacatgaaaacatgggactccaactcaaagatctgatcccctgtgcccaaccggtgtatagtttctccggccagagtgttgcacctttgcggaaaatttgcctacccctcactgttggataagctctgaggagcataactgtgatggcacaatttttgataattgatnttccatcagcttttaatgttatgttaggccaaccaccctaatatgacctgaaggttgtcacatcaattttccattcgtgcatcaagttcccaacaaagaatggggtagggtgcctaaaaggaaatcaacaagttgcacgggaatgttataaccttgcccttaccaaggccgaaaaggaagattcatctggccagagttcagatagggggaaaagcattgccaaatagggagccgcccaaggcggggatgaggatgtggatccccgacttggggaaccaaatacaaatgttgggatagtggaagaattggaagagatagaaatcgacccaaacgtcctgaccaagaaactcaaaattggcaaaggtttgctgcttgaagtaaaattagcattgataaaatttctaagagcaaacctagacatttttgcttggtcacatgaagacatggtcgatattgatccttctataatatcccacgccctaaatattgatccgaacttccgtccagttcagcaaaaaagaagattattagacaaggagtaggcacaagcattgaaagaagaggtagaaaagctacataataacaacttcatcattgaagctttctatttggcctaggtagctaatcccgtactggtacccaagcccaaaaaaaaatggcgagtgtgtattgatctcaccgacctcaacaaggcgtgccccaaagactgttttccacttccaagaatagataagcttgtggatgcaacatccgggcatgagatcctaagctttatggatgcctattcggggtataatcaaatcaaaatgcatccaccagacgaagaacatacaagtttccgaacagatatgggtctgtactgttataaggtcatgccatttggtctaaagaacgctggagctacctaccagagaatggtaaacaaaatgtgcaaagatcagatcggaagaaatatggaagtatacgtggatgacatgctcgtcaaatacaggaaggctggggggcatatagatgacctggacgaatgcttcaaagtcctcaaaaaatacaacatgaaactcaatcccttaaaagtgctcctttggagtcagctcgggtaagtttcttggttttattgtcaatgcccaaggtatcaaagtcaatctagagaaaattcaagcccttctagataggagatcgccaacaaaaactaaagaagtccaaagcttaactggtcggatagccgcactcagtagatttgtttcaaaatcaatagacaagtgtgttcctttcttcaatatccttcgaggaaataagaaatttgaatggacagagaaatgcaagaatgaatttcaagaactaaaaagacaacttgcaaaccctcctgtactctcaaaacctctagacggaaaagaattaggaatatacctagttgttacagaacatgttatgagtatcgtgctgatcagggcagaaaataacatccagcatccagtctattacatcagcagaagacttgttgaagctaaaggatgatatccgctgatagaaaagcttacttactgactaatcttagcaacaaggaagttaaggccctatttttcaggctcatcctgttcgtgtatacactgaccaaccactacgccaaatattacaaaaacccgatgcttttggatggttactcaaatgggcaggggaattgggtcaatacgaaataatctttcaaccccgaatagtagtcaaaggataggctttagcggactttgtagttgagtgcacaggcaaagtagaaagcatttcaaaaggcaacccagagcaaatacaagagcctcagtcgaacaacaatgaagacaaacctacttggaaactacacgtggatgggtcggttacagatcaactgcctagtgcagggatttcccttatcacacctgggggcaacacctacacggggcggtcaaatttgggttcagagcttccaataatgaagctgaatacgaagccctcattgtcggtctaaaacttgctcgggagctgcatgctgaacacatcaaaatttgtagtgactcacagctagtaataaatcatgtgtctggagagtacgaggcctgggggaaaaatgatagcctatttgagcaaaatacatgatctgcttgcacaattcaagaactacattctcaagcaaattccaagagaagaaaatacaactgctgatgccttagcccgacttgcaagcagcaacatatctgataaggctaatataatcccaattcaattccttgaagaaccaatcatctcctgtgtaaaagaaattgaaatgattaacgcagctccaaactggatgacaccaatagcagcctacctcaatactagggaacttccaaatgacagaaatgaagctagaaagatgaggagaaaggttgcacggtatatcatcatagaaggagtcatgtatagaagggggttctctatgccactacttagatgtgttacacaagaagaagctgcacgacttctatctgaagtacatgatggattctgcggcaaccacgcagccgggcaaagcctatcaaagaaaatactaaggcaaggatatttctggccgaccatgattaaagattcaaaagcctatgttaagaaatgtgataaatgccaaagattttcaaagataccccgtgcaccgcccaacgaactaactcagatgcaaagtccttggccttttgctaattggggaattaacctagtcgaacaattgcctaaaggtaaaaggggagtatcgtatgagtggttgtagtggattatttcactaaatggactgaaaccgagcgattaacaacaattacatctaagaaagtgttagactttgtggtgaaaaacataatatgcaagttcgggctcccatacaagatagtctcaaacaatggcacacagtttgacaggcaattgttcaccaatttctgtgcgaaccatggaatcataaaaagtttctctgcagtggcacaccctcaagaaaatggtcaagtcgaagtagtcaataagacacttaaagatactttgaaaaaacgacttgaagatgctaaggggaactggccggaagaactaccagaagtattatggtcataccgcacaactgaaaaaatagcaactagacatactccattcgctatggcctatggttatgaagttatgctacctgtagaattagaacctccgtcccacagaagattgacctatgatcaagaagataaccatgccctcctagcggaatcacttgacgaaattgaagaaaaacgagctgcagcaaacctaaagttggtggcccatcaacaaaaggtggctcggtacttcaataagcaagtaaaggcacgaaagttctttgtgggagatatggtcctcagaagagtgtttctgaacaccaaaaacagcatgacaggtgtgctcggaccaaattgggaaggaccatatcaagtggttgaagttctagagtcatgagcatacaaattagggcgatatgatgaaaatatgaaactcgttctagttccaaggtattggaatgaggaacatttaagaaaatactaccagtaaaagtaccaggtcggatgaccactctaagtacaaaatcaaagaacatttactcttaaataaatggccttctaggtagaccccgcccaaaggttcgggtgaaatgactaagtactcaggtcggatgaccacctctgaaagtataatttcttttaaatgcaatttgttttgtttaaattcaactaaagattggattagatcaacataatagcttttatgtaagttactacggtaataaaaaaatttcgaccagtgaatgaataaagatgtctatttaaattctgattgtgtcaattctattagcaagttataaatttaccattaaatgcgtacaaagatctgctcgaattcaaagaaccgaacagaaaaaaaccatacttgtgaaatgcaagtgaccaagagtcaaaagtccgctcagtcacttaaggggcaactatacccgtacaaagcattggtaaaagtaaataacaagctaaaaaaacaaaacaaacataattgcacagacaattatcaaaacaaggagttgtattcattaaaaaaagataacaaagcacggtaaattcgggattaaaggctgcccagtcatccagttgtcttaaaaatgaaaaagataatccaagtttaaaaaccgcttggttggtcattttgtctcaaaaaaaggcctatgggctgaacaaacatatatataaaaaagaaaaatatttagacggtaggactcccaggctcttggtacgaatcgttttggtctgagggggcaggaggttcaacactctgactagtagggatttcgttgctctggttggttggagatgtggaggtagttgccttggggttctctttagccgtctgagccgcgcagaaatcaagatacatgctcttggattcaccaaggtaatcaaagtttccttcagggttggccttccaatattcgtagaaaacctcaagagcatctgtcttcaaggtctccacttccttctcgagctcctcctcccgagtctgcttattcttgacatcttccccagtttggaaagaagagtctggagactctccctctcgtctttaagatcattgacctccttagacaaagagacattatcggcctcaagctgctcgcttgagggcatatcttgtagttctttggtcagctcctcaatattggtgttagcagcaagaagcttcttgttcacctcctcaagctcattcctcacttccccgagttggctccttacgtcctgagtttccattctggccacatccacctccctctgcagtgtgttgggggtggcaaggttcttggcagcaactgatttggctcaggaataagcataagccatcttcacattgacctgtatggaaaaatgttagagtccgagctacataaatgggaatgagataaaaaaaaggagatatttacccgagtagcttccttcaaaactgctcctaggactagctccaaagatagctcattgtccgccctagacagttggtcactcacctcaggaagtgatcagttcaagtaatactggagcatatctttacctctcttggcctccgtgctcagcgctacggccgttgaaggggtcctagcttgatcagacccgtccaagctcccccctttggaactctttgacttcaaggccttctgagctagaaggtccacagtaggtcgctcctcagaaaggtcaatgacctcatcaactggcgccttctccttagacagaatctcatcgcctttagacttcttggtcggaggagacaggctcaaactatctcccactctcttctttaaggcctggagcatcttttgagatatttctgcacggataaaacgatgcagttagaagcagatataatatatgtgaaagcataatataagagaagtaagtgaaagttaaaataccctgcacatgagtaggtgcattttcccgaacaagtacagatgggacatcatcgtcaaaagagtctccctgctccaccaggacgaattttccttttccctctacaggggtagatggccgagcaggcatattaggttccctaatcctgatagcatgttccactggtgcttggtcggtcggaggagctttcttcttcttcttgcttggcttctcctgctgtgaatattcttgagcatactgctcctagtgtgaatattcttgagcattggccccgccgtctcccttcaacttagccccacgcttgagttgaatgagctctttctcctactcggtaccaccaactcagttcgacttggccttctttttcttttcctttaagggattcggcacaaaatccttagggaagagcttgtacttcacatagttggcctcagtggtcaacaaagtgatgttccaagcagcagcttctgtcaattgaagaatttttgtaccctctccctgagtcccaacgtgaaaggaggacagcagtacgagggaatcttttgaaaccgagtgtggacggtatccatgccctggacgaagtagtactcgtccacaaaatgccctattttgctgacatcagagtccacagtaccctttagccatttctcagccaattgagagaagtaaaaataccccaacctactctacttaggagttgacttcaggtcgaagagccagttggtgtcgtgcggagatgactcaccccatccttgggaagcatagaggataaacagggcggataagtatttgatgccctttggtgtggactgggtcgggcagaagtgatagtaatctgcaatcctcttaaagtacggaagcaagggtagcattgcaccctgcttagtatgggcagccgaccaggcacagtatccctgtcttgggctagttgcctaatgatttagagaaaggaaaaagcattcaacacctcccaggtatccgtccttctccatagtcctcatcttagcttgggttactatagatggaggagacacccaccgagctcctaaggcaccttgccttccttgaggaacatcttcagtgtattcctcagtgacgtagtcatcaccctctaccaagacatcaccggcctcaaacactggttcccctgcctcgttgtaactgtcaaagcgcaatctttgagcaactccctcctcctcggcttcagatggactgtcaggacggaccttgccttgatcctccctctgttggacttcaacatccccttcattatcctcctcctcaacagtaggtcgggcctgttcagcgctcggcattatggcaggccgagccacgtgaggatcagttgaagcaattctctgcattgtttgtttagtgtgggccatcatcctatccctggacgacatttggttagtatgcctagcaacagttacgataaaggtggcgataggaatgccaaaggcagcggtacttggtcggcccacggggatagtatcgactaagtctggtcggatgatgtatgtccagctggacggtaagtatcgtctccaccccttcctgagttcccagatgaagcatccgtaaccttcacccgcgatctagttgggatagaaatggtgttgtacctcgggttttggggaaggcgtaccttcactactcacctcccaatcttcgaaactcaaattggacaaaccgtcacttgatgaggatggactagcggagagacgaggttggtcctcgtacagaagttggagaagatcctagtcgatacaatgttctcctccccaaaactcaccagggttcatctacaaaagataggacacaagatgagtatttggtcgggatatcgaacaaaacaaacaaagtatatcgaccaggttcgatcaaaagattaaaaaaggaaatttcgtgtgatttaggttcataacctagaatctcaaaacttcagattaagggtttatcttcactaaaccccgaatgggcaagtgacaaccgaatatcgtgaaattaaagtcagaatgccattacaatcatgttatatggtcaattacaattaaaatctcctatttcttaatctagattctctacggttttcatagaacaagttcaagactattgaattttctacaatggaaacccagaaaattagagattcaaatgttaaagatgaagaacttactcactattcgaagctttgaggttgctcagatgacgctgatcaacactttctagaaattcttcaaaggatttgagagaaaaaggtgttctttctctgaaatcaccaaataataaaatgctaaaagtggtttattatgactttttgtcctatttataagcaaattagtgaagacttgtaatcattttgaaatttaaatgcctcgatttcctcctaaaagtaaacgttaggaaaacaagtaatcaagtacttgaggaagagcaaccgccaaagcatgcaaatcgttggagtatttcgaggtatgaatcaatcaacatttatgagctgaatatcaaagagaactttttccagaatcacatcggatcaccaacaggcgcatcgaacacgtgctacctgttcaaacacgaattcaaactaagtgaagtctacgcgcgacttcgaaagtccagtgcagacttgaggggcaaatgttatcctatttttcgtactatgatgtggtagtatgaactggtgatacgtgtctgttattctttatgcttgacaggagaaatttctgaacagacttcgagtaatacatttgcacgtacaaagtctgcttgaccgagcaaagcaagggcagatgatctagacaacaaatgaagtcatttctttaagtcgtacatagagacttaactgctacaggattgatattgtgaagctcaagcacaaaagctattcctacaatcatgggatcgaatcaaagggatatggcaagctgtctcaatcccccatttcatgtattctaattatgtaatatatgttcttaccaattatagatattgtaagaaaaagggaaacc

SEQ ID NO: 32829 - DNA, 3078 bp, Cannabis sativa
aggattgctgataccacgtataaagtgttgtatgtcgtttatttttttataattttgctttctgcagtatatttctgttctttcaaattttgtgtttgatagaatagagataaattatattcaaacaattttattacagttctgcactatttaaattgtctaataatttcacttggtaattataaaaacaaaatttcaattggtatcagagaagttcactaagctcttagtgagatcttgtatttaatttctgtttaatttgtttcttatgtgaaatgtctttctttatagaatgaagtttggtatctcgtcctccgctactcaatgacacaaagtatcctactagaaagtgaggatgagaactttcattaaagcacaagatgaaaaagcatggaaataaatttttccttgatggtctcctccctcaaaggaaaatgaggatggtagtacaaaggtaaaatatgaacttttatggaatattgaagaagagaagttatctagttataacaataaagctcttcatgctatctttaatgttgttaaagaaagttttatcaaacttaattccacttgtatttatactaaagatgcatggactatccttcaaacctagtttgaaggaactgcaaatgtcaaatgatctaggttcatcatgttacaaactaagaatgactaattctgaaacactatctgaattctatgaaatgttatctgatatttttaatgaatattttacccttggtgagaaacttgatgattctgttatggtgagaaagatagtgcgagtactcgctacatgttcaatgttaaactcacggctatgaaagaagcaaaggatttcaatactatgaaagtagaagaattgatgggatctcttcgtacctttgatttgaatcaaaagattccttcaaaggagaaattgagtacatccaaggaaaaagagaagactattgcttttaaaagtactgaaaaggaagcatcaaatgatgaagatggtgataatgacatggctttgcttgcaaagaatttttcagaaatacataaagaaaattggaaataagaagtctaatgttaggactccaaaaggtatttcttcttctcttaaactttccaatctaacaggaaaaatatttagtgcaatgattgtgagtaatttggtcatatccagtaagaatgtgaaaatcctttgaagaggaatagaaaatgtatgatagcctcttagagtgataatgactccgagagtcgtgaaatgaggaaggtaatgttgctcttacttctgttataccaaattttgtatctaaagttaaacattttgtgtgtttgaataatatctccaaagatgaagaaaattaagatagtgatgaatttgaattgaatgatgaatctttaagtgaatcttacaagaagatgtatgattcgtggttgaaaatttgttttgaaaattgatccttggtaagaaaaaataaagaattgtcatttgaaatcaaataaattttagagttaaatgaaaattttgaaaaaagaaataattttaaaaaatgatgaaattagtaagttgtcaaaggatttaaatgcaattgagaaaaatataagaatgcttaatcttggttcttctgattttgaggatatatagaattcaggtcaaaggaatcatgtgagacttagagcgtcaaagtctcaaaattccaagaaaattgtttttatttttggtggagttctgcatgctggtatttttgttccaacttctcaaaaagttgttatatcaactagctttgttgtgtttacagatgagttataactagcaggtaaaacaaggttaagcttgaaaaatttattccaacctatcatttttgtggaagaaaaggttatattcgacctaagtgttttactctaaagaactttgccaaagaaatattttttgagagattcaaatattttgaaaaatcaaagagagtaaaaaaaatgttcataaaacacgggtcaagaagaataaatgctttgttgattttagtgctaaatatgatagaggaggtgcttcacgcttttggtattttgacagtagatgttcgagacatatgacaggtgataggtccattcttatggacataaaacttatgcattgtggatccataacttttgaaaagagagttgaaggtaatgttcttggaataggtactcttaactttgaagggttacctatgattaaaagggtgcttcttgtggaaaggcttaaagctaatttgcttaacataagtcaaatctgcgatcaaggttacactattaactttgataaataaaattgttttgttttgaacaaaaatggtgagaatgtgcttgaagattttagatctaatgacaattgctataccatgttgccttcaattatgtgtcaatctgttgtgaataacaatactaatgtgtggcatgctaaacatggtcatataaatttcaaaacattgaaaaaattgtcacatgtaggcattgttcgtggtttacatgaactaggtaaagaatctgatggtaagtgcaagtcttgttaacttggaaagtaattaaaaaccacacacaaaagtgtttatgatataaacacttcaaaagttttagaattgcttcatatggatcttgtggatccaattcaaattgagagtttaaatggaaaaaaggtatatctttgtctgtgaggatgatttttctagatttacctgggtagatttcttgagagaaaaatgggatatctttaatgcttttacaactctttgtttgaaattgaaagttgaaaaggattttaatattggaaagattgtgcacataagaagtgatcatggtaaagaatttgagaattctgtgtatgatgatttttgtaagtctgcaggtatttctcatgagttttttagctcccaaaactccttaacagaacggagtagttgaaaggaaaatcgcacctttcaagaaatagttagagtgatgctaaatagcaagaaacttaccaaacgattatgggctgaggcaattaacactacttgctatcattaatcgtgtttttcattgtctaggtacttcaaaaacatcttatgaaat

SEQ ID NO: 32830 - DNA, 1070 bp, Cannabis sativa
  modified_base (1023)..(1032): a, c, t, g, unknown or other
gacctacgactagttgagagttgtaatatatatataggtatttagcccgtgctttgtgtgctagactgaggccagtaattagagcttcatgttcagccccgttggtagaagctttgaaactgaccttacttgcctcgcgcaaccattgccccctaggtgtcctgagggccatgcctacactaggcaggtggtcaatgcaccttctgggaggatttgtgctactcttgctctcccttcttctttggctcttatttttctcctgaactttgagagatttggagagatatgcttttatgtttaggcatgaagctggcgagagcttggccttttatggccatgctaagttgacatgtggccttatattggctgacctcgccaggtgcttaaggctttggtgacacctatcgtcatggccagttgacatgcattgcattggaagttttggcaggagagtgaagcatgtgcacttctcccccttctcccttagacttcatggcgtaagggaatcattgaataactcttttttgccattattttggtcagagccattgttgttgcgcttgcctctaatactctcattgttggacaattaatagatatcgtctgtactagtcaacatgtcgaacagtacttagggcactatgatgccctgtgtttgtttaacattgacttaccctcttgtctggtcttgccggacagcttcttctaattttatgaagccatcagctcgctcaaagaactccttcatgttgctcattgagatccttctgatatctttctagaattcactaaataataagatgccttcgagtgtggttgtatattggccttcttctgtcacgcttttgaccttggtggctcagccacgaacctttaaatatagtctttccagggtttgtcttgtctttactttatctcgacaagatcctctagtcatgaaggtattagtcttaagatagagaactggatataaaactctagtcgatacaacatgaaaccatccaaataacaaataatcgtttnnnnnnnnnnatttcttgcaagcaaataaattaccatggctctgaggc

SEQ ID NO: 32831 - DNA, 2044 bp, Cannabis sativa
  modified_base (1961)..(1966): a, c, t, g, unknown or other
tatatttaaattaatttttttaaaaaataaaaaatttaatgacttggaccaactagatattgccacgtgataatttacttaacacttaacagcaaggtacctacaaatattctagaattacaacttaggtattattaccgtaaaaaattaaacataggtatttatttacaactgaaagttaaacttaagtatttatgccgcaaattattctaatctaaaaaaaaattcaatatttctttatacacataatttttttcttcttgctttaaatttttaaatttttgttttatttattttaattttttgttagagacataaaataataataatttattttattttgtcgttagttatttttttataaatattaaaaaataatcaatccaaaataactgattcaatttgaagttttgtgaattggattggattggatttaaattgatatgcaaatttgattggatctaaaatataaaattctcatatagtgcagatcaaatgcattataaataaaatagtaccaattcaatgggatgaacacttccaattaattaattaagtgggaaggttataccatttttttttacaaaaggacatatgtgctcttagtatatagggaaatttaacgtttgaatacatgtttgtccataacgtgatgtgatgtgcattaattatttttttctttaattttatttattcttttttgtgaacaacttaactttttctttaactttctctttcctcattttttttttatatttaaattttttttttttactatactaataattatttagtctcaaaaattacaccataatctactctttaaaataattatcttgatacatgaaaagcatatatttttttactagctgaaatcaaaggtagtattttagtttctttcagttttttttcaaaagtttcttttatatttaatttaccaacaaataaacaatattcaaattatgaattatactaaataaaattatttcatatttatgtttacttgttaaataaaataaaatagtattattgcgacctattttttaatgtaatcattatgtttgattatagtttgctctgcattaaagaaaataaaatattgttccaacaaatagaaattagtatgtttattgacatatataatggtagactatataaaataaaattaattgttattctaatatacgaaaagaaaaatgaaaatttattttaatataccaaaataaactaatagatttgttagcatatacgatgataggctatacgaaaaatgtaaataaagaataaatttgtttcaatttgccaaaataaactaataaatttatttgacatatatgagtatagacatacttgattatataatttttaatcaggtcatcgtctttttatttaaaattgataattttatcaaaagtaaccaatttgtatcttatcgaaatcataactaattggtctcaaaaaaatgtcgtatttgtaataatttaaaagttatttgtaactttattctttatttaactaatcaaaatgcatatactaatttatatttaaaaaatattggtgacttaaacatttatgatatatttttttaaaatacagtttgctaaaatagtagcttactggatgataatttattatttttaaaaataaacttgaaagttactcaaatgtattaatatatcctaaataattaattaattattaaagtacatacatataaattttagaagtaattaaaatgtatctcaaattatataatataaaagtaatatttgtttataaaaatgttacttattagtttattattaacatcgtaagtaactaaaatattacttttaaagtgtaagaaaataaaaaaaaaatcaaaatcaaaattagttttactcatagtattttttcgacacaacattatggtaattgagatagtatatagtactagtaggataatatatatatatatatannnnnntatatatatatatatatggtccatgtgcataagagcttctttttcttagaatcgttacaaaataatatgagaaaaata

SEQ ID NO: 32832 - DNA, 1302 bp, Cannabis sativa
acagcttaaaataaacccattttctgagtttgttgaatctttaatttgggattattctatttacctaaaactaaaaaataaatgaaagaagaagcatagcctatgctgttaacaaattccataaatacagcagtcataaactcaattcaataatttttttctaattctgcaaataaaaaggactgacaatattgatagaaagtaatgtaaaaattagaactttatgttaaaaaagagggtctaaacctgaagaagaccatcttcaaccacatcctccatccccattttctccaagactctccaatcaaaccaaactgaaaatttgacttgaaacaatctgataagataatataatatttattttcatataacgactaattagataaagaccataccttttcccttaaaaaaaaaaacatacttttcagttgacgtgtcaagctgcagttatacctttttgttttaatttttaaggttgattgctttattattattcttatttgtttttatttttaaggttattttatttttattgttatttgttttgatttttaaagttttttttaatgcaaaatgaaattttattaatttgttaaatcagcaaaagataagattgtaattcagcactgaaaactcgatctggaaaagaatatgacgctctgacaaagttgtacgcagttatattagtagatcgtttaatgaaaaacaaaaaacattgtttaaaatagatagaagctgtcgacagtccatcaccactcccctaagaggcgaaccatggtgatgttacttcgaatagcttggagaattgagagacaatcagactcgagttcaacattacgccattcatgatccttgatccaacttaacgcctctttaatggttaaagcttcagccatgtttggtgtcattgtatccttgtgatagactgttttgacctccaccaaatacgggtcgtgatcccttgccactaacccgaaactatatgatgaattgtggtcaaaagttattgcatcaactgagatttcgagtacattttcaataggcttaacctaaaaaaccgccattgataaccttccaccaaagaaccaaaagagggaaaaaaaaaaaaaacagagcactaaaacttaaaaattgaggctagtaaatcactcaaaaccaatagaaacttaaaagacaagacaccgtaacttacactttaagggggcgtttggaatagagtaatattaggaggggaaaggtaatcttaaatattaccctgtttgttatgagttttaaattttttaaacccattaatacttatac

SEQ ID NO: 32833 - DNA, 1609 bp, Cannabis sativa
cttaactaacgttctagatcattaatttatgttaattaattgcaatcccagggaaagagtaggccattaaaaaaattgaaatatatacccagatgggatatcaaaattcgttgatccatttaaaatttactaactttttttcttctactttgtacttttgactacagaacattcataaatgatatatatgttttttttttttttaaacttacaaaaatattagaattttaattaattttaacaaaaatactactatacgattttttttcttcaaaagtactgtatttttataaaacaacattgaaacacaaaacataacaactaaaaccaacagtgaaacaattaaaaagcaactgtaggcaacagtgaaaacttaacacagtacacagtataaaatttacacaaaatttttgaaaaaaaacacaagatttttgaaaaaaaatctgcaccacggtaaaaaaaaattgaaaatttcagtatgtggtataaataatcattttttaagatgaataatatatatatgtttaaataaataaacaataataatgagttttatatattctttttatttaataaagaataaaggacaataatagtttacatgaaaagtcttatttattataatatttatatacaataaaaaattgattcaaataattttattaatttatttattcttatattgatttgataatatttgatagtgtaaattataagtgagatataatatatatagacgataataaattttaacagtgactataagtaagatacagtaataataacgactttaaatataataataactacaaatgagatataatgatagaaacacttttaaataataatagcgattacaaataaattacagtgatgacaatcactttgaacttttttttttttaattagctaaagtacaactttttttttgaatatctaaaatataacttttacctaatttattttgtcacattcaatcaaataaataaatggtttatttgatttgttatatgggttagtttttgtaaattaacttaaaggataacaaaaattattcgaattaactagatttaatagatatttattaaaaatatctatatatataatttgaatattataataaatatcaattaaaaatatttaagtaatttatatacatctataaatgatccattttatttttgtaatacttatactaggaacaattttgtagctaattttaaatattctcaacaaaatagatattttaaaatttattatcattttaaaatttaaaatattttgtaacttcaaaaaatataaaatataattaatataattaagaaaacatctctattactgcattgaaataaatatttaacaatagtcgaatgaagaagttgcctaattttttatataaaaaaagtgaattattagttattataaacagttatacaatttttcttgttttaatttttaattaattaatgatctttatttttttgacaaaatcaatgagctctaatcaaataaagtagaaaattaattaattaattaatgatctctaataaaataaaataaaaaatagaaaaatgagagaattaaaaagaaaatttaaagtagaataaaa

SEQ ID NO: 32834 - DNA, 1186 bp, Cannabis sativa
tttattgtgactaaaaataagattttttgtagtgtgaaaaactgtagaaaaactaagagtggacgagaaatttatgtggctgtcttggatatgctctagtttacaatatttgggaggctcgtaataatgctctttatatgcctttgtgtatactgtaaaatttcttgtgtaaaattaagagagagatttgttttaagttttctcattttaaaagggagaaaacttgtatagaagatattgattggttgtacaatttgagtataacttgatagtttactcatttggttgtaaaaagttataaaagttgattgtttttaataaaattcttatttattaaaaaaatacatcgttgtatcatactttattataataatatcatacacaaatcaaataaatagagggtaaagtatttccatattcaacaatattattccatattattatatcccactatggtcctttatttatcgttagcatacaatatacaacatatacaaatcataacaataatcataatatatatatcaattcacataatttatattgtctccaaatttatacattctcagtataatatatacatccataataataaatcgtaaatcttattctcagtatcataaattgtaacttaattagtttgtcattaatttttattgctttgtttcaacactttttagtaataaatttttaaaattttattatatatttaattattaaattatttggtaattagtacaaactgcttattctgtactacacaaaaattttgcattgtaacttatacagtttcgagatgtagttgcggtttgaaaaattacaaaaattaacccatattgatgttatcataattattttttttttatttaagcgtttatatattacaacatgttttaactgagactcgaacgcaacactttctttttttatttattttatatatttttttaatttaaaacacttggacccacccaattggtcccaaactggtcttctgcctaaatgattttgctattcgtacactccaagcttaactataataattattaaaaaaaaaaagcaagaatcatacaataatatatattccattatattgcacaatttttcactcaattaatttcttataagccaagccaatacagccaaatacttaacaataaaatatattcactacaacatatatata

SEQ ID NO: 32835 - DNA, 1107 bp, Cannabis sativa
cccgctcaaaccgcaactcatcgcgagtccaaaataacactgaatccaatatacctttagtggagatgcattcatacagttgatcgtatccggtaaagatgtacggtgtacctctgcaacatgagattaaaatatgcacagaatcacgaatcatttgctacatatggtacgcaggaaaatatatccaaataaatcatagtatataaaataaagaaataggatataaacttgttaataacaaaaataataataaagtaagaaaagaaatcgcttaaaaactaacaaggcaggaaataaaatcaaaaaaagaaaaaagaggagaacttatctaaaagacggcataaataaattataatcaccaccacaagaagtcttccctcttgggccacaaatctgttctatcaccaccgctcgcaaccgaattcggagaaggtaaactatgtccactagtggcagccaccttattgagatgagaggaagggaaccggcgaagtgggcaggccagaggacccaattggagcggccacctaataacaaatgtggattttaattatttcaaaaaagaattatggattttaattaaggcgcttagtatatacatgattttcttaaaaaaaaatagaaaataataaatatgttgagagtttcatatatataggttttatgtaattctttttttaagaaatttaacggttcaaatagattgttattcaattatagtagagcattaatatttggtcagagtctcattgtaaacacttctgtatatatatatagtgaaattttatgttcttatattttttgtcaagcaaaaactaatggattcccaaaagttaacgttagctgaattgaataaaattcacaattatgttgaattttaaattaattcaatcggatttcattcttcatgcatatggtggaaaaaatttgaaaaaaaaaaaaactgattgatacaagctttagcatggaaaaaggaacagaaataacaaaaatagccaacaaatatagtttcaattaatactaatatatatttatttgtatgtgtgtaccttttgttgccccatagatagcacaatctgaaattgccatggccccagcgatagaaga

SEQ ID NO: 32836 - DNA, 1799 bp, Cannabis sativa
aaaagtgttaccaaacggcactttggtttatgataatttctttaatagatcattaattcaaatacttaaattgtaacctttcatttacttaaattggttttactaatcttgttaagttaatcgtttattcacggttatgtattatttattaagattcactataggatcttgttcataatatctactatatctgggagtcgtttgttcattcaacttgcatttagcttgatgttgtttgcaagatttttaataattttgtttttacaacaagtactatattttcattcttgctaataataagatcttaatatttaattttttttgttccgaaccaactttaaccgaatattgtatcttttgcaaaaaaaaaatatatatatatatatagttttaaaatttcaattatcttaaatttagtggatataattatgtaccctcaagtaattttaagtacattttataattacttgacacaaataaaaagactgacattctatcctaaataaatttaaaattttacatattctcataataaattagtgtatacataaatagagcattattattaggtgctagtacaattggttagtgatattccctaaaagttattaaattaaattatatgtgacttgatacttaaatggactaatgacaatatatattaacatataggagggtgttaaatactcctggtaccctttagcatttctcatataaatatacaatcattggtaatatggtctcacatgtttgctgttccaatgccatactaatttataaactccggtatattattacaacttcaataacatagggatcttcccaatttagattaatggatatacataacatataatattctaaataataatagcactttatatatataaggttaatttggcttatatgccgtcttataagtattagaccaagtctaattcaatcacgagtttagaggattgagtcatggaaaacatatacatacattatttttaaacggccggcatataatttcattatatatatataaatattgtcacactcttaaataaagaaagaacctcttctttttatgaatgaaaaacattaatagtttcgtcatgacaactaaaatgaatcaaagatgacaaaggagtgagttgaattgagttgagttcagtatatagttaatagtaacaacatacattacaaataaaactaatatttggtttaggtgagaaatgggcattaatgcaagattacttggtgatgaagacaaagtgaaaatggctataattacttcatcttcatcagctacaacaactgatcataataattctaataataatcatgatggcaagaagcatttatggggaggaattggtattggcattttgacagtgtttttagttgccttcttattctaccttttcagaaaaaagataatcccagctcttaaaaaacgccaatcacctctctacaacatcacaaaaggtacctcactcatacatacatatacataaatacatatctatatacaacaactaatttgtatttgtatatatatttatatatagaaatagtgaaagaagagaagacaatacttaggaaatttgagtttgaggaagtagtgaaagcaaccaataatttcagtagagaatgcttgttgggttctggtgcttttgggaatgtttataaaggaacttttgatgttcaagcaactctggccattaagaggccccataatcactcatgtcagactgttgaagagtttagaaatggtaattaaagccatctattttttttttttgctttttttt

SEQ ID NO: 32837 - DNA, 1754 bp, Cannabis sativa
  modified_base (309)..(315): a, c, t, g, unknown or other
  modified_base (1221)..(1224): a, c, t, g, unknown or other
ttaaaaatggcgaagtatttagagaaattttggaacaacatggaaagattcgattactttaaaatcgaacaaattcaaagagagcataactccgaccccgacgccttagcaaaattggcctcacagaatgacctggatgaattgaatctagttccggtagagatgctgagcgagccaagtatatgtgaaaccaaagacgtcgagatgatagatagctctccaacatggatgacacctattattaattatttactcgacggacaacttccaaatgacaaaaatgaggcacgaaaactattgtattcagtnnnnnnntacacaatgatcgaaggaaaactatatagaagagggtattcaatgccccgatttcgatgtgttcttcttgaagcaaatgaaatcatcagagaaatttatgaaggcttctgtggggatcatgcgggctggcaaagtctgtccaaaaagattattagataaggatattactaccgacgatcaataaggacacacacgagtttgttaagagatgtgataagggtcagaggttttcacatgtacctcgcataccgccaatagtttttagaatgatgacctcaccctacccattttctatatgggggatcgacctaattggggcattaacccctgggcgaggaggagctaagtatacggtagtagcagtcgacttcttcactaaatggacggaggccgaacccctcgtattcataacctgtaagaaagtccttgactttgtcgtcaagaacattatctattggtttggaattcccatgaagatagtatccgataatggaacccaatttgatggcgacttgttcactgaattctgcaagaggaataagattatcaaaagcttctcgtcagtatccgggcctcaggcaaaaggacaagtggaagtcgttaatagaaccctaaaggatactatcaagaagaagttagacgctaccaaaggcagatgggttgacgagctacctcaggtaatctgggcccacagaactaccgataagacagctacagggcacactcctttctcgctagcatttggctcgaaagtcatgctgcctattgaagtcaacatatcgactcatagaagagagttttataatcaagaagaaaaccaagaacttttaaaattatccctagatctacttgacgaaaaacgaactgagtcgcaaatcaccaacgcaacataccaacaccgagttnnnnatacttcaacaaaaaagtcaagaaaagactattcaatgttagagacttggtgctaaagcgagtctttgcaaatacaagagatgcatcagcaggagtgttcaacctgaattgggagggtccatatgtcatcgaagcaatagttggagggagtctataaattggctcgacttgatggctcgctaataaagaactactggaacgtagaacatttgccaccctactaccaataaataaatgatgtaacttgcattactgatgtaaactttaaactttagttatgaataaagagattcatttatattaagtaattataaagttttgttcattaaaaattacataaggggcatttatatatgattaatcggaattcatctaaaaatacattgtataatgcaaacctgtcatttcaaatttctttttaaaattgaaaggttctcgactaaacctctttgacgaaagtggagtcgaaccgttataactccctgaccaaactttttttacgagaaaggggtcgaatcgttataacacct

SEQ ID NO: 32838 - DNA, 1393 bp, Cannabis sativa
agaagattcaagccctcttaaatatgatgttgccaaaaaaagtgaaggaagtgcaaagcctaacttgtaggatagccgcactcagcagatttgtttcaaaatcaagagacaagtgtgttcttttcttcaacatcctctgaggtaataagaatttcaaatggagaaaggatgtgagaatgtttttcaagaattaaaaaagtaactttcaaaaacccatgtactctcaaaacgtttggataaagaagagttagggatatacttggaatcggtgaatatgttataagtgtcgctctgataagagaagagaacaatgttcaacatctagtttactacatcaacaaaagactagtcgaggaagaaggtcagtagcccgtgattgaaaaattaactcactatgtgatcctagccacaaggaagttaagaccctacttccaagctcatctagtttggatgtacactgactaacctttagctaagttttgtaaaagctcgatgcttctgggcggctactaaattgtgatatagagttaggttaatagttaatctgaaataacttaccaacttgacacaatagttgaagggcaagccttggtagatattgtgattgaatgcacaagaaaagaagcagacattttaaaagacaatctcaagccaaacaaggaactagaacaagcaccctcactataagaaattggaaatgacaaggatatttgtaagttgcatgtggatagattagcaaccgattagttgtcttgtgcaagaatcaacctcatcacacttaggggcaacccttgcatggagcaatcaaatttgcattcaaagccgccaacaacaatgtagaatatgttgcactcattgttgggttaaaacttgctcaggaagtacgtgcttagtatattgagatctgtagtgactcacaattggttgtaaatcatgtctcaggggaatacatggctcgtggagaaaaaatagtggcctatctcagtgagatccatgacctgcttgcataatttaagggttataccctcaagcaaattccaacaaaacaaaaggcaatagataatgaactaggatggcttgcgagcaacacagtgacagataaagccaacctagttccaattcaatttttgaaagaacccagcatcacctgaacaaaggaaatcaaaatgatagacaacacaccaaactggacgactcccataacgacctatctcaacccaagagaacttctaagaaataggaatgaagctcgaaaaatgatgagaaaggttgcatgatacataatagtacaagttgtaatgtttagaagaggtttctccataccattattaaggtgtgtaactaacgaagaagctgcactactccagtccaacgttcacaaaggattttatgg

SEQ ID NO: 32839 - DNA, 1974 bp, Cannabis sativa
gaggttttgccgccaattactcttatttttattttagtttttcaatttttttttttctctctacaaagcaatccaaccatctcttcctctactgccttactttatactctgtgaccctctctctctctctctctctaagcaacaacactccgaacctagtcccaagccttctcatttaaagacagcattcgaaaaaaaaaatacatttcttttgacaaatttaaagaaataattgtttattcttttgaagaatcatttttcttttattcttttattatttttttttaaaaaaaaaaatcaattcatttttattttcatgaactgcctaaaattaaaatgaattgttttttttttaaaaaaaaaaaatcatcaattggttattatttttcagattacaaaaaaaaacatctggaattaagatcttttgttaagaaatgatattttatagtgtattaaacgagacacatcaatttatttaaatattttttttaaaaaaaattatctacattgttaatagagtttaagaaaagtagttagttaagtagttatatttagattgatttaatatattatgagaccaatttctaacaggtgattttaattctcttttattagatactaagtgcatctctaatagtggtacttgaagaaaatgtttgatgatatggcggaacgtttggaagaagttaattatgtggaatgatgatattaaatttgaagagtgtttagtattaaagtaagagtataaaaaataatgtgaaagataaataaaataaaatattattttttaaatgatgtgaagacttttgacatttttgaaaagtaatataattggaaatgctttaaatgctaatgtgaaactagcactatagtgtatcaccttaatgattaacaatatttctaataagttattatattaaataatgtaccacataatatttaattgtatttgtatcactggaaatgtgataccttaagtaatactaggcatcactattgcattgacaccttaaataattctaggcatcactattatttttttttagtgtttgagaggtcaccactcaccaagaagagctgcactggtttgttgattgttcaacaaaaaaacttaagagcattgacacatgtaacttacgtagtgaatttttttacgtagtgaacagaatcactcataaattaacgatgtaggaatttacaattggcagtggaactactcaaactaggatggctcatcgtctaaccgaaggacatgttttgccaaactatgaactggagaattcttattgtaagccacatgggacgaaattgcccataaaaatttagacaataaagttataacattctcaaacaacaaccctaactcattaaaaaaatattcttcctttgttgatagttgtctccagagaaagtgaatatgaataaacctctttaattgggactccgcggaaatgagcccaattgagtcctaccaaaagagccaaaattttgggttgtaatactgaaatactacctgaaaaacaaaaaaaacaataccaaaaaacaacaagtattagaaaaggcaatctttgaactaaaattaataggctaaaatcatatttaaacacataactaaattaaactaaaactcaattacattaaaaaaaaatctagccaaaagtgttatcctttggctagtaataactaagaactcaaaacaaagcacaaaactcaatgaagaaaaaacttcattgagtattcgggaaacagagataaacagacgcctatttgtgcttgcctcgacttcccagaagggaaaggtgaaatacctctcccgaacttggaggggtctgacagggaagctctcttagtttatattttaatagaaattcatgttagataaattaataataaacccaagatcaatttgtatataatatagaacacaataatagtatataataattaggtatatgcgtacctgattgatccata

SEQ ID NO: 32840 - DNA, 2799 bp, Cannabis sativa
  modified_base (2625)..(2638): a, c, t, g, unknown or other
tgtaacataagtttgattgcataacatatacttctagtgcaatgcacgtttagttgtcactagtataagttaatattatgtgtatttaattatatttttaatttttattttaattatatatatttctagttttataattagttatatatatatattatttaataaaaaaatattattttttattaaaaaatgttgaatttaagtgctatttataaaaacaaatataaatattaatcaaaatttactgtgatttataatttcagtttaatcgtaatatttttaatttttttaaaaatatcatacattttttagggattattttgtagatacacaaaaataacaaaaaaattataaaaatgcagttttacagaattttaaatattttttacgattttttttattttatttacagaaaatgcggtcttttatattgtactattgttaatttattgtaatctgtatgctattttttgttgttattttgatataatttaaatgttattttcatgttacttttatgtagttttcttgttcttttgtgttgtttatatggaaaactgtagaaatatatataagaaaaaattctttaaacgtaaaaatgtaatttttttacaaaaaaatagtgtcttatgtaattatccttttttttattattattttctttaaataacaatcaaaaaatgttttgtttattaattgcaataggtaatgtcgtaatagtaattctttaagaaatataaatattttttttttctattttattgcttaaaaaaaaaaaacaatcatatcaagatatttttctagatatgtggattaggtaaaatatgataatagaaatatatattttagatgtgtaatgagtttaaattaaattgataattctatttttgccatatttagattaaaataacattttataatttgagtttccttgaaagtggttgctcgatgatcctctagcaccgttaaagtagagaggacaaatgtgctttaaggaaagagtgtttcatgtgtctcttctttgagtttgtttattttcttgtaatgtacttattttgctctttaattaattataatataaatatagttaaaatgacatatttattattggtgtgtgttttaatataaaatctcatatattttgatttaatatataatatttaaaattgttaactaattaagaggtgacacattaatattgtattgtgcactgtcaaatgctaaattgcaaactctaattgtattgaaaaaaaagagtaatatgaatcttgtagctttctagaccattaaataatgagtagtaaggagattaatacgttaatcatcccttatattgtatgaagtcaaaattaattatatatagtgaggaaatttgaatggttacatcaaatttgtattatgattagccattagattacttgaatgatttcgatatatttataaatttactaaatataaataataaataacttgtgacttaataataatttgatactttattttcttataaaattttaattaaaattaattatattttaaaattaaattaattacaattattaattaattttttctaatttttaacgtactaaataattatcatttagcaattaatttttgggaaattatattttttttaactttttttttcaaatttacggcttgagtttctaaagtggttgcagcgctagttgtaatagaggtttctatacaattttttgttgcaatttaggttgcagcgctagttgcaataagggtttctatgtaaaattccgtaaaaatatatatatataaaaaaaaactgttttaaagtgtaaaaatgaaaaaatcccttagtttttttacacttaaattaattattgaaatacttgtagcaaaacgtcttataattttaattataacacatataatctcataatttaaaattttatcacacatataatcttaattgaagattattacacttaattatttatttattttatttaaaattttaacaataaaaattcgtctagtagttgaatgcattttctcaaaaaaaaaaagaaaataggtttaatgagaaatgagtttctcataatcctccttcttccctctcgattaataaatgtaaatttattttagatgaaaagtattctctgttattcatcttcaccactttttacttctgaaataagatataaggggaagtctaattttatataaaaaaattattataaatattataattaaatgatttaactgttaaaaaacttataataagattttgtatataaaaaaaaattatttataaatattaattgctaaaagggtcttgttaaatatataaattaaaaattagttatttcaaaaaaataattaattatattctaaaaaaaaatttatctattgataacatggtgttgttgtaagatataaatatatgtatatatttatagtattacatatatatatatatttcaaaagaaacaaggacgtgactcattcttttatttgacttggtaatatattgaactattgcatttccaataaactagcaaccacacccactatcttctcaaaaatatgagcaacgtcttttgtgacgttagtgctctacatgtgtgtgtttatatatatatatannnnnnnnnnnnnntatatatatatagatacttaagggtattgcatgaggtagtatctcatatatacagtatcgtatatacactgcacatatattatactagttagaagttacgtgccaaggcacgtaaatattagttttcaagttacgcccacacaagcccggagaaaaccgaa

SEQ ID NO: 32841 - DNA, 2360 bp, Cannabis sativa
  modified_base (1915)..(1921): a, c, t, g, unknown or other
ttcttcatcaagaaatcagtttcttggtgatttttttgtgatttttccggagataataccaatttcgatgactttttcggcgccgaccgcaactccggtgactttctcgctgccggcagcaactccggcgactatgccaattccgatgagttgtttcagttaactttattgtttagcatttatttttcgttatgatttttcatagtttcgaatctggtttcagagggttcataagtttgaaactggttttgcaggtttaactcatgattaattactgctaaagcttgattttttttaaaaattttgcgcatcatttgaattttcatatttgctaatgtttgaaaagataaatgcatgtttgactttaaatttaaagtctcaaccactctagaacttatttgataatcatttgaggcgaaatcgataaattacacatgattttaagatataatataggcaatttgtttggatcgattaagcttttcaagtctaccctatttgttaattccctagttttacccaatttgagcctaaatattgacatcttatttttcttttaaccatatacaataaccttttgagcctaaaaaaaaaatctcttgttcatcatttttcataccatagtatattgatcttttatgtatttgtaaaggtgtgagagttttgttaatgaaaagatatatgattatgtataagtgatgataagaaaaaaaaattattattcccttcgattgaatgtttgcaagttgtaagtatttcatctaatccaaaaatttgatgcgtgtcgtatgccgaattaaatttactatattttttttcccatactttcagttatttcagtataaaagtaagtatgcatcaaatttttggtgccgttgtcggggactattgttttattttattattcatatttaattgtagctttacaaacttgttcttctagttgtggttttaattttcaattttcttttagaaatatggcgatgtacaatcaacaatactatgatccatattattcgccacaagtgtatcaatatgattcccactacgacacttacacatacaatcaacaatggggagattactctagcacttcctacaatgggattagacaatatgttcaaccaacttcttactatcctcctgtagcaccataagatcaagatcattctcttattgatctgctcaacactttggaggcttatactactcagatgcaacacaattatgtacaatttcaacaacctactcatgttgcaccatgtagtgaaaagccaactactgttgagctaattgaaatgttagcagttaattccttgcagcttcagcaaagctgtcatgaaactatgcagaaccttcaacaatctctgcaaaagttagagaatcttgcagagtcaatggaaacatctatgagtgagtatgaaattcaatgttcaaactctatgccttcacaagtagagagtaatccaatagagaatgtcaatggcatcactatctaaagtggtacacaacttgaattaccaccacaccaagaagttaatgatttgattccaactaaaggagtcaacaattcatcccttgaaggatcatctccaccaaaggttgaatctcctacttagttggtccaccattactgaaaaagccacacaaaccaattgtaccaacttatggcactcctccacgttttcgaagtagattgaaaaaatcaaagaaagaggagcccatcaaggagatcccttgaactcttgcgaaagttgaggtaaaaattccatgtcttgagaaaatcaaagaagagcctcattgtgctaacactcttgaggagttgtgtccaaatgagaaaaagttgaatggtggtgagaaagtaagtgtggggaaaaaggtttttgttgttcttcaaagaaagttgttgcctaannnnnnnacaattcaatgcacaattagtaaaatcaagtttgatcattgcatgatagatttaggagcagttattaataatatgtcttattccaatgttgcttctttaaatcttggttcattaagaaaaactcaaattttaattcaattgactaattagactaatgcttatcatttagggattgttgaagatatttttgtctaggctaatagacttgtcactccaactaattcttacataattgagatggaagatgagggtgatcccaatcctacatcaactttatttgagagacctttcttacccactactaagaagttggatatgaaagcatggacacctacaatggactttgatggtgaaacactcaaattcaatgtgtttgtaagtgtctttattttgtgacagtttttgttctgttcaatgtctagtcgtgtctggcgtttta

SEQ ID NO: 32842 - DNA, 3445 bp, Cannabis sativa
  modified_base (44)..(53): a, c, t, g, unknown or other
  modified_base (2681)..(2682): a, c, t, g, unknown or other
aattctaaaagttagactatatctactttatgaattttcactannnnnnnnnnaaattgtaaagaaaagagattccaggtttatttattaattaagatacctcaaaaatgagatcgagaacttgattcgattgggccatctttacgagtggattaagaaccggttgcctcatctcaacccggttcaggcagcaggacctttgccccaaggagcaccagggggtgtgctcggagcattggcaccagtcgccccccagaggaacctcaacaaattcctggcctgccaccaagacccaatggaagagtagctatgatctctagaggaccccatatcggagggactactcgaaaggaactaaaacgttacgctggggctgtaaaacatagtgaggtttgggaagttactcagctcccagctgaaaggctccgactaatggatcaacccattacgttcacaaaagaagatgcaaagacagtgcattttcctcatcatgaccctctggtcatagagactcccatcgccaacaaaattgtggccataatcctaattgacaacgggagttctgtgaatttattattcaaagaagccttcacggcaatcggcctcacggactgggatctctcacccagtggttcccaactcacgggggttcaatgggacaacacttatcccaatgggaaaagtgaggctcccagtcaccttgtgcccagatacaccccaaagcacttttaaatactgcacatttgtggtggtggactgcccaacagcttacaacgcaatcctcaaccgaccggcccttgtggagttcagcgcagttacgtcaatcaggcacttgtgtttgaagttccctactcaagaggcagggatagggaccgtgagaggaaaccaggaagaggccaggtagtgttacaatgttgctgcccacctacctgtattgatggtccgcgaagttattgagccaggaatggcggaagaggatagattggatccccgtgtgggatccgaaaaaattgtagaacctatggaggatgtcgaggaagtatcggtgtgcgacctcgaccccaccaaggtcctccggctaggaaaaagtctagaaccggaggaaaaagaaaaaataattaaaacgctaagggcagccacagatgttttctcgtggtgccaatgggacatgaccggcataagcccccacgtcataacccatgtccttaatgttaacccggacatgccaccggttcagtagaagtgacgccccctcgactcagtaaaggcagaagccctggagaaagaggtggacaaattactgaccagtggcatgatccgagatgtatattatccggaatggctggccaatccggtactggtgtggaagccaaatgggagatggcgggtgtgtatagattttaccgatctaaacaaagcctgcccaaaagactgtttccctttaccacgaatagaccaaatggtggacgccacctccagattcaagctattgtccttcatggacgcatacgccggctacaaccaagtcaagatgcacgttgcagatcaagaatgcactgggttcaggaccgataagggggtatactgttacctggtcatgcctttcgggttaaagaatgctggttcaacttatcaacgaatggtgaaccggatgtttaaaggcctccttgggcgaaacatggaagtatacgtggacgacatgttagtcaagtggaaggcaagcacaagccatgcggatgacctcgaagaatgctttgaaatgttttggaggtacggaatgaaacttaacccgaagaagtgcacttttggggtgaaatcaggaaagtttctgggcttcattgtgagtcagcgagggatagaggcaaacccggagaaagttcaagctctcctaagcatcccttcccctaagaagcacaaagatgtacagagcttaacaggaaaggttgctgccctgagctggtttctctcccgatccacagacaagtacattcccttcttcaacatcctgaagaagtgccaaaaatttgaatggtttgacgagtgcgaggaggcattcaaaaaactaaaggagcacatggctaaactcccgatcttatcaaaacctgttctcaaataagacttgttcctatacttggctgtctccgagaacgcagttagcgcagccttagtatgggaagaagaaaaaactcagcatcccgtgtactatgttagcagcatgataagggcggagatacgatactcgattatcgagaaactagttttttgcctcgcaatggcctcgagaaagctaagaccctatttccaggctcacccaatcaaggtattgaccaaccatccgctccgacaggtcctacaaaaaccggaggcgtccgggagacttctcaaatgggccatggagttaagccaatttgatctacattacattccacgcacctccataaaaggacaagcgttagcggacttcattactaagtgccacgaggcagaggctaatgcaagcatgcccacaacgcaagtctcggcgtggaaagtatttgtggatggcgcctccaacgaaactggatcctgagcgggggtagcaatcatgtccctaagcggacttcgactccaagcagccctacggtttgaattcacagcttctaataatgaggctgaatacaaagccctgatagcagggctgnnattagcaaaagtcgtgggggccaaaagagtagaggtctacagtgattcacaactggtagtgaatcaggtatcgggggaatatcagacgcgcggagaaaagatggctgcatacgtagcaatagtcagggaactactccacgagttcacggactacaaagtagaaagaatccctagaaaagaacgcccacgcagactgtttggctaagttagcttcagacagtaaaattgagaaactgggggtagtacctatggaacgccttgcagagccaagcattaaagtcaagagtaccatggcaacagttgagcaagagcccaactggatggtccctatcatcgaatacataacgaaaggcgagctgccctaagaaaaggcactatccagaaggatacaatatcaagcgcaccgttatgtgatgatggacaacattctctatcgaagaggactcaacatgccgtacctaaggtgtgtatcggaccctgaagctaagaaaattacgctagaggtccacgaggggttctgcagagaccatacaggaggcccgagtctctcaaagaaaatattgagacaagggtacttctagccaactattaaaaaggactgcatagactacgtccagaaatgtgattcgtgccaaaggttcgcgaacatacctagatctcttccgaatgaaattaccctgatgactagtccctggccctttgcgatctggggaatagatcttattgggtccctgctaacaggaaagggaggggtaaagtatgc

SEQ ID NO: 32843 - DNA, 1458 bp, Cannabis sativa
atttataagaaaacatgatagtaccaaatttttcacttaaacaaaattcaatgtaccaactaatttcatgggttactaaaaagtattttatatttactagataatattttacataaatttattttacagaacaatttcaataaatgtctaaaaaaaagagtaacctctatattttaatttacataagtttttttttttagagtaattttaatacatttttaaaaagtatacacactcatctcaatttttttttacatcacaccgttagttggttgagctcaagagtagtatcatcaagacctactttttcaaaatcatcattttaatatatagaaatcatatatttctttgttgaatccagaaaaaatgatcgaaatcaaaaataacattttagtttcttttatattttgttaacgaaaaagtaatcaaactataaaattaaacaaactttaatagattataaattattttctaatttcatatttaaaagttaccttgtagtattctaaataagtttattttattgaaactgttttgataaattcctaaaagaacttataaagaaaccaaatagtatcttaatcaatattagaattgttaatattaaaaaaattgactctactaattttgatattaagtatactttatcataactctgtaattttatcatatatatttaaaggtagcgaaagttactaaaagaatgtgaagctatcttaaataacaatacatggtaacttttaaatatgaaaataataactaataataaaatataataatttgtgtagttagttggttaattttacttatattaccagtttatttagtctttggttaaaagaaatggtagtgatgtctaaccattacgtatgaggtgtctgctatatattgcaattaaatattgggttttaaagattttaatttaataatttttgtaaaatatcactaatcattaacaaaaaagttacctcacggtgtattggtattactgatgcttaatatcaatgctaaaatatatagatataaataaataaaaaattatactttttatttggattattttttttatgatagtaaatatttatgtttttcacctatcaaaatggttgtatcaaaaagtaagttgcgacagtattttttaaaactaaaataaaataattagtattttttttatttagtgtaacttaactaatatttttttttttttttggaaagatgaataggaaagagaatatatatgtatttaataaaaagacaaaaaaggagaaaaaaaaaagaatcagcaaaaaaaaaaaaacttgaaactgaaaagggagggtcagttcggtgggctttatttttgaggttcggtataaatgtcttgataatggtgtattattttctctgatactatttgtataattattttacaatatccgtataaaactaaaaaatcccctttatttaaaggttaaattc

SEQ ID NO: 32844 - DNA, 1673 bp, Cannabis sativa
atcaaaatgagcaactaatgccaagatgactctgagggaatctttctttgatacaggagaaaagatcttcgtatagtcaattccttcttcttcttcagtaaatcttttagcaacaagtctcgctttgtatctctaaatgttgcctaatgagtcttttttagttttatagacccatttacatccaatggctctcgccccattaggcaattttacaagttcctagactttgttgcacttcatagaattcatttcatcatccatggcattgtaccacaattttgattctctactgttcatagcttgtaaaaataattctagatcatttcaaattccaatatcagattctaataaatacacaacatagcctttgtaaatctttggtttgacatgtttaatagatcttcttaagacttcaccaacaggctcttggggagcagcagttggttcagcaggttgtcaacagttgccttgtgtgcgggtgacagatgagtctcaacagcatttgttttttagctgctatctgtcgcgagaggttactgatttggtgcataactggattggcagcagagtttggcctacagattttgaaggatggaggagttggctagcttggcagtcgacgagcaggaagcaaagagttcatgttgttctgtgatctatagtttatggatcaatagaaatagatgcatatacaattcttactcttatttggctagagcaattgtaaatgaagtgaagaaagttgtcttgtatagattgcaatacttgaaaatagaaagttgaaagattatgagagagtatacatataaaggatttgtaagtgagccggttgtggcctcttgttttggttgatttgttagttgtaatagtttgtgattaatgaagcaatttcttcttgataaaaaaaatattttctctattttcggaggtggttaagctttaaaattcttcattctattgataatatttttttttatttttttgtttaacagtctgctaacatggttgctcatagctttgttagagtatcttgttcttttctagatcaaattttcaattagagttctatacagtcttatttagtatttgaattagtaaattgataaaattccagttttcttttaaaaaacaaataaatgtacactcattttttagagttcacacaagaaaatgaaacacccaataaacttatacaaggatagatggcaaaaaatagactgtggatcatctttttctctactgcgactttgtttttcacctctggcgttcttctccttggggactcatgcctgtagtgaattctggagcccgtatttgagattgggttaagttcttgtgaaatttaaagtctaaaggggtggacattgacaaagttttcctttatgcttcgatagtggttggtacgatttggagagcgagcgcgcaatgacaaggtacatacatatgaatggtctgggtagcatcactcattatattgacactatctctttttgttacgcagattatggctctaatttacttaatcattcgaaggttgatgggtctcctgtttgggttcctcctcctgaagattaggtcaagatcaactgtgatgttagaattggttatgactccatgtgcgcggtggccattgctagggatcatagggagaccattttgtgggtggctacttc

SEQ ID NO: 32845 - DNA, 1845 bp, Cannabis sativa
  modified_base (1285)..(1291): a, c, t, g, unknown or other
gttcttgggttgacaacaatgttgaagtaaaaactgacgagcttgcttttactttggttgatttaagtaagagaggaagcaagaatgatccattcattatggctagccaaacaattcaagttttttacatttttgatccggctaatgataaatggtctgttattttatcgacaccagagaggaagttcttagagaatgaaaaggatgaggagaatgctaacttatgttatgatgacttcaatgttgggcaaccaattcgtgaacaagttatgggaattgatcgtaaccttgaggaagacaatgctaaatacattagaaacaatatcaacgagggaatatgggtcaattgtgattcaggcaaacataaataaaaaaaaaaaaagaaaacgtgtctaattggtaacttgatatataacatactttatattgtgtttgtttatgctgaatacataatgtttgtttatgtatttaatatttggtatagattacttatatatatagctaactttaaattttgtttgttaatgttgtaaatatggccaactcaggttcagaattagattcagacccagaagcagagtgtcctaggctaatacctacaggaggagctattcagttgaatgaaatatctaagttgatggaccaaggaaaaagagtggcactcgaggtgaatgacaaaggacaatactgtggaaaaaactactccaagctagtatcgactttaggagttagatgttgtcagacgatagggttgtcctataaaaatcggaaagaagtcaaccctacactgaaaaataaagtttggaaagatatataggtaagcagttatttgtgagaattttgatttctttttgataaattcagatgttaactctaattgtgtttgtttttctttaaacaagatgtgttttatagtgccggatgagttcaaacatgattttctgatccttgttgggaagttaatgaaagactaagaatagaatgacaaaagatgttataatgcctgcaattgaagagaaggatgtgcaacgactggcacaagtccttgaaaagcctctggaaatcgaccttactgattggttgaaatttgttgaaagtcgactaactcttgaatttcaggtaggcttattatatttatactaagataaactcttaaatacaagtacatgtatttaatgtatttttttggaattgtaagaattgagtaagttgcaaagagaatgttcggcaaaaatctaatccggacatcgaagtggtcgtagtggaatggtgaacgtaagggaannnnnnntaagtaatcaatgaattctaataatgtgcattaaaatgtaatttgtacttatttaattgttataaaataatgtagaaataggacctcgacgttcaagatcccccacgccatcgtgtttagatcaaatctcggaccaagagaacaaaacttgtcactgattacaacaagaaaattgacaaaaagatagtaagtatatataaattcttaattgagtactgctaatgagttagtatatataatttatataataattgcttgagtatatgtgtgaattaggctcaattagaggagcaacttcctcagggacaaattcaggtccagggccaaagcgatatcttgacgtaggcgctcgggacactaaagcatcctggacgtgtcaggcctgctaggtatgctagtacttgaaatgttgtttccttagtgatacaaaaaaatatagttgatttgcctttcatggtttgcaggttcctgaccagggcatctaaactgtttgaccagaagaaaatagaagtttctgatgttgtggctcggcaacagaaggagattgataaatt

SEQ ID NO: 32846 - DNA, 1487 bp, Cannabis sativa
acgtatttaggaggtttttttagaagaaaatttttattttaaaatattacaacttttttacgattttttttttcattaatacagtttgttagtagaagactaatcttaaaaacatatagagagaatattaggatatgcaaatttttgtttttataagaaaaaaaatgtaaatttttgtttatttagggtgtgattggatgctgaattttatgggataattacactataaattgaaatttttactttgttattattatactctagaattttttttttaaaatactgtgttagttttatattgtgtactatgttaagttttcacatttgttttacggttattttttagttgtgtcagtgttgtttttagttgttctattttgtgttccactgttattttataaaaacatagtattttttaaaagatttttatctgataatatttttataaaagttaacccaaattttaatatttttgtaaatttctcgaattttattgagaaacaaaggaaataaagtacaaaaaaattaatttctaaattgagaatgtaagagagaaattttttaaaaatttatatatgataaaatagaattttactttcctcgttctttttcccaccttattatttcgacgaaggatatgtgaaatacaaagccaacaacttcaaacatgtcacaaaagtcaaacaattactaaacatagttattgtggactaatctgaataaatgaaaattttaacttattcatgagcatgctctaaaacttcacgaattgaaaccctaaatttttgtattttttttctttttaaaacaaagattataatttttattaaagcaaattagttattaaaataactttcaaaccagtaaggacaatccccttactgtttaataaactgaactaaaatgtgaaacaaagaaatagattgtataagactaatacaatctgaaataataagaccaagtggagaaagaatttgcctattactattaatggtatgaaccaacatgagacaatttgattccatcaccaccgcataggaacaaatccttcaaaagaggctccatctccccaggtgtttttaacccaactcaaaccctccttcaaagacattgcttcagccataaaaggtttgagatcaccactgctttttacagcagcagctgcaatacaaacaccatcgtgattttgagctattcacccccaaaccgtggctcttttcccttgaaaatagagtagcatcgcaattaacctttaactcactcatagacggtttaatccagagctcgttacaggtcgagagctgaccagaagatgtcgagacaactccatttttaatctgagcaaacttccaaagttcaaggtaagtaattgcagatgagactactctttctacagaagcaatcttcttgttccaaagaaagtcatttcgagctccccaaacatcccaaagaatcatagctattttatcaacactgtcacctggatg

SEQ ID NO: 32847 - DNA, 2533 bp, Cannabis sativa
  modified_base (2004)..(2005): a, c, t, g, unknown or other
ttttagttttcagactaataacaataatacatatactaatgttggtgttgttcactctcccaccacacatcctaccacgactaatgagggaattgacaacacatcaccacaaggacaacctactacagcccctccaccaaccactaccccacggtccatacctcctactaccccacaaaatgacaacctcaccactattacccatactgctcctttttctagcataggcactaccaccaatgctacacctttacccaatacatcctatagtacattaaataatcctttacctactgccaactttccctctgtcccagccgaaagcaactttagcccaactacacacttcaatgtcccaacggctacacatggtactgtaccattgcagcagacaatgacaaataccccacagtcccccaatgtgcctcctagtggtaatcaagacaatcaagtcacaggtactacagccataaggactcattctatgaagacaaggtctctaaatgggattagaaaacccaaagccttcacagccaccaaatatcccctacccgagtcacttataccatctgagccaaagaacactacagctgccttaaacaatccaaggtggttcaaggtaatgaatcaagaatttgatgctctaaaaaaagcaggtagatggtctttggttccttattctccacatatgactgtgattggcaacaagtgggttcacaaggtgaaacttgatgcttatggcaatcttgaccgactgaagtcaaggcttgtagctaaaggctacttgcaaacacctggcatagactatgaggaaacattttctccagttgttaaacgagcaacagtaagaattattcttacattagccgtgtctcttaactggcaagtgaagcaattggatgtctccgatgcctttctaaatggtgagctacatgagattgtctacatgagtcaaccagaaggctttgttgatcctaccaaacctactcatgtgtgtcaacttcacaaggccctctatggattaaagcaggcccctcgtgcatggaatcaaacccttagagacaagctactagaatggggttttagtgcttaaaaatcagacacctctttgttcacttatggttcgggtaacaacatcataatcctacttgtctatgttgatgattttttagtaattggtcctaacactcatctcatttcaaagttgattgctgatcttaacaagtctttctttttaaaggacctagggtcggttcactatttccttggtattgaaatttatcgtgatcagcaggcatgtatttgtcacaaacaaagtatatcacagatttacttgttcatctcaacatggaaggagccaaactttgttctaatcctacgagttcggccattaaactctctcttacagaaggagaaccctttggtgatcatactctttacaggagcacattgggtgctttacaataccttaccctcacaagaccagatgtagcattcattattaataaactaagtcggtttattcatgctcccacaagtcttcactgggaagcttgcaagaggcttatgcgatatctcaaaggcaccatacatcatggtcttcatatcacaccagctccttccttaactttagaagggtattctgatgctgacttggcgtcgtgtgttgatgatagacgaagtacagggggttatgtgatgttttttgggggtaatcttgtgtcatggtccgttaagaaacaacaggtggttgctcgctccagtagtgagagtgagttcagggctttagctaatgccgctgctgaaatcaaatggttagtttcactcctttctgagttacatgttacttctactcaatgtccaatattatgggttgacaatcaaaatgcagctactattgctgcaaatctagtattccatgcacgatcaaagcacattgagatagatttacatttcgttagagatctcatcctctctaaacaaatatccattcggtatgttccnnctatagaccaagttgcagatgccttaacaaagtccctgtccacagatcgatatctctatcttcaatccaaactcaagatgtgtgacactccttttcgtttgaggggggatgttaaacaattaatcatcacttaatagtttttctgtttttctgtaaatttttgttaaggctggtttagcagttaagtttgttattactgtgtaacaacccttttgtctttttctgcttgtaatacattggtctacaaataagattcggcaaccctattttgggtaagcctttgcaattcatttttcgtgcctctgcttttttttctctgctcataacattgcttttctctgttctggttttaccttcttcacattcaacaaaaaaaaaatctaaaatatgcggtactttttattattttagaatatctctaactatattctgttagaatttattggggtcacaattgtatatataaaatgtgtgttgggtcatcaaataaataagtcaaatttatgtggtctattttggaataaagtt

SEQ ID NO: 32848 - DNA, 7022 bp, Cannabis sativa
gtgacctttgaccacctaagttatggatattacacatctgccacagcctagggctcgggtcgtgacaataatataaatatgtgtagattgaattaaatggattagttttacatgtcaatcaatagtggggattggatggacgtacacctcctaattgtaaagattagaaaagttggtcaatacttagcctaatttgataaaaaaacaaaaattatagctaaattaatattcccacagcaatttggaattctctgtcgttctatttggaattcagagtctgtcggagctctttttctccggcgatggcgacgacgctagaaacgatttcagaagctctccaccagatagataccaagaaagaaaatcttaaaaaagccttcgacgagcttcaacctcattcatctctcatcccctcattctccctcacctggtccgatctcgattctcacttcacctccattcagaattccctcaacgagaaatttcaaactctcaaaaccctagatttttcaccaaaccaaccatcttcatccccacattcaaccactcatccccagcctggcccttcttcttcgtcgccctcatcactcaacgagaagcgtgttgacacggtttcgaatggtgattcggatttggtgccgcctcggccggaattgatagcttactgtgtgaagatggatggtttggggttaaggaagtatgtaagcgacgccacgaaggagcggaatgagattcgggttgagcttccaggtgcgattcggctagcgccggacccggctgcgatgattcttgacgccatggaagggttctttaggccgaacgagaagaataagggggataaagaccttgagttgagtagtgtaagaaggagttgtgtactattgttggaaaagttatcggctgtttgtcctaatgtgggagttgaaactaaagagaaagccaatactttggctttagagtggagaggaaagatgaatacaggtgatgatgagaaccctttggagtcgttgggattcttgcattttgtctctgtttatgggttagtttcagagttcaacatggatgaacttgtggacaattttgttatcatagccaggtacaggcaagcagttgatttgtgcagaaaaattggcttgacggataaggtgccaggtaatgctttgttctataaaactttgttgttatttattaacaagtttatatttgttatatagcttgaaaggtagtcttcatgatttccaaaaaaaaaaaaaatattcttcatttcaatgtgtaagcaatgtgtgttattttggttgcactatcaacatttacgtagttaagaacttaggaagtatgaaaaagggaaaaagattgcaatgccattttgtaatatgtttttagtttttctatcttgcctatttttttgcttaaacagttttttccttttttttttgtttctgtatcgccatttatatgttggcgatatttccacagttttttgttgttgttgttgttgttgttgttgttgtgctatatcaaaattaacttgtgtaacatacgtggtgaagtatggaaagatagtctgctgaattggttatgttcattgagcacttgatttttgagcagacatgattttccctatggtataagctctgctaaaatagactttagacaaaaatattgataattatatctcttatcattctcaatccaaaaagcattcaaaagctccttaatcatcatagttgatgatattggcgttgaatgcccagattgctttgtgatttttgtagggtcttaagcttttcaaattcacaaagtacgcacgttggttgtgtcctcctctggaatgagatggattctgatgaaaattgcaacgttttgttgtgttatacagatctcatccataaacttataaaaaagggcaaacaacttttagccatcaaatttatttttgagtatgagctgactgacaaattcccaccagttcccctcttaaaagactacgtgaaagactccaagaaaattgctaagaaagtttgcaaagaaggaaaaaattctctcaaatcgctggtaattttacattcctttttaaaaaaaaacttgtggcattctggagttcaagaacaactattgcctgcaggtgtatatttattgagtttctttgcagaatgaggctgcagccaaagaaatcagtgctttgaaatcggcaataaaagttattgaagagcggaagcttgagtctgagtatccacaagagtctcttcaaaagcgaattgagcaactggagaaacaaaaggcgagcagaaaacgtcctccagcagctcctgctgcaaaacctactcagccacaacatcagcttgcaaaagagaagcagaagcaacaaagtggaaacaagcgtcctcgaccagatggtcgattaagtcaacaatctcatctacagtcaacacatctgtcgtcagatggctctgcttcatatgtgagctcctcagctgcactttatggcatgccagcccttgttccatcacctgctgcttatgcgggttcattggctgggacacatgggtttgcaggggcacctctgggtcttactggcagtccaactggaactagttcccatttatatgcagctgagccatatgtgccatctggctattatgacagaacaacttcccatggtggatatgatctaccaccacaataccatccatcttactatcctcaatagcatttcactggggttttttttgtttttttgttttttgtagtctcttgaatggcaaaatagtttttgccatctttaagactggttattaaaaagcatgagtttgcctttttgatacccatagttttagttagcagctaattactttaccagttttatgttgacatgatgtatttatgtcgatcttaattcttatttaccatcttatgccgcattcagcattattttttcgtgaagagacattgtgtatttgctaccttcttgtcatatgtgagctcatttaagatgctgctagttgtaaatggacatgcagtcatcgaaagtttagatcctcttgatatatctaatattggaaatatatgcactaactttagctttcaggtattagattatttgtcttttagtacttaaagattgtttagacaccatattccatgtgaacacccgcaacctttgtacttgatccaagcctatgaaacatttggtttatcttgattatttattggatcagaaatatttttggattttattgatttttcttctatgattatttaagatccatctggaggatgaatttaatggacagaactagggaattttttctcgaagtctttcatagaatatttcttgagtatcacaatattgtgaatcgggatcttgaatatcatgacatgtttatgataaagcttacaatgtcatttgtatccagagtcattttagaagtatggactgaatctttgcttttggcattagatagaccatgcctttcaggacagtttacttcataatttgtgtacacaagacttcattccatgtaaaccttcataatttgtgcacttgatcctagactatgttgcttcccatccagactacagtttatttcggagaaatgcgattaccaaaatgacttttacaagttttaattgaaatgatttttcaggacagtcaaaatgtatgtcatctcttgttctagtagtacaaataataattgtaactttatatgcattgccataaatgtattgacattcttatttgccactttgagaaatactcctaaacattcatttggggttaaaagtactcgtataatttggcatttcccattgcaaacaaaagttctgcccaatctttttttcttgtttctttctttcttccttgttttgttttctctcgagtttatgtctgttgttttcgaacattttttacagctgtgttgttgttgttctcttctctattgctcatccgttctttctttaacctacctttgattttaacttcttttaaaagatattcactctagctgtttactggattggcctatgataaggactgttattatttatttattttcttcctcatgcaagccattttttctttgtttgaaaggaaacccatcctcctttgctgcattaggattaggatcagaacgaatgaatgcagatacacacatccctttgattagaaaagcactgtttcttgagttgcattgttgcaattactgcatatatctatatacctctgtctaatgggctaggcgagacagcttctggactctggagtctctctgtagcaatttaattctgctatagcaattaaagtccatcaactcattctgcattatattagttggctgtttttatttcatgtgtcccacaattttgttacttgtagcatgaagaccaacatgggttttcttgaaggtacttttttgtgtgtcctacaattagttctttctctttataattattattatgaatattgcaatgagccggtagagcatatgacaaaactgtaaaatcgtaattagtgtaatttaatatcgagtttgacgtcacaccatatggtgttataccttaggtgtgtttggtttggtgtaatggaatgataatggtaataggaattgattacaatgtttggtttgtagttggagtgaacttgtaatgagaattattgtgtttggtttaatatgtgaatgtaatagaattagatgtgtatggaccaaaataatcgtttttattttataattgtaaaatatttaaaagaaggggtaatatagatgtttgacttttttattatatttttattatgagttttttgtagctaaacactctcagctatcattatacttgcacttaactttctgttatgctcatattacgagcattaaatatggacatgacacatgttatatcagtcaaacaggcatcatagaaaaattgttaatacatgaaattgcctcgaggaggcagtggataacgagctatatttgtcttgcgttgtacatttgccgaagaaccatgagaataacaatgtatgacgagatgataaagataggagtcttattggatgtaacagtttaaagttgtatcgctggaaaagagtagataatgagttctttaaaattttacagctcattgacttatatactcttgagtatgttgaaagactacgttcgaaagttgccatgaaaagcaatgacgaggacaaacatcttaactagcatcttgaagaatgcaaccaacaataggggtgggcattagtcggtttggtcggtttttttctatataaaaatttagaattcggtttttggtctggattggtgtaatccgaaaaccgaccgaccaatccagaacttatcttaaaactgaccgttttgaatctcggtttggtcggtttaaaccgcctaaactgaatttctttttttgttttctttataatatgatccaatttattttattattttacattttacaaatataaacatacaaattaattattcaaaaaattaattatcttattcttttaactttaatattaataaaacaataaaaatatattattaataactacaatataaagcaaaaaaaagtaaataaattaatatatatgtataatggtcggtttcggttttttcggtcgctttattaattaaaaaaaattgaccgtttaatagcggttttaaccgttagcgatttttcgattttcggttccaacggtattcggtaagtcagtttgaatgatttttttttgatttctggattttatgctcagccctatccaacagttcttgaataccattggaagacgtgagctatggttaggatatgtcatctcgataaaagtaaattactcccaaataaggatagaaagcggttaccagcagtaatttggttttattcacatgttataaatatgaaacgtggggattgttcgtgtttcatgaacggttacttagacaagatcaaaatagaataattgtcatttctagaactcctataaatagggacaaaacttaagaagaaagggattgaacatttttgggaagaagagactaagtgaatatttatatttattcctatgtaatcaaagtatttttccataaatatttgaaaataagaatgatttgtggagtatgtagatttaactataaaatcacgtgaaatcctttatgttcaatacatatatttataagtataaatattaattctttatttttcaaagcttcattgattgttaatgaaaatttaagttaatcatttggtgctttcatttagagcctttgtaaaaataaaactcgaaatatatctccccttttgttccatcacattatggaaaacactcggcgtgatgagcatgttatggaagaagaaacaacaaggcgaccgagaaaagagcctcagggggcacatactcaaaccaacacaggatggggtcctactgagacgaaccctgagagaagtgaccctaaggaagaaattcatgagagaagggagttagatgcatatgaccccacaagatatgtccctattgttaaattagagaatcgaaaacttaaggctcgcagaatccaatgttgtaccaaaaagtgagtgttttaatatttatactcacaagtgcacgaatcattttggaatataatgttcatgtaagtacgaggtcgaacccatgagaactgactaatatcaaaagaaactatttcaaacaaaacaagaattttctaacatagttttgaatatttgatgagattttagtgtagaaaaataaaagacaagtaataaaaagattaaaaattaaagatgagtgaaaataaaatagtttccaaataaaatgtgtaaataagattattaaaatattagaattcacaaaatacaaactcaatagtatttataagtatattgattctcaagtttatatatacttgaaataaattacactttattttttaaaatatattttctatttaagcactagttcttttgtaacaccctaactagcataggcgtattacgtgctttttaaacatactgtgcagctc

SEQ ID NO: 32849 - DNA, 2271 bp, Cannabis sativa
atgcatgggagtatgtactagtactagaagtgtgagagtatgtactatgactagatgcatgggagtgtatagtacgactagatgcatgggagtatgtactacgactagatgcatgggagtatgtactatgaccaaatgcatgggagtatgcactatgaccaaatgcataggagaatgtactacgactaaatgcatttggagtgtgtactgtgaacagatgtacgggagtatgtactacaaccagaagcattgagagtacgtactttgaccagatatgcttatttaaacagttaagcataatgagctcaaagtattactttaacttaattaatatgtaatttgtaatacatatgcttgtttaactttcacattttgtaactttttcttttatatgtaactagtttaaccttttctattatagaccaggttgattatatactagtttatatatattttcaaagttttatgtgaaaagtttcatcatgatatggtttttccatatctataacaaaattcgaagttatcttaattttttggttgcgaccaataaagaagttttcatctttaatctatgtctataataaaatttgaagttatcctcttttttatgttgtgaccagattagaagttcttcttcattccatgtttataataaaatttgaaattattttctttttctagttgtgacccgattagaagttttacttctttaattgtaaccactttaattagtgatatttacgcatgccccctttcgaagagatattgtatctattgaggttcagcttgctaagtactgcgagttgttcactatagagcgtctctatttcttctttgggtaaacaaattgggtcatcttcaaggagattgagtcatctttatatatgagcaaatttatctatgagcatagttatcaacgagcagatttatctgtgatcatagttttctacgagcatagttatctacaagcatatctatgagtagatttatctttgatcacatttatctatgagcacaattacgtacaagcagatttatctgtgatcatagttatctatgagtacagttatctgtgatcatagttatcgataagcatagtttttatgagccaatttatctgtgatcatagttatctacgagcatggtgagtagacttatctgcgatcatagttatctatgagcatagttttctacgatcaaatttatctatgatcaaagctatctatgagcacagttatctacaagtagatttatttgtgatcatagttatctatgagcacatttatctctgatcacagttatctacgagtagatttatctgtgatcatagttatctacgagcacaattatctacgagttgacttatctatgagcagatttatatgtgatcatagttatctacgagtatagttatttacgagcacaattatttacaagtagatttgtctctaatcacagttatctatgatcatagttatctgtgagaagatttatctatgatcacagttatctatgagcatagttatctacgagggcatttatccatgagcagacttatttgtgatcatagttatctagagcagttatctatgagcagatttatctatgagaagatacatctgtgatcatagttatctacgagcataattatctacaatcacagttatctataagcagacttacctatgagcagatttatctgtgatcatagttatttaggagcttattatgttttggggctatgagcaaacaagattttctcatttcctcactttgtcccaatttgtcattgggaattatatatagatcctttgacaaccacttgaatattgagtaagtgaaaaacctaagaactttttattatttatgcaaataaaatgtcttgaacattgacatcattcaacatttctctcatatatataaatatatgtattcattcagtacttatatgaatgtatatataaatatacgtatatatagtctttctctctcatatatatatatatgaatatgtatacattttgtatatgctcctttggttgccaaagccttatatatacttcgcatatataattataatattgtgtaaaataggtaagaatttaaaaagtactcctacatgttttaacgatgagtagtagaagaatattctactagactctccattttaaccaatttcatagttaggattgtgaagatgatgaatctgaatctcttcctcttgaatctcttaaaacttccttctctcaatgaaagtaccaaactgttgac

SEQ ID NO: 32850 - DNA, 4797 bp, Cannabis sativa
tatatacccatcaaagcataaaatctaaatatataatacaaaattgcacaaaataaaatcatatatacatgaaagtaaatctcttgtcaagatatgcactgtgttaaaaagtagttatgattgcacaatttgccatttatattgagtatataaaatttgctattcataattgagaaattataataaaaacaaatttggggcttcagaattttaataaacaaataacagtgataaagccttgggaaaaaaaaaaaaaacaatagtgacagtgatatgattttataaataattaaatccaaatttcttaattcaaaaatattcatccaacaaaatatatttgaaacctagatgaataaacaacttacataataatagccataaaattcttgtgatttatgtagacaagagcatcaataacattagtttagttaggatttacacaagaatataagaactttttattttagagagagaaagaaactggcatagtagttattgtgaattttatattacaagaaaacagaatttgggtgatggagagaccaagagtaaggaatttgtacttccttgagaaacacatcgaaaatagagaactattttttttatgtaataataccataaaaattttaaaaaggagaagaacaattttttggtgcataaattttttcaactgttcatgtatatggtgttaagagttgttacttttaacacccaaaaatgcaaaaagcagtaaaaaaaagatacatacgtcttattcaaaaatcaaaatgagagcaagttttcaagatgaagaaaaataggcttctttctttgctccacggatagcaaaagagagtattaatatataaatactttgtggaagtcataagaatgttatttaaaatttgttactgcctaagctgaaattggatcctctaacattgaatatctacaactccaaagatatttgatactaagaataaaaataaaaacataaaatctaaatatctagctattgcaaaagcaacaatgaataatgaaatatcttctaagaaaaatattgggcgaaattttgtttgatgaattttttttatgtagttaaaattctcctcatgccactttgtatatatatttgtgcatatacactatggccatttttttatggcagcagtttgtttatttcaattttttgaaggttgcttatagtatgtaagtagtcatagattcaaagcttttaatatgttttaattgattttttatacttgtatacacattgacagtgtttagtgcttagaataccttgttgtacaattatttaaaattaaatccttcattttttttctctctaaaatgcctcgaaattataaatttctttgtaaacacatctcctcttttgcattttgttcattttttttaaatattgctattgaaaaaccaaaatgtaagaacgtttccaatatgaagaaaaataggcatctttttcttttactccacagatagcaaaatagattcatgtgtatgggatagctatatttcagttgcctatatttttattataaaactaacatttattaactggattgtgaaatcccaaataacacaatattaatacatattgtgcaatctcttcattaaaaattacaaaactaatagcaagaaaaataaacatatggcatagaatcaatatcgataaacaaactgaaaatataatcattatacaagtaatctttatataattcaatgaattaaaaatgcataaaatattgagtaaatagcttaataatacaaataattctaacagcaacttaccttgattgtatttgaaactaataaaagttggagaaatcttgaacagtttgcaatattttaaagcttataaagaaaaagaagaacatcatattagagaaaactaataaacatcataaacataattaatgtagatggtcaatattttttaacatacaaatagaatcgtagagcgaagaaacattaaaaaatttctattccaataaatataattcaaataaaaacctaaaccctataattctgcaaatgacagttcaactataagtcactatatctacaagtgccaaataaaaacagaaacaaaaggcagtaccactaaattttagcataatcttataatcaagcaactaaacgcacgttcattgttcgaacccatgatctttttatgctgacaaaaattaatgacaaacatacatttctatcaattaacataaaaagtaaacattgaagtaatataatacaactttcaaaatccagaataataaagtattaggttcaagattcaaatttaatatattttaattgatttataatatgagttatttagatttgtattcacattgatagtgtttagtgcttagaataccttgctgtacaattatttaaaataaaatccttcatttttgttctctgtaaaatgcctccaaattatagatttcattgtaaacatgtctcttcttttgcattttgttcatttttttaaacatatttctattcaaaaaccaaagtctgagaacattttcaatatgaagaaaaataggcatctttatcttttgctccacaaatagcgaaatgccttcatgtgtatggggtagctatatttcggttgcctatattttcattataaaactaacatttatttactggattgtgagatctcaaataacacaatattaacacatattgtgcaatctctttattaaaaattacaaagctaatagcaagaaaaataaacatatggcatagaatcaatatcgataaacaaactaaaaatataatcaatgtacaagtaatttttatataattcaatgaattaaaaaagcataaaatattgagtaaatagcttaataatacaaataattctaacaacaacttaccttgattgtatatgaaactgatagaagttgcagaaatcttgaacagtttgtaatattttaatgcctataaagaaaaagaagaatatcatattagagaaaactaataaacagcataaacataattaatgtagatgatcaattttttttagcatacaaatagaatcgtagcatgaagaaacattaaaaacttcttgttccaataaacataattcaaataaaaatctaaacattataattctgcaaatgacagttcaactataagtcactatatctacagttgccaaagaaaaacagaaacaaaaggcagcaccactaaattttagcataatctcataatcaagaaactaaacgcacgttcattgttcgaacccatgatctttttatgctaacaaaaattaatgacaaacatacaattctatcatttaacataaaagtgaacattgaagtaatataatacaactttcgaaatccaaaataataaagtattaggttcaagattcaaatctaggcaatcctaatctacccagcacaaaaaaagtgggagagaaaacccaaaaataagtacgatccaagagaaacgaatagttcaatacgaaagtacgaatccagcatcagatgcaataaaattacagcaaagagagactacaagtaaatccatattgaacataacaatatgaaaaacagatacctttttggagtgactgataatacgggaagtataaagccaaagagagtaaatggaagtaaattttttaaaggaaaagtttataccctgtcaatttgatgtaccgttttgatcgtataaagaatagtatacttatacaaattttcaagaagagggtggtttgatgaatctaatgacacgtacatatgatgagtcgacattaatattgactcatcactaacatacacataaatttaccacgtatactgtgagcaagctttttaaaattctactaagagatgagtatcgattataagaggaaaaaatgataacatgcaaaatcaataatcttacattgtaacacgtatactgtgagtaagtttttgaaaaatctagtaacaaataagtattagttcaattaccaaaaaaaaaaaagataagtatcagttctaagagagaaaaatgataatataaaaaattaataatttgacattgtaacacgtatactgtgagtaagctaaatatagataactttcaaaatctagagttttcctttgtagaaaaaaagtttgctaaatgaatataataaatcacaacaagaaattgatcacatgcatcatgaaaattgtgtgcctttctattattttctggtacaattagggattttatattaaattagggatttttgcatttatatgtatagtgataaaagaaaaaattaaggaatgagggaatttaaaatcaatgaaaaagaaattcatatataaaagcatacttacaattgataagaaagactataattgttggacagtgtgggcgcaccatcctaactgttgtagaagccataatttcaatcagatcacccattattggttggtgattgcagggagttgaagatgaagagattcaggaggcaatggcaagagagaaagcaatagagaagagactctaaccagggaaaaggaaaattagagaagagaaatagttttaaaaaggaaaattagagttttcaaaggaaagttgcagagaagagaaagaggaaaatgaaaatgtcaagagagagaatagagactctacacagggaaaagcaaagctaaaaagtctcagtcaacaaaaatacctaattacaaaagctttattgcaatagtaaaattatattaaaaatgtcaataaacaaaaacaccttattacaaaagcttacacgttgcactttatacattaacaaagggcaaaattataaatacctaattt

SEQ ID NO: 32851 - DNA, 1913 bp, Cannabis sativa
taatcctagtcacaaattttgggatttgcaagtatagggttaatccctaattccactttcacaaaatataagaatggcattcaaatcaaagatattcacatagagctcagaacgagctttccaatgatatatagaactcccaaaacggagtccggatcataaagttatgaatattcgaatatcgcgttcgaatttacccaaacacaagggggcgggccgcggcacccccacatggggtcgtgacacctgggttcgattcttaggccaaagaggcgggccacggctcccaaggagttgggccgcggcccctgggttccaaacccagaaaaccttaaaaccagcttcgaaaaacatggccaaatcacactcaattcaacccaaaccataatcaaaactcaaaatcatactccataattataactcatcaacacagagagttaaaacacaaattcatgcataaaatccaacaatataaaccctcaaagttcatatttaaacaacatacaacgtaggcttcaaactaaagcgaaattcaccaagaacccaacttcaagagcttaaatacttcgccaaaattctcagctcacaataacaacaaaattcacagttgtataatcaattaaaaatataataaaatccctaaaatcatctcaaaacactacataagcatcctacatcaattttctaactcaatcaagcataaggtatcaagattaaaccaatatcaacatacatgcatatcaagaacatctaaagattaaaatcataacattcaacttcaatttcagcaataacaatttaaaattaaggctgtaaaagctacctcaaactttcaacaaaatcaagctccaacaccttctcaaatccatacttgaatccaagcaactctcaagcaaaatcacaaatttagagataagtttagagagaaagagaggggtcggtttgggtagagcaaaccaaaaaattaatcccttattttgcaaataattctattttactacaaatgatacaaataggccaaattactataatgtccctagggccatataacatacatatgagcattcaagggcaattatatcatttccacacacaaaaatatgctcaaataaatttcagattaatcatatgtaaataaaatgccaataaactatccaaaactgtatttcgaccctaacccggttcaacccaaaatacccagttgtgactataccacgccaacttgtcagaacacacctgaaaaagaactaaacaggcatactatataataatatagttcaatagcacatcataatataaatttctcagttttatcattctcgggttaaaattactaaaatgcctctgactcaccaacgaggtcttaagttcatgaaccgtagaggtctgtcccaaccctctatagttctaagccaccactctcatggctcctgtggaggaggtacatcatcctccttcacaggggtagagtgatccgacacgcgagaaccaaagtcttcaagcaacaccaaattgccaccatttttatcaagagagcgcatttttgccagtaatctaaaaccccagctcagcccaaacaaatcattagttgactgactagccacctcgtcatcatggtttggcccgacaatgtcccaaggaaagtcacgcacgacaccaggatgttggcgcatcattttcacaagtctatagcatgcagacgtcaagccatcaacaagcttccttttcttgagacgggtagttctttcatttttcttagagacaggttgggcaccaatatcacctcataacttacgaatttcagagagatcaaactcaccaaaaattttaagttcatgaataaatgcctcttcagcttaattttttttggctaaagctctactctcatcatcaagacagttattattattttt

SEQ ID NO: 32852 - DNA, 1290 bp, Cannabis sativa
  modified_base (385)..(407): a, c, t, g, unknown or other
aagatcttttgatcaaagatcaattaagtggtattgacttagaaaagacataaagtttataatatcttttccactatcaatgtcgatccaatccaatgtatatccaatatatttgatactaatatgctttgctaatgccctagaaaggcattcctcatatcattgtgtaagtaaactttatcactgattatcacgtcagtatgaatccagtgcactgataaatcatgggactaaatactttgaagcatataatcacaattattttctattgtgtcgacaacactataatcatgaataactatatattcatgatttaataaaatttatatattaaacatataatcataaaagaatgtagcataacttttattaattagtaaatctnnnnnnnnnnnnnnnnnnnnnnnttagggcataaaatcccaacaccaactctgctctatggctaagggcatcagctacctggtttacacgtcatgccttgtgctcaaagtagaagccgaatttcgctaagaattcctgacatcgggcttgcttgggggttagttttgactgcatgaggaaatgactaacaacagtattatccgtcttcactacaaacttcaaccccaacaagtaatgcttccacgtccgtgaacaatgaataaatgctaggaactctttctcatgtgtcatataccgcctttctggttcagaaagcttacgactctcaaatgccacagggtggccctcctatatgagcacccctcccaaagcataatctgacatgtctgtttgtacttcaaaaggcttgcatacctctagtaaggctaatacaggatctttaatcatgccttctttcaaactttgaaacgcttctttgcacttatcagaccacgcccacagaacacttttcttcaacaactctgtcaagagtgtcgctcttctcgaagagttgtgatagacacgtgacaatcttttattgtatcattgagggagtcttgtaatttggcttgcccattttgtagctcagtgataacagtctgcatgtctgttattgcttgttctaatgccctgatgtgatcctccatctgaggcgcatctgatgttccagtagcagcacctctcttctcgattgtggctaccctggccaacaagttagcatgatcttgggccaacgtggtaagttgttgttatgccgtcattagcctcgagttacgagcttcagaagatagatccctgatcctctcgtctagttcatcaagttcccttatccgcttctcaagcgcttcaattctttgagtgttgttc

SEQ ID NO: 32853 - DNA, 1240 bp, Cannabis sativa
agggcataaaacccaacatattttccatattagcattttgaactttgggggtaggtcaagaacttcgatttcaggtgagaagggtgatccacgtgcccgatcaagttccagatctatgagttttgggctggttaggccttgtgccatgttttaagttgatctatttgtacctacacaagtggatgaacttgttcaggttgttgaacgacttgtgtcacattaggatctctttgaactagatcttgggcacgagtatgtggctggacgatcggtggaatgttttatccatctagtccccttttgtaattcaaatcggttctgaggtcatgtgcggtgcccaacctatcaaacacaaaagtaccaggtggccttggcatttgacttatttatccgacaggatggcctgagacttcgatggtagtgtagttttttgagtgtgtaattcctccaaaggacagtctggtaggatctggccatctaccatttggccccatagtttagacctgtgcccttagattggacggctaatcactacgagtttatgtggtatgcccaacttcatacccttctgatctgcttaggggaatactagattcagtagctggttgttgattggtaacctggtagtcccttcttatcagcacagtggcctgcctagaacgatcatcaatggctacttgttgtgccttcataatttccatctcccggtctctccactctatgaattaatgtctttactcgtcgaatgcaaggttaatgctgcttggagatccttctgatcatgatacagagtattcttatggccttgcatgagctcaagtgcctctcgcagatattggagttcagtgtcatctccagccagcctttgagtgttagtagtggacgggaccttagtgctgggagtggtctgatcgacaaccgtactagtgtttctagtctcctatacacctggtgcgaacccagccagaggagaagtcactccatggcatagcgtaggaggttatgtattaacttacttagggtttgtccttggtggtcctctcatgtttctaggagtttgcacgttgggatctgtcaccattgggtcgccttgattagtaaggcctccccttcgagtttgtacaaccatcttgttcacctgtcaaaacaaagacaagcttgtatttttgctctcaatgaaagtaccaaaatgttgacctcgcttctagccaacgatagtgagtcaaaaataaagcaatta

SEQ ID NO: 32854 - DNA, 4294 bp, Cannabis sativa
agtaacttccatgcttataataatagaaggaaataagttttcgtcttgcttgattgtttgtgaggaaagtcaaattaagtcaaacgaatttgcttgactgcctgaactcaatttttacttggtttatggctgaatttttacttgtttgagttttcagaacaaatgtgcagttattttggttcaatggagtgcttaattttgatgaatgtatatacatttacatttacataaaaaatccattactgcagataagtaagaattataaaaccgtatcgttgttatttcggactttttgaccatgtttcactacttgaatcattctagcaaagtggagattatttggttttctaaattgactaaaacctcattattatttgtacattctttgacgctagtaataattgtattttggttcttttaagttttatatggttaggatcttacatgtcttgtcgtctaaagtttttggggatttgaatgaaggatattaaatttggttcttgattattctgctacttgtattttgtggattgaagataatcatttttcccaactgcatttgtataatctaatattcttatagctatttgtgttgtgaaaagcatggtgcttacctctactaaactgatacatgtatctaatattcttttatgcattatactctatgcagtttgattttgatagtgcagccccaccagaacaagcctggaggaggaggttaaacagtcatgcaaatattctcaaagaatttagtgtcacgtttacagaagcaataaaaatggtaagtaatcttcaaagtgttcattgttttgaatgatagcttgtctccatagattttcttcgttatcttgttcgcttgctgattattgtcttgctcaacttcttacttgtgtatggacattgatttttaggttcgtctaggtatacggctatggtcatatgtgagagaagaagcctctcatggaagggtaaattttcagctctttatttattttatttttcctagtaatgattatgtataaggtgttgtgactgttaacacttggatgaaataatctttacacatagagcattgctattaggcaccttaaagtgtccaacactatgtaaggtgtgagtagttagcggttttccatgttagtaattaaaatatgtgggatctgatattgaattgcactaattgtcgtatgacaatctcatatggtgttgggcattactagtgtttttaaataattctcttatccgtaggagtatgaaagttaattgcctaatcgtgtatctttgcagaaagctccaattgatcctttcactcgtgaaagttgcaagccttctgcatctcagggtgttccacttggaggcatggggtctgttgctgtaccaagcttgttgctacaaaattttcaactttattgttttttattttatcattctgatgtgttttttgttttttggtctcatacagaagtggcagcatatctagaggttttagaggtgaattcaggcaatttcaaattgttcctggtttatgcgaaggttctccagtcatggccaatcaattttctgtaaataccttctcttcatctatgttttttttttttaagtaataagaagcttcagtaaaatccaagtaccatattattgtgaggtagtggatgagtgctacttatgtgaaagtaaagtaagcactgtggaggtgatgaaattccacctaatttgaagtgtaaatcttatatcagattgactattgcagctgaagttgaatgtcgaaacagtttttttttgtagatgtattcattgcaatacaacactatttttgattagaaagaacataaatagttcctatgagtgttctaaatggaagttgtaatgtgaagaatatatttgttatacgtttttacttaaatatgatgaacaattgaatttgttatatttttataagcagcatataattgttggcctataaaattcaatctttgttttgttctcatgatttacttcatttatgttgtgccacagattttcatatcaagagatggaggacataaaaattatgcatccgttttggctccaggtcaacatgaaggaataaggtagatttcatcatctcctgtaaaagaagtttgaaggatatacattcttattctaactgataaaatataaaatggctcgtgtgtgcttttgttgttttacaggaaagtgggtgatcagggtatatcgtcgtgggactggaatcttaatggccagcattccacatatcatgctctatttccaagagcgtggactatatatgatggtattaacatacttctattcttttttgcacagaagttcttcaccctttgcatcctttttgttaattttgttggcttgtattttaggtgaaccggatccagaactgaaaatttcttgtcggcaaatatctccattcataccacataattataaagatagcagtcttcctacttctgttttcgtttatacggtatgttcaatcaacacattcttaatgacaactaaatcgcaaaaatcttttttttttctaataagtaataccaaatgtaagtagagaagtgagtgtcagcccttgctcttttatgttgttcgtactgtttacatattaaattatcatgccttgtattttctcctttgtgaattgaattttgttgttgatttttaaattttgtataattgtaacttaaataaactgttttaatatatcagtatgatttagagtatgacattgtagccataaatttacgaatttgacattgttgttataaagttacttagtagacttttgtcttttttcttagttggtgaacacaggaaaggaaagggcaaaagtcagccttctttttacatgggcggtaagcatctttcctaacataattgtgtatttttactcctataaatttaaacctgccaagatcactaaatatcaaccgtttctttgtgtctagaactcaattgggggagtctcacatttgtctggagatcacgtgaatgaaccgtttatgtgagtaattttgcctattctagacttcatgcggtctttagaatttatattattgaagtacttgttgtccttttttttaataatttctttatatttttttaccagtggcaaagatggagtctctggagttcttctacatcacaagcaagtcatcaaaccttactagctatttttgacggttggtttgcgtatttctcttggtcaacccaatgaaaaaattggttaggagatcttaagagtattacctccttttggaagcataaaacacccctaaacataggaaaggaggataaactcagtaaaacaaggatatttctgcatgaacctgccaatttccattatttaaatcactaacaaattcattatagaacatgtatttagtttatgtttatagaaaagggcagcagataagaacacttaggaaaggacctttgaaaatattcatttagtcaaaaattaagccgtgtacacctagctgttgaaatgcttgatgttaggtattggctggtatgaaactttaattttgtttgagacacttggggataaaattcaaagtagggttttcctaatatctctacaatagtggaacaaaatatatgctctgacgacaatgttgtatttagcgaacctcatcctggtcctgcacttctaagagaaaaatttggatttctcttgttatttcagtgttgctatattatacggctgtcttcatttgtttctaactgacaaaattagttatctataagccctgaggttctttattattataattattagtttaaaaagtagatgttaaaggatatagcttcagactaggaaatctctagagaaagttcgagttcatatatgactttacttggcagttcgtgccttttttttcttttgccaagtactctcatttctgattctgtttttaatgattagacttgtgttatttagtggtagatgttactattgtggtagatgttactattgtgtttaccaatcttgtgacctttctttctgtttgctcattctgaaacaataattattgctcttgttttttttaatgcttcattgttcttgttatttgaagttgggaaactgtgactggatttataattttctacaatattatatatttgatgcaggactgctaaagggaaccctcctgtaacttttgcagtagctgcatgtgaaactcaaaatgtaaatgtaacagttttgccgtgttttggattatccgaaggaagtggcactactgcaaaagaaatgtggagtaagatggttaaggtactc

SEQ ID NO: 32855 - DNA, 1851 bp, Cannabis sativa
tcgatccttattcatagtgtatatatgtttgatttaattccgcattttatacataaatatatatttcagtttatacatataaatgtctaacagccacatcagtggggacaaatccagctatccccattaagaatatctctacgagtattttcccttttaatatatccacccaattttaaacaatgcgacaatttataaaatattctaaaacgagtaattacatatactctgactatcgtatcgtatgatttataattgatctatactacgattgaaaagtttagctgcgcgttgaaaaagtgcatgaacaaaatagtacactcaagtagtgggatatgaactgtatgaagatactcagtatgtttatttgatttatttagtttaatgtaacagcgtatatatatctaaataaataaacacagatattgttcagaaaaaaataaaaaaataaataaacacagatatggattaggtaatattaatgcgttgattgcggaacaaagggtattgacccatgcgatagacaatgtttgactacctaagtaattttagtcacaactgaggaaagatgtttgattttagagtcttgatgttgaatattagattcaagaatttatgatatggtccccaacataaaaaaaaaaaatattttttatattgcatatgtattaatatttgctcctaaaagcaaaggataattgtccaaaatggtggttcaggttgaggtcaccctctttcaccccaccttaaaattttaagatggaccacgttatgatttattgaaaaatataaagatataataagaggtgccacttgatatatacgagtaagtaacctttgagcaatgattagtattttgttcttcaaagcatcttgaccatatatgatgtaaagtgttccacattgttgcggtcttcgtctatttattttatatgcagagagaattaatcactcagttttcttattcaagcaaaataaacgtgtcgtttatagaaaaaaaaacagttcgagaaaaatgaatgcaaaatttgttaaggtgcctaacaccatattaatatggtgtgttgtggttaacaattttttatattatttattaaattaaaatatatgacacataatattaatttacaccagtaaaaataatatttgtagtggttgagaatttaaggtgtcccttaatatttttcatattatatatatataaattgatattgtgaataatgaaaagaaaatttgagaatgctctctgtattagggtgattctaaatcattgttcaatgtctgcgagggtttttgagccactttcaacaagctttaaccatgtttgatggtgctcttggtctttttgcattggtgttgtgctctgaaacagtttcctttcttcttttgggattatcgaattttcttgtgaccaaggtttatctttggatttttgcacggttacaaaaaagactttttatttcgattttaaagcgacacataaaaaaattgtgttgtttgggtaactaacccaataattatagacgcaaatagttatatttttttacttcattttagaatcgacgcaatttttttttcatcggctgtgaaacaaagcaaaaagaaaattgcttcagctcataactgaaaaaaatagtagtacaccaatgctaattggtttatttcttcgattatggactgaagcaaaataattttaaacaaaataaaataataaaaaatcagaacaaatatcgcaccaccaccaccattactacactaatacaacccaacaacaacaacaataaatactgtcaccacaacaaactatcggacaagcaccactgcctgtaaaaaaaatagagagagagagag

SEQ ID NO: 32856 - DNA, 1375 bp, Cannabis sativa
gaagagggaaagaaccagcaacctatttacaatgttagtaaaaggatactgggggcaaagtcaagatatccccctcttgaaaaacttgccttatgcctaattcatgcatctcacaaagtacgaccttatttccaagcacatcccataaaagtcttaactgatcagccattaagacaagttttatccaaacctgatacttcaggaagattgataaaatggtcaaatcgagttaggacaattcaatataacctaccatccgagaacatcactcaaaagccaagctttggccaattttctaattggatggataatctcagaagaagatccactcgtcaagcacgatactaaaacttggaaattacatgtgtatgagcttcaaatgagaatggctcggaggcaggagtgataatgatgtcacctaatagcttcaaattccactatgcactaagattctaatttgatacttcaaacaatgaagtagaatatgaggctttgttggctggcttgagaatagttgaagccttaaaagttaagaatcttatatgttatagtgactcgcaattgattgtaaatcaagtcctaggtgaatataaagcgaaaggattaaagatggaaaaatactaagagaaggttcggaagaacttggagaagtttgaatattttaagattaaacaaattccaagagaacataactcaaatgccaatgcactagaaaattgggcctcgtaaaatgaacttgacaagttgaatttggtactggtcgaagttttgagcgacccaagtatatgtgaaaagaaagaagttgagatgatagatgcctcgccaacatggatgacacctatagtcaaatatctacttaacggcaaactttctagagacaaaactgaggcacgcaaactcttgtattcaataccttgttatacaatagtcaagggaaaattatacaagagaggatattcaatgcctctcttacgatgtgtgttaccagcagaagctactaaaataatcaaagaaatccatgaggccttttgtggagatcgtgcaggttggcaaagtttatcaaagaagattatccgccaatgatactattggccaacgataaacaaagacacacatgaatttttcaagaaatgtgacaagtgccagaggtttttacatatacctcgtgtaccaccaacagcattgagaatgatgacctcgccatacccatttgcattatggggaattaacctgattggggcattacccacagggcgaggaagagcaaagtacgttttagtagcagttgacttctttacaaaatgggcagaggttgaacctcttatttccataacttgcaaaaaagttcttgattttgttgtcaagaacattattt

SEQ ID NO: 32857 - DNA, 1589 bp, Cannabis sativa
ggagttttgggagaatctatcgaaccaaactgctatccgcccccttaagggagttgggatcaaaatgcatcgtaaattattctctacattgctggcttgcattatagtattgaaattgtttaagtgtgccactagatcagtagtcccatcatatagcaggacatgaggattcttaaatcacttagggaaatgggaatttaatatgtctggatgaaaaagtttgagttccttgttagagtcgtatccaagaaaatttccatgttccctgtcctagtacctgctgaactgtcttcgggccctttgatgtattgaatcatcatctagttgattgacttgttcacacgctcgtggagattattggtttagtctttctcagagacttagagcattcctgtttaattgttcgcgcaatttaaggtgtctttgattcaatttccttcaaaagccaagtctatcgcgcacaccgtggagtttctcttgccctttttcataattgctcactcattgacttagtagaatattttcttattgataactcttcaaaattttgttaacaataaatgaggcttttttgtaagttaaaagaaaaacttcaataattactactaagtgttaacaaataataataagcagactacgggcacaaggtatttatgtacttttgcagttaaatctacataattttcgagtcattattattttttgggtttttctgtgtaacagagtacaaaattaaaggaatgtaagtaatacaatctcaatttttccagggtgatcctagataattttgattattccttctgtcgtaggttttgtccctatttataggagattttaggaatgatagttatttcttttagtcttatctagataaccacccattaaaaatttacaatctccacgtttcatatttacaccatatgggataaatgaattaattgttgtatatgcctttgtccatatctaaaacagttgtttcatcgagttgttcttctattcatcactttataggctgctcacaaattacattattaaatacgtgttcatattcctcaaatcttttctcgaggaatgaatgatttattcatttattcctcgcactggttatctaaaatgaaattttggataatttttgtatacaatcatattgaaataagatttttaaaattatatcttttgtgttttttaagttaagaacttatatgttgtctcacttaactcaaggacggagctaggattggatgattaaggggaccaaaacgacaacaatatgtacgacaatgagacttcacgattaaaatttttagtgaccataactcttttttagtggtgtgtgttaatcaaggttgattattcattaaattaattagtataaaaaagtgatcctaatatttttttccaaagtgagtttcacttttttaacaaaagccatctagtttaatcaaactgtaaaaatatttatatcaaatcacatatatattttaaaatctataaaaatattttattaactaatagaaagaacatataaaccaacaaattacattactttagtaaaacatgttagactatatatatagtgtatgtaatat

SEQ ID NO: 32858 - DNA, 2603 bp, Cannabis sativa
  modified_base (1807)..(1807): a, c, t, g, unknown or other
aagtatgggtgcaaaggcagtactacccttggtgaatgtggtgctctgaccacgccatccagttgacagtaaaccaatctctcattggtctctcaatgactcctcacactaaacgactctcactagtccactctctcttaccttatcaagagtctagacactaataatagacggaagagagacccaacgatctccctgcactccaaaatcgagaacctgaggttcagtagcttatattagaacatggtctacaccgatcaccgaaggcagaccaagcctattcaaaggttccctatcaccatcatacgagcctagagggctatttaagaaaacaaaataggtcctgtactgccttctcttagcaggtaaaacctcatcaacctcggactccctatttgggttctcaacaacatggtcggcaacaagaacctctatctagccaacctctggatcaccactttccaatggctatgtggcctcctccactataccgaccctacccattgttgccaacttagcaatgtaagggtcaaaaggtggtgctctacggtaagactacttagtttcagctcacaaaggcatgactgactaaacctatgattgagtacttatgtcacaccctaactattttaggcatgttagcgtgattttttaaattattgtacagatcgtttctaatcaacaagattattgaaaatcgtgattaaataaaattttgcttatttaattaaaaacataacgtagcatacatttaaaattttgggatcccgtttacgaaaaaaaaaacatttacaaaagtttaattatacatgtacaaaagtttgtcgcctagcgactatacaacaaaagccctgatgtcccaaagattgtacactccaggcctaatctccccaacatgtacaacctccatctgcttgctctcacggctgctcagccttagccttgcccttacctacacatggaaatagcaattgtgagtcaacagactcagtaaggaaagcataacataaaacataataatatcccggcttataataaggcgcccatacacccgaccgtaacccaatccccatatcccacacagtactgagtcttcaacattcatacgacaatactatcgaccataatgtcagtctatattgaatatgccagtcgtactatagctatattgatgtgacaacatcgatcagtattttagccaatatacatttatcagtaatttgtacaactttatgtatactattattgctatcaatgtattctaacaggcataaacaacatgtatgctaaacatgtaaatacatatgcatgacattatactaatctcacattgtttccgaatttaggtttgtcggccaacctgagcggaacaactactcggtgaattacaggcccctaaatcacatcaatcataacatggataagtgacacgcttaatcacaaccaaagacttaggttttaaaccaaaaacatacctactgtaagttagcatggaaataccctaaactaacagggaattaaccaaccaaacctctgaaaataacacgaattgacaacacaaaattgttggggaacccagcagcaaatccagctaaccgatgttacaggacctgcaatccttaccaaatcatttccgaaaattccagaaagccccgaaaattccaaaacctaaccaaatcatttccaatccttaccaaaccttccaaccctacatattatgccccaatagatatattccaggcaataaaactactacagaagcttagaatcaaaaatcaccattaaagagccaagcttgagttctaanactcaaagcttgctcaaacaacactagagccactcaaaccagccaaaaacaacatatctaaacataattcaacttcaaaaaacaatatcaaactccaacaacaaccacagaactccaaactaacaattcatgcaaaatttcttatttaaagttcaagaaaactaaagaagatgatgctaagaacttacctacagcttgagatcactaaactcttgctgtaacttgcttgaattgatgaaggaaactccaaatcatagctgctctagggattttgagaaagaaaaagaaagggagtttgaaagagagagagttctttttggtttaatttattatttttcaaaaaattagatataattttggttttatctaaataattaagagataaaaattagattattctttccacaaatgtccactaaatgacaccctaaagcaaaatgaccattttttccttgcccacactaaaaatcataaaaatcagttaggggtatttttgtcaattctaaaatctcaaatattcttaacattcccaatgtcttactatattgcccctctatactaaaaaaaaatactatgatgtgattctaatagccaaacaccgcgttccaatattgtcgggcacaaaacatgcaaaattatgaaattccatatatgacatacagaatgcattctgaattcaaataaatcttactaaactgataattcataactaatatgtaagtttcataattaaactttaattatatactaatttccaaattaaagttaagcagtatttacaattatccccccttaa

SEQ ID NO: 32859 - DNA, 1989 bp, Cannabis sativa
  modified_base (56)..(76): a, c, t, g, unknown or other
tgaaccatgcagcataaaatgttatttctgatcttattaataagtaaatctgattnnnnnnnnnnnnnnnnnnnnnagggcacaaaacccaacagtaatagtctactctcctttatttgtattgacttaagaacaaagaatacaatgattcctctcttaaagctcttacgatgaaatctctgagtatgctctcttagatctccctcaagtaattctttcgccccctttatcagtgagaatggatcactatttataaggctacatgtttgagggaaggtttcccttttgcttaaaatgtctatgattggtgagaatacagattacatatatagaatacacagattatgggatttggacagcttgccatatctatgtgatatgatcccagagttatagggattgctcttgtgtttcacgatccaattgcttgaaatgctaagtgttgatatgcggctcggattgtccactgcttggttgggaggacctcgtctgtgcaggtatatgcactgttctactcggaacatctctttcaggtaggtatggagaatcaagtccacgtgtcaccagcatgtgatgccgcgtcaaagtgtaaaaattggaataacatttgcccccaagtctgtacgggacttccgaagttacgtgtagatttcatccgagctgactttacatttgaatgggtgacacatgtcgaatgcatctgttcgtgactcgatgtgagtctgaccaggcgtccctttgattttcacaatagtagaagggaaattgtatcgaaggggttactcaatgcctctcctacggtgtgttctccccacagaagcaaacgagattatcagagaaatccactaggacttttgtggagatcatgcaagttggaaaagcttgtcaaagaaaataattcgacaaggatattactggccaactataaacaaagacacacacaaatttgtcaaaaaatgcgataagcgtcaaaagttttcacatatacctcgcatgccaccaacagaactaagaatgatgatctcgccctacccattcacaatatgggtattgatttgatttgggcactccccatagggcaacgaagagcaaagtacgcagtagtggctgtcgacttctttataaagtggacagaggctgaacctctagtttccataacctgcaaaaaagttctcgactttgtcgtcaagaacataatttgtaggtttggaatacccattaagatagtaaatgaaacttagttcgatggtcaattattcactgagttctgcgagaggaacaagattattaagagcttctcgtcagtatcaaggcctcaagcgaatggacaggtagaagctgttaataaaaccttgaaggatactatcaaaaagaagttggatgctgcaaagggtagatgggtcgatgaactacctcaagtactttaggctcacaggacaattgagaaaatagcaacaaggcatactccattctcgctgacatttggctcggaagcgatgttgccagtagaggttaatattgcaacccacaaacaaggcttctataatcaagaagaaaaccatgtacttttaaaattgttcttggatctacttgaggaaaaacgtaccaagtcgcagattagtaatgcagcctaccaacaccgagtgacaagatacttcaacaagaaagtgaagaagagacttttcaatgtcggtgatttggtgctgaggcgagtgtttacaaacacgagggatgcatctgcaggagtatttaacccaaactgggtgggtccttatgtgatcgaggcaatagtaggaacaagggtttacaaattagctcggctgaaccgctcgctaataaagaaccactagaacgtggagcatttgcgaccctactacaaataaattgatgctgtaatctctatttttgatgtaatattttgaacttcaattattaataaagttgaatcatttttcaagtaattacaaagttttactctttaaaattact

SEQ ID NO: 32860 - DNA, 1694 bp, Cannabis sativa
tttcgaagatatttcaatgatctattaagttatgtttcacactctaatcacaattttgaagatatcaagtctaaaatttatcctcaagagagttacaaattttaactacaacttacccgaaaaagatcccacggacacgattcaagctccgaaaattggtgaccgacctctagagtcaatttcaccgttggataatcatcaatggtgaaaaatagcttaaatgtcattttcacattttttgaatattttagtattattttaataagacctcattctctataaaaagagagctcatctagctcatttttcacattcaaaaaagtgcccaataaggtcagagcatctctctctagtttctctctctaaaaatttagacctttgacccttagttaattctcaagaaaaataaaaactcgaaatagacgtatttctattacaatcacaacatggggagtgaactactataatttttttgtgtctctctttaatatttacttaactcttattttatctcaccaatctagcgagcaagtgttgactatttttcagcgtcaacaatataacttaaattcatctaactaagctttggacgtctttgaccttaattggggatttcatgtcgatcaaggcctttatcttttttgggttagcctcgatgcccctagagttcactatgaacccaaggaattttttggagcttaccccaaaagaacactttagaggattgagcttcattcggtattgtcttaggatctcaaaacattgctttaagtcttcaatgtgcccttgggctctcttagacttgaccaacatgtcaacgacgtatacctccatgtttcttcctatttgttctttaaacattccgttgactaacctttgataggtggccccaatatttttcaagccaaacaacattacttaatttgtagcaatataagccgacgttcatttgaaaacttgtatgttcttggtcaggtgaatgcatgcttatctagttgtaccctgcgtaggcatccatgaaagttagaatttcatggtcggctattgcatccaccaactgatcaattctaggtaagggaaaacaatcttttgggcacgccttgtttaagtttgtaaagtcaatgcatacccttcaggttccattgggctttggaactagtacgaggtttgagacccaaactgggtagtaggcttctttaataaatttgttgttccacaatttttccacttcttcctttagtgctttggctatttctttgtcgagtaaccttccttgaattggctttaagtttttgatgtcgatgtttaaagcgtgacttatcacggtggggcttattccttccatgtcttcgtatgaccaggcgaagacatcttggttttcccttaagaactggatcaaagcggatcttatgtccttaggaagctcttttctgatcttgactaatttggatggttattcgtggtctaatggtacttcctctaattcttcgattggaccaacccatgtatcaatatccccaaaatggggatcaatgtcatcgaccccattttgggcgagtcctcattgctaagaactacttactgtaacttagagggatttggctactttctccctagttttgatggataggttgtaacactctcgtgctaccatttgattgcccttcagccagccaattccacccttggtagga

SEQ ID NO: 32861 - DNA, 1503 bp, Cannabis sativa
agaaaagggaagttggatccaagagccttgaagtgtgtattcataggctatccagatggagttaaagggtacaagctttggagccttgaaccagggaaccaaaattgattcattgtcagcagagatgtgatctttgaggaagacaaagtgtacaaagacacactcaaaacacaacataacaatactacagacagcagagaagagagtatgcagtttgaggtggaattgtcagacaattcaacaccagaacagggagtacttgcataaacagatggcacataggcactacaagaggaactagaagatgaaatggatcaagaagacactgccatccatgactaccaactgacaagagatagagacaagaggcctcacaaagctcctcaaagatttggctttgttgacatcattcactatgctctaaacatagagcaatttgagcatgaacttagaagctttgctgaggctatgaagtcagttgagaagaaaaaatggggaggagaaatggatgaagagattgaatctctaaagaaaaataaaacctgggttctgatcttaaaacctgcagggagaagggtagttggttgcaaatgggttctaagagtcaaggatggaattgatggcactgaagaagtaaggtacaaagcaagattggtggcaaaagggttctcacaaagagaaggagtggattacacagagatcttctctccagtagtaaagcacacctctataagactaatcttggctttaacagtaataaatgaccctgaattggagcaaatggatgtaaaaacagccttttttcatggtgaatgggaagaagagattctaatgcaacaaccagaaggttatgtggaaaagggaaaagaagactatgtttgcttgctaaaaaggtcatgtatggcctaaaacagtctcctaggcatttgtacagaagatttgatgctttcatcactaaatcaggtttcaagaagagtgcatatgactgttgtgtgtatgtcaaatcatccaatactaagagtattgttttcttactcttatatgtggatgatatgctaatagcaagcaaacacatgagtgagataagaaaagtaaaagacatgctaagctctaaatttgaaatgaaggatctcgggcatgccaagaagattctaggcattgagatactcagagatagacagggaagaaggctgatgctatctcagaaggactacatttcaagggtgctgcagaagtttggtttctcggaagttaaaccagtgagcacacctatgacacacatgacaaagttatctcactcacaagctccaactatcgaatctgaactcaactacatgaaaaacataccctactccaacctggtgggaagtctgatgtacatcatggtgtgcaccacctgatttgagtcaagcagtaagtgtgatcagcaggtttatgggaaacccagggatagaacattggaaggcagcaaagtgggtggtaaggtacttgaagggcacatct

SEQ ID NO: 32862 - DNA, 1747 bp, Cannabis sativa
  modified_base (1718)..(1720): a, c, t, g, unknown or other
cttcccaacccctcttgaaattttctctctctttcgaagcttatccttaagaaagccaaggatagcattcttattcctcccaactgaacaaggaaggcctatatataatagtcattttcatctgcctcataaatttctagcatagcacagattgaatcctgcacctcactaccagtattatttctataaaacacagaagacttagtgaaattaattctttgtcccgaagccacctcataagtacgcaacaggtccttcacattgtacgcttcatcctcagtggccttacaataaatatagctatcatcaacaaagagcatatgagagattaccggcgcaccttgagcaattttacatcccttgagtaaactactttattcataactacgcaaaaaactagagaaaccttcagcacaaagaataaacaaatatggtgataaaggatcaccttgacgtaatcatctttgagcaacaatgggccccaactccttccctccgtgttaaatggtataggaaacagaagaaacacattgcataactaagttaatccaacgaccattaaaacccatcattaccatcatagcacagaggtaaccccactcaagcttatcatacactttgctaacatcaagtttaagtgccatataaccatccctccctcttcattttatctttaaatgatgcataatctcataggcaatcatgatgttatctaagattaatcggccttgtcaaaatgcactttgagtatcggatatgacagacagcataacactcttgagtctattaccaaccactttggacacaatcttgtacaacacattacataaagcaattggtcttaaattccccatatccataggctgcttcttcttaggaattaagaccaaaatggttttgttaagatctataggaagaaacccattatgaaaaaattgctagaccatattaataatatcatctttaacaatcgcccaacacttctgaaaaaagccaggggtcataccgtcgggcccttgggatttatccggatgcatctggaataaagctttacaaacctcctcgtctgaaaccggtaataacaactcggtatttttctgcgatgatacacgagtttgcacaatgcttgtgacatctctctaatcggtttaagaagataaaaaaagttcgttgaaataagaaaccataagttggtccaaaccactatcccagtcaacccacgcaccaggatggtccttaagttttgccacaaaattatttcttcgtcttgtagttgcagaagcataaacatatttgttattattgtctccttcttgcaaccataatttctttgatctttgacgccagaaaacttccctttgcacataactttgaaccaaatttctctttggttgtttgtaattggcaacggatacttcatctcgacccaatttccacctttgcagctcatttttacactttttcaatctttctttaaagttcccagtaacctccttaccccaatcggccagcttttccccgcaaaactaaattttatacatcacgtcatcagccccacaaatctcccaactatctttaacaatctgataacaaagaggtaccctcaaccatacattttcaaaccgaaattgcttcacaaaattgtggccagtagtaggaaccatgaccataagaatcagagtatggtctgaagttgaaatttcaagattatggagctnnncagaagtgaacatgttcaaccaagcaa

SEQ ID NO: 32863 - DNA, 4263 bp, Cannabis sativa
catttttggttgtggagggactaaaagtttatatccaagagaaagatgatacctggattgtgtgaactgttgaacattcaccaatgttttaatctgattcttggcatctaccacttttttccagtactaactcccttgaatggaggcattgtagccccaccaatcgtctccccgaatgtatacactatgtatccatcgaacccacatcttatcttccttgttagcaatcgcccacacatatttaaacattgctgctctgttccattctgctacctttttgaacccgattcctcctttagacttagcttggcaaacaaactcccaagctattaaacccaaaccagtcattgaatgttggccctttcatagaaacgctctacaaatagcttctatctcattcactatcttcttaggtaaaatcattatctggctccaatatgagtgaatggtcatgagaattgaattcactagaaccgcccttcctgcaaaggagagattcctggtactccaagttttaattcgggatgtcattttctaagcaagctctttgcaatctttgcttgaaattcttttggcacatatcgacactcccagatatctaaatggggcattgtgtctaccgaaaccagacatatctaatattcattgtatttccttgtcatgcattccactaaagtagacagcgagtttggtaggattaggatgcaaacctgaggataatgagaatagcttcaatccttgtagcatgagatacacacttttgaagtcacccttactgaacaagagcacgtcatctgcgaagcttaagtgatttagtttgatcccctcacatctttcatgaaaccgaaactcttctttagaaccaattctttgcataattctagacagatattccattcccagcacaaagaggagaggagacatgggatccccctggcgtaatcctctttttgactcaaagaatccatgcagagtaccattaaatatcaatgagaattttggagttcgtacacaattcattaccagctttacaaacagactagggaactgtaaggcttctatcatctcttctataaagtcccactccactgtatcgtatgccttctgaagatctagctttatcatgcaattagcccttgcattcttccttccataatgtctgatgaggtcctgacatatcattacattgtgagcaataagtcttcctttaacaaagccactttggttttgagcaataaggcttggtaagatgtttttcattctagaacaaatcattttggtggctattttgtaaacaacattgcagcatgcgataggcctgaagtctttcactgtgttcgggcacttcacttttggtataagggtaagaactgtggagtttatctctttcaaaaattttcctgatgacaaaaaagattccacagcttcatataattcattcccaatcaactcccagttatcttggaaaaagtaactcgagtatccatctggacctggcgctttgattcccaggattgcaaataaggcagctttgcactccttcgagtacttctccatcagcatttcagcttgctgatttgtgacttttggtcccacattaacaacactacggatgacttttttcctgttctccatggagcttcccaataacatcttataataggaaagaaaagcatcagttacctgttcgggctgatcagttcgggttccatcctgctgttcaatagatcagattttattctatcttcttctatcccgaaggcttgaatggaatatcgaagtgttatcatccccatttttcacccaagagaccttggctttctgttgtagcatggataaaaggtcactatgcacctttaaaaattgatgtcgagcctctaattcctcctaatgtagcagcaggttttggggttccatttgcaacttgttttgacacacagccagcacttctttggcctttgctctagcaacatgaagctcagaaaaaccttgcttgttaatctcctttagcactcccttcatagctttaagctttgtgactacttgatacatccttgttccatagacttgttgtgtccatacttctttaactttctcttcataggtcggataataactccacattctgaaatatttaaatggttttttaccattagatgtttcaggatgaaaagttaacacccccagggaatgatcaaaaattccttcattaaggaataaagcttcagcatttgagtacttgcccatctaacttggattagctaggattctatcaattttcgaatagatcctatctcctccatgttgtttattgttccatgtgaagaagttgccactcattttcacatcttcaagctggcatttctcaacaaattcaataaattctattgccttgtcatactgtactcggtctcccactctttcttctctattcagaatttcattaaagtcccccaacactatccaaggatcaactgttgacagctcctttaattccttccacaactttctccttccctctttatcattcacgacatacacagaggtaacatagaattcattcctcccatctattatagtcaccttgctatgaataaattggctatcacatttgattatattgacattataactcaaaggattccaagcaagaactatcctcccacccggatgccaagcaacatttgaggtaaaacaccaaccactatattaattttgaaatatctatcttaaaaaaatttatatctatataatgcctctatttagaattcttaacctaaaaattttaaaccctcagcattagcctcagcttgatgcctccctttcatacgatcaattcatggagataccaaaccatggatccatcaatatttctttctccaatttttttatacattaatattgttgattatatttataatcttgaccagaaggtttctttatacgtaatatttacatctgtggacttaaaatcattcaccaacaatttccactagaagaatctgattggagacactcagtaagttttataagaaatttaacaggtattatatgcactcaagaaaatcgagatgtgaccgtcaagatatatatgggatgaaaaatcaaattgcttgaacttggcttccgatgatgagcatttaatgatcaaagtaagttgcctaataattggacttgtatctgtttgtatatatataaatatatatatataaatttatatactaaaaaaagttacgtgcgagacacgtatacttagttttatgtttcgtgatttctactttatttaaaaataataataaataattgaaaaaaaaaataattagctattgtttaaaattatttttacatgtccaattaatgaataatagggttgatcaaagattttccaccaaagtttaaatatgattttgggctgaatgatatctgtacaagtacaaataattttctagtaagttttagaaactcacatccaagcaacaacccttagtttttttaaactactatgtttaatgatcaaattctagtaaatatgtgagactctggcattaccatattttttgtacttcaaaatcactactttcttctgagataggctatggagaattgggatcacatatggccatgccacaatccataagttcaagaattggcaattgtgctgtgataaattgaatacgatctgccgatatcaagaaacattaataaaactaaagctttaaaagtcaaagaacaaaacaaagaatatgttcttaaacatagccaaaaaaaagtaactatttaaagtaataagagcaacaaggagccttgtaagagtgtctgggaacacattacagatcattccaatcacattatcactaataccaaatctgaatttagatagaacacaaaatattgtgttagaaaacattaaatggaaaaagatgtcattacgaataacatacccatttgagtttgcaaccattgcatgcatgagttaaaaaatacaatcatctttataatgcacaaggaattggaagcatacgcactaagatcaagaagctctaaatttagataactttgagcaatggcagcaagtgagaagtattctttagatgccatggacggaccaaactttcaggtatggaataatgttgcgttcgatgatgatgattttgaatgctttgcctttgtttcttggtctattttgcattcagatttggtgaaccattcgtctgaataatttgaattttactacagcaaagagattctcagtcagcaaagaga

SEQ ID NO: 32864 - DNA, 1544 bp, Cannabis sativa
aaatcaaaggcaaatattctctctgccttttcctattctttctcatatggtatcagaagaacaaaggccttcaccttccatggctcggccaaccacacgatcccaagatggctctgcacaattaacgatcgacaacaacactacagcagaagtcaattccgactccatgcctgctcctccttcctcagcaatccctcgtcgagttccctctgttcgagtcccatctcagaatgcagaacaagggtttcaagacacttccaccattgctgcagacaaccccaaccagaacctccaatctcgatcggtagctgatgatcattccagcccgttcttcctaagcaccggcgaccaccctggcttggttcttgtaaccacagtcctcaatggaaccaactaccagccgtggaaacgaggcatcaccatggcgttgatggccaagaacaagatcgcattcatagatggatctctccctcgtctcggaactggtaactccaatctaaactcttggttaaggtgcaataatatggtaatgtcttggttagttaatttggtttcccctgaaattgcacaaagtataatgtactttgatttagccactgaaatgtggagtgatcttgctgagcgattcaacgaaggcaatggccctcgaatttttcaattacaaactcagcttactcggcttcagcagggtgataactctatttctacctattttacaaaattgaaatctctttgggatgagttgaaagaatttcaacccattaccacttgcacttgtggtgcaatgaaagtttttttggattcttacaaccaaaatcaagtgctccaattcttgactggtttaaatgaatcctatgcttcggttcgggctcaaatcttgcttaacgaacccataccaaatctgtcccgagtgtttgcaatggttgttcaagaagaacgccaaagatcgcttggaaactctgattcaattcccttggctgccgcatctagttctacaaatcctccaagaacaaagaaacctagaccatcttattcaaattgtgggaaacccggtcatcttgttgacaagtgttatttcctacacggatttcctcccggttatggggacaaaagaaagcaagacaaaggcaaagcaaaggcaaacattgctactgcaaacacccagaaaaacgacacagatggcacttcgggtcccattgatctatcctctcaatgccaacaattaatctccttgttgagccaacaactcagcagcaacaccactgcagaaccaactgctatagctcctgctgcatcaaatttggcaggtaaatctttaaattcaactcattggattgtggacagtggtgctactcaccacatgtgctgcaatccaagttatttttcatctttttctaacacaccatttcccaaatatgtttccttaccaaatggacacaatctttctcgccacaacattggcactgtccaaataaacccaaaaataacattgcagaatgtgctttatgtaccacaattccagcttaatcttttttctataacag

SEQ ID NO: 32865 - DNA, 1180 bp, Cannabis sativa
acaaataattttcatggttgtcaactacttttataacacattcttgcaaagtgttaacaatggcaattcttcactaatttcaataattataactttaacataagtttgagagtttatcaaagtgaatactgaaaactcaaaaagagctaagaggccagctcacacctcatctaggccacaataactttcatatcgaaaagtgaaggtattgatttggagaaagagcaactcgctcgcctccatagatcaatagacctccacacagaaaaactcctcagccaaagcacaatcggagcacacaaggacacctacaacactccagctgagagagagaacaatttgatgacattttcatcaaattgcatggttaaagattagtaaaggcttttttttaatgaagaatttaacaataagtaaaattagttataacgatttaaaattattttcattcgcatattttaaagaccaataattttgatgctctttttttttttttttttaattaagcgtttatatattacaatacataacctaagacatgaactcaggacctccaacacacacgcaccttcttatggccacttgagctggcatctaacacattttaaagaccaataattttgatgctcttaagtcatagtcataataataatgtttattagttaaattaattcatcctaaaataaaactagtttggtccattttgtaattaagattaagagaggccaatcagagaagagtgtttgttttggtagaagataaatgtgtttgttttcatttcatttgcttacattctaaaccggtcaaccacaaaatacaaataaaataaacacactaaaaccgaaaaaggacaaatagaacaaaactaaatttgtaaacatgaacatgacatcattttctaagtgacaatgacaattaattgaatttttaaaaaacaaaaaaaaaaataataaagttaggaaaattcgatacttatttatttgttttgttttggcatgagaatatattataattatttaagatttttattataaaattttaaaaaatttaaattttttaaatgctaagtttaaatagtttgcatatgtgtgaattagactattttaattattttttttaatttttttaaaattttataatatattttatataattataacatatatatacataatcataa

SEQ ID NO: 32866 - DNA, 2577 bp, Cannabis sativa
  modified_base (2544)..(2551): a, c, t, g, unknown or other
ttttttttttggagaaagattaaaaaaaaaaagctaatgattctctctcttttgtggggctttggaatcaatctcaaaaaccagtcacacaagctcaattttttattatttccattaattttttaatcaaaattttctactgagagagagaaagatgagagctttgttgttgctttactttcccatttctccttttccttcttcgtttgtctctttcgtcttttgccattccactcaacactcactgcgctttcattcaaagtaaaaagccagtggttttgggctaagctcaaaaaccccactcactcactactacactcattgatattaccattaccatcttactatattcatatttagcaaaaaaaaaaacccagatagagttagggtttttgtaatgccaagagcttgaaaaaattcatcttgtgggttcattttgaagatttgagtaatgggtcaaaaccagctttttctgggtttcactcttttggttgttttatttggatgtgtctcttcagcttctactaatgtaccagcaagtaagtgaagcttcaaaatgttctttacttgttttactaaggtttccatatttatgatctgttttttggattgcattttcagagatcgttactgggtttgtgtcaaatgctgtatctatggctatgaaatctatatggtcactcaaaccgacaacaaaaacaggtatagatctctagtgatgtatatacattttcttcttttcttacaagattttttttcttgctctttatttatttattctatctttttgcagctattactggtcgtcctttgatgaagtttgagagtggatataatgtggagacagtgtttgatggaagtaaacttgggatcgagccttattctgttgaagttttacccaatggggagcttttgattttagattctgccaatagtaatctttataggatatcttcttctctatctctttgtaagtggatttgagttttaattgttctttgtctttcatctttaataatttgtagcatcattgttgaaatctatgctgttgtttattgtagatagtagaccaaggttggtggcaggatctgctgaagggtactctggacatgttgatgggaagcctagagaggccagaataaatcatccaaagggtattacagttgatgatagaggcaacatttatagtgcagacactgcaaatatagcaatcaagaagcttagtgatgctggtaatttccatttagacaatttgttgtgtttgtttgtgtatttcctttgccaaattgggtttttttgatttggtatatatattgaatttgaatgaaaactgtgtgctgtttattaggtgttacaacgattgttggtggcaaatggggtcgcgggggaggtcatgttgatggaccgagcgaagatgctaagttctctgatgactttgatgtggtttacattggaagtagttgctcattgcttgtaattgacagaggaaatcgagctatcagggagatttagttccatttcgatgactgtgctaatcaatatggaactggttttcctcttggtatgtactattttccagctagaattttgtttttgtcttttcaacttttttgcacaaaatattgtaggtgcttattttcattattattggttgattgcagggattgcaatgcttcttggtgctggtttctttggatacatgttggcattactgcaacgccgtgtgggtaccattatctcttctcagaatgtaagtaataccgcaccctttcttattaggtattgtaacatgtgaggatgagtctttttattgtgaagagagcaagaaaatgttttagcataagtcaaaatttctttgatttcatttggtaagagtacaaaatttgtttacatgtgttgtattggttttttcaggatctaggccccgagaagacgagctttacagcaagtgcatattagaagcctccgaaatcagtcaggccaccttttatcccaacagaagacgagctggagaaacaaggagaggggttctttggatcgattggaaagctattggtaaacactggaacagctgggatggaaattttgggtgcagcctttcctagcttttgaagaaaaccagctttggactatcaatatcaaaatctacaacaacaaaatcatttgaatacttggcctgtgcaagaaagtttcaatataccagatgaggatgaacttccttccattgaaacaagaaccccaacacctcagaaaacatatgctttcatgtccaaggatgctgagaagttgcaaagtcgagccttctacaatggttgggacgatgaccttcagcagcagaaacaacagcaacagcagcaacaacatcaacagcaacagcatcataacatgtaccactcatctgtgccacatacttactatgagcaaaatcaggaaaaaaactaacgaagttatatttggggcagttcaggagcatgaccgaaggcaccaaactgtgatcataaagccagttgacaatggggctcccatgtttgtgttgggttttannnnnnnnataaaactctttacaatctgattagt

SEQ ID NO: 32867 - DNA, 1536 bp, Cannabis sativa
tgctaaaatgatacaaattaaataaaggattcatataatttaatgtaataatttgtatgaaataacgttaatcaattgtaaagtgtttcctcttgataatgctaaacaccactaatacttaataattgtgcctattcttcacaagcacaagattctctctgtcatgcaactaagacgattctctcccgcccaaagttgttcattggtatatctttctatttcttttatagagagtgaccttgaagttgtcatcaatttatatagtcctttctttttctgaggttgtgttcgggtgaagctatttttttagttgtattagatccttattatttatctttctgggtgtatacaaatagagaagctatattccaaccaccgaccttaggcttgaaaccacaagagtacccaaccaccttggcaaaatagaaacaattaactttatgaggtaggaccttacaaagaaaaaaactttaagaggtaggattataagtattccatatctttaaatgttgcttgcattttaagtggtgatttgatattttaaggtggccaatttatgttgggtcctgttcgtccatctagttggactgctatctcattttaattctcacattagtttgatattatctgttttggattaagtccttaattacggtcttcgtttttggacaccttcccaaaaaatcttatttgaagtaggtggaacacttatattcaagacacaactcttgcctatttttcagatgtgagacttgggctgataatccaacaatctaaggaccatatatttgtggactcccctctagcaaaaccatcttataccattgctatcaccaaatagatttcgtcacctgaccttcaacattgccaggaaggctttcgacacaagacatgcaccaaacatagatcttcatcttgtatcgtcgtaatctctaatggaacacgccacctaccaccataatatcatgtagactttcgatacatagctttatattgatcttcaatcgcgaggtcatcacattgagggcttctcccacacatcacaaatgcaacccactatcccagcgctgctaaatctttggctctgataccacttattagtctctgttcgtccatcttgttgggtcgtcacctcattttaactttcacattattatgatattatatctttagcctaagccctcacattttttatttttagacacctaaatgccttatacaaatggagtaagtggaacacttatatcaaagacaactcatgcctattcttccgatgtgagacaaaggttgatagaccaacaattcatatcagagctagacttgggctgaagcacatgagatttttagttataattacgacccacctacacaatggcttaaaaaaaatatacataatttttagtaattttttagaataataaatatctttcaataaataattcaataattttttttcctacttcctatcctatttcaggccggctctggcttaacatcatactaacatggaattttataattagttagcaacttctg

SEQ ID NO: 32868 - DNA, 1140 bp, Cannabis sativa
tgactttagaattttaccacttcttgtgataaatttgagatttgaaatttttttattatattttataaataaaaagattatttggctgatattttaattaatataataaaatttctaaaattgaaaaagaaataattaaattaattattttttttttacacttgctatttaaattaaaaaatcgtaatttttaaatttgagatatgatctattgcttagatacatttctatataaattttactgctgcccaagcccccttagaaaattggattcctcaataatattatattttttttttacttcatatcgatgaatttttttttgagtgtactcaagcattggacttttgacagcattctgtgttctctttctttttccgaagacttctcggttgttgtggtaatatatcgcaatttaagtgagtaattataatcttcccattcgttcatactaaactgtatatacattttgaatcatattttttttttatacatgtacatatatgtgtcttgtatgtattatttttactgagcagtatatacatatctttcgtctcttcccttttttttgtaactattaggatgatatggcatattttgaattttaagaaaacctttttgttttctttggccacgtgagagccatgaagtgtagtaatttatatatatttaacagaaaactatagtatttatacatatataactgaactgacatatatatatacgtatatacatatattacttttactgattcaaagatatataatagcgaaccatcaaattagatttttttttgatgaaaaaccatgtcttttggtatacttttattgtagcagacttgttttcacaatcaatctcgagtagtcgtatatcaccttaacataccactcggcccacatatcatggtacaaatttatatgtatatatataatttcagatgatccaaccgaaccatgatattttgaccgcaatttttataccaattgattagtatattttatattttatatattttaggtgtaggcaatatcaaattttatattttactatatatagttatatactttcgatggtgccttttcttttctttgaatgggagcatttctttgaatgagagcatccaattttttagtggaatga

SEQ ID NO: 32869 - DNA, 1945 bp, Cannabis sativa
aaataatttccaacaataatgtcagcaagcccgagtccacccccacaagatccctcaatcatcatatcaaaacttgttctaattatgtccccctcattcaagttgtaacccttcatgatggcataaacatatttcagcctgtctatctgagcatcagaatagtgtttgtttggtaccaaccttgcactaacgaaatatagccatgccttggccaccgggtttagttcacacctaaacagctgataaggttctccattgtattcatgaaacttgaggcctgggtaacctaaagtttcagctacgtcatcataattcaaactcttttctcaaatttgctgtgtcaatggtagttcttctatggtgaaggttggtaagtcataaacagcatggataggggctgtggaaaccgaaacttcaatccccctaactttgactttttcatcctctctttctggccaattgggaaagaattctaaagctagggtttggttgtttcgttcagtaatatccacaaacttaatccaatgcatattgactatttgctctctaataggctcaaatacagaaggtatggctcgaggttgtctagggtcaccaatgtgtatgcccttatcttcgatgaatggtctatctttgagttgtaaaaaactctcttgtgcctcaacattcacaaaatctagccctatcaacattggaacggcccgatgacctaggtgggttgatgaagaagctccccctctttcattcactcttgctcttttaggacccattgtcactccgaatttctaacactaaaaaatttaagaaaatttcggcagcacttccccttaaaattctactttccgggtgaaaacccaatcacaaattgcacaattctaacttacgaacaactcttcacaatgatgcaatgagcaatatcccaaaaatcacacttaaattttaagattctccgaaaatcaaaaattatctattaataattgcatagagaatccaagaaattgataccgtaatgaaaaatctccttcactctacctccattgaagaaaactttgaagttcttgaggtagatgatgatgaatagtgaaattttgaatttgggtgaggtttagggatttggatatggtttttgagaggaaaatagtgtttgatgagaggaaaagtgttttagagtgattagggatgaaagatttgaagaaaaaggatttagaatgagatgagatgaagaaatttggttatggggaggagttttcggaggtggtggttttagggttgagaaaatggtgtgattttgaaagtgatggttttccccccttttattcacgtctgaccattctcgccgcggccacgagtgggctagccgcgacgagatacatgccaataaatacacttctataagtgactttatggccgcggcgatgatgaagctcgtcgcgacgagataatcctttaaaaatccctttctgcagttgattatatggccgcggccactgggctataccccgaaaaaaaaatcttttttttttctttgaacattacaaaaattaaagaaaaccaatattcggtttacgagttcaacaaacataaaccaaaaagaaacaaaaatagtaataataactaaaagaaaacaaaatacgaaagttcaactaaaacaccaaaaaaatttgggttgcctcccaatagcgctgtctttttcgtcgtacagctggacgttgactgagttcttcaaagaggcgccagaatcatggcggacttggcttggtcaaattgacctcccaagtaaagctttaaccgctacccgttaactttaaaagtctcagggctttcacctttcagtactacaactccatagggaaatgctttgaccactgtaaatggtcctgaccaccttgactttaacttaccaggaaacaatttcaaccttgaattgaaaagtaaaacttgctgc

SEQ ID NO: 32870 - DNA, 4184 bp, Cannabis sativa
gcgctctccggattttgtgtttttgactgagctcaaggtggatgccaatcccctggtacgtattctgaaagcttttcacttttattttcatatctctgtgccgcccagaggcaatgcggggggaataattttagcttggaaggttggtttttgctttgaatatatagcttcctctcgtaatcatatttcgggtttagtctattcggaccccccaaccccttggcttctctcgtgtgtgtacggtcctccctacaaccatgcaaagaagcaattttggagcgacatcatgactttgggggatagatttggaggtccttggttgatatttggtgataccaattttgtccttaatccctctgagagggaggggtcgctgggtcgtgacccctttatccctttcatttctaacctggtagagtctcggggcctaatcaatatgcatattaaaggagacatgatgacctgggacaaccaccggtcgggtgagggccatgtgaagtcggctttggataaaggcattattaatgaagcttggcttcatctgttccccaaagccattctctgctcgatccaaaccagtacttctgatcatagaccgctatgtctcgatacggttggggctgtgcccaagttcaagaagtgcttcaagtttgaggaaagttggacgagggatgaaagaagtaatcttgttgtggctaacgcttgggattctgtgcgccatctttgggctcctgcccgagtttttaagaagataggagctactagagtggcgctccttcaatggaagagaacgcaatttgggaaaattgatgaggtaatcaaagatttggaggttaaacttgatagaattcagttgttgcttgctggttctagagattggagtttagaatgtgatatcagacggagtctaaatgaagcaagaaccagaaaagctgtttactggaaacaaagggcgagaattgattggctcaaggatggagacaaatgctccaaatttttctttctctcggctgctattagaggaagaagaaatgccatagattgcattttgaacaaacataatgtttggattaatgagcggaaatcgattggtcaggagttcttggaattttttaagggcatattttctgcatctaacgtgtctaggccactgaactgtggctacttatttagggaaaggatttctcatgaggaccaggttggaatggtcaaggccccctcccgggaagaaataagaagtactctctttgctatgagcaatcataaagcccctgggcctgatgggatgtctgttttatttttcaaacactactgggagtcagtagggagtgacttctgtgatgctgtcggcgatttctttgaatcgggtaggatgcacaagggtgtgaattccacgaacgttgtgctgatacctaaggtgcaaaacccgacgagacctaatcattttagacccatttctctctgcaatgtgatatataaggtcatctctaaaatcattgcaaatagaattaagcctattctcccctccctcatctgcccaactcaagctgcatttgttccaggaaggaatattcaagataataatgtgttggtgcaagagattatccattctttcaacaagaagagaggaaaagaaggtttttttgctatcaagatagacctggtcaaagcttacgataggcttagttggaactttattgaccacgtccttggctgtttcggtttcccccaagaagtttgcagctgggtcgctcagtgtatctcaactgcctccctcaatatttgtatcaatggaggtctggttggtaaaatcgtgccctcgtgcggtattcgccagggtgaccctttatccccctacctcttcatctgtgcagcggaagtgctatctagacttttagaagaggcgattggaaagggggctatccacgggattaagctaagtagggggggcccggtcttatcccatattttctttgctgatgacctcatcttggtgggccgggctaaccttaatgaagctaaatccttgtgggattgtctggataagttttgttcgtggtctgggcagaaggtcaacaagcttaagacttcaatattttttagtaaaaataccccgaatggtatgaggagaggaattaaggaagctttgggaattggcactcctgagggggttataaaatatttgggtttgcctcttttcagatctaggcaaaaggatgctgattttaacttcatccttgataacctcacatctaaacttcaagggtggaaggctaaaactttatcgaaagcaggaagggctaccctaatcaaatcagtgggtctggccatgcccatctatgccatgcaaacaaccaaattgtctaatcggattgtgaataggattgatggtttggtccgtgatttctggtggggctttgagaaagggaaccatggtctttatctcaaggcttgggataagctgtgtcttccaaaatctttgggggggtctgggatttcggaaaaccaaggaaatgaaccttgcttttttggctaagtggggttggaatttactgacagggagccagtccttatgttgcaaggtcctcaaagccaaataccttcggggtaaggactttctccattgcaagtacaaagactctgattcctggttctggaaaaatgttgttaaagctagtgatatcatccggaaaggggcttgcaagagagtgggtgatggaagagacactagcatatggagggacccgtggatccctcacttgaaaggtttcatcccgaaaccaaatggaagtgttgctttggataataactgtgttgctgatctacttttgcctacgggagggtgggatatctctaagctaaaaagtttgttcgaccaggagacggttttagcaattcagaaaaatggaatcccccctggattgggaaaggatagctggttatggaccttggaaagtaatgggcgtttctctagtaaatcggcttatctgtctcaggctttggaaagagctccccagtgtaatgttgctcctgctctttggaataaactttggaatagtaacatcatggagcgtcataaagttctttggtggtgcattctttctcaagctctccctattcgggcagtgattaaaagaagatttcagattgatgattccagttgtccgatgtgtggcaggggtgaggaaactatggagcatttgttcctttcctgtgatgtagcgatgcatttgtggcgttcttctccgtgggggatcttccctgtttgtgataatggcattcgggtttgggattgggtgaagttcatttggagtcttaatgggcgaggcatccgagtagaggatgtctttctttatgcctcgattgtggtggacaatatttggaggatgcgcaacgacgtggtacataataactgttctcctaatgttctaaaatgtattgaccatatttgttcttcttttgcagaggcacatacttctctcttgcctagtcattcgccgcctgtgaagaatagctggacgcctccacctctggactggataaagctaaattgtgatgttcgcgtgggtttggagagtatgtgcactgctgttgtggccagaaatcatctaggaagggtggtttctattcacacgtcccgattggatttctcggatgctctttgtggagaagcggcggcctgttgcttggcggtgtcggttgccttagatttgaagtataattatgtaattgtggagaatgactcgagattagtaatcaatgctctcaatgggaaggcgtcccattgggcccttgagaactatgtctccttttgttctaagtcttctccttctttaatatgttgtaatttttctaatattagtaggacatgtaactatgcggctcacaatgtcgctaagtgggcttttacccaccaagtgtatggatcgatcccgatcaattctgttccggaaaacattttatgtaatgaccatgaggtctagctttattcaatataactttacgcttatttttcaaaaaaaaaacaaaataatttgattatagggaatattatgaaagagaatataattataagaaattgtgtaaactgtgtttagctgtgtagggtaatatataattatattcctgttaattgaattatactgtttgattgagtacatgaatcttatatattattttaaaaa

SEQ ID NO: 32871 - DNA, 1751 bp, Cannabis sativa
  modified_base (27)..(31): a, c, t, g, unknown or other
aattacaagagagagagagagagagannnnnagagagagagagagagagtagagactaatagtttattttttcttaattttctaattttagaccaaaatgtaaataaactaatttatatctaatataattaaagaataaaatcatattataacatacctaatattccactagaagacaaaaaaaaaataacttagggcaaaaagactatcttatccctcactaaaccaaaaagattctaaatcacttaatggtattttggtcatttctaaatctcgaataattctcgacattctttatgtgtaactaagttatcccactactactaaaataccaaaatgtaattctaatggccaaatgttgtgtttcgatgttgtcaggcacaaaacatgcaaaaacataaaattccatatatggcataaataatatatcctgaatccaaataaatctccataaaatgataaatcataaataatattctagtttaataattaaaccctaattatctgctaatttccaaaataaagctaagcgatctttataattatccccccgttaaaaggatttcgtcctcaaaatctaacctgaacaactcaggatattgagctttaatgtcagactctaactcccatttggcttcctccaccatactgtttctccagagcaccttgaccaaaggtatggtcttattctgaagaactttatttttttttgtccaagatctgaactggttgttcttcgtacgagagatctggttgcagctcaagattctcataacttagcacatgagtaggatccgaaatgtacttctgtaatatggaaacatgaaatacattgtgaaatgctaaaagtgctggaggcaaagctagacgatacaccattagtccaaccttctcaagaatctcgaaaggccctgtaaacctagggcataacttgcctcttttctcgaaacgtttgatccccttcatcggagacacccgtaggaatacatgatctcctacctaaaattctacattattaaatgattaattgaaaggatgaatcaaaaggaaataaaataaataagctaaatatactataatcaaattttgtatatttgtccaataatgatgtggtggtctccgagatctggaactacattatgtggagagtctcgtttacatgacttagcctgaatagtcaaatgagatataacatctataagagttatagaacatagatcacttgtgccagttggaaattattgagatttataccctaaaagaaagtaattaatggataatatattacaaaatatatttagatttgcataactcttttgcctactctgagaggcaagcattctggccttaatcttctctatagcttcattagtctgttacactgagtctggacctatgtattttctttctcccatttcatcccagtgaataggagatctacacttcttgccatacaatagttcatagggagccatccatatagtactcgggtaactgttgttgtacgaaaattctatcaatgacaggtacttgctccaggagccttcgaaatccattacataggctcgtaacatgtcttccagtatctaaattttcctttcggactgtccatcagtttgaggatgaaaagttgtactgaatatcagtttggcacccatagcccgctgaagactctgccagaattgcgccactatagatttggaattgaatacactctcaattatatggaatgctctatatgtaccacgata

SEQ ID NO: 32872 - DNA, 1669 bp, Cannabis sativa
taaataattttgacatttataagattgaaactgaaaaatatgacataagtgagaaaaaagcatgttactcttagcctgattggtataaatttgaaaacaattttatcagttaaaacttaagattttttttatttttgttattacaatgtatctttttataatgttgaatatgatttgagccttgaaaagtatatattttaaacaattttttcgaagctactttcactttaaaaccatataataaataaggtaaccttagctccagtaggtctaatctactcaaaggtttccaatatttcaaatttgacatatcaattcaattctatgaataaatatttaatttaatagaaaatatttgagcaagattattgtaatagaatgtcaaagtttatatagatagttatgtaatctactaaattatcaactaactgccacacttaaaaaatacaaaataaataatttattatattaagaatatataaacagatcgaccatttggcatgaaatctaacaaccttataataaaactacacattctaaagacaaaatgaaaaattgtccaatcaaacaaattgttcatccactcgaaaagcatgctcagctaattcatgatactttaaaatgtgcaatgtcactcttagcttgattgatataaatttgaaacacttttattgattaaacctcaagatttttgctttttgctattacaatgtctctttttataatgttgaataagtttgagctttgagaagtacaaaaattaatcactttagtcgaagttattttcacttcaagactatatagttaaggaggtaattttaggtctggtagatctaattttcttaaaggtttccaatttttaaaatttgacatattaatttaatactacgaataatatttgatttgataaaaaatactcaggaagattattataatagaatgtcaaaggttataaatagttatgcaccctactaattaatcattaactaactaataatcattaacaaggttgtagggcacttaaaaggtgtaaaatgaataatttatcatattaagattacataagagcatctctaatgaagagctataaatgtagtgtattgctattttttagaatattttgctaaaagttaactccaaatataaaatgtgtgccaaatttagtccaagctaaaaattatgccaaatttggtacaaaagatagtgtttgccaaattttagtccacaataaatgttactttttttaattacatatttgccactcattaataaaaatatttttatatttataagttattaaaataatataaataaagttaattgtttgtatattttcaatgagtattaatggtattattgatttttatagagatctttgtgtattggagcactaatacaaaaatttggccaaatataattttgtgttatattttggactaaatttaacctaaaatatacactattcatagaagatggtctaactagattgactaattggcatgacatccatcaacctaatatacaataaagctacacaatcaaacaagttgttgcttgaaaatatgcaaggttactcttagcctgattggtatagatttggaaacaattttatcaattaaaactcaagatttttggatttttctaatacattgtatcttttcataatatt

SEQ ID NO: 32873 - DNA, 1928 bp, Cannabis sativa
gaaagaaacaaaaaaaggtgaagataactatgctatatgcaaaaggtggattttggtgaggaaaaacaaaagggtaagaaaaggggaaaaaagtgtattcaattatttttttcatagacaaagattctttaaaaatttatatttttaacaaataatggagcaaaaacatcttctaacaaataatgtaaattactctatttagagtatttctattttttttcaaatatttctctacatatagtattatagaaaagcactattcatccattaaacatattttaataatattctaattatattttatttcatttttattaatatgtattatatatatcaaaaaatatattatttaaataatataaagaagatagagaaaaatagagaagttgatatatgttgtgttgtatggggtgtttattggactatatttaatatttttaagcttattcagatccgatccaattatatattggaagttagattttaccatctaatccgatccaattaattttaatcatctaatcgatccaacatctatgagatgctggattggatcggttttatccattgagtgtatttcatgtacatctattggcttaatttggatttatccaatatttcaaacctaatattttttgcatcggttagatccatctaatagtttagatccagtatgtattggattggattgaatctatcagatcaaaaaaataaagagtaaaattttaggaaaacttacatacactgtaaaataggaaaaaatttacaaaaatactgtgatactgaatattacatttataccatcctaggctaatttttattttttatactgtgtctatgccaaaatgaaggaattctcattattctcaacagccatggtcggaaacaactgatcaaccagcgaacaactggaaaacaatcattattctagccagaatgactctaattctaaaacaataacaactaaaataattataaaataacagtaaaactataaaaataagataataaaataaaatcacaaaaagtactatacttcaataactcttttgccagtggggacttccataatatcatgagagcgaaccttcaccttgaaattttttctttaaccctaaatacattaaaaatcaattcaaaaaaaaaaaaacaccgttaaaaaaatatatataaatcaaatatataatactaaacaccgaataacacataaaaccaacttaacaaccgtcggtaaccacaattgaaaaacatagatcaattttttaaacaaataaaaaataccaaaaaggaagcttaagaagaagaagaaaatttcaaagatgatggagatgagaatagcaagaagtaatggtaactacaattgaaaaaacgtggatcaatttttcaaacaaatgaaaaaaaaactgaaaaaaggatgcttaagaacaactacaacccaccaaaaaataactaaaaacctatatcaaccctaaaatgacagaaacaaaaatagtataaagaatcatgattaaaataataaaattagagaatatactctaaaaaaatcctcaaatacatgtatacaatgcaaatgcaggctcgatatatccttaaaacaaccgtaaaataactttaaacccctaaaagcacaactacttaaaaagcccgtataacttcaaaaaaatgtggttaaaaagccaacaatcacataataatacccttgtcactttgtttacttcgaaatctttatcttcaagctcaaaatcatcatgagaatcttcaataataagcttaacacgcttatatttcctcttcctcttagtagtatttggatatgttagataaggataataatctttaaagtaatttgtggcataaatacttaagtttaacttctaattgtaaataaatatctaactttgattttttggtggtaataatacctaagt

SEQ ID NO: 32874 - DNA, 3523 bp, Cannabis sativa
aatcttttaaaaatttataagtgatcctaaataattataccatacacaatcatgaaaaaaaattaaaaactctcctaaatatcaaaacagtaggaagtgcgtcaaaacaacctttttaaaaagtgcacgtattatagacttatcctattatttttaattaattgattaattaagtgtcccttaaaattttgatcctgtgttttcaaaattctttcttatttatgttaatagatcttttatataaaataccaacttttattgctaaacaaatattaattttttttgtcgatacttatcctttaataattggccccccaagaacttaattatggctccgcccctgtatacaaactatgatgctctaaaaatagaattgaagcacaaaagttgcaacaaaagtcaaaacacatcactgaggcctttcaccgaacacttgacattgtctcaatatctatattcaaaacacactaggcaaacacactttttatcaggcactaaaaatagaaatgacaaaaagattcatactatgttcaaacttatctatatatatttacttattaatttgattaatattttaatcataatcatctatttttagccaaaacatataaatacatagatatatatccttgtaaaagtcacaatcaagtagaatattaaataaataaaagtcatattcaccttcaggcaatgctctaccatagtacccataccgtatatctccaccaacttcctgttgacctctgtctcacgtcgaacccagccccaatagtcatgattcccataaacctacatacaaaagagcaattatatatatttttataaacatttttaattattaaatttttctaaatcaatgttacaataaacataatatccggtactgctcttattttaaacaaaataaaataacaaaaatatacacaactagaaaaagagcttttatcttcggttattatataaaatcgaagacaaatgttacttttctcttcggtttttatttaataaccgaagagaaaagagacttatctctgaatatatttcaattattatttaaatctgaatatgtattaattttttatttagtatttaattatatattatttttttttgaaacaattataaactaattataagaataaatagtttctatgaaataaaaacattttaattatataacaaaattaagtacaaaaaacattctaattatattataacaaaattaaagtatacaatagacaatatgctaggtccctactaataaaaattgtacatgaaataagtattgcctaaaattaaaagtctaaagctaaacagtttgaatttttaaaaacaaaatagttttttattaagaaataaatgtttattattcattatattttgaataattaatttttgattgaaatatgatatcaaaattataaacatataaatttataaggtctgtttacatatattttgaaattttttaaaagtcacgtgcccctgcttttatttgggggcttaatcttgcaattatactaaatgaccctaaattccacttactacaagaaatctgaggtttagctacaaataatttacttaccaatatatatatttgtagttgaagacagggtttacttacaaatatatatttgtagttgaagagagaatttacctacaattatgttggcggcaaagtttcccagccattctaatcaagtagtgttcgccacggtcttttatctacaaatataaattatttgtttatttgtaagtaaatctcattatctaaaaaataaatacaaataaataaataaaaaatgagcaaccttacaagtattcggttattacataataactgaagagaaaaataacctatctcttcgattattttgtagggctttttttcattagtgtagaataaaaacaattttattacaaaaaatgtgcaaaaaaaaataaatttaaaaatgtacacattttattacacatttacataaaatcatccaaattgttactttaatttattggatgtattaatgagtcaaattaccataattagatttttgtaacaatgtttattattatcattttgtatggtattcatgaggaagcagacaaaataacaaaatttgtatatgggtggtagttacaaaccataatcattataaggatacaagtaataatttgttaaaaatgtttgttattaattttttagttgaataacctaatagtcacctaacaatttatttcttcataaaactttaataaagattaattatatttattattaaataaggatcttttagacatctttttgcctttaaattattgaaatttattatagcaaaattctttataatttataattatacacgtgtaatttcataattgaaattttattaattatgtattagaactactaagaggagcagtaatctgaaatgtattagtagtgactttatcgtgaacaactagtaatgataccctactatagaattgatcgaggactttgtgtatcagaactactaagtagagcagtaatcttaaatatattagtgactttgtcgtgaaatgataccctaatacggaattgatctttgtgtttgtgtctcagaactactaagaagaacattaatcttaaatcaattagtgactgtgttacgatcaaatagtaatgataccctaatacataattgatcgttgactttgtgtatcagaattagtaagtagagcagtaatcttaaatatattattgactttatcgtgaacaactagttggagttctttttgtgttttgtaaaatatataactaaatgataatattatttataaattgcattttttataggggtccaaaatttaaattagaacaggacatccaaaatgtttaagatatgaaatataagacaaggtgtggaatttaaaggacagtagacaacaaccagtcttttaaaataaacggcctgtctaaaacaccagatatgttatcgaaacacaaaatacatgctttcaatatttaaaactgcttgttgtatgaggcagactatgcgtcgtatataaaagacggcttgtcaaaacaattatgatatttacaaaaaaaattgtgttaattaattgtaagtactacaaataaatatgaatgtagataaatcattgaattccactaagacgccctatgcgaccattatgataagacccttctattagttgaccatacacaattaaaggacggtagacgacaatcagtcttctaaaatagacgtcctatctaaaacaccagattggttgttgaaacacaaaatacaagctttcaatattttagactgcttgtcgtatgaagcaaattgtgtgtcgtatataatagacgacttgttaaaataattatctatacaaaaaaaaatattaattaagtgttaatactacagataaatatgaatatagataaattacaaaattccactaatagatcttcgaattgaactaggagaccctaagcaactgtttgttgggttttatgccgtaaataaaactcatttca

SEQ ID NO: 32875 - DNA, 1912 bp, Cannabis sativa
ttatgattctataattggagtgttaacggattggtaattggtgcatatttttaattttttcaaatcaaactaatattacagttttttaaaatttaaaaccaaactaaaacgtgtttcgggtcaattaaataatcaaaccgaaccaaaccagtccagaacggattgatttggctcaaaatcatggattgtattttgctattgttctaattgttttaaagcaatcttgcatttttttggtaattttttttacttttaatagtaagactataatacataaataatcaaaatattttcaaaaattatatattaagtatacataataaaattatacgtattgatttgtttcgaatcgctactcagaattctaaaactgtgactaaatcagagaattctaaacggtcggaattgaccaaaccattcactctaaattcatttggtccaacctcaaatggtttggtccgaattgattgaagtttagaaccacgaattacaaattatttgaacaaccctatagtacaaaagcagatcatgatcagaagagcattattagttaattaattataatttaatctgtacaccacgaagactgattctgcagacaagaattaatcaaacttaccgaagcatatggtcttttttaattattaattattgtactacattacatttagggtttcaaatgttaataaattaggtgtttattgatgatggtgaagttatgcattttaatttattcaaatgtaaattaatagtttatgattaggtatagtttatgcagaaaattcatgtaagtgatattaaatgtggaatttaaaaaccaattaattaatttgctattgcataatcactaaatatatgtataagaactaatatattaattttacctttgttataggagctatcttgattagtggtttctttttttttttttttttgataataatcagtttttgggtagctcaagggggctacttgttattcacttcaaaataatgaaactactattggtgaaaacttactgacctttgttgaaattttctaattgattcagctacatatatagctggcataagtttatcatattattataattcttcccataccaataatatataattgatcaaataaaagattagaaatgagtaattaaatcatcaagtgaatgagagtttgtgggttgtagaactcataatagcttgtatggttggttacagatacttaattttttgggcctttagtcctcttgagcagcccacggagggagtgtgacttgtaaagacaacctagtggtttataattgtgttaggcctaaatctaataagaaaagttaagatgtaccttaaggtgtcaagacctgacacatattttaatttaaaaattaatatagaaaactgctaactaatattaaagtgtcatattattgtgcatggtgttaaacactttaaggtgtctattaacaattttcctattaaaaattgtgcccttaggagggtaaattttccttgattgacaacatcatggtgcatgctatagtaaataatatgactggtcagtcacttaaccgtataaatagaatagcaacaaaaacaaaaacaaaattaagttaattattatcttaaatgtttaaattctatgtgctcaacgcttatgagcctataaattatacaaggcttaaggctttaaaatttttcacacacacatttaagtcaaaaagttgactaagttcacttgcatgtgcatagatccctcttgtacaatcttctttttttttttctcattgatacttgggaaattcagttgacataagctcatttcatgtttgagtattaatcaccaaacaataaaaataccaaatgaagtaggtaattatcatttactaattaaggccgcaccactataaacagtggcggac

SEQ ID NO: 32876 - DNA, 3354 bp, Cannabis sativa
caataccctacacctaacttgattacatactttgtgtcatgggacccctaaacatctacagtgatagtgtcactactgcgagtgtacatcgaaaatgctaagtggaacactatttcggtatcggttagctattttgttacgatactggtgactcctccgatatacactaacacctactaacacatacatactttgtgtcacgggacccataaacatctacagtgttagtgtcactacagagtgtacatcggcaccactaagtataaacttgtttgagtttcggtttgttatttcgttacgaaattggtgactcggatacactacacctaacttaattacgtacttcgtgtcacggacccctaaacatctacagtgatggtgtcactactgcgagtgtacattggcaccactaagtagaacactatttcggtatcggttagttatttcgtttagaaacttttgactgtgatacactacacttaacttgattacataatttgtgtcacgggactcgttaacatctatagtgatagtgtcactgttgcaagtgtacattagcaccacgaagtcgaatcttatttcggtatcgattagtgattttgttacgaaacttgtgactctgattcactacacctaactttattacagattacacacctaacgagtgtacatttgtagaactaagtagaaccctagttcagtatcgcttagtgggtgactctgatacactgcacctaacctcattacagactttgtgtcacgagaccactaaacacctatagtgataatgtcaatattgcgagtgtacatcggcacgtataagtaaaacactattgcaatattgatttgttatttggttacgaaactggtgactacaataccctacacctaacttgattacatactttgtgtcacgagacccctaaacatctatggtgatagtgtaactactgcgagtatacatcgacaccacaaagtagaaccctatttcggtatcggttagttatttcgtttcaaaactggcgactccgatacactacacctcacttgattacaaactttgtgtcaagggacccctaatcttctacatggatagtgtcactactgcgagtgtacatcggcaccactaagtagaaacctgtttcaatttcggttagtgatttcgttacgaaatttgtgactccgatacactacacctaaatttattactgactctttccctaacgagtgtacatcggtaccactaagtagaaccctagttcggtatcgattagtgggtgactctgttaccctacacctaacttgattacatactttgtgtcacgggacacttaaacataaacagtgatagtgtaactattgcgagtgtacatcgacagtagtagaaccctatttcggtataggttagttatttccttacgaaactagtaactccaatacactacccctaacttgattaaatactttgtgtcacgggacccctaaacatctatagtgatagtgtcactactgcgagtatacattggcacaactaagtagaaccctatttcagtatcggttagtgatttcgttacgaaattggtgactccgatatagtacacctaactttattacagattatacacttaacgagtgtacatcggtaccactaaagagaaccctagtttggtatcggttagtgggtgactctgatacactacacctaacttgatgacagactttgtgtcatgggacccctaatcacctatagtgatagtgtcaatactgcgggtgtacatcagcacaaaagtataagtaaaccctatttttcggatatcggttagtgacttcgttacgcaattggtgactacaataccctacacctaacttaattacatactttgtgtcacgggaaccctaaacgtctatagtgatagtgtcactactacgagtgtacattgacaacgctaagtagaaccctatttcagtatcggttagttctttcgttacgaaactggtgactccgatacactacacctaacttgattacatactttgtgtcatgggacccctaaacatctacagtgattgtgtcactactgcgagtgtacatcaggaccactaagtagaaccctatttcggtatttgttagtgattttgttacgaaactaaagacttcgataccccacatctagcttgattacatactttgtgtcacgggacccctaaaaaactacagtgatagtttcactactgcgagtgtacatcggcaccactaagtagaaccctatttcggtatcggttagttatttcgttaagaaactagtgactgcgatacactacgcctaacttgattacataatttgtgtcacgggactcctaaacatctacaatgatagtgtcactgttgcgagtgtacagcggcaccgctaagttgaaccctatttcggtattgataagtgactttattgcaaaactggtgactctaattcactacatgtaactttattatagattgtacacctcacgagtgtacattggtacaactaagtataaccctagttcggtatcatttagtgggtaacgctgataccctacacctaacatgatttcatgctttgtgtcacgggacccgtaaacatctacagtgatagtgtcactagtgcgagtgtacatcagcaccaataagtggaaccatactttggtatcggttagtgatttcgttacgaaacaggtgactctgatactgaccacctaacttgattacatactttgtgtcacgggacacctaaacatcaacagtgattgtgtcactattgcgagtgtacatcgacaccactaagtagaaccctatttcagtatcggttagttatttcgttacgaaactagtgactccaatacactacacctaacttgattaaatacttttcctcacgagaccttaaaacatctacaatgatagtgtcactactgcgagtgtacatcgacaccactaagtagaaccctatttcaatatcggttagtgatttcgttacgaaattggtgactccggtacactacacctaactttattacagactgtacacctaacaagtgtacatcggtaccactaagtagaaccctagtttggtatgggttagtgggttactctgatacacttcacctaacttgattacagactttgtgtcacgggaccccttaacacctatagtgatagtgttaatactgcgagtgtccatcggcacaaccaagtagaaccctatttcgatattggttattgatttagttacgaaactggtgactacaataccctacacctaacttgattacatactttgtgtcacgggacctctaaactgttgggttttgtgccct

SEQ ID NO: 32877 - DNA, 2443 bp, Cannabis sativa
aagtattttcatgccactgctagtactcgcagacgtaccaaccaaattgttcaactgaaaaactctgatgatgcgtgggtcaactggtcttcgggtcttgatcaggttatcactgattattattttttttgctctctatgctacagatggtattgattgcaattctgtggtacatggtatatctagttctgtcactgataatcataatgaagctctcttacagccggttactcctgaagaaataaaataagttgtttttcaaatgcatcctgataaagctcctggtcctgatggtatggggcctggcttttatcaacatcactgggatactgttggtcctgacattgtacagcttgttactagtttctttgaatctgaagatttgcctcctgatatcaatgataccaatcttattttaattccgaagaagaaaaacttttccacaatgggtgacctgcgtcctattgctctttgcaatgtatcttacaagattgttgctaaagtccttgcgaatagaatgcgaagcatgattgatcaggttatttctccaactcaaattgcttttatccttggtaggctcatctctgataacattatggtggcgtttgagatcatgcataaactcaagcagaaaagaagaggcaaaaaaggctatatggccttgaagcttgatatgagcaaggcttataatagagttgaatggggctacttgcaagctgtaatgtgccaaatgggctttgccagcaaatggattaatctcatcctaaaatgtgttacctcggttaaatactctgttatccatagtggtcatatcatgggtcctattattccttcgcgaggcattcgtcagggcgatcttttgtccacatatctgtttattatctgtgctgaggggttttcagctcttattaagaagtatgaaatagataggatcatccatgggtgtcatgtggcaaacggggccccctctatcactcatatgctcttcgctgatgacagttatttttttttcccaagccaccccaagtgctgctgatagtatgaatagactccttcactcttttgagcttgcatctggtcagcgcgtcaatgcatccaagtcttcgatattcttcagtcctaactctgatggtgtggtcaaaactcaaatatgctcaacccttggcatgcctgaagctactgaaggctctttctacttaggactgccgaacatcattggaagaaagaagactgttatccttggctttctcaagaataagatcattaaccgcataaatagttgggatggtaagtttctttctcgtgctggtaaggaaattctgctaaagactgtcatccaatctcttccaacatatgccatgagtgtgtttctgatccctctgaaaatctgcaatgatattgagaagcttatggctagcttttggtggaaaacaaagagtgctagtggacaaggcattatttggatgtcttaggatcggttggctgttcacaaggacgtgggaggtatgggttttcgtcatctccatgattttaaccttgcaatgcttgccaagcaagggtggcggttgttatgctctgactcatcccttgttagtcaagtctttaaagccaagtactacccccgttcgggattttattaatgctgaactcagaagtaaccccagttttttttggcgtagcatttggaatggccaacacttggtacggtctgctactaggaggatcattggcactggtactgctacaagcattctggctcatccttggctccctgataatgataactcttttgtatccaccactactccgtgtctcgaccattatacggtcaactctctttttcatgtggatgatagaagttgcgatgtctctcttgtgcgagatatgtttaatgtcagagatgcgaactttattctgggaattcctctcagtttctctgctactgatgatcattgggcctgggttggcgagaaattaggccattattctgtcaaatcgacctacaatctgctgcaaagtcagaagaacaaccgttttggggaaaacaattcaggcttttggcgtaagctgtggcatctcaagatacctcctaaagtgaagaactttatgtggtgggcagtctctaatgtacttcctacctgtcttcaactcatctctaagggggtaagtgtctcttctatgtacgccctgtttgcaatcatgctgctgaatctgcttcgcatatattacttagttgtccctttgcaataagctgctggcaaaaggctgatatagttacccatgctaactttgttggaaccattggacaatttcttcatgatgtgttcaacggctttgatgaagacatctcttgccgtgttgtgatgctatgttggtcgatctggaaggcaagaaattctttagtttgggacaaaaaagcttcttcagcgtggactactcttga

SEQ ID NO: 32878 - DNA, 1562 bp, Cannabis sativa
aaaaataaaaaacagttttttaattataatgccaaacatgcacaaagtatttttagtatttttgaaaagttaacctaaattctagtatttttgtaagtttcccaaaatcatttaatttagagtttttggtggcctttcacttgtatttaactttgatttttaccaaaaaaaaaaaaactgaattttgggaaaacatttacaattttactgacacacagaattttttacaaaaatactatttaactttgggatttttacaaaaaaactaaattttgggaaaaagtttacaattttactgccacacggaaatttttacaaaaatactaccttttataaaataagcgtaaaacaccaaacagaacaactaaaaacaacagtagaacaacagatgaaacttaacacattacacagtattataaaaaatatatatataatatttttgaaaacaattctgccccacagtaaaaaaaaattaaaaattttagtatgtggtgtaaaaatccctttaaaacccttataatttattaaatcgtgacaattttaaggtgtcatccagttaactaccaccatggattgcttatgtgtacactcttatatacgtgttacgtttatattggtacacctaatattatcatttaaaaattatttttaaaattcattttccaaataaatataaataaaattataaattattatcgagatttttgaaaactaattaagtaagagtttcaagcaattaaataaagattaagtaaaatagattgatgatttttacgtgattcgggcattaattatccctagtccacgtgtcagtatattgaccttttaggctttgaaatgtattacaaatgagttttacaataaggaaccctaactcttactgtaaggtggtttctcttgaagaagaaaaaatcttaaaataaaaactagtagagcttcggctaaaattgcgtcccccttccatgaagggatagtggggtttatataggctagagttcgggtttgggcatacctatgacccatttggattttattgtaaaagcaagccccataatgggataaaatacacaaatacattactatgagacccgctaagaatgtctagctcatggggcgacggttccgtactaaaagggggatcgtttgttgcaggacacgtgttacacgggggtcatgctaggcagacaaaggtgtcaagggagccgtcagacaaaagtggtgtatgcaaatgttgtagtggtgcccgcactatcatgttttgacataggggacaatatctagtcttgtgtcaaagaggtggacacgttattttaggggagacatttgcctcttgtctctaggtagacatccgttattcaccccgtggtagaattctgattcttgacctgtggtaggcttccgagcatcatcttgtggtaggcgttcaggagtatctcgtgtggcctgcctctaggtgtgcccttatctttgttaggaggttttcattccttccatgtcccgaaaggctagggaggctttcgggtcttggaagaacattatgttgttggtattatatttatcca

SEQ ID NO: 32879 - DNA, 2414 bp, Cannabis sativa
  modified_base (2379)..(2385): a, c, t, g, unknown or other
ctaatcttacctcaattctgaatttaggtgtgccggtcaacttaagtggaacgactgcacaacgatttataggctcttaaatcacatcgatatcaacacgcataagtgacttgctaaatcacaaccgggactaaggtttaaaactaaaaccctatctactgcaacctaatatactaatatcccaatctagcaggaaatcaaccaactagaaacctgaaactgacacgaaacgacaagctgaaaaaacggttttcccccttgctgcaaaatctgggtaaccggttttacaagcagtgtaaaaccggttaaccggttttacccagaaaaccaacaaaaatcaaacccctaaccaaatcgtttccaaactcaaccaaactttctagacctgcatattataccccaataaacatattccaagcaacaaaacaacaatcaaagctccgaatcaattttcaccattaaagcttcaagcttgagttctaaaactcaaaacttgctaaaaccttcaaacaactactaattcatgcttaactcaacataattaatcataactaaacctctgaaaacaacatccaacaactgcagcagctacagtagcaaaaccaacaatcatgcaaaaatctcaaacttaaatctcaagaaaacaagaagagaagagctaaaacctttaccttgatcaatatcacttaaaaaccagctgaatctccttgaataattgaagaacaaaatgaaccctagttgctccaagggtggaacgaaagagagggagagagagtttgagtgaaaaaacttttcctttgatttttttcttattttggagaaatgaaataaaacttagtttttctaaaaacaatttaagctaaatcaactaataaaatcagatcattaacaataaattaattcactaaagacaaaaagagtagtggccaaaatgaccattttacccatttcccacaaaaacaacataaaagggcacttaggggtaatttgggaaactctaaaatcccgactattcccaacattcccaatgtctaaaatattatcccaatatactaaaaatactaagatgtgattctaatagccatacaccgcgttccaatgttgccgggcataaaacatgcaaaaattatgaaatttctatatgtgacatacaaatgcattctgaattcaaataaatcataataaataattaattcaatattaataattaattttcataataaagtcctaattatctgctaatttccaaattaaagctaagtggtctttacatatagaatagttgccatcttcattatcttttaccaactaagaaactggcctgttccaactctccatgaaattacaagaataggagatcaaactcaaaagactcaaacaaagatggaaaaggatgctatacatgtagaaaagtagggcattataaaatggattattacttcaacaagaacagaaatcaaagtcaaaaatacaagaaagactactcaaagtagtccaataacagattagaatcacaagactcagccaactatggtgatggctatgattccggggaagtcctacttgctgcagcatcagctccaaatgaacattggatcttggattcgagttgtacatttcacattacttacaatactgtagcataggagaacgggacacatcagtagcaatggacttaaggtaattcatgatcaaggactactttgaaaggacaaaatcagcaaagtagaattttgtgaaagttgcactttggaaaaacaacacagattgagcttcagtgttggaaagcattgttcaaaggaaatcctagactacatacatgctgacctacggggacaagaaaaaaatacctacacatgcaggtaactcatactttttctcaattattgatgatttttctagaaaggtttgggtatttttattaaaaactaaaaatcaagctttagaaaaattcaaacaatggaaaatgttaatagaaaacttgacaagaaaaaagattaaaactttgaggattgacgatggtcttgatttttgtagttgagagtttgatgaattttgtaaaactcatggtgtacagagacacaaaacagtaagaattactcccaaccaaaatgggggtagctgagagaatgaatagaactttgctaaacaaaatgagatgcatgttatttagcccaggtattgctaaaccattctggggagaagcacttatgacaactgtttatttggtgaatagaagttcttctacaacaatcaagctactaacacctaaagagaaatggactgaacatcatccaaacctatcaaatctaagagtttttggctacattgcatatgctgttggaatttattttacctggatcttagatctactcacannnnnnnttattaacatcctaaataagaactttcta

SEQ ID NO: 32880 - DNA, 1328 bp, Cannabis sativa
tctggttgttgttcaaaggaatgttgagaatacaagcttgatctcgagtattaaacaaatcagttatgatctccatatcccaagctcgctcattacttttctttagaggtgaaactttattaccaatcagtggtagtgaatctaaagtaataaaatgatttgcatcatcaaacaaccaaggctgccccaaaatgctaacattatcacctgaaccgattgcccatctcatcctagtagcaagcagattcttggcctcccaaatgcttctccaagcatagcttggattatcccctagactagcatcaaaaaaattacccaaagggaaataccgagctttgtaaagtttactaaccaagctatttggttgagttaaaaatctccaaccttgcccaacatagcaagattaaaatcacgaaaatctctaaaatatcccaatccaaccgagtctttatgcttagtcatcttatcccaacgcatccaatgaatacctttaccttgagagttatttgtatgccaccaaaatttagtaattgactgttccagatccttagtcacctccataggaagaagaaagacactcatagcaaaagttgggagagattgcactactgtttttatgagtacttcctttccagctcaagatagtaattttccatcccaattctgaattctctttctgattttatcctttagaaaacccagaatcaatgttttgttgcgacccaaagtgttaggaagactaagataagtactatgttcatctgcttcaaccatttgaagagtatggcataggagttgtcgtacatgccctccaacatttgtgggattgttttttaagccaaaaatgttagactagaaatgtttttctagtccaataatattagactagaaaaatacaccttttatgtcctagactattatgtacaatgcaaatagactcgaataatttatctagtccaactttgatggacataaaatggtatttttgtagtcgtgattattttttaataaaaaactgaagctaaaaactaaaaattaggatatatattaaataataatgtgtgaaatcataattatagtatttttaaagagtgctatacattggagtgttttttaaagtaaaagtgttaaaaatcgaccattacaataaatcaaacttcacgcgacaacccacttaaatcattaaattgatgttgtggtattttttaacttttgtacttccgaatactcgtggaacgttttcattacgctcgttttcgtcaacaaaagcatcatttcaccatcagagtaataatatgggtaaatggcggcaaaacccccaatacttt

SEQ ID NO: 32881 - DNA, 1300 bp, Cannabis sativa
tagtatatttttaattaagttttaatcgtatttggagcatttttacacttgttatcttttatttttacaacatctccactacaacaaatacaggttttagaggcgacaattgtcgcttctaatagtaatagaaatcgcctctaatagctattagaggcgacaagtcgcccctaaaaagtcgcccctaaaagtattattaggggcgacaaaaaagtcgctccttattaggggcgacaaaagtcgcccctaaaagtatttgtcagatcatgattttgacttttagaagcgatattgtcgcccctagctaacttatttaatataaaatatatatcataatatcataataatatttatatatcttaatattaaacatgtgcatcggtattaccactcatttcttttcagtccattgtcttgaggtatagttcaatacaaagtcatcattatcaatttttattattatttttttcatttgtccttattacgtaaattgacaatcataaattaaataaagatataataataataataataatagcaaaagaaatgccttgaatatgtaatatactgacacatatatacactgtgaagatgtgaagattaaattcacaaacaataaaaaaaataataactaaaacgaaaagagaaaaaaaaaataacagtacactcaaaaaaatatcattatttcaaaaagaaaaagaataaaaattaaacccattatttaaaacccaaaaaaatttaaaaaaaaaaaaaaaaaaaaacaaaacccagccatcatctctaaaagtcgatctatctttgcccaccatttgtttctatgaatatctcaactccaaacaccaactttgatcagtagagtatataaaaaaaaaaatagaacattattatatatatataaaaacacaaaccaccaacaaacatatttccataaatatgatacctttaacccaaatctaaagagagagattaatgatgggagacaggagacggggacacagtcggtggtggggatgggatggccggtcggactggaggtggccgattgtgattcttcattttcttcaataaacggccggctagctgcaattattggagaaagaaagaagatgaaataaggaagaagagaagaatggggttaggtagggattctaggtttttatatatggaaagaacttttaggggcgacttataatagttgtacgatgtcatattcaaacttttaatgttattagcgggaaaaatcccgcctaatcaaattgggtatattttgattttattaggggcgacaatatcgctccta

SEQ ID NO: 32882 - DNA, 1227 bp, Cannabis sativa
gtggcccacacttagtaaaataaattaattctcaagtaaagtgtgttagcctgtcttgtaacccaattttgagcccgataaattcagaattgtgtaattaccatgaaacatactttgatccgtctcaacaaggtatcttaaatgcaagtggaaccaagtcatttggataaaattaagagagttattcttgtttcactgaaggttagtaagtacttttcaactccaaatccaacctgtgccatatcattacgagtcgtgccacctcattatggcacatgtcggccatgcatgctctcggacacctcgaatgtgttttgattttttttatggtgaatcatattttggggttctagggtcctgaaacctcatctcagaaaccctaacgggagacttgtaccatcttttggtgccaaataaagaaggcataggtaggatagggattatgagaagcctttaatggtgtttcttgcttagtttagtaatatggatactagaaaaatattttggtcacattagttcttggctaatttgtgggtgagatctgtgccatcttttgggccacaaagatggcacaagtcggccataggtgttctacacctcttggtgacttttctcacttggttttggtaccttgatgttggaaatatacttttgccaaggaaaatcttccccatttgatgtggtcgacctttgccacttccttgtgcacaaacatggcacatgtcggctaggtggtttctacaccacttgatggccttcctcactgtgttttgatgtcttgatgatgaaaaaatacttttggtaaagaatctccttctcatttggtgtggctgacctgtgtcatttgtttgtgcataaagatggcacatgtcagctagcagggttattaagtgaaaaatagtttatttcacttgtgttatactccttggtgatgagaaattatatttggacaagtttcctttagtagtttgagagtagagacctgtgccatcttttcatatcaaaagatggcacatgtcagccatgcattatggaatggcgcaggtctagtctttttatgcctaaataagtcaagcccttgttggtttccttatcgatttaggatgaaaacccttgcacgggcccagtgacgaagctagaaatttagttgagtgaaggcttgaataaatattaagtcaaaactaataaaaataatgataaatatatctttcaaattttcatcttcaa

SEQ ID NO: 32883 - DNA, 2200 bp, Cannabis sativa
  modified_base (650)..(651): a, c, t, g, unknown or other
ctcccacatgcacacacggctcgcatgtgagcccccactcacacacattccctccactcacacacactctctcccacggcttgcatgcgttcccgccatgagttcacaggcgagccccaatgctcaaacactgtccctcacctgacgtctatccacacatgtataacatctccttctttcacccgtgagtcgaacggatgctccaccacttgcataaaggttccacgactcatcccaaatgcccctgggcttgcacaacaccccatggggtcacacaatagctagtgggccacacaacagcccgccggctcgcttcggaaccgtcagctcgcataccaagttgtcacaattcggtagtcttagtattttggccataactttctcgatatacatcggaattggacgattcaagtagctttgaaaagataagaaagagatatttgaatcttatatttgtggcaagatccaattctcaacatatcattacgaaaatcgtccagcaattgtaacctagtaagttgatcttactaactctactcatgagttgttacggggttgacctccgagttgcacggatgtaccccgaaacttgtaagcatggatttctaagattaatgatcattaggccatacctacacagtctcagaatnntcccacttgaccttccccaagcgatgtgagattgcacagtttacccggtatttctccttatagatcacgggactactaactgtcacaattgttgaccaatctcgaaaatcaactctatcgatttttggatttaatagtcacgtgtcatgtggcgcataaaacacgaataacaatatttattttaaatatattatttaaaaataatataacacattgctcttaaaaaatctcatgccaacaccctaatcataacaattctcatgttagcttttacaatttactatgaatatgtttgttttcaaaactgtattacttagatatagttactttttttaactattcttaatgagaaatgttaacaggcaagcattataaaatgtggtatattattattgatgtaatatttatattttttaaaaaattttatattttaattaaataaataatataaaaaatccttaagtagtaacacattttaaaattaaatattttaagatatctaatagctatgtcttacataatattgtcaatagaaactatgcgtatcattaagatgcaataatttcttgggatattgagctgccacgaatctttgacttaattattttattccataattatagggagtaagcacgtgcatacatacattacaccattaattaaaaattaacacataattatactcttgatgaagagtatatatacacatatttatatctatcttagtcaactgttcattattagatcggaatgaatttattttcgtaatagggcatgatagtaaagatgtactggaacagagctaattttcttcagtgtcttctctctttggccatttcttcactatctttccaccaaatcaacggctacgattggcgagatcctctcggcaacatcaccatccgttgggacattatctcacccactccagacggctacgtggtatgctagcactactaatatttcattaactactgttttaattataacaaattattaatgatttacttaaattatgttataataggcagtggttaatatcaccaactaccagaagtatcggaaggtggatgcacccggttggaagctgagctggaggtgggcccacaaagagatcatatggacaactatcggggctcgcgtagcggatcaaggcaactgtaggcggttcaagaagaatgtgccaacttcgtgtgctaaggcacccacaatttttgatctgacggctgatgatgatgagattacaaagaatcagaagatcgacggttgttgtaagggaggggttctactctctcgagtccagagctaccataactcaacgacggcgtttcagatagccgtgggtggcgagggtagtagcaacatcagttggcgcctccccaccaactacacatttaggacgccacatggcgcctattcctgctcacgtgcccgtgttgtgcctaacaccagattcatcagtgctgaccgaaggcggatcacccaagccatgagtgagtatactcctctcctttctcctctatttattttaattttcaataggaaacaa

SEQ ID NO: 32884 - DNA, 1537 bp, Cannabis sativa
cccctgagttttggtaggaaacatggtgcgaaagccattggccatctcgaccgctttcggtccaaaaacggcgaagtcaaaatctggcagtttggttagagtagtataaatatagttagatacagtctagtcgtaggctttctttgcgttctctttctcagtctcgcgattacgagtaagtgaagtgttgccctcctttagcttcttagtttgctcctctgagttcttggctctttcctccgcttgatctctagccttgccaaggttcttgacttcattctctttggcaacaacatacaatttttctttcttcaaaccctcttgaaaagccaagttttgtttctttagaaggccaagatccttaaaacctacaacataagcacgcgagtaaactaatgttagttgggagataagttcatccaagtgggccaaaatgtcctcggtgggagcctcctcaactttggtaaccaaatcatcgctcacgaacttctcgtgtatgaccataaagccacaagctatggcagcaggatccatcacaaccttcttccctttgggcaggtccactttctgttgcttctttgacaagtcgatcgtaggagtggctgcaacttcacttttccccttctgaggtgttgcagttgaaggagttacgatgttttcctttggcttgcgaatgaagataggagcctgcttcaagaaagtcatatatggaaaaagaagcatgagagtaataatttaaaaaattaagacaatattatcactagtcgctaaatcgtattacctgaagtttgtcttgaagtctgcttggaaagacgcttctctattttctccttttgcgtctcagaaggctctttgtatactagttctcactgatgtttgtcgtctgctggaatgaatttgtgatctagcagttttgcagagttacaaagcaagcactaatcgcaatcttgaactggaaggtcacataaaacttcagcgatttctaaacaattttttttctaggatagatcgagtcgatctacctgcaaatattgaagtggatatagtgtttgtagaaaagtgaaaataaaaattaaagtgtaaaagtatgcaacgtaaggggtcggcgattgaagtcaattctcatctccggaatcttaaacgcataaaacaattttaatttctaatctcccatattggaaacagtgccttcgacaccatttatttcagaattggccaacttactaaaccagtagaagccattgtcatgactaacactctttatatcataaaagaagctaaaatccttgatttttggttccccttgtgtgaattccatatacattgcataaaatcaaggattttgcaataactatttagggtaagttgagtgggggaaacgtcgtagtgcattaggatgccctttacaaatgggtggaaaggaagtgtcaccttgcagtaatgaatgggaattaaaaccaccacattttgagttgggaggattacaaggtttgtaaaggaagcttcaccccgttgcattggcatgagcttagaggta

SEQ ID NO: 32885 - DNA, 3796 bp, Cannabis sativa
  modified_base (467)..(470): a, c, t, g, unknown or other
atgccactagggaaccattaagtcatcttcctaaaccaaggatgagagagaaagaccatctagacatatcttggagaaagaccggctacatgtaggtcaagaaagaccgtctgcacgaagagagccttgatctctgcacagaccttattctcttcatcatcagattccatttcttgaagccgagatctctttcccagcctcaggaaattcctcgataccagaaagaggatggtgcaaagatctttaagcgcaggtttgggtcttgggttggctggattctctaatagaaaccacgcaaactttcttccatgttcatctgcaaccatgccaaccttcctctggaattctttaccagcctgaggaggactttcaagaccgctcacaagctctataccctcagggataacttgttaggatcggccatggcaagctatggggttctcctagtttggattggtcggaagctnnnnagccttggaatccatcgtttttggctccagttgaggcttgaagtctttgggaacaaatggaaattggttggtgcatatgggtaagattatcttggaaggataaactcctgcactcagaagggacattctagcaggaaagagatgatccatcttgaaaatggatctcacgaaaaatccagaagtttgtgaaaaatgacaagcttgagccgcccttttatacacaaagtttagtgacaagaaagctaaagattgaaaaatttaatggttggaagatgggcagaatataaagagacgattcataatgatcctcgaaaccgtacaattggaggaatcaaaggatgcgttttttccaagaaaggattttggcaaaaatgtcctctctaattattaaaaagccctttttactaaaacagaactttttaatgggcaattgttatacccaaaatttggttgctgcctcaatggacacatgtcaagacgaagggaatgggaatcgatgctattgctttgatggagtaactcattaattacataagtatcagagtatatttgtaactcgttaactgaaaggtcttaggtgagaagtcaatgtacaaactggcacttagtatattagggagaaaccatatgtcgctaaatgcgaatagcgaggcaccaaagaaagagacatgtatcaactatgaaagtccttagcgtggaatgaacaaacttagtgtaaaaatcagatcggctcaaagaacaagtaagtgaggtgaccatctcgcgatgcgaagacttcctatagcttcatctagctaacaggagcgatgcttacaaccctggcgagtaagaagaattctttataaatagccgctatcaacacaagacatacatcgtcgacctcgaaaggaagaatagccctagctcgctattgggatcactataatcaagtttctgttgagacatctccagattcaaaagttaaagacgtgtttaatacacgtagttttgacccagtaaaagcggtaaaatcacagttataagatttttcaaatcataaactgcatttagactacgtgatatgtaatcaaatcccacgattttagggatgattcctgttaaattatttcagtgaactttgtaattcaatgtcaactatgtaattataaatagtgacaaagaagatcaaaaaagggatgaaaaaaatcatatgaaagaggccctgaaacacactcagaaatcttaataacattgactcgtggactatgcagaattttaactacaaaaccacgtaaaaaaaccctgtgttcatattctttacttttctatagcttttattttttctgtgtgagatcaatattgtgaggattgattttaattaacaaagatctgcgttaacacgtgctttagtcggattagtagtcttgccattaaaatgttcccttcaagtattcaatggataaatttttgtttcaattgaatattattaatatgttttaactgtgaaaaattaacttaaatttacttaatgtacgatttgaccacgtcagtattttgcaacataagtcggtgcgcttcttcacaattagctcggcttacaccacaaatagaagaacccttaccccctgcttatttgagcccagtagggcgagagacaacagtggtaacctctaacaagtagtcttagcagaattctatcatctcttcaacaatgtataatttaacaatacaaccctctggcctacttctatttctgacataacccttcaagattttcatgtattgttcaaatgggtacatccatctcaagtacacaggttctcataacttcacctttgtcaccaaatgcactgttaggtgaaccattatgttaaaaaaggaaagcaagaaatttttttccaaataacacaaaacttctacaatttctaacttgtgattctgtaacttagtcacattaacaactttataacaaatagatttaaataacaaacacaatctcgtagttgcatatataactttcttaggcaacacagaatagatactcactgatagaatatgatgaatcaatttatgatgatcgtgagatttcagaccactcaaaattattttgttcatatctacccaattagagacatttgaggagtaccgttccgatactttcacctgggagatagaaccatacaaagattgtttttctgctttagttagagcatgaaatgctggtggtaagaatgtttgtcgaccagcaacttgtggggtaaattggccaaaatccctaactttttcaaatctatgcaagatttgattccatctttgctacgcccaggaatattgaaaaaggtattaagcaagctgtctggcacatttttctcaatatgcatcacatcctgattatgacataacaacaaatgcttccaatagtcgagctcaaaaaatattgacttcttcatccatggcccttgagctttatttgtgacaacgtcacttttatcctggtgaccttttcttttcttttgattttcttcaggtggattcgaactttattcaacttttctaatacttgttccccttgcaaaggtggcggtggcaactcaaattcttgcttacggtcaaatgcttttttccaagtctgaaatacatgttcttttagaaaaaacctttggtgtcccatataacacattttctttcagtgttttaaatacatagaacatgttttctcctcacaaataggacatgctttgtaccctttcacactgtatctagaaagattttcgaaagctggaaaatcattaatggtccacagtatatggccttaagattaaattcttctttcccaaaggcatcgtatgcaggaacaccctcataccacaattggctcaaatcatcaactagaggggctgagtacacatcaatgtcattactaggctgtgaagggcctcaaataaacagtgtaagcatagtgaacttcctcttcattaccaaccaaggcggcaagttatacatcacaagcaaaactagccaggaactatacttactgctaagtgtggtttgtggattgatttcgtccgcagtaagaccagacatacattcttaggttctttgccaaatttaggccacctacgataaattgatttccaagtgggtgagtcagctggatgtctcatcttaccatctaaccttctatcgttggcatgccagatcaatttgtttgcatgattgacgtttcgaaacaacccagccaaacaaggtattgggggtaagtaccataatacctttgcaaggacacaaacttttacctcgtcaaaattatttttctttttccacctagactcaccacaagtgggaca

SEQ ID NO: 32886 - DNA, 2246 bp, Cannabis sativa
  modified_base (2015)..(2017): a, c, t, g, unknown or other
ggtgaaaaaatggtgaaatgggggtgatttttcgtggtggttggcggagagggtttggggtttctctgatttggggatttctgggctggctggtcgaataagaaagatgaagtgatgagctagggttataaacccttttggcgtcaaattcccttctaaaaattttcaaccctatggcgtcggttattaattattatgctgaaaaaagcgactctaaaggcttgttttatagtagtgtttggctttatcatttgttgagttatgttttgttaaacgaatggcaaacaagttggctcattgtttggcaagggactcttgtttctctacaagttatgtgcttgagttggaggattattcctctgaagtgcgttctattgttttgaacaagttattaattaataaatcccctgattattcaaaaaaaaataaataactttcaaattttcaataatatatattcaagatcaataactaatcacaattattaactttcatacttttttaataatatttattcaagatcaatgaccaataacattaatgactttcaaagcttttaataatctatattcaagatcaataactaataatgattaataactttcaaactcttacaattttttctttcttgatgattttactccgattaattgaaacatatacaatatatttataactacaaagaaggacgaataaagcaactctgtctctctgagaaaatagaattacatgacagatggtggaatgaagtatagatgtgtcgactgcggcaaaaaaaaatatctttaattttataagttttattatattttttttaaaaaaaaattaaatcacttgaaccaatcacaaagtgacaaacttatttggtacttaatgtattgatattaagattgagtgtagaattacatttaatcagagatcattcttactattttttattaattatggttatgagtgtaataattttaaattataagaagttttattacaatatttcaacaatttaagtaaaaaaattaatttctataagattcttattaagtaacaaattgtaaaaaattaattaatgattttttttttttttaaaaaaaaaaaaaagagaactctattcaaaaaaccaacaaatacaaccaacaaaagcccccacaccaacagtcgctgcacacaccatcgactgaggaactaccagttaaaaattacattacatatataagcttcaagcttgtctttactctcatctaaacaactcaaaaatttatgtataacaatgttcttaatgattttactaatataatacactatttcacaattacaatcaaaaacacagtttttcctattcatccaaatgctataaatcgttgctgagaccactgcattaaccactttgtcttgcaacgacctaacgagctttgagaaccattccatccactcaatgtgacacttcggtcactctgtagtacccagccacctagtaatttcaaccagcacccgttttgtgaaggggcactccacgaataggtggctatgtgtctcgatatcattatgacaaacaggatagtgtataaaggggagaaataataccttgctgagatggtcccttgtgagtaattggttgttaactgcttgcaaacatatgaatcgatgcttcagaatgaccattttatgccacactcttgtatcataatgaaccttctaaaccgagataagctgagtaaagaagttttttgccttgaatctttctttttctactagccttgagcatctcttctttgtcaatgatacttctaagtcttagaagttttttgaagtaccaactagcatcattcttaaaagtgagcagccaaaaatcttgaccttttaagtaagtggcattcacccatcgaacccacaagttgtcttgcgttttcgagatggcccaaatgaatttggccataagggtaatgttaacgcagatttttgttaactaaatttgagcctcacgataataattccacacagaaaaaataaaagctatnnnaaaataatatatgaacacagggtttttatatggttttgcagttaaaattctgaatagtccacgagtcaatcttattcagatttctgattgtgtttcttttgtttagggcctctcttgtataatatatttccgtcccttttttaagcttgtctgccactatttataattacgtaatgggcaattaattacaaagttgaccagaatttgtttacaacaatcatccctaaaa

SEQ ID NO: 32887 - DNA, 1849 bp, Cannabis sativa
ttctaaactagtccagtattcttccaacataatttatcttacgttgtcatgacatttctaacaactccgccaagcttccacggtcgctaggcccaaaaacattttatttcagaaatggtatccatgatacccacatattccaaaataatcttcgtaattaataaattacgctttatttaatgatttaaataaattcaccctaattacactaagtaagatcataatcttactccattaccaaaataattacatatttaataaaatatgtccagttaaatactgtattaatttctgggacattaaaactatcccctccttatagaaatttcgtcctcaaaatttacctgaaaatcttaggatactgctcccgcatctgcgattctaactcccaagtcgcttcttcaattttgatgtttcgccacagcactttaactagcagaatagtcttgttccgcaatgccttttcctttctgtccagaatttgtaatggttgttcttcatatgataagtcggtttgaagtttgatatcttcataactcaatacatgagttgtaacagatacatatttctgaagcatcgagacatggaatacgttatgaaccccagacagagcaggaggtaaagccaaccgataagctaactaatctactctttcaagaatctcgaacgggccaataaacctgggactgagttcactcctcttcccgaacctttgaattcccttcattggggacacccaaagtaaaacataatccccaatctagaattcaatatctctatgctttggatcagcgtagcttttctatctactctgtgaagcaagcatacgagcttgaattttctcaatggcttcactctctctttggacaacttcaggtccaagatacgtatgtccactctttcttccatagagcatctcatatggagccctgcaattggaactctaataactattgctatatgaaaattcgattagaggtagatacttgttccaagaaccttcaaaattcataatacatgccctcagcatatcctcaagtatctggatagtcctctcagattgaccatcggtttgaggatgaaaagttgtactgaaatttaacttggtacccattgctcgctataggctttcgcagaacttggatgtaagttttggatctcgatcagaaactatcgactttggggcaccatgaagccgaactatttccttgatatataaattagcatactgttctactgtatacggtttctgcagtggaaaaaaaaatgttcagactttgtgtttcgatccacaaccacccaaatagagtcataataccctaatttccttggtaatgccaccaaaaaatccatggtgatgtctttccacttccactctggaatcttcagaggctgaagcaaacccgccggcctctgatgttctgccttgatttgctgaaggttaagtatcttaacacatactcaacaatatctctcttcgtacccagccaccaatatagagctttcacatcatgatacatcttggttgttcccgggtgtaaggaatacggtgtggtatgagactcatcaagaatctcgtgtctgataattttatctgttggcacacaaaccctgttcttgtatcgcaataacccatcagacaaaagtgaaaattcttttaccgatccggcctctaacttctccttatgcccctgtaactcagaatcgtttttctgggccattttaattctttctactaaattagactacagggtaatgttagcaagttttcctatcacaaattcaatccctgcttgataactctatgaaaatagagttatttatatctttttgggcattaaattagctt

SEQ ID NO: 32888 - DNA, 1641 bp, Cannabis sativa
aaaaaaaaaaccaactttatttcttaataattggatctgaagatattatatattcctatactatattaatataaagtaaatctatcagtacactgctttaattggtgtttcagtaaaatttatatttgttttgatatttaaatctggaagtattttgtcaatatttttttttttatatgaacgtgttcactataaattttttaggatagctattaaattttttaaaaaattgtattatttatattactgaaaatacaccatgagagagaacaactgcttgattatttaggatcgcatgattattttttcatgtagatgtagcaaacaactgcttgatttaattttatttttcaaaggatagtctccttataataaaccatgagagagatgctctccctatactatatattatattattaattattacaccatataataagtaatattcttaataataataataatagttaataaactttatcacccatttttttactgttttgtttataattataataatataacactataacaatattgctattattattatattatgattattaattataatagttactaaatttaaaatattacgtatattattaaattactattaattatatatatatgtatccagttaaccttacttaaaagtttaaaaataataaaaaccgaagaaattaaaattcttgattgtaaaattagtaaaagaattatatagatacttgttgatggtcttctcttgatattgcttttttttttccaatttggaaataaatcataaagttatttaaactctatttatcaacctatacggaataagttgtattctaaaaactctttaaagcttcatgcattaggtattaaattattacaggatacatttatgcagttaattactataccacaaaaatggatcactcatatgtaattttgtagtttttacacgtaattttaaaataattgttagtgacattcttaaatttaaatttatccatcattttcaaaagaaaaaaaaaagtcacatccaataagaaattaaataaatgacaactatctcaaaacagagcccaacaaaaaataaaaagccaaaatagcccgattttttctatgttgatacaacactcaaccttttctaagaagctttctaacttttctaggtgtgaagagaaagctccaaattcatcacaaatatatcataacaatagaaagatatgcacaaatgtatataaagtaatttaccacaacacattagattaggatatcaaacaagatcaaccatcattacataaaaaaaataaagataatccaagttaagagaaatgaaagaggactaaataaggagtaaacggattaaaataaataaattaaaagaaacctaccaaaaaaataaacgacaaatgttatctcaactttgtcattggataatgagaatcactctccataatctcaattttcatgaagccataatctcacctatatatatatatatataaatacataaataaaaaatttaaagactgattcaatcgtaaccttttgaataatggcacctcttcaatggcttaaattagtataaatgacttttaaatagctaaaggtggaatatcaaagttctcatgaacattcatatataat

SEQ ID NO: 32889 - DNA, 1144 bp, Cannabis sativa
ctctctctctctctctctccttggcaccaccaacccccttggcaccaagggccacttcccttctctctctctacttctgtctatatctctctttctctctctatctctctctatctatctatctatcattggcgccaacaaccacttctcttcctttctttcctcatttattttccccacttttcttctctcattggcgccaaggaaatcttcaccccgagaaggcttgaatcaccttttttcccttcattttttcactcaatagaacaacaaggagaaagtctaggtaccaagtggcaatgaagcaagggtgtgccaaaaggcaaaaggaatgtactttggagtgtgttgtgtaccagcctaacctctgcactggacaagtagtggtgacagaactgtgtacaagggaaccaaccgccaagaccattaagtactctgacagccacaacctctgcaactactacccctaccacaactctgacatctaagggttagtaggtgtaccatttaccgatcgtccctaaggaccacaaacaacaatttgtaacacaatgctagtagagtctcattataaatagccctcaccttcattgaaggggggttaatgtaacagtaactacataaatagaaccagtgacggacccacttgtattaatgtggggtttatagcctccaatagctaacaaaaatattaccttttaaaaaattaaatgtaactttttttaatttgatagttataggctaaaatagtagaaaagcgcccacaaaattaaataaatctaataagagtgattataatataggtataaatatttttaatgataaataaacctcccacaaagtaaaaattttaagtctgtcactgaaaagaactactatttttatctcaagtatttcatgaaagtttcttaagtgttattctcctcagtttagattattattttcattttccagctcaatcattatcaatatgtaatacaaagaaaattttaaaaatcaactatataatgtatgaaaacaaaaatgtagtgaattatttactgttaaacccatctcaatattttagcaatattaaaaatcagcatttacacattatgtgattactttcttaaacaattggctagagttaaaaaaaaaaaaaaaa

SEQ ID NO: 32890 - DNA, 1814 bp, Cannabis sativa
  modified_base (504)..(511): a, c, t, g, unknown or other
  modified_base (568)..(576): a, c, t, g, unknown or other
  modified_base (1107)..(1109): a, c, t, g, unknown or other
cgtcaaccttctgtgggaaggtggctcgagttcaacgagtagcatagcttcataaccgtacgccattgtgaatggtgtctgttcggtcgctgttttttccgtcgtacggtatgaccatcgaacttcaagaagctcttctaactagtttcctttggcatcttcaagtcttttctttagtgtatccctcaaggttttgttgactgcttcgacttgatcatttgcctgaggatgcgccactgcggagaaacttttgatgataccatggttcacacagaaatcaatgaaggattggctgtcgaactgcttgtgattgtttgagactattttgtacggtagtccaaaccggcatatgatgttcttcacaataaagtcttgaactttctttaatgtaagggttgcaagtggttcggcttcagtccatttagtaaagtaatcaacccctaccactacatagtgcacaccacatttacctttaggtaattgtccgatcaggtcaattccccnnnnnnnnaagggccacggactttgcatctgtattaactcgttgggcagagctcttggtatcttnnnnnnnnnctggcatttgtcgcacttcttaacatagggtctcgaatcttcaatcatcgttggctagaagtaaccttgcctttgaattttcttggataggctctatccggcggcatgatttccacagaatctatcgtgaactttagataggatttgtgcagcttcttcttgagtgacacatatgagcaatggcatcgagaatcctcttctgtacatgactccctctactatgatatactgtgcagctttccttctcattttctgaacctcatttcagttatctgggagttcccaagagttgacgtgggctactattggtgtcatccagtttgagggtgtatcaatcatttcaatttcttccgtgctagtgatgctaggctctacgaagaactggataggaactagtttttccttgtcacttacattgttgctcgccaatcgtgctaacgcgtctgcagttgtattttcttctcttggaatttgtttgagaccgtagcttttgaattgtgcgagcagatcgtgtattttgctcagatatgnnntcatcttttctccccgagcttcatattcttcggatatgatttaccaccagttgtgaatcactgcagatttcgatgtgttcgaccttcatctccctggctagtcttagcccaatgattagagcttcgtactcggcttcattgctatatgcttttaatcgtaacttaactacagcgtgcaggtgttgccccccaggcgtgacgagggaaattcttgcaccatatagttgatccatagccgacccatccacatgtacttttcaggtcggtttgtcctcattgtgacttggctgaggtatttgtaccagctcggggttgctttctgatatgctttctttcttgcctgtgcattctaccacaaagtctggcaaggcttggcctttgattattgttcggggttggaaagtgatttcgtactggcccaactctactgcccacttgagtaactgtccagaagcatctggcttttgtagtatttgttgtagtggttgttcggtatatacccgaacaggatgagcttggaaataaggcctcaacttccttattgctgaaatgaggcagtaggcgagtttttctatcaacagatatcgaccctcgacctcactgagtcttttatagatgtaatagactgggtgatgtacgttgttttcttctctgatcagcacggcactcacggcatgttctgtaacagccaagtatattcccagt

SEQ ID NO: 32891 - DNA, 1725 bp, Cannabis sativa
  modified_base (371)..(371): a, c, t, g, unknown or other
taaattaaaatacataatttttttcttgtatatcacaaaattcatcgataaaggaatttatactaaattttttggcgatttctcttttaatatatatttacaaacaatcacgtaaaaattcattctatcttttcggagaatgtaatcttcactataattgtagttgagaaaaatcactttgtggtagctataaaaaatgaaagagtaagagaaagaattatcattttatacttaggaaaatctaaaatagcttatcttaccaagtaaattagtattattagagaaaaaaataaatatcttaaaaaaaagaaaataaaatagaattttataaaattaattctagaacataccatttatatatatatatatanatatatatataattttagtttgactttgtcaaacaagatctccaatactcaattatcaaaacaaattgaattacataactaacaaaagaagaaaaaaaaatcaaataaaatatagaaacttaaccacaggcatatagaatatctaggggggccatggcctctttatgctatatagtacgtccgcccgtctgcccctgattgtacttaaattatcctcacattctcacataattaagacataatttcaaacataatagatttatgttctttggagatgaatgtgtaggtttgtgagaaagtttgggcaaaattttaattaaagaaaaatggagactatcgagaagtgatagggtaaaactggtagaataattaaaaaaaatgttaacataataaattttgaaataggaggtaaaaatcaaatgcatcaatttaaaagaaatatgtaatgtaatttgctcttaatataataacttttagagagtatcgttagccaatcacaaggcgacatgcctaaaagtactagatatcacttatacctaataacaatatatatatagaagaagtatgaggcggtgacgtgccggtctaaaaatagtttaaggtcatctttcttttctccttaattaatttattaattatgtatatatattaattaatataaaatatattttttccttaatttatttattttttttaaaaaaaatgataacaaaaaatttagttattagatttttttggccacgttttagcttctttttttttaaaaataaaaaaattaaaatttaaaaaataacaatacaatttaatattttttccttaattcatttatttaaaaaaaaatgataactcaacaaaaaatttatttattagattgtttttggccacgttttggcttttttaatattaaaattttaaaaaataatatacaattttttaaaattttaaaaaatctatatcttatcatatatacaaagttattttttaattattttattattttttaaaaaattcttctactaccatacaaaaatttattttctttttttttttttaaaaaaaaatcttctaccaaattctaaaaaaaatataaataataattatctatatatatacattaattctaaatgatgcataaatcacatcacttttcctaatatttatatatatatacattcatttttttcatttttattctctcatttggattacaatatacaatatagtttatataagatggtaattttattagggtattttacaaaaatactgaatttgggttaatacttttcaattttactgccacacggcagatgttacatttatactgtccttcctttttttttcttttatactg

SEQ ID NO: 32892 - DNA, 1439 bp, Cannabis sativa
aaatatatgggtatttaaatagaatgccataaaaaaatattgaaaaagataatcaatttttcaaataggatcacgctctctctagccacataagatttttttctcgcatgctattcaaattgtttagtttctcatgtgatcaaaatcaatcaccaaagatccttcattatgaaactgattttttcatcaagaaattagttttttcttcaagaaactgtttttttttaattaagaaactagtttcttcattaggaaactggttttgattatataaaggtaaaatttataatataaaaaaaacttataaatccaattttgaagcaaccccattacagtaaaacagaggtgctcaaaaaaatacaaaaatcaaactactctctttagccacacaagattttttttctctctcttatgattcatattgcttagtttctcatgcgatcaaaatcaatcaccaaaactccttcatcaagaaactgatttttcatcaagaaattagttcttcatcaagaaactggtttcttcatcaaataaaactacctaaaaataaataaagacattaaatatgggttttgaaaacctaatttacatatatatagcatatcaaataccataaaaatacctaaaaataaaaaaaatactatataaattggtcaaacctaaaattgtcatatttaaataaacaacttttaaaattccacattgagtgtaaattttactatttttttttcagaaaaaaaccccgaaaaatcatccttaaagcaaaaaaggaagatgtactgattatattaagtcatctcacataaaacaagattatggatacaagaaagataacttgaccaccaaaccttgttaataactttcgacaagacatatttagccaaagaataagtaacaacatcaatagatttaggaaaaaatgaaatactagcagaattaaattaaaaaaaaattatgtctaaaatcagttgatattaacccaaagaaaaagccaaaaaaacctagttattaaacttcaataccacattcaaacaatcagatttaaaaaacacattctgataacccaataagcagcattggatgactacatattttaacgctaaagcttttgtcatttcaagaaaaggtacccaaaatgtgtcaaaaagtagaaactataacctcacctgtgtagtcacgaactaccacacccaaaccatatctattattagggacatcaagagtaggggtgagcatggattggaaataggccgaccaacctggccaacctaacccgaaatgggccgaacatggtcattttttgtgggccgaaatacatatgggttgagaaagattcaacccgcccctattgggttgatttcgacctgtgggttttctaacctaatgaacccaaaccgaaccggccagtccagcccaagtaaaaaaaatatatatataca

SEQ ID NO: 32893 - DNA, 3178 bp, Cannabis sativa
  modified_base (1121)..(1124): a, c, t, g, unknown or other
cacctaaacaaaggacctaggccccgaaacccagaccttgatctaaattcgggacttcaacttgaactaggacttgacctggaccggggaatatgatgtcggaccaagacgtggatatgaaatctgccccggacccgaactaggacaggaacctggatacgaacacataccaggaccaaacccgaaaccgagccaaaactcagacacagacccaaaatcagacccaaacatagaactcgaacccattccaggatcagaacccaggacttagactaagaactaaactcaaactcagatcgagatcaaaacctgggactcggaccagaacctttacccagaccaaggaccctaacccactcccggagcatgattcagacatagaccgagatttggacccaaacacaaactcaaactaggactcgaacactgacccaaactcgaacccaaactcaaactcagaatcgcaactggaactggaactggacaaggactaggactagaaccaagattaagacacagaccagagcccaaacccgaccgagacttaagccagaacctcgactaggacccaaacccgaacatagaatgggatcaaaatcgggacctagaaccagaatcgagatacggacttgggcaacggaactaggaccgggacccaaggcccgaacccaaacccggacttaattctaggacccaactcgtgactcgacatacgaaatcgaactagaccgagacccgagatcgggatcaagatctggacatggggcttggactgaacccgtagtcggtgtttggatctgggacccaaccccgaactcgaacctagaccaggacccgaaactagacccagacttgaacccagtcccaaatcacaacctggacccggatccaaacccagacatagactcgatgccgaacttggacccgaactcagacccaaacatggaagcagaatcaggacacaccattggggccgggacctagaacggaaccccaatctcggtccggaactagattttggactcagaccaggacccaaacccgacccctgacccaaaactagaacatgaacaagaaccgcaacactgggaccctcgaacaagactaggaccgtgagtagnnnntggacccaccctagaaccgaactcgaacatatccccagacccaaaccgtgacctgaagtcaggccctgcacgtcgtgtacctagaccaagactgagacctggaccaaaacccggatccagaccaggatcgaaacttggaacctagatctggaacgagaccctaacctagacccagacctggacccgcacccgggacccgaacttgaaccatgacctaaacccagacccagattgggatccggacctggacccagactcagactcagactcggaccaggaatcagacctcaacccagacccagacccaaactcgaacccagacactgaatcgaaattgaaactgggactaggacccaaaccggatcctaggactcaaaccatgatgggggacctggacttaagccacggaacgccgaccaaaatcggaacacggtactcggactcgaacctggacatcggggccaaactcaggacccaagaaccagactgagacttgggactcgaagcccagacctagaatgggactgtgacccatactcggaccctaacccaaatcgcgaccaaaactcggtccgaacccaaacccgaacctgaacacgaacttggattcggaccgaaacctaggacctgaacatagatgggggacccagacctgggaattgggcccccgaactaggaccagaaattggtctcagaacttgaatcgggatcaaccactcgaccccagacctaaacttggacataggacccacctcggaacctgggatctgggactcgatgcttggacccgaccagtactcagtgtctggatcaaggatatagacttgaactcgaacccaaactcaaactcaaactaagaccttgacacatacgaagaccaagacccacactcaggaacaaaaatcgaaacatgaattagaaagggaccaagatctttgaacgggaccgagacctgggccctgacccagcctcgaaccctacctgagaccgaaaccttaacctaaaccttgcctcagaccaaaatcacgacccgaacccagactcagatccaaactcgaccaaaacccgtaccccataacttaaaactgtaatcgaaactagaagcagaccaggacccaagaacaagaccatgacaaggacatgaacatagagccaaaactgtaaccggacctggacccagactcggtcaaggaccgactctgggatcgggtccaaaatctaaatccaaacccgaactgggactcaagacacgaacctagacttgaattcagaccagaacattgaacatgacacgagacccagaactggaccctagtctcggtcctggacctaaacccaaacctagaccctgacctaggacatgaattgaaacaagactaggacccatgattgggatgcagatctagtccaatgattagagaactggggcttggacacgacccatagttgatgtcttgatcatggactcggacaaggacccgaagctggaaaaggacctagacccagacccaaacctgggacgcaaaaccgaaacttgaaaaagaacgtgatcaggaccatggaacaggaccgggaccgtgagctggaccttgacccgaactcagaactagaccgaacctagctcagaactcgggttcagacccagtcgtggacccagactagcactcagactcgaaccagaacctgaacacgaagtcgggacacgatcctagacccggacaaagccctttacctaaattggaattcagaccttgacatggacacaaacccatacccgaacccaaataccgacgacgacctagaccgggattgaaacaagggacctaggcccagacgcagacgcatacccagacatgaacatgggacccagaaccaagacctaaacctagaccttgactcagatctgtacctagaccgagattcgaaaaacccgtactcggactcgaactaagactcagaccctgaaaccaacttggacacagacccggatccggaaccatagtcggacccagaataaaaactggaaattatgactaggacccagacctaagacg

SEQ ID NO: 32894 - DNA, 1004 bp, Cannabis sativa
  modified_base (303)..(307): a, c, t, g, unknown or other
  modified_base (354)..(357): a, c, t, g, unknown or other
ctaccaacacttgtacggaaatggtacaaagtgcattggtatagtgtatattgtttaaaaagtacattacagtgttactagcacaagtacggggaagtacatggtgtgtgtcgtgatcacttaacggtactcagggtacaaaacaaaccctacaaacacttgtataatgttagtacaaatagtatgtggtacagtggttgtaccctagtatggaacgttcttactcctttgttaagccttgtaaataggtgtatgggcgcctagatacaagtcgataatatgtgatatgttatatgcttttcnnnnngagtttgtcgactcacagtgctacttttatgtgtaggtaaaggaaannnnaaggctgaacaggagtgagcttgagctaggatgaggttgtacatatcatggcagcgcgatctaaaatgttcgatcttaagacatttggggtttccattttgtagtcgctttgcgatctgacttttgtatttggaatattttgtaaaaattttaaataacgggatcccaaaacttccaaatattttggtaaagcttataaagtttcatagttaatactaaaaggtttaattttgacacgatttttgaaaaaaaattctttgattagcgaagacaacaatttaattgaaaaataactgtagcgtgccttagcattacggtgttacaattttggtatcagagccccctggtttgtctatggaagctcgccaagaaatgtacaatcatcatcagagaaatcttagctcacggttcagtaagcctgtatttgtttaatattgtatgtgattattaaagaatgttggaaagcatattagtttagggttatttattttaatgtgttgccttaaaatacataagagcgatattaagtttttgtgattgttgtttgacttgcctgacttatgggttcgcaggctaagtcctattaaatggacgcccagcgaaatacaaggagttagggtaacagggtcgagaccggaggcggtcag

SEQ ID NO: 32895 - DNA, 2829 bp, Cannabis sativa
ttaatacaatactagataacgatgttgttgttgttattgttgtggatgggatgggttgctttcaatgtagaattttgtagcaacaaaatcaagtttgtcctctttagtcaccacagacagagccatatattaattcattcactccatctttgtgtgggcccaaaattataagctggcccatctgcaataatagcccattctctaatccttagaatctgacctgacctgaggtgaccaggcttcctgcattgcatgcttatgcacctgtcaccttcttacaatctatactcttattataagaaattacatggtatacccactttactttatttgttttaatttttacctctatttttatatcttttaagatatccacttttattaatgatgtcttcattagatcccttaagttaatgtaaaatatatgctagacttaagtagagagtaagggtataataggcaatccactcaagaaagtaaaaaagtaggtatattttattaaaataaaatataaaagtattttgattaatagatactgacattttttaacatatcccctcttattattattttatttaacgacaaaattatataaattttaggattattagcggctaaacaacttaaatttgtggttgatctcctactgtcaagtggggattgggatgtccaccaactgaatagtctttttgaacaggagactgtttctgcaatcttgaaaggtggtaagccctcgggacaaggtaaggataaatggatttggaccttggaaagcaacgggcagttctcgtgtaaatcgacttatctgacccaggccttggatagagctcctcattgtgttgttgctccggtactttagaataagctttggaatagtaaaatcttggcgcgccataaagttctctggtggtgtatcctttctaatgcgctccctatgagatcagttattagaagaaggtttcagattggagaactcaaactgccatttgtgcgggttgagggaggaatctattgaacatttatttctctcctgttaggtggcgcaacacttatggcgttcttcaccttggggtatttactctgtgtgcgatactggtattcgtgtttgggattggattaaatttatatgggatcttagacataaggggatccgtgctgaggatgtatttctttatgcatcgattgttgtcgacaacatctggaggacgcacaatgaaaggtacacaataaatccccccagatatgatgaaatgtattgacaatatttgtacttcttttgtagagttacatgattctctcttatctgctcctacaccgaccttgagggagacttggaaccctcctccacaggattggataaaactgaattgtgatgttagagtggccttagagagcatgtgcatagctggtgtagcaaggaatcatctgtgcaaggtggttcgggttgacacgtctcggttggatttctcggatgcattatgtggagaagctacgacctgctgcttggctgtttcgatggctatggatttagggtataagtatattattgtggagagtgactcgaggctagctatcaatgcgctcaatgggaagctgtcccattgggctcttgagaactatgtctccttttgtattaagtcttctcctgcttttatttgttgtaacttttctcatgttagtaggacttgtaactatgttgcccataatgtggctaagtgggctttctcccaccaactgtatggttctattccgatctcctctttaccgaggaatctattttgcaatgactgcgaggtctaactgtttaattgtttaatgaatgtttcacgcttatttttttttaaaaaaaaataattttaaattttttaacatttaatcagaaaaattgattttttaagttgctaaacagaaccttattatattatactatacaaaattagtctaataatttactacaacctatgacattctgaatgtgtatattggatcaaaatataaatatcctcatcatgtattgattaatattttttaattgtttttctctctttctcttttggttgtcgttgaatgtggtcataatacaattcaagaatccagatccagacttaacatatctctacaaaattaaatatataaaaatactgctgttaaataaactaataataatgtggttggtgattaattacctgaaattataacgtggtagtttagacatgttaggttagtttaccccattacattaaggaccaaaataagtagacttttgacttttgaggttaaaattacttatatgagtaagtgtacacaacatatataccaaaccaatagaggtaaatacaattttccactttatatttgtaaaaattacttattaaattatatgctttgttaaatgataaattagaccatatattttttaaaattaggtaattttcaaagttaataatataccgatctagaattgttatgataaaattggatatatttttttgcatatattcgtgttagtgttataagttgtcttcaagttgattatattacaaaaattattaaaaactgagttcagttactattttgtactattttagaaaatacagagttcaatttatcgttttacaaaatagagtctaatcgataacttttacaaagcacaagtccaaaataatttaacccaataataaataataatatagcgttttaaacttttaatacaaatttagtaggagagttatttgcggcataacctccttaagtggccaggtttttgcaactaacccccaattctaaaattttgatggtaaaacctcttaaacccaagttctgttagca

SEQ ID NO: 32896 - DNA, 1466 bp, Cannabis sativa
  modified_base (927)..(933): a, c, t, g, unknown or other
  modified_base (1188)..(1189): a, c, t, g, unknown or other
  modified_base (1418)..(1427): a, c, t, g, unknown or other
gttagatgtatgataagatatacgaaattctttctcaaaatcaattagcaatgattattgaagtaactttatattatgaagaaaggctagcttttttggagactcctcccggatggacaagaaagccttctgagaacactcttctaggggacaacaaacttcctggaagatgaatatattttagagacctttttatttaaaggaactattacagtataagtttttaatgccaaatttggtgtagtataacaccaaatttagtgtataggttggagatgctgttaggatttgactattgtgtttgtgagcaattactagatagcaatttatagtcaccacaaaaaataattaaatatctttagtagcaacctttaagtcgcaatataaattttttgtgactagatgtgacttttagtcataacaaaaatttacttgtgactaaaacatagtatttagatacaagttgttactaattgttagaatttgggataagatgaatgaggttctatctcaaaactaattggcaataggaggagtagcccatttatcttatatattacaatttatttccacactttagcaatgtgagaccaactctagtacacccttcttgcgtttttgggcctggaaagtgtgggtataacgaacgacctttaagaaaccacaaggccgaacatgacatttgaaagaatcccacaaggccaaatatcgggaaatttgtgggtgtatacgttggaaatttgtggaatttgaaataggtcaaagaccccaacattgaaaattggcacacattggccaaaaggtcccaaatgaaggttaaaggggagacagcaaaagtatctttttggaccggcaacactttggctcacaacggattacaaacgactttttggaacggtggcatttgggctcacaacggatcacaannnnnnntgataccatgttagaatttaagataagatgaatagggttccatctcaaaaccaattgacaatggaaggagtagcccattcattttatatatcacaatttatttccacgcattagcaatgtgtgactaactctaatactaatttacttttagtcacaacaagtattgttactaaacatacatttaatcataataaattgtaatttttgtaactaatacctttaggttttacccacggaccttttagtcacaacatnngaatgataatttataattaattattcacaattttttacttttagtcacaacaaaaattataactaaaagtaaaaaaaaaaaaattatagtgactactattatctattttatataaaatgtggctatgtagcagaattcttagtttaacgatactttttgggtttctacgttaactttaacagaaaattctattacttaacagatgattctttattaattttataatatnnnnnnnnnnatttaaaaataaaaattatataaatattttatataaaga

SEQ ID NO: 32897 - DNA, 1316 bp, Cannabis sativa
tagataggatcataatctcacttattttacatgattaacccataatataaatataaaccctaattatttaccattaggtttatcaagatattacaatcctccattccttatagaaatttcatcctcaaaatttacttgaataactcaagatacagctcccgtatctacgactctaactaccaagtcgcttcctcaactttactattcctccacaatactttaaccggagggatcgtcttatttcagagtactttctcctttcagtctaaaatctggacaggttgttcttcgtaagataagtctatctagagctcaatatcatcgtaactcaaaatatgtgttggatctgacacgtactttctcaacataaagatgtggaagacattatgcaccccagatgacacagatggtaaggctaattgataggcgacctagcctatcagctccagtatctcaaaaggactaatgaatctaggactcagctttcctttcttcccaaatctacgtacccttttcataggtgatactcgaagaaatacagagtctcccacttaaaattctatattcatatgctttggatctacatagcttttctgtctactttgtgaagcaagcatatgagatcgaatcttctcaatggcttcactggtcctttggaccaatttaggtccaagataacgtctctctccagcctcatcccagtttataggaatcgacatttcctaccacacagcatctcgtaaggtgccatactaatggtattctgatagctgttattatatgaaaactcaatcaagggtaggaacttgctccaagatccttcaaaatctatcacacatgctcgcaacatatcttccgatatctgaatggttctctcagactgaccatccgtctgagggtgaaaagttgtatagaatctcaacttgtttcccatggcaatctgtaaactctcccagaacttggaagtaaatttaggatcacgatatgaaacaattgattttagggcaccatggagtctcactatttccttaatgtacaattcggcataccggtccacagtataagtcactcgtacatgtaaaaagtgtgttgacttggtgaatctatccactatcacccatatggaatcatataacccagtagtctaggtaaccctactacaaagtccatgataatgtcttctcacttccactcaggtatcatcaaaggctgaagtaaacctgtcggcgtatattatagaattttccaaaattgtaaataaaacaataataaaagggtgattctataatgcacccccttaaaagagatgtactgat

SEQ ID NO: 32898 - DNA, 2539 bp, Cannabis sativa
agcatactttgccaatatcctagagagaacataacacttatcaaaggtataagtaagttttattgttgactatcacatcagtgtaaatttactgcactgatgaatcatgagacattatcttttgaagcatataatcacaattaccttccactgtgttgacattactgtaattgtaaataactatttgttctcgattcaacagaaattgtatatcaaatcataaacatgaaaactactataaaaccctaacattttttctatttttttttcaataaatttgaagagaatataaaattcaagtactactgtttgtatgcccttgatgttattttgctatgttcacaaactaataattaatattaagggcttacaaagataattccttgggtgaaaagggaaatagtatgtcagcctaaggcgatgggtgggcttggtttttgagattttcaactttttaatcaagctcttttggccaagcaagtatggaggttatttttatatcctgattcattgcctggttgaattttgaaacataaatatttaccaaattgctttatccttgaggccacagaaaaagttggttcgtctcatctttggtcgagtttgatctggggaatggatttgcttaagtgcggtcttcgcagatctattagagatggaacacaagttagagcttttaagaacccatggctcccgtgttcgaggtcttttcagccaattacgaggaggattaatgatgactgtcgagtgagtgaaattattcttccatctagtacttgggatgtggggaagcttcaacaggtttttctgccaatggatgtggatataattctgtctattatattagcgaggtgtgaagtagaagatggttggtcttggcactacgatagagatggggtttataatgtcaagagtggctactcattggcgtggtcgctccaagttgcgaagggaattgcagattcatccagtttaactcgttggtggaattgagtatagaatctcaatatgccaccaaaggtgaaagcttttgtttggcatatgttccatatttagttttaccagtagtaacacaacttatctcctgaaaagttcaggtacctttttgatgttctcggtgcggagaagaagttgaaactcctaagcatgctctatttttctattctggtttgattctatggcatggtggggttgttggtcggtgctccgtcgatgtgcatatggaccaatgtaggaaagtctcctactactctttgacaggctatcccgtgaggcttttgaattgatgatgacagccctttagtggttgtggtatgataagaactcagtattatttggcaacaaacagccaaaattaaatattattccaaacttagccaataaccatctagcagagttttaagagtatgctcagcgagaccttcatttgggattgggtcttgcaaacttagttgtaaactgagctactcgatggatgccacctcctcctgaatcctttgctctagcgacgaatgctccggtgatttcgagaaaaggctttgttggatagtgatataggatgcagagggtgtggtttggttggcgtagtcatcaggtgtgttaggtgatttctctgctaatgtagcagagctgcttgccattcatctagggttgactcttgcgtatcaatttagtttcaatatctctatttattaatagtgattcctctgtggtaattggttgggttaataagcttcacattaattttagttttcagtctattttattagatatctagtagttgttggtagtggttcttgcagtatcactccgatatcaacgaatggtgttgtccatattgacaatctctattactagtttataagcgatcgtgtgttatgcttgtctttgattttttagttcttttataagagcggatttgtcgtaatgaattttgcatttatttcaaatatatatatatatatatatatatctgatgtgccacctagtggattatacttgatgaattctatacgttccatatttgaccaagtcactaaccttcttttactagcaatacctatcaataaggccatgcccatgcctttaaatccttggtcaaattgaaatgacatgttcatataaggatttttctctttttgtagatatatcaatataaaaatatataaattaagtagtagttttcgttttgttgggttcaaactttatgcaccataataatgcagtggcaactcgaaggaaaactcttgcaagttggcaacgtccctcttggcctcttctacatatatggacgataataaatttcccaataaaaagtactcaaagctctttttggaccaaattatatactgtgattggattttgattatttgttatggcctacgtacccctgatgaccccacatttgctttaatctcacggttcgtggaattagagcactattaatataacaaattaaaccacataatatgataaaaagatcatgtacatttcttatgtgccatggaataagattaatgattctctttttggcttggaa

SEQ ID NO: 32899 - DNA, 2571 bp, Cannabis sativa
agctttgacctgacccgtagttagtgtttgaatccaagacctctggacccaaattcgtacccagacctagacctagacccagaccgggatccacatctgatcacggacccaaaatcgggataagataaagagtgggactagaacctcaacctaggatagtaacaggatcaaaacctaagcccaaactaacacgagaacccataccaggacttggacccagactgggacctgtgacttgggatctaaaccaagatcaggaccttgacccagaccgggactcggacccagacctaaactcacaggcaaaaacaggggccagacccaggacctaagaaccagactcggacctgagacccgaaactcagacccacattggtactgggacccaaactcggacccgaaccgaaatcgagacttggactcacaccaggactcgagacttgaaaccgaactggaacacgaatttggacccgaactaggacctaggacctaaatatagattgggaacctagacacgggatttgggcccccaaattaggaccagaatttgggcctcacaacttggatcgggatccgggacacgacaccaaacccaaacttggacctaggacccacaacgcgacctcggatccgagaatcgatgcttggacccgacccatagtctgtgtcttgatctaggacttagaccagaacccgaacccaaactcaaactcaaactcaaaccaagacgcggacacatacccagaccaaacccacactcaggaaacaaaaccaaaacttgaacttgaaccgagctggaatcttggaacgggactaggacctggacctggacctaaaccttgcctcggacccaaatcaagacctgaacccaaagtttacccgaacccgtaccccgtgacttgaaactgaaaccataactaaaagtaaattgggacccacaaacacaggaccaagacaaggacctcgagacacagacccaaaactgtaaccggacaaggactccgactcgcacacagacctaccctgggattgtgtcccaaacttgaatccaaacccaaatcgagactcgggaccaaaacccacacctgaactcagaccgaaacatggaacaggactcgagaccccgaactgcaccgtagtctcggtctcagacctagaccaagagccagagcgggacttgggacatgaaccgaaactagactaggacccgtgattgagatccagatcttgtcccgggatctgggaacttgggcttggaaaagacccatagtgcgtgtcttgatcgagaactcggacaaggacacaaagtttgaccaggacctggacccagaccaagacatgggactcgaaactgaaacttgaaccagaacgtgaccaagaccctagaaaaggatcgagacagtgtccaagacctggacctggtcccggacccagactaggactgagactcgaacccaaacccaaacccgaactggggactcgatttcgggcccaaaccaagcccctgactgagatagggattcgcacttggacatggacacgaacctagacccaaaactgaataccgacctagacccagaccgggatcaaaacacaagacctggactcggacccagacacagacccaaacctataataaaacccaaaatcgaacctaaactcggatcgaaacccaggacttagaaccggatctaaacctagactcatatcgagatcggaacttgggactcgggccttgacctagaccagacccaggacccgaacccacactcggagcatgatccaaaactagactgaaatctagagcagaacccaaacttaaacaaggactcgaatcactacctgaactcaaaacctaactcaaactcagaatcgcaactggaacttgaaccagactaggactatgacaaggacaacgaccaaaactcaaacccgaacctagataaaactaggactcaaacctgaacctagaccgggacccaaacatagaccacaatcaggacctagacctagaatcgagatagggacctgggcaacagaactaggattgggacctagtatccgacgcaagacctagacttgaacgtaagacctagctcgtgacccaacacccaaaatggaaccaaaccatgacccgagattgggatctagatcttgactcggcgcttagaccgaacctgtagtcaatatctggatctggggcccagcctcggacccaaacaaagacaaggacctgaacccagtcccagacccaaacctagacctgaacccgtaccctatgacctaaaattagaacagaaactggaagtagacctgaacccaagaacgggaccagaacaaggacttagacttggaaccgtaactgtacctggacattgacccagaaccgtaactagactaggacctggacaccaactcagaccttgactcgaatcgggacccggacccagacctgaatccccaccgagacttggactcagaacccgaactcaaacccgaactcagacccaaacatggaaccatactcaggacactgacccggggctgggacctagaaccgtaccactgtct

SEQ ID NO: 32900 - DNA, 3130 bp, Cannabis sativa
tatgtgacttggaatccttgaaagacacactgtaatcgttcaaaaatagtgaagatcaagccaatcatcttaggaacagctcgggaacgtaactcaaattttgggtgaacctcgggaaaatttctagggctttcttttcttttctttgtacttttgtgttttcgtgtttggatctattactaaaaaactgggttttagaggcatttttttagctgatttataaaaaagaaaaactaaagcacccaaaaaatatctttgggttcccaactatagaaaattgatatttaattgcggttatattataaaaattgtatcgatagagtgtacctatttttatagctatggtttttttttctttagttgttgtggctgagcaaaagaaatgagggttaacatcctatgtcgtcggttattagtaaataaccgacaacatatagagtgttaaaatcttgatttctttgcattcacttcttcatcttcattttttatgagaacaaaaccagacgagccacgaaaccctcaccggcatccaccacccatacaacccccatttctttattttccaccattttcactcaatttttttctaaatcttttatttttcatgcatacccaaaattgtattcccaatgtttaatcgttcttttcttttttttagctttttagtgtaaactgagctaagaggtggtggttgcagctccaatcgccgtttttggtgtaaaaatagttgaataatctcaacgtccattaaggtataaatctaatctgtaataattttattaaagtatatttttttattttttattttgtaaatttttttagggctttttagattgttaagattgtgtttttagagttatacaatggtggccagattttggtcggtatcagtggccagatttgggttataattaaaaaatctaaactttaatagttttgttataattttttaataaattgaaataattttttgattagtgtttgtgttacatattattttgttaaaaattattatttttatttaatattaatatgttaaatattaagatgaaaagagaaaatgaaaatgagataggagagtattaaagtagaaattgagaaattgggttctaaaacattttttagtgagatataatttttttttttttcaaaaatagatgtagatctaagatgagaaaaaaaaattaactcttttatttattttttttatttacatactaaatttaattttttctttcatattcctattcttgtgtttttaattcttttactagctagtaactaatagttagttacaattactaactaattactaatttttatttctattcatgtatttttagtactaactagttactaattttactaactagttactcattagtaactagttagcaacaaatttctaacttagctagttagtaataaattaactaattactcataaatgatataactagctagtgtagttaaataattcaaaatttaaattttatattatttttcaatattgtaggcggtgaggtgaatttgcaatgattcgacttatttggtgttgatcagtttttagctagctagaggtatacattcactaacttttgttattaattaattatcaatgctttgaagagtttgaatattaaatatccatccgtgtgaagtaggttctgcgatatattgtactgcggtcaaatgagtggaataatatgcatgctacatgagtttgaatatcttaaatatttattcgtagtaaagtaggttctgcgaatacatgtactgcagtcagatgagtagcaaatttttgtatagctaaatgttgttgtgattgctttatattattttttggaattgtattttgttgttattaatagagtttttcgcgtttctgtcaaggaacttacgtggactccagattagcatccaaagcccaccagtgggcctaaaaaagattataacttgaggcaagcccaagtccagctggacctttcaggaaggcatcttcgttctttgctcagacgagcttccgccaaggacagctcgtatgcaaaagcaatcccagtactacatttttggaaggccagacaatgtgttcttggaagcctagcacaatttctctttttattatcaaatcgcacagaataaggaaaactctccttaaatctcggccaaaagatcatatcaagctaaaatgggaaactacataaaatgaagatcaagtaattaattcataattaattatccacaattataggacacggtaataatagcttgatcgtgctcaacctgcctagtcagcaagcttatcgcctcatggattgggccacacgaatacaatcctgacttgtgtgtgtgtgtatttttatgtaaactctccattagaaggaaagaaaaactaagtataattcatgtaaactctataaatactcaacaaacccttcagattaagggttgaacactcttgcagtatttgctcaggcaaaaacagagaacatatagtcattatattccaaaaggtttttctagctaaaatacataataatatcgactcgtggactaaggctctttaacgttccaaccacgtaaaaaactctaagtgttgtcttgttctgtctctttgaattatttatttcttcaattttaatttcttataatcagttttttgaaaatctcggtaaacattttagtactttcattgagagttaaaggaagcagtgataccatctcgagattacattcagtaatcatggtactcgcccaaaataagtctgctcttcattatactgattctaatgctaaggcaggggatacaaaagatttgaatgaggtgacctgtcgccacaaggatcaacgtggtaaagacctaaatcttaacaatcctataattgaagatgatgaatcagaggagaatagttttgatgaccttgaagatgatcatcaagatacaccaaaagatgatcaccaagacatgcctactaacggtggtactaaaaaaaaggacaatccacacgattcagaccccatggtcattattgtcacgaagttacaaatgactgaaagcaaactaactcggtaagaagaattttctttacaatttctcgagaaagtgtcaaaaatagaagctatattaata

SEQ ID NO: 32901 - DNA, 1246 bp, Cannabis sativa
tcattatctattattaataatttagtaatcttttattatttttcatgagttaataataatatttttatttaaatgaaaagtgtcctttcattctcttaactcccattctaattattatattaacatttaaaattatagtaagttcaattttgatgaaatgtgtaattgtaggttcttttatttatgatatataaaactcaattgttattttctttaaatgcgtgtagtgtatattatattattataacttatactataatagatttgactgtagcaatatcttgccatatttcatttgcactaatttatatatatactttagatatatgagaattagttagaagataagtaatttttctttttgctacttttatatttttatatataatattttgttctttaattaataaggcacataaaaagatatcctcaaaagaaaatataattttattgcctttgattatacttaatggagacttctattgtaaattttgtaaataatattgaaatgattagtaactataataaaccatgaaccatgaagatagagttagaataaaaatattattatagaattgttatttaagaaaataatctcatttaatatcactaaaaatgaaaaacaataatgcaacaaatgtaaaggattttcttaaacatctcaaaaagcatatatcaatatatttaattatttgttcatctttaaatactttctcagatataaaaaataattttttgatataaagtcttaaaatttgggactattatagaaaatattatgaccatatttttttgtagatttttattaaaaaaattatttaattaaaagaaattacaatagtcatatctataattacttaattactactaataaagtaaatttatgtaatattaattttaataatataaaaaaaaaatagaatatcaatagtcttatgaaaaatattaattagtgtccatattattttttaaatttatttatttattgataaatgtatatacaatagatgttaatgtatattaaattaataatttttttatttttaggtacttaattacttttgtatagtttcatttaaatagattaatttcaaaatattaatcaattctattaataatttttgtagtatgtaactactcaaaaaaattaatataaatttttacagttatatatcgtgccataaaaatatatatctttatatattaaaagtgcctatctaacgacatttttttggtttaacagaat

SEQ ID NO: 32902 - DNA, 3860 bp, Cannabis sativa
aattaaaaatataaaaccctaaaattgttatattatatatgtttgatttaataaataaaaaaataattatttgaacaaaaaattaatttttttaaagagttgacctagttgaccgggtcaacccggccaatcgaaatccgccaacctgccaacccatgccctatatgggtccgaacttggttttatatgttttttttaacttgaaacctgcgaacccgaaacccagtaaattcgcccataaagattacattagtttttatatgttacaaaatctaattaagaaaaaaagataaataatgtgacagatctatttattatcattacaaactaaaccaaaaccttatacttcagtatttattattattatttagttttttgcttttaagtctatttttttagtattattattattattatttggttagttacataatgtttttatattatactttttaaaattatttgtaattttttctatatatttataatatttttacttaattaattaactttttttaatttaaaatctcatattaaaatatattgattatatttattttgttcattttgttttgatggtttttatactttttatggaatctttaattttgtacctttttcggcttttgtgccattttttatggcttgtccttaattatttggggtagtttaatggtacagtcaatggataagaaaaataattcattctgtgctcttgacttctacatcaacgatctttcagttttaacagataagtattttaagtctttatatttatagattgttttatattataatatggattattttacctttttctttcattttagttattaatttttcattaaagtagtaatagagttttatttattgttgttttgtaggttacttttgtagagggtttacgactacagaaactttaccgataaggttaattcaaagattgtctcttctaatacctgttgttgcttggtgttatttgtttttttagctatcaataaaggaggggtgttttatgagctgagagtgttgtttgagaatgttatagctttattgtctaaatttccgggggcagttttgtcccatgtggcttgcgatatgaatttttgcagctcatggttcgacaaagcatgttcttcggttagacgatgagctatcctagttcgaaaaggtgccgccactaattatagagtgccgtgttgttaatcatatgtaattttgatcacagcgtcaaaaaaaataaataaataaaaaaacccttatagtttaggcctgtagtaagtctatcatagataaaaaaaaatatctgtcattgcttatctcatatctggatattaattgtaaaattgtatgtacttgatagaattatatcttttaagttaaatttgttttctttttctgatgtaaataataagcacatcaaaagctcattcttttcttttcttggcttatataggtctttcttttgtacattgggactttaaggattagcaataagtatactagtccaaattctattagaatatattctcaaaatattttgagctcgggaaacaacgaaaaatgagagtaattgtagaaacttgtaaggctttatattttaccttattttataaaatattatttttgacgcactaattaaaaatattaaaattatttagaaatacatagtgagttttgcaataaatatgcaaaaaaaaaaaaaaaaaaaaaacacgaatgatcattcataattaaaaacaaaataagtagttgagtgtattttttaaataaatttataacatcctaatgagcttagattactatctaaaaataaaccaaggctccaccgacattctagaccgtttgttcatccatagccactcgcagcatacatactaaaactgatccagctcatcaaacttatattcaatattccctgtctattgcctatagggaaaggtaaggggtgagttaaaagcccagtaaaaaaatacttttaacacacattgacattcaatacatcatacatgtcttaaattcacaacaatacaactatatacaataccatcatattctaatgtattaagtatttcaacatcatactttaaatgatgacaatatgtaaataattttatacatggaaaattatatcatatacgtccatgctaatccaaaaccataacatcatatgtagagatcataatttttatatcatattcatagattaaccaaaatactatgaaataagcatatcacaaccatatcacaaccatatcacgccattcatcatatcatggccattatatacataattcgggtctatactcgccctacaataacttgggcacatttagccctactattgctatagaataaggtatctctacattcaacaacaacgtcattgtatcatacctcatcataacaatgtcatacacgaatcagacaaattcaggatagtgtatctctacattcaacgaccttaccttgtatcataccccactatggcccctcatttatactgagacgttagcatacaacatacagcatacatcctatacaaatcgtaccaaccataatatatatcaattcaaaagctcatattgtgtccataccacacattctcaatattatatacatattcataataataaatcacaaatcatattctaatacacaaatagtttaaattatacatttcaacacatacaaaactacataatttccttacctcaaatcccactgctcaagacttgttatcccgtcactactccatataataaggcatgagtcaaggccttaacattacaatgcatacccttacagtacaatagaaagaacattattttttactcacaactacacgaattcagtaaaagttaacttcataaaaattatacaatttatttatctttccaatgatatatagatcattaaaaatggattacaactgagcgagttatcataattttaccaaacaaatttcttagaaggaatatggagtaatgaattacaggactcaacgaaaacataaattttttgacatagaaatattcagaactagagaataatatctccataaaagttttagaaaatttacttccctttctaatgatattaaaatttttgaaattagaattatattcagagagatattgtgattttaccataatagtttttaaagcacaacgttaaagatacgaattacatggtacagaagaaaaataactttttgacatagtataactccgaattgatgaaatatttctccataaaacttatgggaaattgaataatatttcaagtgatactaggattgctagaaacgaatcagtactcagagagatgttccaattttactgaaacaacttaaataggaaatatgagaaaaataatttacaataaacatcatagaaatactaatttttgacacaaaaaaattctgatttagtaatatatttcttcataagaattatgagaaattcatgagcattctatagacaccgagattataagaatcaaatgagtatttaaagggatatgataattttactgagaaatatttcattctaaaaaaataagaaaatgagacctacaaatattcttgtatggtcaataaatgagtaaatgtagagttttttacctcaaatacttcaagttgcttggatcaagagacacgagataatgttgatagaagatgagagtgaagagtgatatagctttgtctaagaatgtaatggaaagatgacttgaaaatttttagggttaggcttgctaaggtagaatgaatagaacgatataattttagggttgtttgaataaaacctatattgactccgattaggtttagttgtatgaataacaataataataataat

SEQ ID NO: 32903 - DNA, 1207 bp, Cannabis sativa
cattggaacctcctcattttttttatgtttagtcataataatatttgtgattaaaagtgaaaaagttacgactaattataaattatcatttctatattgtgactaaaagattcatgacttaaggtattaactagtcacaaaaattacaatttgttgtgattaaatttatttttaatcacaatatttattgtgactaaaataaaaactaaaatttgtatctaaataatatattttagtgatatatttaattgaataatttgcggtgttaatacctaagtttatctcaaagttgcagagaaatacccaagtaaaatttttggtggtaaatatacattatgttaggattctggaacttccgtaggtacctttacgttaagtgacatgtaagtatccacatgtcatcttcgcattggtccacatcatttaattattatttttattaattaaaattcatcaaaatatttgaaaatcattttaaaattaaaaaaaattaaactaagtaaaaatttaaattaagccttattataaattaaatatacataataataataatattaattaaaaacttaaatcttcatctcactcaccatcgtgttcttaacagaggcatcccaaacctaaaaaaaaatttcaaccaaaaatctcaaaaaaatttctcacccaacaccattcacccacttaaagctcaaaaatattcccactaagagaaaactgatctaaccaatccaacaaacaaagctctactcaaatatcccaaaattgaaaaaaaaaacccagtaaatttctcccacaaaaatcctcatctataatatcttgaaaaagaatttaggtgactcaaattgggatgcaataaaaaaaaggtaaaaaaaaatacctagaagccttctcttctacactgcttaaacagtcttcctagaaacatcatcgtcgtcctcttgtgcgattgcaaccacaacaccggcgacaccaggttacagtaacactttatttacaaaaatttctaaaaaaaaatcttcatcgtggacaaagatatatagatctcgtaaaaaacacctaagcaaccagatttaaacaaacaatagatcccgttgatgcatagatctcaatcaagaccaagtttcttgtcgacacctcacctgtatctccgttaggtgtggtaaagtctgtttgggccatggacggtcggagttgctccgtccggctctga

SEQ ID NO: 32904 - DNA, 1863 bp, Cannabis sativa
aataccctgataaagatgaaccttgaaaaaagataaatgctttcagttatatatatggggacttcaaaagtttggtactagtgaaattgaatatactgcatggtaagcattactatttgttatatttactcatgtactatttgttttgtatcaatgtcggtgaagctacaattttgtgatgtggagcaaaaaacttttgatacgtgtcaattttaagaactacaaataaaactgttaaattgggtacctacggactaactaaaatttcgagcttggggactattactgcagctttttgagattgaagacttctttacatcaaagtgaactttttggggacttatgccgtaatttaatatcaacacgttgtattttttagagcaactaacaaatttgttaaaatgaggaccaactaacttacaagaatctcaagcttggggactattatcacaatttttcgagattaaaaatttatctgcatcgaagtaaattttttggggactttaatgcaattttcccataaaaaaataatttttactatgttaatgatgataaatgtatacttaaataaagaaatttagtttcataagtatataataaaagcctaacaaaaataaatttatatacaacaaatattagtgaataaataataggtcaggtttcgaacactattagggcttgtttgctacatcgtgttgtattatatagtatgctattatattgtatatgtattatttaatacaatactatgtttggtataaacttgtatattgataagtggtgtaaaactatacaatatttaccataaacttgagccaaccctgatctcgaccctagccctggacccgaatcccattttgggtcccaggccgaactaggactcaaaccacttcccaggaccttggatcagggtctggggctatgtctggcggctgggactatggttccagtatagcgtccgggtcgagttcgggtttgagatttgaggtgggatgcgggtccagggctgaggttgaggttcaaaatttgggttcagatttgagtctaagtttgagttttacgttcgacattcagagtttaggtttgagggtcaggtccaagtctaggtccaggtttgggttcaaatgtctaggtctggggcttgaggccgggtcccgaatccagctccccaagcctgacccattttcaaatattataatacaagctaataattcaaattttttatgtattaaataatatgattcaaattgtattaaaatttatggttgtaatatgttgttgactattttattcatagctaaatggtcttagttctatgtatagctacaagccacaacctcaaatatgaattatatattttctgatatttacttacaaattatttaataataaatattaaaaatttaatattcaagcatatatcaaaatattcaactctttattaataatcagaaatatcttaacagacttttcagtgcataaatcctaacattttattgcatagtatcttatcagtgtaattagatcatatgatcatggatttccaagatttataaattaacttatgtatttctaattatacacttatttctcattcttagaaatgaaataagttcataacatatttagtgaacctagtatatatatatttaaataaatattgatttattaagatatattgaaatccctacaggtgtattaatattattagatttcacaatttttaaaaattctctcggggagataaatatagttgggatcgatgaatattttgaaaaatgatattcttgcaaaaagtataatatgaacgatattactgaaaatgatatatgtcaactacaaattaatattctttaaaattga

SEQ ID NO: 32905 - DNA, 1920 bp, Cannabis sativa
actccagtccatataacgtaaaaaaaagaattttttctaattaaataaaaaaaattaatcataaaaactcattgttttctaatattatccattcatgggtgatactcattaagagtgcacccttttatacacaaatataaaattatttaatatctttaattctctataattcaaattaaataaaattataagatactgatattattcgataatttaaatctcatacattatgatttaaattttaaagtgatttggatttaagatattatttaatatgggataaataattatcattaatttttaaattttaaaataaataattaaaatgtcatcaccaaataagttttttatttataaaagataataaaaatatcccaaagctcaattttatcacaaaaaaagtagtaaaattctaaagccatacaaaatggcacaaaattctaaataagctcatcaaaattaatcttcgaatattaaagagatcattcacctcacaaaattttaaagaggtcatttcctcataaaaaaaagttgtttacctcacaaaaatctcaaaatggtaattttacctcaaaattgaaaagtgcactaaaattcaaaaccataataaattaaatgacattcctaaatgaggtcattcacctcaacaaaaataaaaagtgaattcacttttcacaaagacagtggaactacgtttgacttgatttctataaaaaggatatgtagacaaagttgaagaagactaagagtgcagtagtcgtcgataccgcaaaatggtataaaacataaatctcaaaattctgtaaaaggtcatacgcctaggaatttttcaaaatttttaaatagcaatgaattcctaaaagtggtcatctatggaaatctttatatttaaattctaaaatgtcgtattctgaactataagtagcttgatcctttataaaaaaaaggtatgtaggcagctcgattaattaaattactgaggtcagccacaattccaaattcactccaaattttccccaaattattttaattatttaatatcatcgtaattggaatcaaaaggtatttcctttaaataaaaggattgtaattaagagattattcttataatcttggatgggtcaaacttaaatcaataaactcttatgctataaatttagcataggtaaaattgtattttgcatttatttttaatattctaaatgtacacttttttttgcttaacataagttttggcacgccaggtgggacccattctccttttcatctccaactatgatgactattctttacttttaattttatggtgctaattatgtttaccgttttcaggaaaaaatggcaccacaagtgacagtctatttccacaagttaccagtgacctcttctgctcaaggaggcaaaaagaattgctatctgacgacattctctattgattgggcacccatttcatgtagggtactcgaactggaagagaatgtgaagacacctataccagttaaaagggctggaagaggaaaaggtgtgaaggaagtccctaacgtccctaagactgtgcaggccttgagaagcaaggcagcaaagggcttcaaaaagacgcaagctcgggcaatgaaaggtccgctgcaaaggttgtcaagatagaagggaggccaacaaagattggctcccccataacgatccaaaaggaatgggggccatgagtgtatcttgattggttccattcctattttcttgcccactatcgcctcagtgatggttatctccacaaaggaaactgaggcaacaccaacttctcaatctcggagaggtaggaaggcaacaaaaggcaggagggggacaaaaacttcaccctcaccaaaccctcttgaaataagggaattagtaggagacacaccgattaggcctccgattgtaatc

SEQ ID NO: 32906 - DNA, 1730 bp, Cannabis sativa
aaagacccatcaatgcatacaataggtcgacaaaacctaaacccccggatacaaggacctagagagaagaaacaattcttgaagcgaccatcctttaccacaaaatccgtgatggtagcaagatttatcaactttagcatgtgcatgtaactaggtaatttcgagtatgaatcttcaggtgtaccctgagctaggtgtagtgccttgtctctgtaccttcatgcctaggaccactagcattggtccctctagcatcactaggaccactagcatcattggtctctctagcattattaggacctgtactatcagtggttcctctagcattactggtttttcctggacgactactactagtaccaggtgtttggcaattttctctacagggaattttcttatgtgtaggtggcctgggtggtatttggtacgatagtggagtcaagtttaaagctacagcagcagagacctctgtaccttcgtcgtctcttacgtcaccattgccctcaacataacatcagggtctggaccatcaagaaaacaatcaatgaagggcatttgtgctacaatatcagcacttgacatcatagtgtttaattcacgtaatacatctgcaaccaacacctctgaatttgtttctagaacaaaactttcaacctcgctacgagtgtccttaacaaaacttggtgtgggactaggatcgacacgaacattcttatttaacaaagtcacaaataagggagtaaattcatctggcttcttcgcaagtgtagacaaaaagtaccttgcacgcttatcatttataataacttcagggtgatacattaagcctttcatgttcttgtaatttacttctaatttcaagtcatactgcactttgtcaacatccagttcttcatacaaaagatcaaccaaacctgagtagcttatgttcaaatcaatgtcaaatgtcaaattttttcctcggttaaaaacccaatgtctaccctcaagctccaaccatatacataacaaacgcattaacagatgaacctatcacatacattgaaaaattacaattacaatttagaacaaaaatctcactggaaagttatccaaattcttgaaaatacaataaatttgtacaccatcgcgcccaaattggaccaccatcggccccatatcggaccccgtcaaaaaataaagtcccaaaaccatgttggactgaaaatgggccaaccatcggaccccattgggtcccatcggacacgatcaaaaaaattaccccgaacccatttttaccccctgatcggacacccatcggacataatcgggctccatcgaacccagccaaaacaaatcgtcccaacccatttatcgaccccccatcggacacaccattggcccctaattgggcccatcagaccatattaaaaaaattgcctcgaaacccattttttggacccccatcgggcctttatccctgtcatcccattttcacagtgtattgaaccaccattggatgggcatcagacctcatcgaaccaggcgtaaaaaaaagcaaaaaccaggaaaaatgcaatattcacaaacagcaagcattacaatacacaaaacagcaaaataattgtaacaactcacagatcaagtaacaaaacaatattctaaactaaatataacaacaataaataagattaaaaaaaagaattatttacccgttgatgcttcgtatatagaagcttgtagtgttgtag

SEQ ID NO: 32907 - DNA, 1290 bp, Cannabis sativa
atactcatgaaataacaagcaccccaatggtcttagttcttgaagcaccccatagatcagagtgcgcatagtccaacttacccttggttgtgtgtaatcgtggagtgaatttcactctgctgcacttaccttacacacattcttcacagaaccccaatttctttcctagtttgcctttgagaatgccctgtttctccaattcataaagacttatctcactaagatgacctaatctcatgtgccatagtcttgtattgtctttatcactgctcttaacaactaagtttgtttttctaacaacagtcttcccttgcagatagtaaatcccattcctgatgtctccttacattactattttagtacccttcattattttcattaaaccatctatctttatagtgcaacctctagatacaagttcactaattaaaagtaaatttctctttagttcagggacatacctgacttcttgtatgagtttgactttaccatcatgcattctgatcaacacacttcccattcttaagattttgcaagcattattgtctcccaacagaactgatccaccctcaatctttttaaattcactaaacagttcttttcttagtgtcatatggaatgaacacccagagtcaagaatccaatcacatccagattcttgacttgtcacaaccaaagcttcagcagactcgtaagcatcaaaggcaatgcatgcatcacctctttcctttcccttttctctgttcagcttttccttgagtgccctacattcatctctaaaatgtccttccttcttgcagtagtaacatttctttccttgcttggattttgtctttgatttgtactcttgattgtgccccttgttctgattgttcttgtaatttgtcttgttgtatccacccttggaatctttagaatcatttatgcttttcacaaacaaactatctgcaacaccatcagacctcttatcattctttttctgaatttccttggaattgagtgttgccttgacctctgtcatggtcaaggtctctttgccatatagaatagtgtccacaacgtgttcataagattttggtaatgagctgagcaacaagatgccctgatcttcatcttctattttcactcctatgttgctgagatccagaataattcgattgaactcatcaaggtgctttctaagttctcttgaatctttcctcttgagagtgtatagtttcttcttcaaatataacttgttggcaagggatttcttcagataaatcgaggcaagtttctcccataatccca

SEQ ID NO: 32908 - DNA, 8162 bp, Cannabis sativa
  modified_base (8107)..(8133): a, c, t, g, unknown or other
taattttaaaaggtaaatatttttttttgggcccctgggataggtgggccctaggcacaggcctagcccgcctatccccagggccgggcctgtaaataacctactgcgaaagtagacatcaaagaagaggtggccatgatcttcctttgttacttcacaaaccagaaacatgatgttgtcaagttgcatatgaatcctttgtaaatggtcatgagtaagaagttttgcattaacaacctgccataagatgaaacgatactttggcacacttacactattccaaagtgttaatacatcacattttcaagtttaatgaagcttttatacaatttaccagcactaaactttctaagacaactcgcatcctctatctctccttgagaaaaaaatgatctaataaggcacaatttacgccaataccaactagtatccactttaagttgataccctcaaaaattttgaccttttaagtaaatattatttatccacctgacccaaagagattcttatttttgacaaattcactactacaaattacactattcacgtcagtcaatgctgctgttcatagcgttgaccgacatgaatagtacccaagttataggacccgtctatttaaaaaagacactaataatatataattagcatcgtttggtaaaatgaggctaaaactaaaactgatataataaagcaatttttttaaaaaaaacttgctttcatttagcgtcggttattaactgtcgattgttgttttttcgagggtttaaaactgacgcaaaatgaatttgtgagaaatataaacagacgctaatttaataaatcccctaaaacacaaacaaatcgccactactgttcatacacatccaaaacccactcttcgaatgatctggtgaaactaccctcgtcctttccgatcgtcccatcaaatccgaccagtgctctccaaaaccagcctcgatcctttctgtcgtcctcagcattcccttctcccaatccaccaattcggcttcaatctcaacccacagattcaactccccaggaccaagccaccattgttgacgacaatacagctcaagcactccattctcgatcagctgctgacgatcattccagccccttttttctcagcactggtgatcaccccggtctcatgctcgtgccacagtcctcaacgacacaaattatcaaccatggaaaagaggaattacaatggccttgactgccaagaacaagatcgcgttcattaacggatctctccctcggccagaacctggtaattctactcttaattcttagttaaggtgcaacaacatggtaatgtaccttggttatttaattctgtttcctctgagattgcacaaagtataatgtactttgatttagctactgaaatgtggaatgatcttgctgagcgttttaatgagggcaatggccctagaattttccaattgcagacccaactcactcgacttcagtagggtgattcttcggtttccgcatatttcaccaaaataaaatccctatgggatgagttgaaagaatttcaacccataagaacttgcacttgtggtgcaatgaaaattttcttggattattacaaccaaaatcaagtacttcaattcttgactaggttgaatgaatcctatgcctcggttcgggcccaaattttgctcaatgaaccaatacctaacctgtcccgagtgtttgctatgattgttcaagaagaacgtcaaagatgccttggatcctctaaaaaaattccacttgctgctgctgcttcgacttcaaacaatccaccaagagccaagaaaccccgaccatcttgctctaattgtggcaaaccaggccatttagttgataaatgctattttctacgtcgatttcccctggctatggtgataagaagaaataagacaaggaaaaagccaaggcaaacactgcctccaccaacaattcgaaagctgatactgatggtcacaatatgcatgctgatctctcatctcagtgccagcatttaatatcactgcttagccaacaactaggtcacaccagcaatgctgaaactcctgcaatgatccctgcagcttcgaatcttgcaagtaaaaatcccatttcacttgcaacatcttggataattgatagtggtgctacacaccacttgtgttccaacattacttgtttttcttcctttactaatgatctttctcctaagtttgtcacattaccaaatggataagacatacctgtccaaaaggttgggactgtcaagattaatcccaacattactctgcataatgtgttgtatatacctcagttcagactgaatcttttttccatttcagattttatgcttaatacttctaataacatcctgtttcatcacaattcttgtgaaattcaggatcatactctgaatgtggtgattgggacagctaaaagatgtgaaaaattgtacttgcttcaacaagacaaaccatctgctacagttgctgctatactccctttttctttcaataaaaccaatgtaatccaatggcacaatcgccttggacacccttcgatgtgtattttaagttttttcaataaagaacacaacatttcacatcaaagttctattaaacattgtcatatatgccatttggccaagcaaaagtgtttaccttttatttccaatcataatttctcaaagaatgtgtttgatttggttcatatggacatttggggaccattccacatcctaagtgtgaaaggttacaagtacttcctcactatagtagatgacaaatctagatttacttggcttttatgctcaagaacaaattagatgttcaacacattatccctaccttttttaacatgatttgcacccaattctccacttctattaaagcaatcagatctgacaatgctaaagaattaaacttacaatcattttttgcttctaaaggcatcatcaattaccattcctgtgtggaaagaccacaacaaaactcagtagttgaacaaaaacatcaacacatactaaacatagcacgggcactaggatttcaatccaatctacctttggtttattggtcatacctagttcaaactgccacctatctcatgaatagaactccctcaaaaatgcttaaaggaatgacctcataccagctcttgcatggtacaaaccccaaatacgatcatcttagaagttgtgggtgtttagcctatggctccacccttccttataaaagacacaagtttataccaagaagtagagcctcggttttcattggctaccctcaaggcatgaaagcctataaacttcttgatattgaaactaaacaaatttacgtctcaagggatgttgttttttatgaaacaatatttccattgttttcaacaacatccacttctgaaattaataaaatactacctgatactgtcattcccactatcagaccaattcaacaacaaatttctgattccaacaatgtgctactgcccactgcatcacgagaatcagttgcacaccagcacaaccctgctgtcataacaagcaaccatatcagtccaattcaacctgatcttggcacaccagaaatttaatcacaaacaccacaaaaatctggtaccaatctcataccagattctgctgtaacaaaactcacagcagttggttccataccagattctactgcaacaaaactcacagcagcttgttccataccagcaaaaaaattatttctggcctccacactattgagcctataactgctcaaccttcaaccacaataacaaggactggtaggccatcaaaaaaaccaaaacacttgatagattacatctgtcatgcctcatctactgctcatccaattgagcaatatctttcttacattaaactacatcccacatttcgagcagctgttctcgcagcatactcacaaattgaacctcaaacttatgttgaggcctctcaatttaaacattggctattggccatggacaaagaaaccgatgcccttgaaaaaaaacaacacttgggttgtcactaaattaccttctagccataaagaaattggttgcaaatgggtgtataaagtcaaatataatgagagtggggctgttgaacggttcaaagctcgcctagtacccaaaggctacactcaaaggcatgacattgattactctcaaacttatgcccctatggccaaatttaacactttgaaattttttttagctcttgcagccatgaacgactggaatgtacaccagttagacatcaacaatgcttttctccatggggatcttcatgaagaattttacatgaaaattcccccgggttaccaagctcctcccaacacggtatgcaaattaaacaaaagcatttatggcctaaaacaagcttctaggcaatggtttagcaaactaagccaaattctcatttcagatggtttttctcagtcactttttgacaactcattattcaccaaaaagaccaacacaatcttccttgccattttgatatatgtagatgacattatcattgctagcaacaatgacaatgccatctctcactttaaaacatatctccatgacaaattcaagctcaaagaccttggaaccattcggtttttccttggtcttaaagttggtagaacaaaaaaaggcatctcggtctcccaaagacccttcaccatccaattgctcaaggataggggatacataggtgctaaaccagcctctactcccatggagagaaacttaaaactcagcaaagacaaagggaacctcctccccgatcctacaatatttcgaagcctcattggcaagttaatatacttaacgatcacaagacccgacatctcctatgttgtcaaccatcttagtcaattcttaacttgtcctcgcattccacatcttcaggctgcacatcgtatcttgcaatacttaaaaacaacgcctggacaaggattattttttccatcaaacacaacaccatctgtttctgcttatgctgaaactagtttatctccatcaaatgttcatatttctttcttttctgacactaattgggggacttgtcaagacacaaggagatcaatttctggttattgcctattccttggcagctcccttgtgtcatggaaatcaaaaaaacaacaaaccgtctctcgatcttctgccaaagccgaatatcgagccatggcaaatgcaacttctgaactcacttggatccttactcttctctaagactttggcatccaccactctactccagctatgctctattgtgacaataccgcatcaattcacattagtgaaaacccggcctatcatgaacgcactaagcacgtggagattgactgccacttcattcgagagaaggtccaacaaggctccatcaaaatacttcatgtttcttctcaaaacaacctcgctgacatttttaccaaacctctattgcctactcatttttcaaacattgtatccaagatgggcttaataaacatatacactccatcttgaggggtgcttttagaggcactttggataagttagttaggttagtttaatttttagatagtttgttattcctacagtctttttcggttgtaagttagttgttcccaactaacactttcttgaaatctcagagctatataagctcagttctcacttgtaaatctcagttgagaacaattaataaaattgctctgattttcctctgttcttctctcctttctcatatactatgaaaacgattgaaacttacctatttttgttttctttaatttgttggaactgttcttattaattaattatatcattcgtaaatatactgtgttttctctttctttgaaagattcaagccatcttatctttggaaatctttttatttattaattattcaccaactctaatcttgtaaaaaattgaaaagttaaatttaataaaccaaattataacatagtggtcttaattaattttaaaaatagcaggtgtcatagaaaaatgcacatcttggtgtaaccatagtagaggtacaattagagtactactttgttagtattttgacttcttattataagctctaaaatgggtccaaaatggaattgtaaatacaagttgggatgttaatttttaagtgtgaatatttgacttgtaagatcgaaattaagctcccaatttataatagtaattgctagctacttggatatactgaaattgtttgattttttatttttatttttatgatatattgaaaccgtttgtatcatatgtatgactgtagtagtacagaatatgtcaataaaattaatttttaaagttctttcagcagtcgtgacatcgagctctatagctgccattggatagacttgattgttgttaaaagaaagcactagcagagtagaagctctgatcttacattcatccaatctcatatttattaatgcttcatggagagaaatgtattcattgctctcaccatccaccaagatcctgcatgcagtcttaaatgacaatagcatcatcatgtggcaatttcacatctctgaggtcttccttagtgaaagtgattggaaccacatggaaatatttcctttcatgaagaatataattaactttgtgctgctaagaccgtagtcttttcaccctttcaatggttcttttcttctgttgagtcatattttcccgagagtgttgcctctatgcttcctaagatcatggagatttatttcacaactagttcctttcccttggatgagctcgactcttcccaggtttgttgtcttcattgtcccccaatttttttcagtgtatctttcttcatttcttccacttttgttccattttacatactactagaagtgtaatatctcagaaaatataataatacttatttaggcatattttattaaatttgtgattatgctgatattggagtaagattataatcttacttaagctaatggtgtgacaattagtgtaaatgtaataaataattaaataaagcgtaatttattaattatggagaatttattggattacgtgggtattgtaaataccatttttgaaataaaatgtttttgggcccagcggccgtggaaactcgacggagtggtcagatatgatacgacactaaaagatgaattgaattgggattatactggactagtttagaattttaagttatcgtttggcggattagttagaaaatgaccaaaataccttaggggtgcgtcaaagcttaagttttaaggggatgggtaaaatagtcattttaccctaacttgtcttttgtggatatcttgtaaagtgttgggtgattatttaagttaagatatatattaccttaaatatttttcttttctagaaaattaaagaaaaaaaaaaagagataaaacctaaactaagaaaatcttaaactaagtcacatagtgctctttatctttctccctctcgttgccatagaaacccagcaagaactagggatttctttgctacttcagctgtgttctagcaaggtttgatcaaggattagagttgtccacacttgaggtaagctttgtctcttttctccttgatttttctaaggtttagtttgcgtttggatagggtaatttagggatttcggggctgtgtagttagtctagggttagagtttgttctaggtttaattaaaggtttgtttagagtttaattggttgtatggtggggctgttaggtttagaactgggaaaaatttagtttagaagctcaatttttactctctaatggtaaatcgattaatttgataaattgttgtgatttggtgcgctggatacattgtatatttggtattggactattctgaaaggtttaagtaggtttggagcagctcataattggtttcagggtgtaaaagcagaattctccaaaactgcccagaaaatcggtcgagcagttttgcatgtaactggcaaatcggtcaaccggtttgctagcagggggaactctagggttttctccttgaatctggttttggcttggggtgttttctggagattaatttagtgcatttttttttggtgatgtttgggttagttcatgttggattattattttaccaggatctagattnnnnnnnnnnnnnnnnnnnnnnnnnnntaaatatgaatttctaaaataatggaatt

SEQ ID NO: 32909 - DNA, 1253 bp, Cannabis sativa
  modified_base (587)..(595): a, c, t, g, unknown or other
tatggaaaaaaaaagatacaagattgaattgttgaggagagtgattggagaatacaaatatgaattatttgagagaatattgcatatgtatactatgttgtgatttgagcctaaattaacattctctatctacctttcaccctagccttgcattataagcctatagtcctattgatttttagattgtgtataattatatttagtggagaatggtttgataattaagcttatgaagtagattttcgttgaaatacacatttcttttgagatgtgtttattgttggcatgcatgaattgatttgaatgttagtaatatgacgagttgattgcatacacacaaaaaaaattgagtttgtaaagtaatttatcttgagttgaaattctaatgattgaaattccaggaaaagtaatttttcttggaattataaagggatgtacaattcttgaaactattttttctttttcataaagaccgatttgtttaagcatcattcattttatcattaacttactcgaggacgagcaagagtcaagtgtgggggaatttgatgagtccatatttgtcttataaatatgatcaatttatnnnnnnnnnttcttaaattgattctttaaattattaattagtgtgattttaatttgttgggctattttaaagactattcatgcatttagagtcttttggagggattttagcatattttgatagaaaataatggaagccggtgagctcgattttacaaggcagaatttaatggcaaatttcaacaagcttagaggtagaactagacttgaagctcaacatgaaagttttagatcttattcttagcttcctggaacatcttgaatcgtttaagttcgagtaatatcgagagagttatggccaaaatactatcagtcgttacaacaggaaatttttgaaaaaaaaaaagataaaaggatagttgttcaagtagagttgcgattttttatcttttttttttaaagaaaagatgagttatcttttcttttagtgagatatttcctaatactataaatagaatcctaattctaaggggattcatctatcttttcaagcagtataaataagacctcttaggctacgaattgaataattctaaaactacaaattagagagagaagctcagagagagatcaaggaagagacggagatcgacttcaaagtgttcttcattctagttcttttcttctccttctacttttactaaatattatgattttggttataatgt

SEQ ID NO: 32910 - DNA, 3146 bp, Cannabis sativa
tctagattctcatttccccccctaatgtcctcaggcccaattgtctcaagtctgctggtgtccaacaccactgttaggaatcttatgcatccatcatgcaataggtccctagctttcaatactaaaatgattagtattcgaaaaccctaaactgatcccataaatataaatggctcttcacattctggttaatgagttacatttttcctcttataatcaatactagttgcatacttagtcaagccttttctgagaataatatcaaactctgctatactcaattcaataacctcagtactcaactccctattctccactctaaccagaatagacctaagccaccttttggagataactaattcttccctaggtaatagggttccaaaccctatctcataattatcacaaggcttacccaatttatcaatcactttaggctccagagtcagacaatatacagtaaaaagagtatttaacgagaagttaacttgtctccaaagacaaactagttgcaacgtcagtctgagcaatgacaaacacccaagctggagtggcttttgcctcttccttcagttcttccctaactagttggggacaatccctctttaaatgcctcgtaagtccacactgaaaacattattcttccatctttgacggtggataatccctcttataatgtcccattacaccacactaaaaacatgctttacctttacactcacccctggtgatgtattttatagctaggacatttcaagaaagtgtaatggcctcctaagccatcctactgaccatcttgaacttattttccctgaaatctttatacgctggctctatctggttaccaacaagatgttgttctgctggaaacaacaggtaccagaggaggatgtgcaacaaaagaaccctgttgcaacaacctttgaatttactcgtcttgcctctaaacttcggcttgcacttttgcaaacctctgctctcagtcttgccgatcttgtggtgaattaacataaccctcacaatgaaccctccaacagactcttctttggttacaggggcaaaagaaatccaaccctcctaaccactaccagcctcgaccatattgccctgacttcttattttttccaagcgtccattctataggacaagcctacaaattcataagtaaacctattaggaagcggtcaaaattgtattctaactaccgatttatagaaacttagacatgctcttattcaaatattaaactactaacatgcttcctatcactcttttctaattatgctcaactgattaaaacacttaaaacatgtaaagacttactgaaccgtgagtcgagcttatctctaatgatgattgtacatatcttgatggtctttgaagaaaaacccgacagctctaataccgaaattgtaaggccctaagtgattaggcatgtccccgtcttttctaaatttatgtgctaacccttgctaaacaaaggggtttagttaaaaaggtgattaacaaaaactttgtaataaatatcaactttactaattataaagttacaaaagtctacagatgtttggatcctgttttattttacaaacacatccaaaatacaataaccaaaagtgtcgcccaatgactaatataactgagcccatgctatcctgaagaaccaaactctccaagtctaaccatcttgatatgtacaatcttcatgaagccctggaccttacagttcagctttggcctttacctacacatgaaagtatatctatgagtcgacaaactcaataagaaaagcataaaacataacatataatctgatttgcatcttaggtatccatacacctattcataaatccaacatgtgtctgacacgtattaatgagtcttaaatgttcttgacaatagtatgacatctataccacatgcactaagtatcacacaagtactagtgttagtagcactaggtcgtaccccattgaaagtatactatgccacatacactcagtaccttgaatgtactagtgttggtaggaataatttatattttctaataattcaactaacctttatatcacatgcactcagtaccccgaaggtactagtgttgatagagttagtttaagtcactataacacatgcactcagtactctaaaagtactagtgttggtagaaccaacttatatttcatagtgcatgcattaaacatgcataaatatgtattttttttatactaatcttacctctacttcataatcaggtgtgccggtcaacctgagtggagtatgttgttgaacgatcaaaggccctaagtcacatttacataaaatagataagtgtcttactaaaacactttcagggaactaaacttgaaaccaaaagttttcctattgataaatagcatatcaataccctaaatattgataaaacatggaaactgagtcacccaaaactaccacatttggtccactgatccccaaacagttaactatttattggggtcctgccagacgaaacgattaaccgtttctacaaaaacaactaaccatttcctagaaaaaatcacaaacctcgattcttctcactcaattctacctcaaatcttaccaaaccttccaaaacacccaataacatcacaatgaatataattcaactgaaaattgcatgatcaaagctctgaaactaaaatcactactgttgagctaaatttgagttcataaatgcaaactcagcttaaccttactacagccataaaaaacaccaacaacaactttaaaataaacttctaaaatagtttataacaactcaaaagtcttatagaaccgagctcaccaaaacacacactgaaacttaacttaaccttgaaatttaaagagaggaggtgaggaactaggctatcttgttcttgactaacaacttgcttccaatttgttgatgaattgctagttgaaatggtagttttagttctgaaatgtctagggctcctttgggttctaatgtggccaagagagagaaagagatgtatgaagagagagttttgatttcttaacgataatatctatccaatagatattttattttatgcaaactttaggatcatctcaaacacactaaaaaactccagaaaatccattaattaccttaataataa

SEQ ID NO: 32911 - DNA, 1914 bp, Cannabis sativa
  modified_base (1015)..(1018): a, c, t, g, unknown or other
tgtttgttaaaataccgagctactttttgttgatgagctatcaattttaggtttgctgcggttcgtttttcttcaacttcatcaactgattcttcaaggagtgcatgattaacttcttggttatatgtcagtcttctgtgggatggtggtttgagttctataggacagcatggcttcataaccatatgccatggcaaatggagtttttccggtcgttgttttctcaattgtgcggtatgaccataacacttcaagaagttcctccggccaatttccttaagcatcttcaagttatttctatagggtatctttgagtgtcttgttgactgcttcaactggaccatttgcttggggatgtgccgctgcagagaaactttttatgatcccatggtttggacaaaaatctgtgaaggactgactgtcaaattgtttgccattgtccaagactatcttgtacggtaatccaaaccgacaaattatgttttcacaatgaagtcttggacgtttttggacataatggtggccagtggctcggcctctgtccatttggtaaaataatcaattgtaacgactacgtatggtactccgcctttgcccttgggtaactgtttgattaggtcaattccccaaatgatgaaaggccaaggactttgcatttgagttagttcgttgggcagtgcacggggtatctttgagaatctttgccacttatcacatttctcaacatatgccttggagtcttcaatcatggtcgcccaaaaatactcttgccttaaaattctgcccagctgcgtggttaccgcagaatccattttgtactttcgacaaaggtcgtacagcttcttcttgtgtaacacacctgagaagaggcatggaaaatcctcttctatgcataactccctctacaatgatgtaccgtgcagcctttctcctcattttctgagcttcattcctgttatctgggagttccccaatgttgagataggttgttattggcgtcatccagtttggggannnntcaatcatttcaatctcctctgtgcgggtgatactaagtttttcaagaaattggatggggatcagatttgctttatcatttatgttgctgctcgcaagtcgggctagtgcatccgcagttgtgttttcttctcttagaatttgctttagagcatagcttttgaattatgcgagcaaattatgtattttgcttagatatgctatcatcttttcccctcaagcctcgtactccccagatacatgatttaccactaactatgagacattgcagatctcaatgtgtttggcttacgattcatgagcaagtcttaggccggtgataagagcttcatattcagcttcattgtatgatgccttacattcgaatttgactgcaccgtgcaggtgctgccccccaagtgtggcaagggcgattccagcactggacagctgatccgtagctgacccgtctacatgaaacttccaggttggcttgtgtttactattgcttggctgaggtacttgtactggctctgggttactttctgaagtgctttcttctttacccatacattcagccacaaaatctactaaggcccgacccttaatcaatgttcggggctaaaagatgatttcgtactggcccaactccactatccatttgaataaccatccaaaggcgtccagtttttgtaatacttgacgttatggttggtcagtgtatacccaaacaagatgagcctaaaagtaacgccttagctttcttgtttctaggattaggcaattggtgagctcttctattaatgggtaccagccttcagcttcaataagtcttttgtgagttactagtagaccagatgttggacattgttctctattagtagacaagatgttggatattgttctcttctctgatca

SEQ ID NO: 32912 - DNA, 1740 bp, Cannabis sativa
tcattgttggatgattaatttttcaatggaaatgacaatagaggtcatgttgcttttcttctggagtgggtaatttcgtgacaaatggcagtactacttttccatccttaattcatgcttctaacaagctacaaactctgtctttatcacaaggaaattcgactggtttatcacttcgtttcccttttttatgggctttaaaattttgtctgtcttgtgctagtgctatgtcaacaccacattttgaacctttccatggccgatgtgtctggtcattttggttggacggcttagtcaaaagaaaaacagtggcttcagtatttctttgatttagctataagctctgcaaaattgtatatggcatggtttttaatgtgtaatcgatattcatccaacatgcctttgatacacattttgaccaaatccttttcatccatggtctcagcacaatcaagagctttttccctaaacttttgaatgtaattaatgagattttctccaaagttttgtcttactcctgataagtcagctatgctccatttatcttcaatcataataaactttgcacaaaattgagagaccatgtcgtcccaactccttatactccctgatggcaaacttgcgtaccaagagtatgctcgatcagtgatagactttgaaaattctcagatttttaattcaaaatcatgcgcataaatacccaaatcatctataaattgaatgatatgttctttggcattgccaaatttcccattgtattttcaaaatattggactcatgtgaccgcaaaggtaaggtttgacctaaacttccacggggaaggattgatgaaagtcgatggaagttaccgatgatgatgatttaccccttttggctttaaggagaccaatcaatttgtcttttgtgacgaactcagaggaggaccgagcctcttcaccaatcctttcaacaatctcaaaagttctgattcctcaaacattatcatgtgtcgccggagttcgttgttcaacaatatgtacttgccttatcaaagattcatttattgcacgttcttcaggtaagccgctcctttcaacaaatgcttcttggtgtatctgtggtaaaagccaactcagtagctgcatcatgccgtcttgggccttttggagcttttccaatctagctaacacaacctcatctgtgttcatcagattggtataattattattattattgttgttatcattttgcaaggtatttattcggatctgactgtccgactcgcaagtatcggagacagatatctagatttagatgagagaacagaattccctttttttttttttttcaggtgaacgaattgagcgttttccttagtatatctatataagtatatttattgatatatatatatataattatatatgaactacttaaagaaaatgctctccagcaaagtcgccaaaatgtataggagttctagctaaatatttaattatatatatataataaataaataaataagagcttatgatataatgtgtaataaataattataaacttaatataaactatatatataaatgtaattatagcataatatgtgtataaatgaacgtcattataatataatatgtatataaaggaacgtaattatagtataatatgtatatatgaattataagcaaaattatgtgtatatattgctaaatatgcatataagtataaatatatatatatagaatatgtaacacacaaatt

SEQ ID NO: 32913 - DNA, 1114 bp, Cannabis sativa
tatagactgcaagcgaaaaatggtgacttttcagccattaggtgaagatctatttgtttatgttggatcggttcgggggcctgagatcctagttattttagtattaaggactagggatctactacacagtggatgtgtaggatgtttagcagttgtgattgactctagtagacccaaaaactttgggcctgacgtagtcagggttgttgacgactttctcaacttatttcccgaggagttgccaggattactgccacaacgagaaattgactttgtgattgatttggcacctggagccaaacctatttctaacgctctgtatatgatggatctagcagaactcaaggagcttaagttacagcttcagaggatacctaatattaggtttactcgacctagtgtatcgccttggggagctccagttctgtttgtgaaaaagaaagatggttccctcagaatgtgtattgactatcgggaactaaacaagttggtaattaagaataagtatccattaccaaaaattgacgatttgttcgatcaacttcaaggaaagacagtattttcaaagaatgatacgcgatccggctatcatcaactaagaattcgagaagaagatataccaaagactgcattttgaaccagaaatgggcattacaagtttctggtattgtcattcaaatcgactaatgctcctacagttttgatggatctcatgaatagtattcaaggatttcctcgataacggcatcgtagtgtttatcgacaacatcctcgtatactctaagtcagaagaggagcatgagcatcatcttcgaatggtattgtagcgacccagagatcataagttgtatgcaaagttcaaaaagtgtgaattctggttgtcagaggtatcttttctagggcatattgtcggaaaagatggaattatggttgacccgagtaaaattgaatcagtgaagaattggccgtctccaaaatgtttgacagaatttcaaatttttctcagtttagcagggtattaccaacatttcgtcgagggattctctaaaatctctatgccgctaaccgaggtaactaagaaaaatcagcaatttgtatggtcagacaaatgtga

SEQ ID NO: 32914 - DNA, 1652 bp, Cannabis sativa
cctaaaaatagcaaaatatgtttcgtttttttggggtcacttatatatatacaagtagtaatagtaactatatgtaaaatgaaaagtggaacaagtcaaaccattggattttgaaggttaatcacatcagtaaaataaggatctgaattatgaaaccaatgaattaattataatgacacagattttggtatcatcatcatcatcagaattgttctgcatatgcatgagcagcaatggacgctactcagcgcatggtatgtcaagaagatttcttcaaccctttaacttcaatgggtcttcaaatggcctccattcttgtcatctctcacttctttcacctccttcttaaggccttaggtcaacctggtcccattgctcaaatctttgtaagtatttattaacatttgttcatattattcgtatgtataataatttgaattgatctaacaattgtatatactaggctggattggtattgggaccatcagggctttcccatgttgacaaagtcagagatttcttctttcaagcttcgggagctgagtactacgaaatatttggtttcttttgtagaatgcttttcatgttcttaattggtttagaaaccgatatagcttatatgattcgaaacattaaaacctcaaccacaatttcttattgtggaatctttataggagctgtgtttggtctctcagtttccttctttctccaccaacaactcatgtttagtagcaaaaaaatggttggttttgtcctaattgtcatcctcttaatgacctacaccgcctcgccagttgtcattcgcctcgctggcgatctaagattcgccacctcaccaaccggacgcctagccgtctcttgctctgtcatcaacgaaattagttgcttgattttgttcaatttgatcattgtggtgcataagaggaacttttttaaaggtggggttttgaccatttttataaccggggtagttatattggtgaacaagtatgttgctattttgtttaacaagaggaataggaacttaaagtaccttaccaatgctgagttactctttattttatctgttttaattgggagttctatgatcatagaaatgtttacaagtaatagtgtgataagttgttttcttattggggttatgtttcctaaagaaggtaaaacagctaggactttggttcataagcttacttattcggtacataactttatacttcctatttattttgggtatttggggtttcaatttgattggaatcgtttgagtaacttgagtagcattattattgtgttgattatggtggtgttgagcattggtgggaagattagtggtactcttttggcttgctcatacttgaagattcctctaaatgaaggtgtttttattggtttttgtctcaacttgaaaggtcatgctgatcttttgttcattggccaagctacaaatacactaattgtaagttccaatatttcttcctttctttctttattaaaatctacttataggtgttttttatttgatgtgatacttaattgggatctcatgtgctagatggtaatatggatgagttttagaattatatataggaaaatttattatacactttagtttggtttagtacacttattttgtttcaacatttaagaaagta

SEQ ID NO: 32915 - DNA, 2436 bp, Cannabis sativa
  modified_base (520)..(524): a, c, t, g, unknown or other
acgcaagtatacgtatcgttttaacatgtaatattcagatatgtgagatcgctctcacgaaaactatagctaaataccaatcaattgaattcttgtttctatttgacaatcgaatagataaattttgaaactaaataaactaattaagcaaaaataaataaaacaaacaaataagaggtttaacaatagatgtgaaattagggtgatttcaattgtatcgatatattatggtctaaaatgattcaattcctattaccaaattctatgcaatagcaggtttactcaagtaatttatagtcttctcaaatatataaatcctaattacatgtaaattttttactcatgtgataaattaaacatgtaaaaggcattaaatacaaaaaccctataagttatccaaaatatataggtactctcgtcctatatcgaaatttgtttctatttcactatagcataattgatactaacttctcagatttcgcatcaaaatcataaacatttaattggtgatcaggcaatnnnnngtaattaagtacgaatgaaatagaatatatagaaattgagagaaaatttaaatcacattaaaaccataaatcaatgtcaaacaatatccatctaaccctaataaattgtttagctactcatgttcatcgtagcaaattcacacatattaattcagagtagaaaaagaaaatagagaagaaaaaaatgttaaaaaactcgttgaaaaaggcttcgtgattgattttgctcttcaattttcatactcctaaatcgcttgttaattaagagtttctcagatttttttagctcttcaaacctcctaaaaatactaataataatgtgtttatataggctaacaaagttacctaaaagatacgaaaaagatttaaattttaaacttcaaaaaaataaaaattgcaactctacttaaaaaaactatcttttttcgctatttttttatcttttttttttcagaaatttcctgctatgacgactgatagtattttgacaataactcaacgattcaagatgttctagaaagcttaaagagagatctaaaacttttaaatttcaacttttttcaaaagctgaccagatcatagtcgaatttaggtttcaagtttaaactttatttatttttattttttttttttgcacaattttctttattctatagatcatttttttttttcaaaatctgaccaatttatacatttcaagtgtcaaaacctgaaattaaaaaaaaaacaaacataattttatttcaaaaaataaaaaaaaaaaaaactttaaattacataaataataagttaaaaatatgctaacaataactctacagcctatgacaatacatggctgatctcattacatacatggatctcatgatgatattgacaacaaatataatagtaccataatatctttagattttgattcataaaaaataattaaaatctttagcttttggattattctttctaataattgcatagtaaataagtcaaaagtgaggcgttgaaatggtacattgatcttgtttgtttttgaccgagaacattcatgcatatcatcttttttgaaagaattttctaccatgcccaactttctcggaagacaaaaatgtatttaaaaatgtaaaatttttgactgaaaaatcgtagttgaaaacttaaaaatcatctttatacaacgaatagtctacaatatatttttatatatataaatcaaaaagattattactctacaaaaattttacattctaagagcatgcatctttcaaaaagacttcaaatatatttctatacatttacaaaggtttggagatattctctattttgtgggcttactcttttggctaaaacatagccactctatgtttaatattgttttgtattttctgtacaattacacttgcattttctctattcttattctataatttgtcattttttgtatactatatgaagtacacaagactattaatggctgctaggggtgttcgcggtgcgagtggtgcggtttttaactattttttcaaactaatccgctcatgcagttttttttaatttttcaaactgtacccacaccgcgaaactaaaaaaccatagaaactgcactacaaaaaatggtgcggtgcccatgtggtttttgcgagttagatcctatcaccaataattgaactatcacaaatataacaaaacttgaacaacacatgttaaaaatatcataaggcttgaaaataaatatgaaaaaaaaaataagtttcaataatacaataattaatgagctttggattagatattcatatattggacctaaataaatatgaaaattattatttttataaagtgtggtgcggtgcagtttgaacctcatattaacaattcaaaatcgcaccgcgcggtttaagaaaaattcaaaccgcgacagcac

SEQ ID NO: 32916 - DNA, 2442 bp, Cannabis sativa
  modified_base (2401)..(2408): a, c, t, g, unknown or other
ttttatctagggcataaaacccaagagaaaggaaactccaataatgcttagttagatttcttgttgcctcaatttggtcaatgtttgtatttttcgctctaaaattcgtggtctagagtgaagagtgatcactttataaacataaatttaaaaaattctaagttttggatgttgaacacggtccgtttgtgattgaaaataaagtctaaagttccaaaccaatttttgaccatgatccattcgtttctaggaaaaactttttgaatgaaagttctagatctcattttcatattttcaaaacatcttaaattttctagttctgagttatatcaagagagttatgactaaaatatgatcgatcatcgcagtaggaaatcagaaaatgagagagctacaactcttgggataaaaagggaaacatcccaaattttgtctataaaacgagttggagctaggtttcctttatcattcaaacttggagaccaattttaggcattggaggattatgggaaacctttttaattgtgtatttaaagggattgggagcttagatctaacataattcaaaaattgagagaaatactaactgtagaagaagggcaaggagcagaaagtaccattggaggactccaaaattgttctatcttctatatctctatcttttatgtttttagttaaatttctattgttttaaaatatcttctagtagctaagtttcatttgtggattattatgtgaaccacttgaatttactttatggattaatgtagttgtttaatttcttcctcttctctttatttaattccatacaatctgtttcaattctgtaattatttgttgaccatctatatttgttatctacgaattcgaatcaaaattttgaaaggtgagatttgaatatgttatgattgttatggatgtaaattgatttaggattaaagtacttaggttgtttgtatgatttaataagtttctttgcttaatgttatctttttgattaaacttaccataagaatataggaagttttcatatagattaggtttataagtcttaacaaattataaacttcttaactcgggttattaatcgaataggaagaagagaaattagataattgaattaagaagtaaaataaaggatagttggtgatcataataatctttgtctttattattgatatatcttttaaaattttaatctttgttgttttatttactttctatccaataatttttattaataaaaaagaaataaagaattaattgattaataattgataatcaatcatcgtgggaatgatactctatttattattatattacttgattcgatcgcgtatacttgcgtatcaaatttatcaaacaagttacctataacattttacacatatcatgagctgatgaggcttgctcaatattttaaaaaatatctctatctaatccacatataagagcatacttagcctttgtatttttagacatcatcattttatcattttaatcacatgcatcatatttctttacaatttctacaccatctacaacatgcatacgaatgtaaggatcatgacatacaatatgccacaaatcataatcaatggattgagataagtttttttttttttaattttccaataagaaaagtctaccctatcaaaaaatggtgctctacttgtgcttaaaccttctagcatattattttgtgaattacatggaaacaccatactctaagtatgtgaaatatacctaaaaacaagatcccatgctctgatatcaattgttagcccatgataggtttccaagaggggagatgaattggaaatttaaaataatttcaaaaattaaaaaaccctaaagacaatttatgcaaatattcaaatttaatgcatctcatagataagcacaagtatacataattaataaactaaacttaaaatgtaaagagtttagaattagaaattgcaaactctcaatttttacaaggtttggtagaactaagctacctgcatgctttgtctttaaagctatggccctagttttgacttcaactatccagccaagttaacgggcttgactaactcttttaactggagactttttcaccaaggttttggccaaacctctcacaatagttttcttccaaggactcaacctcactggattgttgaagtgccaatctcaccaaccaagttatttttcctctagtgcaaacttcacctcaacaatagttttttagagaactatcaaccactttgaattgttcaagatctaatctcactctcggattgttacagtgacaatctcactcttctcaggttgtttatataaccaatgtcaacctctcctacaactgagttatttttctactggtgccaaccttgttggatatttattttaccannnnnnnngatctactcataagtatgttgtttaaacacccta

SEQ ID NO: 32917 - DNA, 1393 bp, Cannabis sativa
  modified_base (100)..(113): a, c, t, g, unknown or other
attccgctacaatcaatgtaaggttttcttaaacccttatgtgtttattttctttgttttaaagatattcatattaaggatgttaatcaacatacttgtnnnnnnnnnnnnnncctggtaaaatattcccaataaggccaaggtcccatgactcagctaagcaccagccagggctaccaaacccaagcatgaacagactagctttgtagggtggaaccctagggctggccaattcccatgattatgccctaggaccggtcaagtctcaagcaagatccttagggtcggccagggttagttttgaattgaaatgtgtgttctttaaaaactcagatatgtacctcgtcgattcttttccttaggaaatcacacattatgcattctaatactatcatgcaaatcaaaataccaaaaagattacaatctaacgtgagaatctaaaagtttgtaaaagcttgaaaagcttgaaacttatcaatggaaggttcaaagaagagatgtcaaagaagagaagatgaggcatatatggaaagagaagatcaaagatctaaaaccatgccatgcaaaaagcaaacacttggctagacaaggtttctcgatagaggctactacaagcaagacgggagttgagaagtccctatcccaccagatgtttgaataaggacttgagggacaaatattatcccaaattttgtccacctaatgtcgtatgtcaacataagccaagacagagtacatgtgaatacggccttgccaatagcaagacaaagtctctttacaaggaatggtaaaaccatcaagcaagaagcaaaataagttaagcgagctatcaaggagctgtaccaccatgtctggctagccaagggaagtctatattctggctaggatgagcttatatggctggacaaggtttgagcacaagctggacaactaaaggtgactttcaaggcaaggaagcctgacctctacaaggacaaggtgtacaaaggatggcctccacctacaaatgctagtgtctacctacaaaggctggccatcatcaaggctgaccatcaccaaggttggccatcacctactaagctggccaacacatgcaaagacctatccaactcttgacaaagcaagcaggaacatgacctcccagaccctagcaggaacatggtcggccagacctcaacctacaggaattgtatggctggccagcctgcatcctgcaggttcatggctaactagcctttggcatgacaggattttgatgtgcagctctcatttgtggacagcaagtcaagcaatggactgggccttaatagcccgcgacaatagagggaaaatatctatttttgagaggtaatttagtcatttatatttcattaattaattatgtaaataatgg

SEQ ID NO: 32918 - DNA, 1175 bp, Cannabis sativa
gggtgttaaaattagtcctttctgatgatagtatgcataaagtgaaaaatatgaggtttccttttaaaaatcattggcttactgaacccacttttttactactgttaataattcctggagttgttcaaactctggctctaataatcatcttttgtcaaattttgttagtaagcaaagcagttgtattcaggctatccgaacttggaaccaatcttttaaaagtttagctaataggattaataaaattgataggcagcttaatgacatcttttgttcccttcctgcttctaatgagaacctgttcgaggcttctaaacttcagtcgcagcttgatagccttctttataaacaagagatatttttgaagcaaagatctaaagtccattggcttcgggctggtgacaaaaacaccaaattttttcatcacaaagcctcatcttggaaaagaaccaatttcattagaaagctcactcttgatgatggtagtactatttctagtcaagctgccattgaaactgaaatctgtcgttttttctcaaccctttttccattctcatggtagtagcagggatgctactaatttacttttatctgctattaattctcggctaactgctcatcagttcaccctgcttgatgctccttttactgctgaggaagtaaagttggctttatttcagctttctggagataaagcacctgattttgatggacttaatgcctacttttaccaaaaaaactagaatactttaggagaggatttgtgcacagcaattcttaacattcttaataataatgccagtatggcttctattaataagactctcattgtacttatccccaaaaaatctaatgcttcctcccttaaagatttcagacctattagtctttgcacaactttgtataaaaatgttgcgaagactattgctaataggattaagcccattatggaggatattatttctcctacccagagtgcgtttttatctgaccgcctcatttttgacaagattcttattgctcaggaaatgattcatgccattaaccataggaagtcgggtaaaattgggtgggtgggccttaaattggacatggaaaaagcctttgtccgtgtggagtggggttttctcatggctattcttaaacatctcaattttcccaataaaattattagc

SEQ ID NO: 32919 - DNA, 1304 bp, Cannabis sativa
aattaaaataaaaaattatttatataaaatatctatataattttttatttttaaatatatacaataatattataaaattaataaagaatattctattaaagttatcgtagaaacaaaaaaagtatcgttaaatcaagaattctgttacatagccacactttatatagaataaatatagagatctaaatacacctcgatacatctcatatatgttttaattttattttatttttttaataaccgtgtacgcgctgtactaattatttaagataaaattttacaattttttaaataatttaaagttttaatattaaaaaaattaataatgtcaagatacaaaaaaatatatataatataaaacacaataataataaataataattaggtatgtatacctgtttcattcgtagtaattaatacaatttaatagtgcaatactatcaactaagtcttcctctctatgtttttaaattagaagcaattttattttatctgattaacaaaaatatacaattgtgatgagacaatatgtttttatagaaatagggagacttagctagtacatcaccctagttggactgacctgctcatcaaaggctttagttaattagaaaatcccatacttctgcttcaactagactttacacacacagatgttaagcccatcaactattgatcgctaacaatatgtgctaacacaacaaagaactattcactaaactcaagttttaataaaactaatagaagttaatgtaagccaaaaaaaatctaacattctctcacttgggctacattaatttatatatattatatatcaaaattattattttttttaaatgactcattggttgaacaacagaaaaatatttgtggctactttaaaaatgatagatctttgatagcatctcaacataccggtctaatttaacctttggtattgaactatgacaataatattatttttaaatcaacaaaagacattcataattaaaaataccaaagtattaaatcgacatggtcaataagtctagtagtatggtaatgaattatatgttcaacatttgatcaataaaataacataatttccttatcagttctcaatttcactgataccgtgatgcttaataaatgaaacagtaaaattaaccatacactacttaataaataaatatgtcactaaatatacttaaaaaattaagccaacataatatcattgccattaagcaattaaacataaaagataataatcataagaagatatgaactaaatgcttttattcaattattctcgagaatataacaaa

SEQ ID NO: 32920 - DNA, 2183 bp, Cannabis sativa
caaaaaaaattaaaattaaaattagaataaaaaattatatgaaattttatcaaaaaaaattatgaaataaaattaaaataaatattaaaattaatacaaaattcttaagtgactgattttaaaattttaatcttaattttttgaggagtgttaattataaattccaattacaatctcttagtcagcctttatgtctgaaatcacatgttaaaatatgtttttttttttcaatttttctttcacagccatattcgttatagttacagtattgttcctataatttttgaaaaaatctaaatagtttacaatgtcgaaaatagagttcttaatattccaatttaccacgcgcgttcaaaaaatttcaaacatatttcaacactataaactattcgaaaattttcaaatattacagggatgatgttgtaagcataaagaacaccgccaagaaaaaaaattagaaaaaaaaatatttcggtatgtgttttcaggtacggaggttaactaagagattgaaatatgagggttttttatatatattgagtcgtagttatcattttgtagggtacaaatagaactcctcgcctaatatttgcacaatatttgtaaaatgtcgaaaaagcccctacaaaactaacgaaattcaaagttaaataatctcttctcttcatccatttttggcgccaaaatgccgaaaaatacggaagaagatgaacactgggaagaagctctcgacatagacgacgatcaaatcccctttctcaaaccttgcaagcgtccaaaaccctctcttcttcccaaccccaacccctcatcctcatctcctccttcttcacggcggcagttcctcattcccggcccagccggagccgtacaattagccatggaacggaaatctcgggaagacggtatgttgttctatgaggatctaattcctactcaggagtatattaggaaggttattgaagatggcgatgctagtgaagatgaggattttagggctgatccgtggctttcagctttggattttctacgaacggaaggtgtgcgaagaattctgtttctgaaaatgtatttggaaattttgattttagtttttaattttgtttggtttgatttgaattaggtatggtggatggtgattgttcagttcctggaacgccattgggttctatcaagaaggggtttcgtagtgacagagcagctctggtattgtatttgagatttattcatttgtgaattatatttctattattgcaaattgaaaccttcaatttctgtttggttgctgagaaaatagtgagaaatgtttaaagagtgttcatttctaaagaatttttttccaaattaacaacttgtaattgtaaaatttgtaaaataatcacattgaattgatcataaaaagaccatgaaattgtaaatttatggttgaataacaatggtcacagagtgtaactaatgtgtggaaagaacagtgaaagctagaggagcaaatgggattagatagcatagtagtcctagtagtaaacgatagatactaggtgctgtgcgtattgagtcccgaatttggagtatcctaatatcaagcaattcgcatttacagggatcaacgagcaatctatatttcgcgatcaagtagcggttcttatatattttataacaatcaccgtgcagtgctgtaattatcgcgttaagtattccatataattttttggaaagttatgttgctaataaattttttcttaaagactatttttacaaaatactcatttctaactggggagaatgataatctgtttgattgcatttaacctattattttctctgtttttttaactcaattcattaatttctcttaattgaatatgttaggttgttgctataatcaagtcatgtactccaaatggtcttggtagtttgatggtaactcttaaggtaagttttgttgcaatgtgaactactttaatgttttaattttcactgtataatgtaatctgacatgttcgtgccaatttcaggatcctacaggtacaattgatgctagcattcaccacaaagttctttctcaaggagagtttgggaagatcatatccgttggttccgttttgattctccaaaaggtttggctttttgtcctttattttattctcataattagtgcttcttttcatgaatgttaatcatct

SEQ ID NO: 32921 - DNA, 2079 bp, Cannabis sativa
  modified_base (88)..(96): a, c, t, g, unknown or other
  modified_base (433)..(435): a, c, t, g, unknown or other
tagagataaatgattgagatctcatttcagtaattatattagtttaccgaaatatcatttatagatagctaagtgttttaaggataannnnnnnnnaagggtagaacagtaaatttgttcgtattcaatgttgatcatttatagatgatctttgactatttaaattgaaacaatagggaattcaaatcacatctatttttagtaatagtgtgttccatgtaattaatagttcaattctaaattcatagtggagttaggaggaattaataagttaagaaatttacttggtaaattttggatctacttattgtaagcttgattacatagggccatggtcctcacactagttgagataatactgcttgtagactaagttaattggtttcaattaattaattataattttaaatttagactatgtcttatttatgannnttcactaagcaaggacttaattgtgaaaaaaaaaattagaatttatttgttaattgaaagactttgtaaggtctaattaataaagaaggtagatgaaaattttatttgataattaattataattatcaaataaatagttttgacatttataggattgaaaatgaaaaatacgttattattgaaagaaaatatgaattatgaaataaagtggaaaaattataactagtgaggcccactatgtatggtcggccactagagttatttttacctattattttatcttttttaatccataaaataaaatccgaaacccttgttgaaatactataaaataaataagatgctctctttctcatccaactctattaacctagttttcattctctgtcaaacaactagtaaatgagagcctccttccttagtatttcgaattccttctattgttcttcatcaaatttgagcctttagtgatagagtaccatgcccactcatagcaagttaagtattcaatcatagtgtggaagactgtggttaaccaaactgaaggagagaagatccaagtttagatcttgataatgctatgctacaaaaaggaatcaagggctagaaatctgaacggaaagagtcatattattccactaccatcaatgtaaggttttttaaactttatatgtgtttatttcatcgtattacgatattcatatttagggtgttagattatagattataatcaacatacatgttagtttatctagatcctggtaaaataagttccaacaactgaccttagaaccatggtaatgatttactttcataaaaatatggatttaaaacgatgatttggatgtgttaatgttgatttatgtgtaaattgatgaatgtttgtgaattacaaatttttcgtaatttttttttaattttcgttatggaaataatttatttagattccttgtaaaaattaagtaattttaatttttacgaaactcgattccaataaaaaacgagggagatatggtgatttgaaaatctgggtccatagggtgtcgaggttcgagcaccacacgcaccaaaccctcagacaaggagggcttgcacgctcgtgcctcggacaagttccttgtctgaaactcggtcacccagatgctacaggtgagcgagttttctcggtcagggaccctgcatctcctccattccacgcgcgtaataggttgcatgcaacctgttgcacgcctaagggtgaatttcaccaaaaaatctgaatttttatgatttttcaatttcaaatccctaaaatatctatataacatattttttttaacatttgaacctaaatgtcaaatttttgaacttaataatttttaattttttaaatggcataaatggcattttaatttttttaatttttttaatttttttttataatatatatggtaataattattaactattgtatgtatatatgtgtttattgtattttctataaatgaaacatactaatttaataaataaagcaataatattcacataagtttattatatgactctatatgtgtcatgcttattttttagtaattttttaaaaaataaataatatatataattatttatttattttttttttttgtttatagtgtcatgtttatt

SEQ ID NO: 32922 - DNA, 1075 bp, Cannabis sativa
gcataaaacccaacagttatttgtgacataaatattttatgtttttaaattcatacacttatatgatacatgtttttttcgacaaattaaatatttttgttatacctattacactatcaatctgttaagtctgattggactaattagtactaacatgtgtcaatatattattggtccaaatcaattaatattgattttagtaataataaatattcaaacaataatcattttacaaaattttaaatcaagtttattatcttttaagaaacaaatgtttaataagtaataattaaataaataaaaagaagaaaaagaaactcacgttcttcaccatcatcaccaccaccaccaccactttcttcatcgtcgaaggccatagattcagacgagctctcttctttctcaattatttttaagacaaaagcatctcgtaaagcctatgaggaagacaagggagatagcaatcatctttaacatatttgggtgttaatggcatgcagatctagaagaggagttgagagatcgagtgcttgacggagctaacagagaccaaaagaatagagagtagtcaaaatttaaggaaatgggtgcgggccttgtgcgtggagatcaccaagtgtcgagatatgattgattctttattatatctaacccctagtagatccagtattttgtttagtgttggtcttcatgctaggtagcaatcatgtcccaaagaatcccacttgagtgtcgttaagagaatctttagatacttacaaggattctaggttcttggtatcccaagaactcaaacattgaaatagtaagctactcagatgtcgactttgccagttgtaagatggataggaagagtactagtggaacatgtcactttctagaaaatttcttagtgtcatgctttagcaagaaacaaaactcggtagccctatccacaactgaagcctaatatacaacaacgggtagttgttgtgcacaaattctttggatgaaacaaactcttaaggattttgatgttgattttgagtgtacacccataaagtgtgacaatactagtgtcattaacctctctaag

SEQ ID NO: 32923 - DNA, 1451 bp, Cannabis sativa
tatttctgttctgttagattctgtgtctaatagaacagagataattttggttcaaacaattttactacagttttttgcattattttaattatttgataatttcacttgataattattaaaaataaattttctatcgtaaggattccttaatcttttatgtgtttattttattgttttaggatattcatatttaggatattatattatagatttataatcaaacatacatgttagtaaatgtagatcctggtaaaataagttctaacagggttcggggtaagatagtttcatgtcatggtatggtgcaaaatattaaatttttttagtaagaaaaaatctaaatatagttttagaaaatttgtgtcaaacatcattaaacttataaaatgacaaaatctcttttctattctcacttttgaaaacacaattctcaaaactataaactgaaaatacaaccaaatagtctctattttctagagttttcatcactttctatttcaaattatttatttcattattattgcaaacttttttttttaaaaaaaaaaaatctatctataaatatatgtattaatttttaaactaatttggaaaactaaaaactattctttaaagaaaaacagaaccaaatatttgtttcttctaaaaaaattacgaaaattgtgtaagaaaataataatactaaacaaactataataattttcttttaaaaaaaccatttttaatttttttaaatctgaataaaagataaaatatttaaaaaatttataataaataatgaaagaaaataaagtataaaaatagtatggaacgaaagaaaaaaaaagtgacaaaagagaacttcatgtgagagaaaatgatatgcttaataaagtgatgcgtgagaaaataatataagataagtaatatgagaaaaatagtttatatctagagaattcactaacatttcttaagtgtataactacttaggttaacttaggtggccatagagatatgagagggtgcgtgtgtgggaatactaggattgagtcctaggtaaatgcatatataaatacttcaataataataaaaaaaaaaaaatcataaaacgatatttttatagggatatgatattgttccatgatgtactttcacggaatgtattctgtggtacattagattggtctcagggtacattaaatgagtgccagagtacgtttctactttttaaccctaactacccctagatcaatctcagttgtccgatcaaataactccatcatctgacggctgtcgtgcatcacggattacaatccgtgaaagtacaataacgagacaaagtcatatccctatttttataatatcgtttaaaattttatatttcaggtgacactttgtattaaaattatctcatatttttttacaatctttgttaattttttttatcatttccaaaattaatcatttcacaa

SEQ ID NO: 32924 - DNA, 2653 bp, Cannabis sativa
  modified_base (141)..(163): a, c, t, g, unknown or other
  modified_base (2570)..(2598): a, c, t, g, unknown or other
agaaggcctaactattcatatgagaaatcaaaaatatacaaagtgataaatcattaaaagtgtatttaagtttgcttaaaataaattataactgtttatgcgacaaaatcgataactgctcgcaaattaaaagcatagcannnnnnnnnnnnnnnnnnnnnnngtagattactaactacttaaataatagcagaagaaaataagagcaatggaaatgcttaaagtatttaactttgatcaaaatataattgtttaagttgtgaataaaaaatgcaaacaagcaaatatattaagttcaaatataaaagtacgagacattcaataaaagataaaataaaaggaaagttggccatacaaccttgcatatttgtctttacaaaaagtgccacaaggggcaaaccattgtctcggccttagggccattttcctaaataaaaaaaatgaaaatgatgatgaataaataaaaaccaagcctacatggtaggagacttggatagttcttattcttcttcttcttctgatgctacctcgacttcttcatccaccttcttaggcttctgtagtaagcaaggacttctccaatggactttcctaggaaactcatatcgatccctgaattttccatccaggctcggtagatggaccgtagtccaacaacattgcatcgctcaatagtctcaacttctttcccatcgagctttactttggctgcactatgttcctcttggagtttttggtattcctcttggagtttcttgcatgcatcggtcttatcctttgtctttcttagcagcttcaagcttcagccttgtgggtcctcttcacctcctcgacttctttggttacgtgagcgacctctgccttggagtcattccattccttggtcataacctcgcccggatctattaaattttggatctcgctttccatgtacttcgttgtttccgtacctcgtcgttgggcgacaaaggatacaaaggtttgctaaaagtaaataaagaatatgtaagcaagtttgaaggatgttaaaaagggaagtaagaggaaggatagtggaatttaccaagaggccatgggtgacactcctttcaagcatctcttcaaggttcccattgttgatcaagtcccattcattgggaatgaaggacttgaagtgatgccaacaagtcgcaccaaattccccaatatccttagcctcgacaagcagagtctgaagtgctttgctcgaagagacagaagcttgattcgctttgggaatgggctcttcaatatgtgtgggggccgaaggatgggtcagagcctgagtctcactctcagggacctcgagatcaacagcctgggaggctcgcttcttgttggcagttgtcttcctgggccttttgagaggctccacgttgacatttgatgaagtctctgaggcagtcaaccttttctttcacttcttgcttgaagattgaaagatctcctcgaggtttatttctatgagacaaaccaatgtgttaacatttgtttgaaatcaagtaaaaggggaagttgggacacaatttctcgcctaagggatttaccacaatcataagaagacgaggtaggagggctataatattcactaaagtatttacatcctgtgatcctgaatatattataggagttaattggttctaaatcccagctcgcatctatatgacatgccctatccagcatggtgccatactgctcggttatcccataatacgagttagtacatctaatttggacgtagaagtctgggtaccaactatcgaacctacatgcaatgcaatctatgaggaggagattctaggtatagaaattataacgactatcccaaaaagacactaaagtagtacgctcgaccttaagcattgtgggttatcaatgacattgattacgtcaagatgctctttcttcggcttcccgagggactgcattctggaggtagtgtgcttgagccacgtaatcttgagattcctcattggctgggatcaaaacctgctactaagaagaatacttgggatatttgtaatcacaagtaaactccttctcagtgaggagatccacagacctcaagttaacctcgttcaagaggaactcagcccatcaaagatcgaatggatgacctagcaagagcctgcgtcgctcagccatctcgggagtaggggttggtcttttcaagatggttgtcaaaaacaaaagccaaattaaagtcagcaaaacaagaattaaagacatggaataatcaagtcttaagcaagtaatgacttacgaattatgcaaaaggtgcttgtgttgattggggaaagaaaagttgtcaagaaaaagtcctctttgaagggggtcttgtttggcaacccaacaatgatcttacgatcgcctgtgtgagtcccgagttaataaaaaccccctgcagcattcttccttgcagggactgccttcaccgagtagaggtgttctatttctataggtgtggggcactcccagtttaaaattttgtacaaaaccttcaaacttgcgaggatcctgtatgaaataggtgttgaaatttattttaccannnnnnnnnnnnnnnnnnnnnnnnnnnnntttaaacaccctaaatatgaactctctaaaatgataaattaaacacatataaagt

SEQ ID NO: 32925 - DNA, 2354 bp, Cannabis sativa
  modified_base (61)..(101): a, c, t, g, unknown or other
aatgtaaggtttcctaaaatttatatgtgtttattacatcattttagaaagttcatatttnnnnnnnnnnnnnnnnnnnnnnnnnnnnnnnnnnnnnnnnnggtaaaataatttccaacagcggggacattacaacctaatactaattggacctaaataaaatctctcatatgtgacaattttattttagcaacctagtccattttaattatcaaaattaaatgggctccctatatgcatctaggcccaaaataaacatataggcataggcacacactgatttggatggatcctatcatgttactaggtttatacacaaatgaaagaagattacactatttacatgttacaaattatttatttgacctattgacaattggattatggttaaaatcaaatcattgaatctgtcaacaagttaaccataacaatttagatcaaacaataataggttttataaaacacgttttcataataaataatataaaacacacacatgcaacaaattgaatgtttggatatcagatttatttaatttaaattaattaaataattaaattaatctcaaaaattaaaaataataaaatatttttttatgaaaaaataattaaattaaattaaataataaattgaaaaaaattaaacctataatttttaaaaaaattaggtttttaacaaacctaaatatctattaaaaaatatcaactaactttttaaaatttatgttattttcaaaagaaaataaaattaaatgtctaataaaataaaataataaataaatattatttatccaattttataatttaataaaataacaaaaaattttaaagttgacaaaaaaatctcgtttgatttttaaaattttctagattattttattaaaatatatcttattttaaatttcaaataaagtcttttataaaattaattaaataatgtaaaatataaaatatttgaccttatatttaaaaataagataaaagaatcaaattttaaaaataagataaccattcaagcaaaataaagatagattttatctatttttcaggtttaaaatctactaatatctaaaattaattaattttactctcataattagatttgagatttaaaaaataaaaatctaaatgcagattatacaaaaaaattcgaaattaattccttgaaaaaatcaagaaaaattgaaaaattacatttggtgcggatggtatgcaccataccatccccgctcgtgggatggtacacctgaccgagaaaacccgcagcctctttacgcgcgcatggccccctgtttagacaaaaaaattcccggggggcacggacaacttgctgtccaaaccacgtgcaccccgagtgaaaaagggtatccgcgcgtggatggggtgtcacacctcttgattttttcccaattttcaaaattttataactaattcaaataaaattaaaattaagttctgtaaaaaagtgaattgcttaatattttcctaattatccaagaaaaataatcctagaacgaaattctaattattttacgtaaaatttttgtaaacatcaaataatcatcaataaacacatagattaatatgattcaaatccaaatcatacatacatcgttttaaattcatatttcttgaaagtaaatcattaccatggttctgaggctagttgttggaatatattttaccaggacatagatctaataacaagtatttttttaacaacctaaatatgaatttctaaaacaataaatcttaagcacatataaagtatgagaaaccttacattggttgcaatggaattaaataactccttccacttagatctctaacccttgttcctttttgtcgtagagtataatcaagatctgagcccgacactccttcagtcgtttggattcttcatagtcttacacactatgattgaggactgactggctatgggtgggcatgcactcaatcactaaggctcgaatttcaatataaagcagactacaggatttcgaagttagaagagaaaaaagaagaagaggaagaagttgcaaactctctagttgtctgacaagatgtaaactaggtcagagtcattagttggattatgagactattcttttcttttttcactaattcacttagggttaggattgaattatatggaataaaaaatgaaaaaaataatagctaaataaaccctatagttgtcggccataagtgtggcccccactaattatatttttgctattttttaacaatttatctattatttcacaaatgccaccttttttaatttcaatcctataaatgccaaaactctttatttaataattataattaattatcaaataaaattatcattca

SEQ ID NO: 32926 - DNA, 1189 bp, Cannabis sativa
atgagaatattgatagattcaattagattattgtaggtttggctaacataaatcacaatcttgttgagatcacttccaatcgcatatcaaaaagttaagtctaccattaagtatggcagggatgttatggcattggaagatggtcttgccgcacttaagtcgaaagattttgaattacaattggagaaggaattcaagaaagaagaagtgtatttggcaagaggaagattactcaagaaagagttcaaagaataaacaccattactctcaatcaaaattgaagtccagagggaaggacacaaggaagtgttacttctgtgaaaagtctggacacttgcaaagattttgcaagaagtacaaggagcaacaaggctccaacaaatcacacaatggagataggaatgacttctagcaccatcatcatgggaaagactctactgcaatcattgaagatggcgatgatttattcacggaatgagagttgttctctatctcggagtcatcaatgaacatggagtgcattctcaattctggatgcacttatcacatgtgtccaaatcgagagtcattttctgattataaaccagttgatggaggtaaagttctaatggataatgagcattcgtgtagggtcattagaattgggaaggtggccatcaaacagtatgatagttgaattaaggtgctgacaaatgtaaggtacatcccggaccataggcgaaacctcatatacaagtccatgcacagaagcttgaggatcaccaaaggttctttggtagtaataaaaggtgaaaagatcaatggattatatgttctccaaggagaaactgtcccagctggtgaagctagtatggtgaaagggctagaatcagatatgaagttgtggcatcacagacttggacatatcagtgaacaaagcctcaaagaactgcacaaataaggtataattgaaaatttaaattcttgtgccttaccattttgtgaagataagctgaagttcactccaacaacgcacataactaaaaggatacttgagtatgtgcacactgatcgggggccatacagagtgcccactcactccggtaattttctttcaatagttgttgattatagtcggtgtgtttggacctacttgttaaccactaaggatgagtgtctagaaaattttagaatttgaaaaactcaggtg

SEQ ID NO: 32927 - DNA, 1821 bp, Cannabis sativa
  modified_base (1774)..(1774): a, c, t, g, unknown or other
tgaaccatgcaacatagaatgcgattttttatctttattaactagtaaatctgattatgttgaaataggttttatttagggcacaaaactcaacatcatttctcgcctataaataaaagacaacaacattcaaatgaggtacgaatacttgatcaaactatccttttaaaaactctgccgaattacgtctccatgagaattgttgaccttaaaaaatgaccaaccaaaagcaggattggatttatctgatgtttgccacatgttacacaataagaacaataaaataaataagacaagaatttttatacaagtttggccccctatcgtctaatgtcctactccctttttagttgtattgataccgagagataatactattcagatcactatatgtaggatctgatatagctttttttaaggatacaaagtatgaatcaataggcagatctctaatgagagtgtgatatggccttggaggcgtgtgagagagaggaagagagagggccctttgggtgtgtagaagagagagagagagaggagaagactaaggttttagacttagagttgagaggtaatgacttagaggcttaaatgagagttagagggacttaggtttctagggttgtccacgggtgaaggttgcacatcaatgttctgccagggagaagctggcggccatacacctgcaggatgagatctggccgaccatgctatgtgtacaggttgaggtcttgccagccatgctcctaccaagatctggcaggtaacgtgcctacgagaatcctacagatcatgttcctgatagccctaccaagaggaggccagcctttggatgtggaggccagcctttggaaagtggaggccagctttgtacatattttccttgtagagctcaagttcccttggtcgaatggaagctcccttggtctgaaagtcaccttttggttggccaacttgtgcccaggaccttgtcggccatataagctcttcctggccgtcttgtagacctcccttgctggccaaacatgctagtacagatccttgacgacttgcttcactccttttgcttactgcttgacggttttgccataccttatatggagatcttgtcttgatattagtaaggttgtgttccacatgtactctatcttcgcttacatggacatgccacgtcaggtgaaaaaaatttaggataacattttcccctaaattccttgtttgaacatctggtcggatagggactttctagctttcgtcttgtttgtagtagtctctgtcgagtagtcttgtctagccaagtgttggctttttgcatggtgtgcttttagatctttgatcttctttctctatatacttctcatcttatctcctttgatatttcttctttgtacctgccattaataagtttcaagctttttaagcttttagtaactttttgattctcatgatagtttgtaatctttttggtatattgatcctcatgatagttttcgaatgtataatgtgtgacttcttacttgagaagattcaattttggcctttgttgtgatttctgactcattgagtcataaagaacacgatgtatatgtttgagttttgaaaaaaaaaaacacacatttggattcaaaactaaccttggctggcctaggagatcttgcttgagacttggctggccctaggacttaatcatgggagttggccagctctaaggtttcatcctataaagctagccagttcatcctgtggtttggtgaccctggccagttcttggctnagtcatgggaccctggccgaccctttcaaggcttgggaaccttggcc

SEQ ID NO: 32928 - DNA, 4349 bp, Cannabis sativa
  modified_base (1604)..(1621): a, c, t, g, unknown or other
  modified_base (3315)..(3317): a, c, t, g, unknown or other
gaaacacaagggttctgccagctattaatcctgaacaaccgtcgaacgtgggtcatgctgctcttggactcatgcaaggtcataccaacaccctacatcatgatcaggaggaaccttgagttgcggtaaatcttgcgttcgaagaacaaagacgcatgtttgtcgaatggagggacaaagagatggaagcgttaagggctcatcatgcagagattacaattgtagttggtaagctactgtgctgatacgaaaagcctaccaaattgtcgggcaacaacccccgaatgtcatccccctgggggaaacagacgaagatctagagatgaatacttcccagactataaatggtcagccaccaaatctccggtcataggttctgccagtgggccaagcagtaggtgggcagaccttgtgcagtaattcatcaggagaagtcataaccgatggttccaaccaggccaacggtgccattccacctgtcaaccaaattaatcaatcactaggatagccaggccattctttttttgagaggttggtgatgaatcatgatctcaaaaacgatcaaaatcgaaggagaggagtagacgattaacctggcacgacgatcgtacaccctgcaacccgtgcttaaattctcgctcagaaagatactgacgtgactcaaattggctaaaatgtcgaacaggttagtccagctgtgtaggcacaactagacgaactaaagagtatgttccaaggcatggcctggaagagaaacaatgatctcgagttggaccgagcatgtggaacccctttctctcccgagatcaatctcctggcgttgccccacaagttcaaaatgccaacctggaaaacgtacacaggaagaaaagatcctcttacccacctcaagtatttccagatgcaaatggatttgcagggggtgcgaggggacatgtgttgcaaaaattttcctgctaccctctcggaagcctcccaataatggtatttcaagctggcccctggaaagttcaactcatggaaagccttctccttggaattccatgcacaattctcctcctctcgccaacttccgttgcattcaggagacctggtctaagtcaagcaaagagcaggcgagcctctccgagcatacatcagcagattcatgacgaaggcgaccaaggtttcacgggtaactgaagattgaaagttgcccccgatactagggggcattgaagtcctctgtgaactttggaaggacataatgaagaacgacgcggtagacttaatgagcaattttctcgaccgtgcttaaggtttcattaaactcgaagaagctattcagcgagcagaaggtgaacaaaagcctggcaagacaaaagctccttccactagaacgtccgcccaactcccccattaccaaataaagctcaaatggtaaacgttccaacaacaacaagaggcaagggaatgtgaagaagggaaagttcaccaacataactgagcaggctccccaggagaatcaagcaaagtacactgcatttaccatctcgactgaggatatagaaagtgtttacacatggccactcagttgctagccccatataagaagcccgggcccnnnnnnnnnnnnnnnnnnaagagagacatgacaaagttttgtccatttcacgtagactacggccacgacaacaacgaatgcaaaaatttgaagcaggaaattgaattcctgataagaaaaaacaacccgcatttacaaaagtatgtcaagaccaatcaaaatctgaggagtgataataatcaagacttgctacctccactggtagagggacatctgcaagtcatcattggaggcccgtagatagttggagattcgggaaaagctcgggagaggtatgccccaaaagaaaagcacgagcaagaagaagtgatcctggctgtataagaaaggaagcctaaaatcccacgggcaggagggcctaccatcaccttcaacaatgaagacgctatcaaaatcaagtttccacacaaagacccgttggttgtggaggtccagatagctaacaaaatggtggccagaaccatgattgataatggagcctcttccaatatcttgttcaagactgcctatgaaaagatgggactgcacctcaaggatctaaccccatgtctccttcctgtctattgtttctccggccaaggagtcgcacctctagaacaagttcgcttacccgtcactgttgggcaagctccgacgaccatgactatcatggcacaattcctggtattatatgttccgtcagcctttaacgtaatgctaggtcatccagccttgtatgacttaaaggttgtcacatcgatattccattcatgcctgaagtttccaacaaagaatgtggtagggtgtctgagaggaaaccagcagactgctcgagaattttataaccttgtagtggccaaggctaagaaggaagtatcctccagccacagcacagacaagggaaaaaacatttccaagtagggagcttcccaaggcggggatgaagatgtggatcctcgacttggggacccaaatagtaatgttggacctgtagaagaattagaagagatcgagatcaatccagatatcccggccaggaagctaaagatcggaaaaggtttgttgctcaaagtagaatcagaattgataaaatttctgagagtaagcctagacgtcttcgcctagtcacatgaggatatggtcggaattgatccttcaatcatttcgcacgtcctaaatattgatccaaacttccgaccagcttaagaaaaacgagggctattggataaagagcgagcattagccctaaaagaagaagtagaaacgctaagcaacaacaatttcataattgaagctttctaccaagcttgggtggtaaatctcgtactagtacccaagccgaacaagaaatggcgagtgtgtattgatttcacagacctcaacaaagcatgccccaaagactattttccgctcccaagaatcgatcaacttgtggatgcaacagcagtgcatgaaatattaagcttcatggatgcttattcggggtacaatcagatcaaaatgcatccaccagaccaagaacatacaagttttcgaacagatatgggtctcaacataccaaagattggtaaacaaaatgtttaaagaccagattgggcagaacatggaagtgtatgttgaggacatgctcgttaaatctaggaaggctagggggcacatagacgatctggacgaatgcttcatgttcctcaggaagaagaacatgaacttaaatcccttaaagtgttcctttnnngtcagctcgggaaagtttctgggcttcattgtcaaagcccgtggaattgaagccaatctggagaagattcaagccctcctggatatgaagtctccaactaaaactaaggaaatgtgtcccattcttcaacatcctgcgaggaaacaagcaattcgagtggaatgaagagtgtgaaaaagccttccaagagctaaaagcacaactcgcaaaacctcccgtattcttaaaagctctgcacagagaagaacttggaatatacttagctatcaaggagcatgttgtgagtgctgtgctgatcagagaagaaaacagcatacaacacccggtctattgcatcaataaaagactcattgaggccgaaggccggtatccattgatagagaaactggcttactaccttattctagcaacaagaaagttacggccctattttcaagctcatcctgttccagtgtacactgaccagccattacaccaaatattgcaaaagccggacggctctggacggcttctcaagtgggcagtggagttggatcagtacgaaatttcattccaaccccgaacagtaatcaaaggccaagcctttgcagactttgttggagaatgcacaggcagagaagaaagcataccagaaagcaaccccgagccggtacaaatacctcagcaaagtaacaatgaagacaacccgacttggaaactacacgtggacgggtcggctacacattagttatctggtgcaggaattgcccttgtcacacctggggtaacacctacacgctgcaaaaaagtttggatttaaggcatctactaacgaagtcgagtatgaagctctaatcgctggcctaaagttagcccgcgagatgagagtcgaacacattgaaatctgcagtgattcacagcttgtggtaaatcatatattcggagaatacgaggatcagggagaaaagatgatagcatatctgagcaaaatacatgacttgctcgcataattcaaaagctacggtcttagacaaattccaagggaagaaaaca

SEQ ID NO: 32929 - DNA, 1001 bp, Cannabis sativa
atattttaaaggacaaaattgtcattatctatttaatattaaaaaataaaataaaaataattaaaatccattacccttaatggcattccttataaaattggtggggtaagttctccctttcttttatcctttatttaatcaagttctctctttcctaattttaataatataagtaaacaaatgtaagggaatgattaccttactattgattcccattacttattagtgaacatgccattagcattgccattcccattccccaacccattaccattcccattcacattccttttcctatttgcattcgctttcccattcgcattctaattccctagcccattcccatttccattccctggcccattcccattcccattctcattccacattcccattccctgacccatgcccattcccattccaatttccattcctattcccatttccattccccagcacattcccataacgattcccaaaccccaaaaccccaaacgccaatgctgcaaaacccaaaccccaaaccctaaaacccaaatcccaaaccccaaacccaaaaaccttaaaccgtaaaacctcaaaatcccaaacatcaaaccctaaaccccaaaccctaatccaaaaatcagcaaacctaaaaaccctaaacacaaaaacaccataccccaaatccaaaaccccaaacccaaaccctaaaaccccataccctaaaaccaaaacaccaaaccccagacttaaagcctcataccccaaatactaggtccaagatcctaaactctagaccctagtcataaaaccccaaaccctaaacctcaaacccaaaaaacccaaaagccagagactctaaacacaaaaccccaaaccccagaaccctaaatgccaaacataaaagcccaaaaccccaaactcaaaacaccgaactcaaacccaaacccaaacacctaatgtaaaacaacttaaccccaaacccctaaacccaaaaaccccaaaccacaaaaccc

SEQ ID NO: 32930 - DNA, 3320 bp, Cannabis sativa
  modified_base (2299)..(2299): a, c, t, g, unknown or other
gcacaggctgcatatctcttggccgggagctgggttaggttggagacaaagtggctcgtcaactcggaggcgaagggagcaagggtaggcctgacgaagcgattgaaccagtctatcagggggtccatgtttaggtcccaggcgttcctaaaggcctcctcgtgcaaggaattttgctgggcctcccttaagacctttttcaaggctttcaccttggcattcccctttgtatactcagccatagcataattatgcttggcaatcctgagttgctgtctctcctcatttgcaggaacgggggtaaggacgatactgggaggtacagtgtattcttctacttcaggcggaatccccgagtcggagctgacggccggaggattcaccctctttggctttttggaagactctgcctccaccattttgcccttgcgttttcagtccaagggggccaggatctcaccctcttcctcctcctcctcgacctccccgtcttcgtcgatcaagatgatttggcctggaggggcgctagaagaagacctcaccggagtcaccaactggtgaggcgccagagggagagcggagtcaggactataggtctgggcgagagtcgccaaaagatcctccattggcctggctgcttcaaaaagacaaacaaattaagtatcagagtggccatgagaaaatatgcacatgaaagcaaagcagtaaaactagtcctaccctgactatctaattcagccctagcaaagtcttgtactacaacactggcttcatcatccccaagaaagctgttcgaggggagaaaccagctggaagacaaataagctgaatgatcaaggggaataggtgcaggaggtccgaaccccatccgggatcggcctagaaaatgacctaagttggaaaaataaaagcccttggcatgatcaccccaccgagtgggggcattctaaatctaagaagacgttctttaaattctataggcctacatcaggaataatcttaggcagaagggacatgatgaatcgttaagggagacttaccagatctggatgtgctggcatcaggggccctagtattggggactgggaccagtaacttaggtcgggaaggcgttcgttctttacccgcttccagtcgaagggtcctcccagcagcagcctgagccttgatataggccaactcctgtttcctcctaaaaagatacttctggtacctgtcctctgtcgaggctatgatgtctgcccgaagcacctttttagcgtccggagtacgaatgtttgggcagaggaccttggagaggttaaagtcgtccacggattagatccccgagatgagtttggtctttcggtagttctccgtggtgaccaagtcccccacgttaagaccatttctatcataagtggaaaaaccttggcatgctggaggaaaagctgggtaggagcagtacgatgcagaggggggatcctgacccactccatgagaagctctgggtgatccaagacttggaagctagaagagaagaagaagcggtggcggtactccttaacattcttttgaaaattaaagtggaccgggccctcattagtgggatgggcccggagggtgaaaaaactgtccttaaacttgtcccccttcttggggacagatacaagttcataaaaatacaaaatctcagtcgggctaggtgaagcccagtctcaggctacataaaaaataaataagcctgagagcaggcgataagcttgaggaataagttggtaaggcgcaaggccaacaaaaacaagaaaattgataaagtagtcttgaaggggaagcatggcttcggacatgagatgggtctggctcgaagctccaaaacctcgtcccgaggcaagcgatgaaagaccccagacgcggacggcttaatgccgtctacggtcacaatcttctccaactgatgagcacagatcagggtggagcgaagctcgtccgcctcccaaccgttagaacgacaagtatagttctcctgggcaactgggcccttcatgacttcctccagggtggccaaagcagccgcccccttccgggaagatttggttccagacgcaggggtagaaatttttgttttgaaaaaagaaagaatccagaagttagcccccaaaccaaaccctaatgtcaaaagagggaatgggggtcccctaaccgctggaaagaggccccctacggatgcttgccaaaaatggaaactcaaaggattttccttagcaaacatccagtacaaaaatcccaaaggcagcgaaagcagaagaaaagcgaaaancacagaatgtgggaacaaaaatcgccccataccctaaataatcttttgataaaaggggtcgattgcaaggaagaatggaggaaaataacgaaacacaaatataagggattctgtgtaccaagtaacaaacttagccaaagctatttcccagaaatccaacaccgaaccaaaaagttctaccctagcatccaaataaacagtaaagacatagagtgtccaagaaacttacatgaaaattgaagactgggggctagtgtcgatcgacggtaaaaagtggattggcagcgacagaggaatagtagcaagaaatctatggtgtctaaaattatttctcaaaggtgctcttgtggaaaaatggcgaagtggtgaaagtaaccaaatgaaggagaaaggctggcttttatggccagaacgggtgtaacgcagctgtgatcaggcgtaatcgtccggtgggaatcgcaatcgattcgcattttctagatccaatggttggggtaaatgctcattagggcggttggaaacgcttgagtatttgtctgacaccaattaaatgcgtcgaattctcaatggatgggaagcgaatcgtcgcctgcaaaaagcaataaattttaatgatgactgtcataaattcagcacgcgccaggaaatcaatgagacaaccggaggcacctgggaagcctcgtttactctacaccaaacaaggcttggggggtaaatggttccctctattttgcccaaaatacgtggacctgtatgacaacgacacgtggatctgagaagctcaactcttagataaatcgactaagtctttttgcaacaggagcgttagcgagaagacacctcccggagaagatgtgaaggctccacatagtcccggagaccaggggaatgctaaggcatctccgggaggtattggaccctttttgaacagtcacctctcattttatgccacatgggagaaaacgtattggaattgccataagcaatatgtctgacaacgtaacccctcttttgcagctat

SEQ ID NO: 32931 - DNA, 3099 bp, Cannabis sativa
ataatatagtttaacttaaaagggcaatttagtcaatttaagcatttcaattacgttttctataaagtaaacaagataaatcacaattatttcatttccaaaaaaattttagttaacagcatattacaaatattgattccgattattttttatttattctattatatttctccattaatttattctgattttgattactgtatagtaaacgtgccataagagttctctttttgtgacaaattaattaacattacatgtttaatattgaataattaaggcttataaaatctccaaacataacactcatagtaagtaatattgtaattatatatttaaaattattgactctcaagaacttattttgttaggagagtggtaactataagagcttaacgagggcaatgaaagaaaactaagaacagaaaaaagagagcatattttactgaaaaacttgagtatttaagattcatggttaaaaaatggtatctcggtattaaactaatttaaatttgacttgttaacttagttaaagatttaattcaaataaaaaattaatttaacgtgtcaaatttaaattggtttaacatatgagccaccactttttaaaagggatcttaattctataagtgtagctacaacaacttataattaaaagaaatcttgaattactaactctaacaaactaactaaccgtttcttttggttaacagtaaccaataaaggatcagaatgggttggggcttcatccattttaaaatatatatatatattgtctaaggtctcaaaaaaattaaataataaaacattaatatcaaaaaaaaaaaatcctcaacttacaattttttattccactaatagcttttttaaaaaacaaaaaagtggataggtctcaaatatttaatatataattttttttatgaatttatataataatttagactgaatttaataatgtagagactagaaggaaggtatttgggaagtctccactcctgaaagtgtatcattatatctgagttgggaaatttagtatattaaattttttaacacaagcttactaaaattaaaaaaataggcacactttatattcatatatattatacctttatttcttctattctcttctaacttcaccatccatactccctaatctcatttatattgatggtgtccgatagtggtccgatggtagctcgatgctacccattttttttattatgtttttttatgtttttgtacataaaaaaagtagcatcaggtgcctatcggagtactattcggactatatctacatttatagaaatgttaagctccattcattaagctcgccaggaaggcatcagaccactatcggatcctatcaaaccatattatcgggctaccatcggaccttcgtcttcaacctttactcggtttaacaataagaaggcatgataccactatcggaccaccatcgggcctgacaaaaaaaccaattttttacccaaaacctaaatttggccattttaaaccctaaatctaacatctactcacacataacaaacattgattatacaatttatttccttgacaacattgccaattgtgaagccgtggttgatggagaagtcgttgggtccgcggtggtcattgggtccgtggatccttgggtctgtggtcatggtggtcgtggaaagaagggaccaagtttgtggttgtgggtcgattgtgtacctcctccatgtgcgtgtttacaaagtgcgagagagagaagggggaaagagagagatggttgttcaaatgagaggaatagaatggggttttaggaaaaaatgacatattttactaatattaaatagttttggttttgaaaaaaaaaaaaaaatatctaataaatgtataattaattaaatttccctctcagttttccttaaaccaagaacatacttactacataaacctaaattgaataggcctaataaatcaaaattgactatattggccatattaaattaatacaataaaactttacgaatttattaatttatattaattaagtaaaatcatagttccgctaaagtttttttagatgagggcacatttagaaaattactatgaaactggaacttagtgtaatttacaataattataaagtttgacatatttgtttaattacgtaattacacaataatcatgtaatttaaaataattaaagggttttaattatatacaaaaataattttttatattttttttattttagagtttctttttaaaggatcaactttttaatttcaaagatggaacatgttcaccatttcaaatttagaatttttcaccaattgaactatttttaattaaagatataaaaatatgctatgtacaacaaaaaaaaaaattgattttatgatatatttacatcaattttgtaatattgtgctgcagtatacaattaaaaacttgatgtagcaaatttatagaattgtgacataaatttatatataaataaagttataggataatgtgcatttttgttataaataattatttcagtacataacccatacctaataccattaatatttatatatatctagttttggatttaattacttgtattagtttagtcaaaacaaagtagagcaacaacgacttaataagacattttcaaagtagcagtcccccaagtcccaactactagatctcatttctcttatacatacaataaaggagaaagaaacgtttttctattaagggtctgtttaacaactttgatatataataataataaactagttatcaaataacataatttatattatttcgattaataatctcgtagaatagtagttaaaatgtctctaattatatcactagtggagaaagtaacagagaatagaaatggtaaaactctcagctcaaaattatgagtgaggctgctgcatattatatagccactagacacagggaaggaatattacaagagccaataaatagtctacacgtacagagtttgttaaagcaaaacaaagggaatattgcatatcccaatcctaacggtaaatgcataaaatcacaaagattctattacatcaacactccaacaaatttggaaaacaa

SEQ ID NO: 32932 - DNA, 1607 bp, Cannabis sativa
ttatctctacaagatggattaagatcatcactatctatggattaaggtacgcttccgctttttggcctcttctctttgaatcaacaaaagtattctttagatctatgtttatcatacttataataatatgtaatatgtttgtttgtagaattaaatcatgatattacatatttaatgagtgataaaaaatactatcaatattgtgttttgttgaaaaaaaaaattgtttcattttaattatacttagcagcccatggttttatcaaatcttttttattatattttaagttttaaaaggttttgatttgattgatgttgtcacttttgtgacaatttttcttttattttctttttattatataatttctcattaatttatatatataatttttatttgattgatgttgttaccttgtgacaaatttatttatttatttaatttttttttgatgaaatgagaatttcattaaatttagcattctgaatacataatatccagcagatctactggagcattagacacacagatgctacgttcagataaagaccgagacaacctagcaacaacatgtgctagtcggtttgctgaacgttttacaaaatgaattttgaaagaaggaatagaagataaaagaatttggcaatcatgaacaagaacaccaaaaaccgaattaagaggaatactgcttcgaatagcttggacagaaagtagactatcagtctcgagctcaacaatgtgccagttatgactgttaatccagcttaaggcttccttgatgccaatgatttctgcaacttcagttgtaaaggtcctaggattacagccagctttgtcgtcaataagaatccccgagttgtttcttgtaaccatgccataaccatatctgttctcactagcaaacgtagcaggatcaacatttatcttgattgtgtttgtatccagtttagtccattgctcagccccatctccattattatggaaattaatggaagataaggaattgttatactgagctttaatccaatgatcaagagatattcgtgctgaagctaaaacatttgcaaccgtgagagctttgtttttccagacaatagactttcttgctttccaaagagaccaataaaccatagccatctggaaaacacgatcagcatcaagtttgtgaaaaatgttatctaaccaggttggaaaggagtcatcaagagcaattccagaaggtagacccatagaattccaacagcatgaagcaaaatggcaagaaagaagagcatgagatatagtttctggagcagaatggcaaactggacaagtggaggggatatccacatgtttaattctgagattcaagcaagttggtaagaccccagatgcagcccgccagagaagattcttgacctttggtgggatcttgagttgccagagatttcgccaaaaccctgagttgttaacacctgaccttgagtccttatggtcttgaagcatacagtaggcacttttgacagagaaattcccagaatgttcaccagaccatgaccaaaaatcaccagaagccgaaaagctcaaaggaatgctaagaataagatcagcatcacggtggttgaacata

SEQ ID NO: 32933 - DNA, 1078 bp, Cannabis sativa
catgtttttgattatgcagcatatcataagcacttttgatagagaactcaccagatctttcgccagtccaagaccaacagtcttcgacagatgaagagcttaagggaatgccaatgatcaactatgcatcgcgttggttgaacatatccttgacaagagagatatccatgcattacaatgcatttcaaagagagaactgaccatttggttagcaaagccacgctcagaagaagtgacatacgtgttatcagggtcaggaagccatggatgcttcaatatggtggttgtccttcctgtaccgatagttcttctaacaccaaggttgacaagattttaggcaccccagatgcttctccatacaaagctaggattgttgcctaactccgcattaaggaagtcagtgttggggtaatacttagccttatacacacggcttacaagagaggttggagcgcataacaaccgccatccttgtttagccaacatcgcaagattgaagtcatgaagatgacgaaatcccataccacctgaatctttgtgtgtagccatgcggtcccaagacatccaaataataccattccttttggcactcgatgttttccaccagaaattagccataatcttctctatttcttgacaaatttcgagaggaataagaaaaacactcatcgcataagttggtagggactagagaacagtttttaggagaatttctttactagcacgggaaagaaacatgccactccagctgttgatccggttgataactttgtttttgagaaagccaagaatgacagttttttttcctaccaattatgttaggcaggcccaaataaagagagccatcagtagcttcaggcatgcctttttttttttcaacttttaaaaattatttttcaatgaaataaaatttaaatttcggtagatttttgtgtagaatcttatttttcaaataaaaatctaattatcaaattaaaataaatttttattaatttaaattagttttagatattagtaggctttaaaaaaattgattttttttttaacaaatttgctattatcattatttagaaattcg

SEQ ID NO: 32934 - DNA, 2220 bp, Cannabis sativa
attcttaaacaattgaagaagtgtgagtagtggtattccagttatgatattgaattgatagcagtggcttttgccttggaagtttggcgttttacccatctggtaaaagtgcgaagtctacacagataacaagaacctcaaatactttatctcttgggaggatttaattataaaacagtaacaatggttagagctagttaaagattataaccgagagaattctctaccaatctaggaaagaaaattgatgatggatgctttaatttggagtggtctaagacaagatttcaccaaagctggatgaagatttaactagagtggggattgagttcgtgattggagaacttgttcctatcacactattgtctgatgtattagaaagaatcaaaatggcccagcagggtgactctaagctacaagggtacaaggaaaagacttgaaactaggtcggcaacggacttttaaattttgtctaaagggattttacgaaaaaaggacagggtttgtgtaccggtcgataaggatatcaaacagaagattctagatgaatctcatgctttaccatactctttaaacccgagaacaactgagatgtatcacgatgtaaaaaaaaagtcctctactaggcatgaaaggtaacattgtggagtgtgtgtcaagtgttcaccttgtcagcaagtcaaggcagagtgtcagaaaccatgtaggaatattttaacctctaaagatacttgagtggaaatggaaagaagtaactatagactttgttgatggattactatagaatggtagggttctatgatactatatgggtatgtaagaataagtgtacaaagtcaatataataatatttcttatcagagcggaatatgattaaagcagattagtgtgctaatctatttgtcaaagaaatagatgaaccctgtgatgctttaaaagtaattacctcagattgtgatttaaagttcatagctaaggctgagagagtcgatgacaagcatatgtaatagattttgaggttccttgaaataagcatcatccgctaaatgagtcttcatataataacagttatcagagtactgttaatctggcattgatgcagtttaaagatttaagttcgtatgttgcttatataatggatggaagagctatgctggtccaaagtatagagatattaaattccatgttggggattttatctttcttcaagtgattccaatgacgggaatacggaaattgggaagaaaggtgaagttaagtcctagattaatcggtctgtttgagtttctagaaagggtaggtcgggtagcttatcagctagccatactccgtgctttatctggagtctacaacatgtactttaatgtttcaaaagtacgaggtagaatcgatccacatacggagttacgagaatattgaatttcaaacaaacttgtcatatcaggaacaatcggtatcctcaattgtttagataaatttcgaggacgaaatttctatgaggggatagttgtaatatcccaaaaaatatattgatattttaattggacatgatttattaaatatgtgattaagtgggtattagagtagggtaataatccaacttaaactaagtatgagttgattagggaaataagaatacataaagtgtaatttattaattacggagattatattagaatatgtgggaatcgtagacaccataattcaaataaaatatttttgggcctggaattgtggaacttgacggggaggtcgtaaatgtcatgacagtaaaagatgaattgaattggaattgtaccagactagtttagaactgtaaattgtcagtttggcgagattagtttgaaaagaccaaattacccttaagttgtattttgagctataatgtttaaaaagggtagaatagtcatatatcactctctctttctcttttctctctcttgagccatggaaacctagcaagaaatcagggtttttcttgctaattcaaccagttattagtagatgtaatcaaggttaggggtctccaaggtttggaggtaagttcttcactctttacctttgatttcttaggttttaggttatgttttgattgggttttttatataaattcgaattgttggtgatgattgagttcagagtatatttataagtttaatttatggttgtttaagtatatttgtgttattcttgtttgttgttaggtttgagtttgaaaga

SEQ ID NO: 32935 - DNA, 1887 bp, Cannabis sativa
ccagcatcacgttcaactaagctgtaatagttcttactttgggagtgccaaacaatatggcactaacttcgatagggcgagccatccagattgagacatgtctcctctaattttcataattattggttctagggagtttactaattatgatagttcttctttctcgtcagatgattatggtaatttagttaagtgggagtttatctcacaacaattatcttgtttattttgtacaagtattgacactttatcttttggctcgcagatatggactttgaaatctcctgtccaaatcgggttcaaagaaaggcaagaagcgagctgttgtactggaaacctcttctgggacaaacccagaaccatcgaagagattgaaaaaattgatggccaacaaaaaatgagcccatatggttatcgagttagaggcgccttaagtgacctcttcggttcctgctgctgcgagcactaatgaacaggctttaggatctgttcatcaggttaaattcccgggatcacaacccgagatggtactcttggagccttcttactccttgctaaattctgcaagcattaaaggtttgcaagtttgctcacagtatgccactgcctgttagcgtcattacaaaacttttcaacaagatgactgggatttaataaatgatagcaattttgaaagtttatctggaaggagcaccaatcttactctctcggttagcatgcatctccattttgtattttgatttcatacttctccttttagttatcctttcctaacttagttctattgtaggcatcttctttatcaaacagttggaatttgagcttcgaaagtccactgacaacgtgaagttattgcgaggcaatggaccgattctcaaactgagattctttggctaaagaaggatgctgaagagcagagaaagctcaagaatgcccagaaagctgccaaggatcacctcgaggcccatcagaaatcccaggaagagcttaatgatgccaaaaataaacttgaagaagctgaggccaatgccaaggctagatttaactctgtttccaagcgtgctatctataaggcttggttggcgaatctaaatatggatataagcttcttggaagatggtgctgaggagatgttggctttttgtgagcagaccaaaaaagatgaaagatatttgaagaagaagaagaagatcccactaaatctccaactatttagattttgtttttataatttgaatttctgaacaatggcccgtaggccgaggcaatggtttgccccttgtggcatttttataatatattcaaacctttgctttgttggatgaccaacattgctaatttatatatatatatatatatatatatttattattaagctttttatcctgctatttttgagttattaatgtttgtctattgtgtttttattcacaacaaaatattttcttcgatttaacttaggacattttagggttacatgcatactgttgtcattatcttgttactcaataggcgagtagttaatattctgctatatatatatttttgcaagcagttagtaatatgctacatctttcacaagcagttagtagcttgctatgtttaaagcaaacttcaaatattttgaatacttctattaagaactattttgaatactttttgattgcttgtatgaatagttaatcttctattcaaactttagcctgcgtattacttctgaagacacatttgtatctcgtttagaatacatgctataatcatatgtgagccattatttatttagatcacatataacttcttgttgctttatgagaacgaatctcacttacaactactaatgtcgttttctcttaaagaaaaggcttttcaattcttgactttatactg

SEQ ID NO: 32936 - DNA, 1571 bp, Cannabis sativa
tatataaatattttacataattcgagatcccgttgtaaagttacaaccatttttttaaatacagtagttacaaaagctgtcgctgagcgactatcaaaatgaaacttgcaatatctcgaagatctgaacactccaggtctaaccgtcccgatatgtatatatttactcgagctcactattgttcagtctttgctttgcctttacctacacatataaatatctgtgagtcaataaactctataagaaaagcataaacataacataaaccgaattataatcaggtgcccatacactcaatcacaatcctatatcccgcgttcaacgcgttctaagtctagacgttcgtatgacagtacgattgatcataatatcagtctatactctgtactctagtcgtaccgatgtgatagcgtcaattttgtactttgccaaacatatatccatcggtattcagtgcaaccctatgtacactaataccgctcttactgatatgttacctattagccaatcataaaacatgcacactaaatatgtaaacatatatgcaactattatactaatttaccttaattccaaatttagttgtgctggtcaatttgagtagaaattactaattgacgatttacaggtccctaagtcacaacataagtaaaattgataagtgatatatgctaaattactttttgggaacttaaactcaaaactaaaagttttctattgatagatatagcgtgaaaataccctaaatatcgataaaacatgaaaaattggggtctaaaatctaaaaaatctggtgaatcgaaacctcaaaatggtttactgttttctggggtccttcagaaaaactttgcagaaaacacctaactttgaaaattttctcaaatctaccctaaattctaccaaactctccaaaatacctattcaagacataattaacataatccaaccaaaaatagcagctaaactccctaaatccaatttcaccattaaagacctaagtttgagcttaaaagctcaaatcttgatctttctcaataataaccataaaaattagcataaaccaacataattttcttagaaatagcctcaaaaatactcaaacactactaattcaaacagtaacccaaaccgaaaacatgcatgaaactctaattttctatttaaaaattcaaagagaaaagggagagaagcttaccttaagctaaccctcttttaatctatgaaactgtagctaaacttctttaatttttgatctgaaatggagacgaaaatcccttagttgcttgggattgcttgggccgaactaagaagagaagggaaggagaaggagtttctaatttttggttttttctttaatgaaatctaattgtctaacataatataaatcctatattcagatttcattattgaacaacaaaacaaaatactagaatttccactacaagataacctttacgggagtattctaacttctaagccatttttttgtgtaaaggtcgaatcccactatgaggtctttttttggaagatttgatccaatggctctctggacaacggaacatccaaagaag

SEQ ID NO: 32937 - DNA, 977 bp, Cannabis sativa
  modified_base (117)..(118): a, c, t, g, unknown or other
ctaattgtccactccacaattatactgtttcttaggaaattcacctttagaagctatgcgactggttcttggtcttcctatagtcttgtcttcaggaggtgctatcacttgtattgnnagaatatcttcaggaatgtcagtctattgtgagtttggaagtacatgataaatagttttagcatatgctaacaaccaatattctgatgtgtataactataaacacatagaatatatgagttccccagtattttggggttgtgcctttcctgttgctgctattgcatggatacatggaagtttctcagcatcaaaaattttgcatgtgcaactctttgaccttaaatttactattgcattgagttcttcacacatcacgttgtactcattctcatttaactggagagttatcaatgattatcggtactaaaccagtaccaaaccattcccaaatacaatcatctataatcttccactcaccattatagtccatgcatataaagatatgatccatacctgtcatagagttaaaattttaaattaacaagcgtaaagtaagaatatcaaatcacttagcttatagttattttgaagccatttagatacatttagaaatacatgttagaatctaaaaattagtggaaagcgaccatgtgtgaccatgtacgacctatatggtcgcataatatagttttctagttgcattgagcgaccatgtgcgaccatgtacgacctacatggtcgcatagtatagttttctagttgcactgagtgaccatgtgcaaccatgtacgacctacatggtcgcatagtatagttttctagttacactgagcgatcatgtgcgacctacatgatcgcgcatggtcgcatagtattttttttttatttttactaaacgaccatatgtgaccaaaggcaatcaaattggtcgcacatggtcgcatatcacaggtcatcttcaacctcgaactggagtt

SEQ ID NO: 32938 - DNA, 1893 bp, Cannabis sativa
ttttttttttttttttgcaacaatcaaaaccaaccgctatgttaaaaaaaccgtaaccgaaactgaccaccaaatttggcaaagacgtggaactgaaaatttagttacggtttggtcggtttgatggtcggttttggttttttcgatttttatgaacacccctaccttcaaatcacccatttaatcttatttacacccaattaagagatggtaacaacatgaggtgtagggtattgaagttcaaagtgtgtaatcctaaatactataaatagaaattttggttcatctttttagacataccactcttctatcttcaaatactaaagctagagagttcttagatgcttgataattctcagaagtatttctgcaaaaccctgaatattctataaagaggaaaataaagctttttggacaaacatgttgaaaccttattcaagcttttagtgatcctctttcactactttagatttccttttttttcatctatgctacacttctatctatatctctcatatatattatatacatttatatatacatagggtcggccctgaaacaaagtgggccatagggaaaaaaaaaaattgggtccttatgttaaaaaaaatgtagtatttttcaaaattggtaaaagaatgtataaatttaaaagaggaaaaaaaaaatttgggccctggactgggtgggccctaggcacaggcctagcccgcctatgcccagagcggggcctgtatatacaccataccatatatcatatatattttcatttttttttttacatttatatgttgatgctttgagttataattatagtcttctaccctttctattattttctttatttgtatttgaactttgagttgtaacactctattttacatataattttcttgttcatcattcattcttccattgatttatctcatatatttctaacaattaaaaaccttatctttattttgaatggaaggagaaacaatcaagattgatgagccaagttaaggtgagatatcctttggaaaatttacatgatatattaacttttttcaatttatttttcttttttactgtacatatttttggattttatacggcagtatactgctttttttgttcaaagttttttattttttttgacttacacgtatttttacagtattttcccacaccaaaatttaaagtttttcttttaataaaaaaattgattgaggcgtgggctgtcacaaaagggacaagttctttacttttttgatttaaatggatgttgtcttcatatactgtacactttattcatcttttttttatgtgtttttttaattaaaaaaaattagtaaaaatgtttgatgtaatgttgcttatcatattgttggcaaaccggcaaaccctttttttttttttttaataaaatcaatttctttaaaaaaaaaatgacaaataaggcacaataaataatgatttgaaagtgattatcacatctcataattttttttttaataagaattaaaatttttaaaaagagtgatacataaaactccttttaacgttaaaaatattggcggcgaaactacctgaactttatattttgtaacacttaatcacaaaaaccaaaatttcggcgtcaaaacctactgaactcccattccgtttttctctgtaccccttcgtcaaaaaatcatagttaagtgcaacggtagactgtctgcgtgtacacacttatacacgtgacaaatttttagtggtccacgtaatattaattttaaaataattaaaaattataaaaataaataaaatctttttataaaatcttttttttttcttttttttttctctttctctctcttctcgacagacaccaccaccaccactaccactcctctctctctctctctc

SEQ ID NO: 32939 - DNA, 1899 bp, Cannabis sativa
  modified_base (48)..(57): a, c, t, g, unknown or other
tttagaagttcatgtttaggatgtcaaaaacatacttgttagtaaatnnnnnnnnnngtaaaataattccaacaaaaatcaacatgttctctgtttcctaatactttgtaatatgattatagctaaattaagcttgaagtttttctcaagcacacagtaactaaacatcaatttcgagttgtcttaagattttgttcttaaagtttttaaaaattatttttattaccagaaaagaaaaaaaatcaatttcatataaaatatttttaaagtaaacaacattaacaccaaattttcatgtttttgcaacattaatcaagccatttaatgaaattcatagttaaaccactaaatatcaaatcaattcatataaaatgaaattcagagttaatcaatttaatagcaactaaattcacagttaatcaattcaatagcaatcactctttacaattcattgtttttgttgtttgctctttacctctccaagaatgttgtattcatgtttcttttttgttgttgtagtgttttgttgctggtgttgattcagtctagagctagattcttgcatgtcctcctgttgtgtccttttcttccacatttgatgtacttgttttgtatctttatctcgcattttggtcttgttcttttctttttttggtcttcctgctttcaccctttcaagtggtggcaacattttaatatctttaatttcttgtggaatgttccaattatgctaatttcctactgggtatacggttgcttcataggtttctagccaattttttgtgttgtaattatctgaacgataattctgtggatcgaaatacaactctttcatcactgttaaagcatgcgcacatgatatttcatcgatttgaaacctattgcatgtgcatattttttcttctagattcaccaccaatgatctttttactttgtacacttcgaacatgtgttcatttgatgctctaacctaagaacaaatttattttgtatatattttggcattgtaacataaaaaaaacattaatacaacatgatgtaattctgattactaaaaatcatgtacctttaatttcaaagcagctttgtaattgcccttcatcttcatctcggcagctggagttaattttatgaatgttccatgtgctattttcctatttttgcatgtccactgttggattaaagtcctcaaagcttccattagtgttgttataggtagttctctagctgtcaggtttgctgcatttaataattcagtaacatttgatgtcatggtactgtatcttttatttttagaataaaatcttgaccatttctcatatccaatattttgtagatatggccgaacccgtttgtctaaggcgttgagctctttcatgtgatatttgaatttttcagcagtgtatgcctttggtgcacgagaaaatagcttttcaaagaaccttgcatttttttttttttgaatgttctcttcaagttgttgagtaggtgatacacacaatatccatgttctactttagggaagattttttgagctgctttgattatactttcgtgtctatcagatataacacactgttcttgtctaacaccaaatgtggctcttaatttttcaaagagctattcccatgagatatcattttctgaatctgccacacaaaaatctaatgggaatattttacttgctgcattttgtgcactagctgttagtagtgttcccccatatgtagcttttagaaaagtttcatctactagtattataggtctgtattttttctatgctttcaatgaagcgcttagtgccatgaaacaaaacaagaagttgttcttttcttcagtttcaatgtgcactacagatcctgggtttgttttttggagcatatagatataactaggcag

SEQ ID NO: 32940 - DNA, 1608 bp, Cannabis sativa
gatccactagttagtattactgctgccaactgattgcttcctcaatcgatattattatcattaataatttgcttttcagtgagaaagaaattagtactggtatgtacatgtactcccgtaaacatatgatatttgtttggtttttgtgttttaattgtttgatgcatctatggcttcctcagtctatattattattggctttggaattggataagtgttaatgtgcataaaaacatttgtttgaaatttcatacaaaaacttttttttttttttttctgttgctatgaatcggtgggtgtggaccaattatatgtataaatatcagatatgattctatattgtctgacattaatgaataaatatcatgcactttcgttgtttcatggtgtttataatttatttattattttgttgaatataattagtatatatgatggtaattacatttcgtttgcttgggaaacaaagttgatttcggccatttctcgtttgtatttataatcattagagcttttgcttgggccactcagttgcactactagaactacttcattaaatacaattgtgaagactagaagtgatcgatcctctcattctctacttctgtaattcagagttatcaatgtttggttgagttgggtttcttttgtattcttaccatttattatctctatcaacgtttttcatgaaaatatgtttgcagaatctactgagttgtttgtaatgggactaagtgagcttaatataaagtgtgaaaggtggacagaagttgtgtgcctgttaagtgtttgttttaattactcaatgacatgtgttatttatgcttacagtttaggagcaaatagttagaatggttagcctttatttgcaatgagtggaggagacataccaaccaatattatttagctctctagttagaggatactttggtaggttttctgcatgagaaatgttgtaatgcttatttatgcctggattttagttatttgtcatacaaatgaaaataatgaacttgacttttctgtccgtgactaacaggagcacaagcataataacaaaaatgtgctttatcaattgtatattttttttattattgtttatagttgaaattgacagatttttaagttaataaaatagacaaaatgttgtttgatttttttatagatgtaattattagattttagacgtttttgcatgcatcaattttgatatagttgagaatgtggtgttaatgtaggtccttagtgaacatactcaaaaatcaagctcctccttcaatatcttcaaccccaaaaatctgaattctgaaacacacaccagatttgtgcaccttgacttcacgcctgctgcggagggaggagagggttcatggaagcactctccggttaacaataagagcttaaaattggacagagctaaataaaataactgtttttttttctgggctgcattacattagccaaccatatggaaaatcttggaaatgttctatcaaacttttgcttgttaatgacaatttctgtgataatcatccctcatcttgggtgctgcatagaatcatcgttggtttcaagcaaggtcagtgatcccattttttttaaagaaat

SEQ ID NO: 32941 - DNA, 1923 bp, Cannabis sativa
  modified_base (1628)..(1632): a, c, t, g, unknown or other
tcgatcctaactggcatagacctaatgcacctattggagataaccaactccccactagggattagggttcaaaaccctctttcaagtatatcacagggccgacccaaaagatcaattacccgtgtagctacatatgagcgtgtagctcctgaatcaaataatatagtatataaggagttgttgacaaggatctgacctatcaccacagaagaactggctgcaacatcagcttgggtaatggtaaatacccgagcaggtacaggttttagctctgacttcagatcttctttctttgcctcagggaaatctttcttaaaatgccccaccatgccatacagaaagcatgtcttccaattgcattctcccggatgatgtttcttacaatgtggaaactcaggataagaataaccctggcatccaccactgccttggttcccacggaaccgcttactctgcctcgaaccatcaaatgccggggtagctttcctcttctgatcagtggtggaattacctccatccctaccatatacaggagtaggaaaactgggggttccaccaacattcggagtcacttggcgctcctgatggaatttaactgcaccctcagctctcagagctttttcaaccgtttcagcataagtggttgcttcattggtagtgatcaccagatcatgtctaatcttcatattcaaaccgaccatgtacttttctttcttactaaaatctgttggcacaatacccacagcgagcttggccagacggacaaattttgtagtatattcagtaaccgacatcccctcggtttgcactaattcgttgaactctttccgtttaacactacagatggcttcattataatatttggagttgaacaactcccggaattcttcccaggtcataataatgacgtcgcaagtgagggttatcaactcccaccacacgagaacatcctcctagaactgaaatatggcgctggtcaaccgatcatttccaacaacccacataaaatttagaattcgctcaatcactgtgagccactgctcagccttcatcacatttggacctcccagaaacactggaggtgtctgcttgcaaaatatttcgtataatggctccatacggttgccagcaataggttgttctgctggcaccgctagaactgcaacggcctgagcagcttggtgtggaggcacgacaggaagaccctactgccttaatctctgaatttcttcatcttgctagcggattcgatcttgcatttatgtaaacctctgcccccaatctggaggagcttgtggtggatttataggacgaccaccctgagctctgccacggccacgaccgtaaccacaggaattttgagggatttggtttccctgatcgcctctagtctcaaccatatcaccctgacttcttgcatttcgctgggcgtccattttataggacatagcctacgaacccataaactaggcaggttagacagcgatcataaaacttgataccgctcttatggacttaaaggaaacacacttaaattaaataattataatcaaatatgcttctgatcatgctttaataatcatttaaaataccaaataagtatgggcttactgaaccgtgaaccgagnnnnntctgatgaagattgtacatgtcttagcaagcttcggtaaacaaacctagcggctctgataccaaaattgtaatgccctaatgctaaggcacgctacagtgctatctttgctaatcaaagatttatctccaaaaatgtgtcaaattaaaacttttgtaataaatattaaactttaggataaatggcggcaaaacccccaatactttcgttttggtttcactaaacccctgaaacccagatttctgcgggtaaacccccaaaaccaggaaactgttagcaatttaacacttcc

SEQ ID NO: 32942 - DNA, 1406 bp, Cannabis sativa
aattccacacatgtccatcctaatacttctaacctgcctcttatccctgctttacccactgccactacacagatatccaacatacatcctatgcaaactcgctctaaaaatggcatcactaaaccaaaaattttagcagctgaattgactatgactaatgatgattttagtgaaccaaaaagtgttaaacaggccctgcaatcaccaaggtggaataaagctatggataatgaatactatgctcttaaaagaaatggtacatggacccttgtaccttacacagatgatatgtacattgttgagaacaaatgggtttacaagaagaagttgaaggcagatggttctttggacaaatgcaaagccaggcttgttgccaaaggatttcagcaaacacctggagtggattactttgatacctttagtcctgtggtcaaggccagcaccatacgaattatgttcactcttgctgtcacttttggttgggaaattcaacaattggatgtaaacaatgccttcttgaatggagacctcaaacaaactgtttatatgtatcaacctcaaggctatgtagatgagacctaccctaatcatgtttgcaaattaaataaagctatctatgggcttaagcaagcaccaagggcgtggtatgacaagctcaaacaagtcttggaatcatggggattcacaaattcagtttctgacagttcattgtttttccaaaataaaaacagtcaactgactttggttcttgtgtacgtggatgacctccttatcactggtgctaattctactactatccaacaattgattcttcatttgaatcaacaatttgctctcaagattcttggaccagtgagctacttcttaggctttgaagtctcaagacaaggttctcaacttcatctgtgtcaagcaaaatatgctcatgacattcttaggaaaactaatatgttggattccaagtcgtgtaccactccaatgacccctggctacaagttaactacaacacctagtgatgatttttcagaccccacactctatcgaagtactgtaggtgcttagcaatatttgactctcactcggcctgacttgtcttttgctgttaataaattaagtcagtatatgcaatctcctactctagctcactggtgtgcttgcaagagggttctacgatatattcatggaacattaaatcggggtcttgtttttaaaccagctaagtggctttctctggagggattttctgatgccgactgggcatgtgacatcattgacaggaaatcggttactggtttttgtattatgttaggaggcaatttaattacttgggcttccaggaaacaaaaagcagtgtctagatcgagcactgagtcagaatacagggccttatctactactgccacaga

SEQ ID NO: 32943 - DNA, 1782 bp, Cannabis sativa
tcttcgcaagagttatgttcaggaacagaggcatgtttttcaggggatggtttgacaataatgccatccaaagcttttcttttacgagggcctgctaaatgctcttggactctaaagtcattaatgtccattaagggattaagcaaagtgggctctctgaaaaatttatccacagtaaggccccccatcaacaactctcgggcctttggctgggcccaacattctgttgaaggccagtccattgggatagcttgggagccgagtagagaagtgtaataagtatccttttccttgggctttctaattggactttccatatgggcctcactttgttccgaagtaatagagagagaagcagtggttaactttgaatttccactgtcctcttgatcaaaaagagttgtctgcaattccttatgattaacggcttcgttttgcttacccagatgaggcaaattgtgggaagaagcttgagaagtctttttcctaacccagctgggcgttggactgttgcgacttgctgcatatttccttgtcaccattgcagtagctggtttatcattggaggaggctcctgctttatgttcagctatcttcttgagttcttgcaggtcttgtatggaaactgcttttgtgttgttgccaaaaggggcaatttctcctatacccggcagactaaccaacggtagttgggtaataaccaacgatgcttgggaggcttcctggttctcctcatcggagacgatccgtttctttcccggaagttgtcttctgcattctctgagctcatcggattcaccatggcgaatcgctttctgcactttcaactggtttcggagtgcggggtccaaaaaaatttgtttttggagtacccagtcttggaaccattttgctaatggagttgtgaacgtcgatctttccggggcatcacttttgaaccaaaccccatacattggataaaagttgcctgagttatccttcacgacagtgggcgtcttaaaacaaatgctttgatcatgtgtaagcagcccacatttgaaacataactttggtaacctctcatatttatattgaatccaaagatctttcaagttttgtctccttaaaaagaacccggagaagattggtttattaaggtcaatagtggctctaaatcttagagtactcataccaatcgcatcctcgattcccaggggaagttcatgcactggagaagctcttgaagccatctccttcaggttagagcgattccaatagaacgaaggaatgctttcaatttttacccagagcggagttttatcaaaccttatttcagtaggggttagccaagctggccaaggcattatcactataagagcaccacaaacaaaccagggatggcgtgcgaggacattcatcgcgtcttcccgtttagcaaaggtgaactgtattattcctccttctatttctttccacttccatcctgaaatggcactccatgataatttcaaagagccttgtattgcagctttacctaatttataccggcttagaatcttgccaaccagcctggttcgcttcttctggttcatcaacctcaccagggttgagagtgaaggtgatatcatcaggggctatttgcaccgcatccttgaacagttcactaacttgagcagggtccatgatggactttgggacaatgtagattaacagacaatcagacagcaacaattctgtagacttccaagaagttagctcctagagagcattaaggcggttattctgtagacttccaagaagtta

SEQ ID NO: 32944 - DNA, 6182 bp, Cannabis sativa
  modified_base (55)..(60): a, c, t, g, unknown or other
aagttagttgttattgtaataaaattaattagttgttttattttaatttaggtannnnnntaaaactaatgcaggaaaaaaatacggatttttctgccattaatggcagaaaaatatgtatttttttctctttttttttttacattcccgacagttttaaaccgtcaagaagtacacattagtgacagtttacctattttgtccgttttacgatggtcgtataggcgacggttatagaaactgacgggaatactttaaacgactgtttaaaaatgttgggaaaaactatttttgtagtagtggatagattttactatccgatccgatccaattaagttttagtcatccaatcgatccaacatccattggatgttggattggatcgattctatctattggatgtattccatatatatttattggtttaatttgggtttatttaatatttcaaacctaatttttttggaacgaattggatccatctaatattttaggtctattatatattggattggactggatccatccaatccaagaaaaaaaagtaaaatattaatgttaattttcataaatacatatagaattcacgtataacaatataaaatccaattacttatccaaaataaataaaaatactaattaattttattggatgttggatgtattagatttttagacaccccatccaccatctgatccgatctaattggatatttaaaaataacatccaattcgatccgatcataattggatatccaatgtatgttggtcggttgtaattggatcggtcagttctcattagattggattgatttatgcacacccttactagtcttattcatcgtagcaatttcacacatgtcaattaagaataaaaaaagaaaataaagaagaaaagaatgttgaaaactctgttgaaaaagccttcttgattgattttgctctctgatttttgtacccctagattacttgctgaaaaatatcgaaattccactctttttatagcaaaaaaaaaaaaaaaaagataaaataaatcatctttttgaaaattaaaagggagggccgcgacactcaaatcctatattgcagcccgtgtttccaaaaattcacgcctcatttgattcccagacacaggcctaagcataggatttccatgcctaggcataacacccctaaatttaggcagtgagctttctgctacgtcgacgaataatattttggccataactctttcaatattgcttagaattggacgattcaaaatattttggaaagataaaagagaaatttaaaacttttattcacaatatttttcctaaaagtaaacgcaacatagtcaaaaattcaattgaagcttcaagcttaattttcaatcacaaacggagcgtgttgagcatccaaaacttagaatttttcaccaattatattttaaaactccaaattctatgataattcatcatatttatctcatttaacatattttttttctcattttcaattcacattatgaatgttaccatttaaacctaaaacaaatagaaaacaagcataattctccacaaaatgaatataatcaattgaaatatacatctaaaacactttataaaatgtacataaaactagcctatcaaatattttgatttaaaaatcttttcacactaacaaaacaaacaaactatatttaaaaaataatacaaaaaatcaattttgtcaattttatcaaatatgtacttgtactaaattatactttcggaatttgaccattaaaaattcattcaaagttattgaaattgtttaattcaaaaaattctttccaatttagtttaattttactaatacgatgattgtctatttactaaatcgtgccctcggaactttgatatctacaaaattgtgcctctgaactttgataccaaatcacattccttgaactttttgttagtaaaattggacaaaaaatttttaaatccaacaatgttactagtttgggaaattttttaactttttttaaaaattcaatgaatcaaatttgatacatgtaaaagttttgggcaaaatcctaagtctccaaattagaaagacaccttgcattttcaatatttttttttgggtaaatatcattttggatcctgtgtttgtaaaaattatcgattggaccctgtattttgttaaatgacaaaattgatcctatattttctaaaatgttaaaaataggattttgagcttaatttttgactttttttttttttttttgtatatatataaccaatttaaagacaattcttaatataaaaagtaagatattaaacatttttgtcacaccattttattttgttatatacttctgtcccacccatcggatcctaaggcattctcggagaccaccttgcattttcaatgttaattttaaatatgacgatgtatttaaattagaatagtgttataggccaggttacatcacaccaaaaaatgacagtaccttcaaaatcaaatccaatagccaacatacttagttacatactaaatggtagatgactttagataccaatagcaaatgaaaaaatgtcatattgtgagtagcactagctacaaattttgaacatttcccaatatcttttcttatcattattatcaacaatagaatttaatcctattatatgtagcctaataatggtcacacacggtttctgtctccagccaatgcctaccttccaaaatcttctgtctctttccttcttaacacaatattgtagagaaatattaaaggataccagcagtacttaccctcttatgtgtaaatatcgctattagtcaaattaagtattggattttatatagtttaatataatagctttgagagagtatcgctagtcaatcgcaacgcagaatgtcaaaaaggtgctaagtactactagtacctaatatcaatactctaatatagtattattgtaaaagaattgctataaagtactactatacctagtaccttttttgatataatattgttattagtataatttataaaaataatttttaaagaatatcgataatcaattataagaagttaagtataaaaagtgttgtacactattagtatttaataaaataagaaagagaataactattaggtaccaatagtgtctagtatttttttatatgtggtaatcaatattggtataattaagtattatgacttatataatttaatataataatttttttacagagtatcgttcatatttaatatatataaaggtgccgtggccaatagcaataatagtaatataaacgcacatttaaatatttaaagaggtgaaggtgaagttttctttgccttcccaaaaataaaaattaaataataataataaaaaaactttacttagctttgcaatacattacaatattacatatatagatatatatacacataatatattttacatagattcaccgccactggcgagatatatatctctgggtttttcctttagacgaatttagagttgtcaatggagaatttcttttcataattattttctcactgcattttccaaacaaaactcgtactgttatcttatcttttaagcttatttggagctcttccttttcatggcgatttcagattcgcctgaaagcgtaggtaccaccgttaccaactccatcgatactaatcacaacgacgtttcagatctcaaagtctcctcgattcggaggagacctagcgctggcgttacagaagcttcatctgattctagttcagggaccagctctcctcttcttcctcttgacgccgataattctcttaaagatttggttgccgactcggctagtgatgtctcttccgttggccgtgtcagcgacaacgatggagatcggattcccgccgtggactttgccacggacgctgttgatacgaaggagagcccggagaaggttcgtaatggtgaggatcaaggacatgatttctcggctatgaaatattcttacaggccgtcagctcctgctcatcggagagtgaaggagagtcctttgagctcagacgcaatcttcagacaggtttaactttgtatttatttttttacccgaagacgaaactattatttgagtagaagtttttcaaacttgaattctaaaagttcatagaggttcaattgaatgggggaggatttgaatccttggggtttagggggaatacttattactagtcgagtatagttgagttgattttattaattaacgattatattttgatggtcgtacaaatgaatgcatgaatgaaggaatgattttgccaaagtgtcacgaatgtatgttctatgtagactcctgtttgtgaatgttttcttcataatgagttacgataaagaagtgtaaagttcgacgagttcagtgatgcttctattgaaatgagtttgcgttctattgaattaggatagaaggattgctgacatattatgttaatttttgtggcagagccatgctggtcttttcaacctctgtatagtagtacttgttgctgtcaacagtagactcattattgagaatttaatgaaggttggtatttaaatttaacatgtacagttatacatatgacaactaaattatgtcaaggcgactcctgttatggtaaaggtttatgcaggcttactcaatgttggattaactttattgattttggactgtgatttttttgctaaaacttgtggacctaggcctaattacatttatgtggcatgtcttctaactgttgttgcagtatggttggttaatcaaatctggcttttggtttagttcaacatcgtggcgggattggcctctttttatgtgttggtactaattccatgacctttgccttcatctttacggttgagaatgatataattagtgttaatgcctcagggcttttagtttagttcagtatcatttgaccagatgtttttctgcatttctctgttttatgcagtcttactcttccactattcccacttgcggcatttacagttgagaagttcgttcaaaaaaagtacatatatgagcctgtaagtgatcctgttctatctactttgataagatttctgcacacaattcttgatcttgccaactggactttaataattaaaattttgctttgaaaggaacagaaaaagaaaggagagtagatattcaacgttagtgccatttctatcatgctttccacacgctgctttttaatttccaagatatgtttaaatttaattgtgttttttaatatttcaggttgttgtttttcttcatgtgattattagcaccacagcaattctgtgtcccgtttttgttattctcaggtcagttaatcattgcttgtatgttaaatgtgattacattttttgctccctagtatctaaaccttctgttatagttagtctctgtaaaatataccctttccggagactatctctagtggattgctggaaagaataactcaatacattgttcagttacatgttttgcatcatcatttgataaggctgacaatattgaatgtgctttattgaattaatgacatgcaggtgtgattcagctgtactttctggctacgcgctgatgatgttggcctgtattgtatggctgaagctggtctcttatgcgcattcaagttatgatatgagagcactttccagattaattgaaaaggtattcaatccataaaatttgagctaaaaggaatttttcctacttatattatagaaacgaatgattgaagaaaataataattgagtgtacagggagaagttctacccagttcattgaatgtagattacaattacaacgttagcctcaaaagtttagcatatttcatggttgctccaacattatgttaccaggtattggttcacgctcattataagagaggggtcttccatatgacctttttttttttaagtttatatattactttttaaaatagataagttgagattgaattatttgtccagcttttctgtattgtatatttactacttgtaattgatttttgtttccagttgaattgattatatgatgcattttctttacagccaagctatcctcgtacagcatacattcgaaagggttgggtctttcgtcaacttgtcaaactgataatttttacaggagttatggggtttatcattgaacaggtaactcaggaattttcaccccct

SEQ ID NO: 32945 - DNA, 2710 bp, Cannabis sativa
ccctacaaatctcaggtatggtgtctgttatccgttaacggtactcgactgcttgatatgttcggggcttgctgcggtgatcttcagatcaaggttagttgcggtctctttcgtattctctgctcttggaattttggactttcgattgattattcaattttattttatagttgatcaaagacccttttttttttcatcttttggcgatctttgaatcctgggatttttgttatgctactgtgtcttgtagtttaagggacgactcatttgggtagtatgccacgtgatatggatattgctaaagtctatagctatatacccttgtgcttaggtaaacatttcatttcattatctcttgagaaaagaaagcttctcctgaagtaagagatgctctgtttggttttatcttgagaaaagaaaggttctcctgaagtaagagatgctctgtttggttttctcttgagaaaatgaagcttctcctgatcatattcatcctgtgcatttgctctgtttggttactgaagtaagagatgccatttttttgggttttcgattaggtgtatattgtttgtttgttttcagttgatttgtagttcaatctttttttttttttttcattcgatgtttttggtcaaactattgtaaaatgcgggtagaaggacaatattttaatgtttgagctttgaaattttttattattgttgttgctgacaaaggtgtcaacgtcatgcttactagaattcagatgatggctaatagaacagttttagcttttcgtagataatgagcttgtgtagagttatcattacctaggatttttatttttctacaaatgaaaagtttttcttattcttaatgcgtgtgtgagattagttgggtgatagcactagttctctattttactgtaaattatctaaagtttttctttgtgtttatgtgctatctgtacttggatgatataaatcaatgggaaatctcgattaccagttgatagcactagttcccaattttcttactttgaagaaaggaatcaacataaatgcaatttgtaatttattcagcctatttacatactattttttttaatccccttttcaaaggtttgatttcattatctttgttggaaataagctcccaatctttgcaacttacagttaattgtttttatttttgtagtaccatctcaagagacttgaaaggagcaccttttgggtaaggtttttcttagtctcttatgtcttgtacatcttgttttgcctgtttaattttaagaaggaaaaatcgtaaagcaagagaagcaactctttttcttgttcttgctttgcctcccaattccaaatggactagaacaaaaaaaagttgtaaagtctcactcatagacaattaattttgtttttgtctagatttgctagtaccccatttatgcatttcattttttctcttttgtacttagacgcacggatgaacgcacaaggtcacacttttcaaaaacccattacaatcatggttttttctctatgtatatccctagtcacgcaaatgcaacttagctttttctcaatgaaaacaaactattgtggttttctttaatattattcttatgtagtttcatattttagaaactacaatccaatgttataaagattaacagaggcatccaaaagcacaaaagaatacttacttaagcattaggccaattccaaataggtaccgctcccaaccaattcctcaattggctagcccctgtatccaagaatcccttcatcaccattgatataacatatcgatgatcgaataggggtcgtgtttagatattcagggtcatataatatcagccccttgtcatttcctgttgtagagtgtattttgatgatcgtatacaattttgctatatgagttttgttcaattctcttggttttgatttgggttttttgagtttttccacttttaatgtttcagatctttgaaatttgctttgtgtttttcacacttttcaaaaacccattacaactcgctatcaaagtttttgacaaatattttttacccatagttgatcgttcgtactaactcctttaaaaatgctacagtgcaatctattatttgcttattgttgtattcttttcagcactagtagtctagtattcttgttagattacatacatattgccaagccactcctcaaggtcattgtttttattttaatggaattgttttcattttttaatggaaaaaattgtaaagtttttcttcttttcagaagcgctcttcaattctgttaagttttctttgactacgttaaaaggatttgatcagccatggcataataaaactgaaggattgataataatgaaagggtaaatttctctctcttcaattttattctctttttgttttctgcttcttcttgtttataactttattttgggttattttcgctcaagttgtgaagaagagtctccctaagcccgcatcgtccgagttcatcaagtgatctaatcctctgaatttaaagtttcaatcgatctgtacctatctccactcaacaaactccagtaatttgtcaggctgcgagtgagtatctctgatcttcaagttgttgtttgaggtttactgtttgtgctatgaacattgttagtgttgtcttttttgaggatttcaatctctatttagattattagtcagttatataactctgagttctaaattagc

SEQ ID NO: 32946 - DNA, 2155 bp, Cannabis sativa
atttaatatgaacgaattcaccattagaaatatataaaacaatgtcaatggaatgggataaacactacctatagtattgatgtagtttttccccttttattagattgtacctaatttagattgattgagagctctagatctatttttagagatctacattttacgaatctgatagttgatattaggaggatcagttattcgcgaattaaatcagaattcagggttgaattttaattttaaactattttttctgctctttctttcatcaatacgaaacatttgtttggattgattctggttttcttctcaggtgaagtcactagaattaatggtggttttccgcctggtttggtttcgtttaggttgtcattctgggttgatcgatcgaagcttgagacagtgaggtttttggttcgtgcggctgaaggtttagaagaagatatataattgtaatatttagattgtgggctgtataaatatttaaagggccgacccactgtatttttgtaaaatagttgcattttttgtataaacctgaaaaagccctatttttttagatatgtacaatgagtttaaatttgaattgcaatgttaaaaaaactaattctagtgaaacggtgtgttttatattacttttgccaaattactttattagttttcctaccattatcaaagtaaaattacttttatgccctcacagttatatttatctcttacaccaattacccacaacaactcaaaaaaataaaaataaaatcgacatctttaaaataaaaataattttaacaaaactaatatagatatatcatgatatttaagtaatttgtttctaaatcgtttaaaattaatcaaaaaatatagattaaacattaaaaatatgaaaaatataacgtgacaaaatataattaagtacaaagtaatgtaaaatggttatatttttactaaatttaaaataagaacatttacctatgtactaattaagggtgtacgctagtttgtttagtcagtttatggtacattttattcaatccaatataaagattaggttacaaaaatctaagtgtaacctgtccaattaagaaaaaagaaaaaagtaactcgcccaatgaaattggtcagtttggtcatgttaacccgtccaaaccgaccactaatatttttttttatttttacattcaattgtaacattttagttaattgtaataatgagacagtaaatagatatattgaattttgaatttaaatcaaccacaataaaaaaaaaatattagtttcaactttatattttttagggatatttgcggcataaatatgataagtttttggttttatacacttaaataccacatgtttgttttcgacggattaaaatttttaatttatatttccgttactttcgtcactacttttctgttaaatcctatcaaacatagagtatttgtagcataaatacttgatgttttaaatttcatacacttatatacaacatgttttttcttctagcagattaaatacttaaagttacatttatattacctttatcactacaagtctcttaaatcctattataagaaattttttcaatattatatctaaaattgattttatttacaaaaatatattcaacaaatttatttgcacaaatacttacgtgtcacgccatctaattttattggttactacaataaatattataatattgcatatttaaaaattttccagtatctaaataaatttactttaaataagtaacatcaacacatcctacacagtagagaagaggtcatttttaaaaattttagtttcttataagttattgtagatattagttgatatttaaaaattcgattttctagtaaagaaactaaaagattacttttgattttaattattttttccgaccacggtaaaaaataatatgcttcccatatgttaaaatgatccccttgaaaattagattgcggtgatataatttttgagctcaaataattaccgatgtaacaaaaaaacttttaaaaaaactttttaaactttttttaaaaaataaaaaagagaaagagttatttttttaatattaaacctactacttcactatttaggtggaatgaaagtgaagtgaccaatgaaaatagatttatttatatatttattaatt

SEQ ID NO: 32947 - DNA, 1467 bp, Cannabis sativa
tgttgggattttacagtcctatccctacacaaagtcaactcacacacacaaaacacaaggtcaaccttgaccttttacacttcagcaagtggacacaaactggccacgtatcacacttataatttgacacataacatagattaacatttatctttaccaaaacaaaactcagaaaaattgatcaggtttttctttgcttagtttctaggttatctttatcaatgtcagtatgcaaagttcaaatgatgaatgaaaatagattgtgcagatgagtgatcgagaagaagagaatcaaacacaacaatttatagaggttcccccttagttgatggggtagtcctctttgagctcgcctcagaacaagcaaacccttgcactatcaaaaatcaagatccagtacaagctttaatgaagcttccagctacaagatcaactggtaagacttcgatctttcctgctatgtatttctctctggtttctacttctatctctctctattcacacaaaattctcactcttcctctctttttctcaactctgagttcttatctttgaactcagagcaattacaggattactctctctctaaggcttcagatctaactctaaaaaatgaaactgggagtggtaatttatacagctgggataggagcagagtaagtagattttaggtgatgatctggcaggtatatggtcttctgttgttctgttatttctgttatgatctcttgttgtaactgtatttaggttgttgtagatgtgcaagatgtttttatgtaaccgacttatggttaagaaaagatttagatggatttaattttaacattgaccaattcaacaacacctttaaaaacaactccaaaggcaccagctcccaattgttccttgaatccattggtagctttttctagctcaacaaaactgaaattctgcaaattcatttctggggtgttcttctgaattggtttagtgattgatgctttgcgacggaggcgaaaacagaataccaatgaggttattagcagtaggatattaagaacagcagagctacttacaataactgatccaatgactatcagtgttgttttgtctacttttcttttggaatctaagttgttgcattgcttggaagcagtagagttaccttttcttattttgactagactttttgttccttgaatacttgaatccatcatcccatttgttaaaggagctgctattttataacatatgtttcctgcaaaaatggcaagagggcagaaacaatcaactaagcaagcatttctgcaccaatcctcagacactgatcgaaagttctcataatcaccgtaaggccagttcaagaaatcaatgctatcaatataaaagtttttgtaatcttctaaatcatcattgcaactttgagcttcaaaaattggcacgcaccctttcatcttatcattcgaatcaatgaaggtgtaaccattg

SEQ ID NO: 32948 - DNA, 1508 bp, Cannabis sativa
tttttttttttttttgagtttagaagagagagaaaaggatagagatggatagagagagggggggacgacaaggggtacagttattgtatatatttatttttttatacatatatattgtattatttattatatataaatactttttgacccggtcaaaccgaggtcttacatgagcaaacttaaaaactgctctttgaccataagactttgcagactatataatcatgtcctacatgctctcaagcttttacacttagttattataatgtgaattatacccattagtgatttgcgattcagtacgattttcttcaagtaggtctaaggaaaatttaaggagttcttgattttcttcttgattatagaaatctcatctatgggtcgcaatattaacctctactggcagcattgcttccaagccaaatgccaacgagaatggagtgtcccatgttgttgttttctctgtcattctgtgagcccaaagtacttatggtagttcatctacccatctcccttatgtagcatccaacttatttttaatagtatcctttaaggttttatgaacagcttctacttgtctatttgcttgaggccttgatactgtacgagaagctcttaataattttgttcctttcacagaactcagtgaataacttaccatcaaactgggttccattattagatactattttaatgggtattccaaatctgcaaattatgttcttgacgacaaaatcaagaactttttttgcaagttatggaaactagaggttcaacctctgtccactttgtgaagaagttgactgccactaccgtgtactttgctcctcgtcgccctatgggcaatgccccaatcaattcgattccccatattgcaaatgggtatggcgaggtcatccttctcaattctgttggtggtttgcgaggtatatgtgaaaatctttgacacttgtcgcacctcttgacaaattcatgtgtgtctttatttattgttggccagtagtattaattcttgtcagattatcttctttgacaagctttgccaacctgcatggtctccacacaagccttcgtggatctccttgattatctcgcttgcttttgtgagaagcacacaccgtaggagaggcattaaacaacccctcctatataattttccttctactatcgtgtagcgaggtgttgaatacaagagttttcgtgcctcatttttgtctactagaagttgtccgttgagtagatagttaactatgggtgtcatccatgtgggcgaggcgtctatcatttcaaattcttccttttcacatatactaggttcatttagaacttcgactggtaccaaattcagtttatcaagttcattttgcgaggccagttttgccaaggcgtcgacattcgagttaagttctcttggaatttgttcaattttaaagtaattaaccaattcttccgaactttctccaaatatcttaccatttttaaatcctttgcctggtatttgcctagag

SEQ ID NO: 32949 - DNA, 2517 bp, Cannabis sativa
  modified_base (774)..(787): a, c, t, g, unknown or other
ccccactttaatttaaatgggtattggggcgagtatggggtaaatttaagaagcggatatgggggtgggagagcaatccccgcaccgcccccactccgtttacatccctagtaaaaatatctcatttgaaaaaagatgataattcgaaaactcaaagaaatcgcgtgctcaccgcacccatgccaacgagtttttgttttttcttcttttgcttgttgcaatgaacctccagccttcactacagcgacaaattatgggttttgggtcttcatggacttctaaaactctaggaaaatattattttagtgcgtcttttcatccgctaacatcacctaatcataaaaataataaattcattaatttttactcataaaatttaatttactttcaatatccgaaaaattcataaaacgataaaaaaaatactaaaaatgataagaaacaacaccctctaaatatgaagaaataaaaaaagcatcgacaatttgttaaaatcccagtttggcgagaaaactagatctcaccatttcaaagaaaaaaaactatcgaaacaacaccaattcaaataactgcacatctatcgaaaataaactacatactaatctaaacgtttaagaaaggctttgaacaacacttacccattattgaggtgaatgtgtgtgattctttttaatgatgaggtacgaccgtccaccgagataggtcgagagataaggagcagagagattgagaaagagttagctgagatagagagtgttagagagagagagagannnnnnnnnnnnnngagagagagagagagagattaattcaatttttttaattagccaagggtaaaatggggaaaatatgtaaacaaaagaattattttgtataaattaatttggggtctaaattttgatagggaaatttcattatatatgcataaaaatgtacccattatcaatctttagacttttaactaatttatactaaataatacatattttgatttacttttctctttttacccccctcgtattaataattgtgctttgaaaaaacaactctctccctctctctctaactcactcatctctctctctctctctatatatatatatatctatctatctatctatctatagtaaaaaaaattaataacccattcacgaccacgaagaccagcgacaacagtggagattccattaaagccatgaatcacacacattggtcgtacgaaacttgctgcacccacaataatgggcaagtatttttcaaaaaaaaaaaaaatctaaacattttgaagagtatgtagttcatttccagtagatctgtgtggttattattaacattggtgttctattgctgtttttttctgcaaaaaaagcaggatctgattttttcggtgagatttggattttttttatgttatatcgatgatttattgataatatgtcgatgttttatcgatgataagcgtattaaagttggggaagattattatcaaaaatttttcgataatttttcaaggctttcttgatgatttccatggctgtgagatttttttttttttttgtgtgtgtatcttttttaacattctttaatttcttatcgatggtatctcaatggtttttctatagtttctcgaagatttttatggctatgtgaatcttttattttatttatttatttttttattttcaatttcttgtcgatggtatatcgattgtttttcgatggtttttctcgatgatttccatggttgtgtgatttttttttgttggtatttttagtttcttatcaatggtatctcgatggtttctcaatgatttccatggcatcaaaaaattcattaaaatcattaagaaaccatcgataagaaactgaaaaatacaaaaaaaaaaacacaaaaaattcacacaagtatggaaataatcgagaaatcattgaaaaattatcgataagagtcttatccaaccttggtacgcttactatcgataaaacatcgacatatcattgataaaccattaataacgtaaaaaatccaaatctcaccgcaaaaaactatatcctgccatttcgtagaaaaaacaacagcatactctttaaaatatttaaaaaattatttgaaaaatactaaactattattgcaagtgcagcaggtttcgtatggtcattgtgcgtgatttgtgactttagtgaaatctccgtcatcgccactggtcgtcatggtcgtgatggagcaaaaagatgagtgagttagagattttttttaagatacacttattaatatgagggaataaaaaggagaaaagaagtcaaatatgtattatttggtataaattaataatggtacatttataaatatatacaatgaaattttcttggggtattttcttaagcatatgaaatttcccaaactaaatacaaaattttataagaagaaattacacttattatgggattttaaaaatttttatgataaatatgacacatttaagtttgaccaatttatatggtatttttttgttttta

SEQ ID NO: 32950 - DNA, 1930 bp, Cannabis sativa
aaattattaaattaattgaaattttaaattaaatataagtaaagaaaaaacaatattacttctaaagtattgaactcgtgacattttaattattttaagagaggttattataaaattattataacatgttataactttctacaagtataactttctacaagtacttactctttcaactaaacttgtgtttactgaacccatcaaagtggtggatcaaatagttgctaaaatcgatattaaggaagcagaggttgaagcctcttattagaagaatgctattgtttgcatagtgttgggagcaaacccaccgtttaaggtgtttgaggggttcataaacagggtttgggggaaacttggaattgagaaagtggctaggatgaactcggggttcactctagtgaaattcagggatgaagcaactcgagacttaatcctagaaactggtatgatacattttgacaaaaaacttgtggttctccgaccttggacaaccgatatggatgctgctagaatgatacaatctgtcccagtttggattcggctgaacggattggggcttcaatactggggtaagaacaacctcagtgcgcttgtgagtacgattggtaagccgataatggtggacaaagtcactatggaaagatcaatggtaaaatttgctagggttcttgtggacatggttatttctgatgaacctccaaagaccatatcgttcgtaaatgagaggaaacagttggtggaacaattggtggagtatgaatggcttccaacgaaatgtgctgcttgtgatttactagggcatacagtggtgaactgcaacaaagataaaaaggtggcttggaagaagaaggttacaacagctcctaacaaggaactggctaaacctattggtgaggatatacaacctgatgtaagtgacaaagcagggactgatatggcagtagaagaaacacttgcttatgagcaggtgcaaaaagggaaaaaccaggggtcattgaaggtggctggtgctgaagtaagtgaatggattactccaaagaaaaaagggctaaaggttgctacagtagctgagacaagagtaacagagaaaataaaaaatggctatgcagtcttacaagagactaacgatgagactttggctcctcctatcttcgttacttttaatggaagtttgtaatatgctaggttggaatgtgaggggtatgaataagagagaaaagaaaaaagtgattctcaatgtatgtaggctgaataaagtggggtttggagctttgtttgaaataaaggtgaaacatgacaaagttaaggagatagttgaaaataacattcctaattgggagttttattctagccatcccatctcgggtagaattttaattctttggcaatctaaatttgttcaagtggaaataattcatgaagatgctcaactagtccattgcaaaatcaaagtttgtgggcacaaggaaacttttcttgtcacagctgtgtatggaagtaattctaaggagaaaaggaagaatttgtgggcaatgctaagtagtattggtcacccgaacttgccttgggttattttaggtgactttaatgctatgttctcttacgaagatagaaatgggggtagacaaatccaagccaaggacattgaagatgctcaaaattggctcgccatgggtcaagttgaggaattcaagtgtactggatcctttttcacttggacaaataagcatgaggttggtgaccttattttctctaagcttgatcgggtgtttgttaacaaattgtggctggatatttttaccatagcggatgcttttttcaaatgggataatgtttcggatcatagtttttgcataatccgaaaccaggagcagagtaatgtgggtttcaaaccctttagattttgcaactattgggttgattatcctaa

SEQ ID NO: 32951 - DNA, 5633 bp, Cannabis sativa
tggtaataaataaaagatttggacatccacataattaataatatttataacaaaattctaatttttttcctttttgacgttctagaaaagtaggtaaggtaagatgtctaaaaagcccattacctgtatgattgccacgtggagcatgtttacctattatattaaatattattttttatgtgtattaggaaaacatataaccccttcaaaaaaaaaaaaaaataaataaataaaaaacaacaaggaaaacatattgctttcgtgtaagtttttctttcaacgagagagaaagaggaaggtttgttaatttggatcgttgtttccctttgcttcgatcgaaattcggcgtctacttcttcagaaatttccgatctttgagttgtaatctcccatggccaccagtggaaacaagaacatcaatgccaaattggtgaggattgttaaatctcaaaactctttttccagctctatttttatgaccttgacttcattgattttcttaattcttatggggctgtgttccatttattatttcattttgtttattgattttagtttattgagcatcgattatttgatgtggattttgatgagggttttaaaatcatgacagaatcgagagtcagaaatggtggtttgtgaaattgaatgttagaaataatgtggctttgacttgtttggctataattgtgtcaatatttgttaaattttgtttgggtatgatttttaattatctgcagttgctttggagttttagatcatgtttatccatttttttttggctttcccttttatgtgttatgattagtaatataatattctctcccaattatggttttcttattacaagatttcggatcaaaccatgttttattgaacaaaaattattttctagtatgcatgaaatatgctttctttttgttcagataatattgttaaaatggatacctgggtttgccttttaagtaggcagctatcgttttcttattaattttttaaaatagttgtaaattcaggcacggtctttctcttgggttttgagcttatcattgacttagttaatagctcacttttgttttccgtggaagctgaatattttcgtttggttattgtttctttagacctgggaattgttgttccaggatgttgaacaacaatctttggtttagaatcttagataaagcatatatgcctgtttcccgtgtcactatttaattctttagttttgcaaatgttgcatctgtgtcagggaattaaactcctcttcaaatttcttagaatcagattatataactttataattgcttcacatttttgtttaatggtatgttgaggtgagcttgcttaatttattttcagtttcttccttaattttatgagttctcaggcataataccgtgtgtgctagtatggtattgagttaactgataatgcgtggttaactagaagtattgcaactaaggacaagtattatttaacactagatcggtttgaaatatttgtgcatctctttaggaagccattcttattcctctttaggagttatatacagttgtagtgacatttctgagattttctaatcagtagcttattttggctgataaaaaaacttattttggcagtatttgactgatatttggctttgctgcaggtgcttttgggagatgttggagctggaaagtctagtctagttttacgctttgtaaaaggacaatttgttgaatttcaggtttgcacttagtacagattccttaaatatgaacaatgtccatctctattgttccggcaacttattttatgtgttatgaccttttaggaatcaacaataggagctgcttttttctcacaaacattggctgtaaatgatgcaactgtcaaatttgagatttgggatacagctggtcaagaaagataccatagtttggctcccatgtattatagaggagctgctgctgcaataattgtgttcgatataacaaatcaagtgagtaaattctgagtgtcgcatgtgtgttttctgtttggtagttgagtccttggggtctcatcttgtctcaagtttacatttgttgtcacaatttttgttcaggttactgcagctagtggctacttttactgtgtattttgtgaatgacacatagacttcagaaacttgtaggtgtgaaggccctaactttaagccttttgccctcgattagggtgattcatgatggattgaaattcagatagaaaagcttgttacttattctaattctagggataattaaactagatggaatgaaacttatgtgaattatgtgaattaattaattatcaatagatataagctcagtggcttagcatggtttctgctcagtcattacttatggatacaatctgtttttctctgtttaggcttcatttgagcgagccaaaaaatgggttcaagaacttcaatcacaaggtattttcttttctttttctttttcgagttgtcatctgcttacatctttctcattcttgtattttgtgtcttggatgctttttgagtaattattggttggcatgagtgcatccatatatatgtagaaggatgcatagtaacttcttgaaaaaatttaaatggtattgtaataatgttttttaactatctataatgtattaataattctattactttttatttttctttgtgccacaaggcaatccaaatatggttatggcattagctgggaataaagctgatctgctagaggcgaggaaggtcgctgcggaggcaagtttcttagatttttctgcttcatatggtttaacttgatgtttgaatatcatatgcagttaatgtttgaatggaaacacattgaaaggaaattttatgtggaacttttatattttgccactatatatacgtgtaagaaaacaagataatcttatatctataagttcaatatatataagttcagttcagacttaacatcacttgctatccttcgagtggtttgctggtaagatgacatcttggaaatgtataaaatgtcattcaatatggagatttagcactcaaaagagtaatacttagtagtttagaatgtaaatatggcgggacaagtgctttttcctgctccaaagattaggctagtgaaacatgaagcagcattctcttttctagaatgtgtgaatgttctaacatttaccagatgactcatctgtttttacatattaagcaatgtttttttcagaagttcgtagtttgaaaagccattagtgtgtgctaggagactaagattatgtaatcacatttaaactgagaggctagtggccccattgacagtgtgtattggacaagttttattgactaaactagactggagaataattttgaatccaactatgatatgtgctttgtttttgcttgtgtatctaattgaacaagagaattttaaaaaataaataaaataaaatgtttgaacacaaaaattacacactttttacacattgatgtgtatttaactttttttttttttttgaaagagacataggccattgtcttagacattatatgagaagtacataacttttaatttgtgtagttgagactaattacacatcattgtgtatggatagtatctaatttgagtgtcacaatctttgtaataaacaaaagatatgttattttgtttttgccaactatgttgtgtgttttgtttatgtttttgcttttatcgttttatcatctggtatttagtaggaattaattcaattatgttggtttttagcagaatagataggtagatagatatggtttcaaaacttctcttgcaaatttagtatatttagtgttggctgattgacatggctgctaattttgcaggaagcgcaaacatatgctcaagagaatggccttttcttcatggaaacttctgcaaaaacagcaaccaatgtgaatgacattttctatgagataggtaaatttctaaatttcaattaacttgttatacacataattattaatgcttcaatcttgtcatgttttttttattcgattctccttgttgacagcaaagagactaccacgagtgcagccagcacagaacccttcaggaatggtcctcatggatagacctgcagaaagagttgcaagtgcatcttgttgttcttgagaatcttcaggtgctccaatttccttcacctcacaatatctcgtgtgatgaacagggaaaaaaaaactttgttttagattctatccagttttcctttatcttgtaaatttgttcagaactgtacatcaatgtttgtttagactgaaaagcttgtggagaatgtcttgtgaatgcatctgggttacagatattgattgcttgtgaatgcatcttggttacagatattgattacttattaattatctttagcggaagtctctaaactatacgagttttggtaagttgatcagatctgacctaatccaattcatgcaaggatctgtttcgtcccgccccgctagataagatactcggatcggatcagatctgacctgacttatttggatttgatctgacccaccctgacttttttctaatctaagtttataattttatatccatttaattttgtattagtattatttaatataatactatgtttggtattaacttgtattaatagattgtgtaaatttataatatattttcaataaactcgaccccaataccaactttggttcgggtctttgtccgggtctaggtttgggtttgggacttggatcccggttcttgggtctcgagtcctggttcctgtgtttgggtctcgggttcgaatcccagttcttgggtctcagatcccaagtccatgcccaagtctcgagtcttaagtcttgggttcgggttccggtctcgatcacgggtctgggtccgggtcctgaggtcgggatctggggttggggtatgggtttgggtctcgtgtttgggtcgagtctgagcctggaacctgagtttgggtttgggtcccaggcgggtttggtctaggtctgggttcagggtctgagtctttaattaattttttttttaatatattgaaactaaattagatcatatccaatttgggaaaaaattaagcggggcggagcggatctgattcgagatctaatatgtattcgaatattttttatcagaagtgatctctcgaactagagttttgacctgctctaactaaatgaatcttttttacatccctttgattttttttttggtgaattggtctttaaattttcaaaaatatcttaatatatttatgatgtaaatataaatttaactaattttttaataatcacactaaactatttattttacaaaaatatcatataaatatatataatttttttatcaactaacacgtactccttttagttaattagggtagaatttttaataaaaatattgtgctaattaagttagaaggaataagagttttaatattttgtagtcaatataagttattgtttcatagtttagcactttaaacttcaatatgcaagtctcttttttattatttttttatttccatcttaggttgattgtggttaatgatcttatatcgctggataaacttattgatcattcctagatatataattaccattatatagggatggcaattat

SEQ ID NO: 32952 - DNA, 1222 bp, Cannabis sativa
ttaattattgttatcaatttttacaatgactatgagtagctatacttttaatcaaggttgttaatgaagattgtttaacaatttattatggttttaatatgatttagttcttcctcaattttttatgtgtatctattttcatttgtatttaatttcttttaattgtctgatcaccaattaattgtttatgatttcaatgcaaaatcagagaagtgagtattaattatgttatagtgaaataagtacaaatttcgatattagaagagagtacctgtatggcctatataacatttaagatttttatgcttaatgtcttttatatgtttaaatttatcacgaaaacgtagaaagtttgcatataggttgaaatttatatgtcctacgaatataaatttctttagtaaattcgctatcacatgaaattaaaaatttaaattaaattatattaaaccatagaaagtagattcaatcaaaattaatcaccctaagctcttatcattgttaattgcattttaattatttgttttcttttcagtagaacttaaaccttctttgttattattattgtcaccaaatagaatttaaaaatttaattgtttggtaattaattgcagtctttgtgggaacgatacattacttatcattatattacttgattcaactacgtatacttgtatattagaattttcacaacaatgttgcaagaccacctattacaactgcaacctggaggagcaggacgtccatcccctgacatttggggaccactagaggatcatcatgtaaatgagagctaatagagctcacttataaatactcatttcctcatatttgacaggagttggaaaattattgtagtcaaggcacttagatagcaataaaaaatttctatttcatcttctccatcacttctctgcaattcattcatgttcttgagttcataaacactttaatcttatctcgcctaaaatcttagatttttcgaccatagcttggttgacgagttcttgatgtcaacagtttggcgccatttatgggaacaacaaacattaacaacgttagttcctaaatcattctattgtttcgagatgcgtagacgttcgcaatatcaacaagaaaatggagtttgctcagatgacaaccagctaaccaccatcataagagaacctccacctcccttcgtcggagaagaccaaaagaagaataaccaaagcgtgaacca

SEQ ID NO: 32953 - DNA, 1602 bp, Cannabis sativa
cttccattgatcaatagaccttaacgcaaactgtacaacatcattagcactccggcttttctgatcccaaactaaatcattccgagccttccatatcgcccaacataaagtgccggcttgtgcaaccttctcatcatcagcggtatttaataattgttgcagccagtcacgaaaagattcccaaccccgacccccaacacacacggcaagcctctcccaacaagcagtagcaaaatcacaattaaggagacaatgagtgatagtttcactagagactaagcaaaatggacaactatagtctaaaggcacctttctctcaaaaagtctcttccttgtagggagacaattagccgctgctctccaaagaacatctttgaccttgggcggaacttgaatttcccataactctttccaaaactttgaatcccccgcccttccatcaacattggtatcacggttcataagcaaatggtatgctgattttacagagtaacaacccgaggtttccttcaaccaataccatgaatcgatagcatcagtcctagctaaaggaatacccataattagctcagcttcccttgcagagaagatatcccgaaccacttcctcatcccactccctagcccctaccttgaacaaactttgaactttgagatcattataagcgcttgaatccaaagttggaattggagactcaatacttggtagccacggatccatcgcaaaacgaatggttaaaccatccccaaccctcatccttaaccccgccttgagaactccttgggcttccactaaacttctccatatgaagctcgggttggagcctaattcagcggtcaaaaagtcaccttgagcaaaatatctcgctttataaacacgactcaccaaggaagaaggattagtgacaaggcgccacccttgcttacccaacatagcgatattaaactcacgaagacttctaaaccccataccaccttccatcttatgtttcaccaaccgagaccaactcatccaactaatacccttattttgattccaagaagacttccaccaaaatcttgccattaggctctcaatttccttacacactccaaccgggagaaggaatacattcattgcataagtaggtaacgattgaacaaccgtttttatcaatacttccttacccgcgcgagaaaggaatttagttcccaactcttgatcctcttgagcaccttttccttgagaaaccccaacacagcattcttattcctccccatagtattaggaagtcccaagtaagagctattctcacctgcttcgatcatacccaataccgaacatatgagctgacgaacatctcccctagtgttagagctaaagaacacagatgacttctctttattaaccacttgacccgaagccaattcaaacaaacggagaagctccataacacgagtagcttcttcaaccgaagcttggcaatacaagtaactatcatccgcgaacaacatgtgagacaccctcggggccccgttagcaacacggcagccatgtagcaattgattcctttcaaatctcctcacaagagcggaaaatccttcggcacaaacaataaacaaa

SEQ ID NO: 32954 - DNA, 1826 bp, Cannabis sativa
  modified_base (395)..(397): a, c, t, g, unknown or other
  modified_base (1780)..(1788): a, c, t, g, unknown or other
gctgggattgggaaattgtattgagcaacattgttgattatgtttgctcgggttagtgagttaatgagtgttgagggattacaccatagatgactggctgtaattttttcttgtagctcctgagattgatatctcttattctcatcattaataaagattggtggcaatactttcaaactggagtatgaccaagttcacattgaacttaggatcataactagtaaaaatctcttgtgctattgtgtctgacaactatttagatttatctgtgttatatttttctggtttaatgtgtttgctagttttttgttcttgatttgtttgttttgattaaacttttgtttgtttaagtatgatctttaagctagaattatagaagttaattcctatgtatnnnagctaaatttcctacaaatcagagttgatttcctacaaatcaatgcttagttcttcgattattaagggagatattcaaagatcacttgcttccgcacaaagaactcatcaagaacccataaaaaattcatcaaggaattctacaagaacacagattaaaagaggatgccgatggctaggttcaaacttgagaagtttgatggatcaactgattttgcactatagcgagagagtttgaagggtatacttgtgcaccaaaaggtggcaaaggtactcgaggatgaaaagttgatggctgagaagaagccaaagaaaattgtagagatggaggagatgacataccacaccatcatcatgtacatgtccaatggagttagaagaaagctaatccaagaaaagaccgcaaaaagattgtggaacaaactagagcaactgtacatggcaccatcaatatcaagcaagattaatcttcttgaaagattatacaggattgttggtttcgctaaaattgatcatatggtagatgaagaaagtcaagcaatcatattgctcagatcattgcaaatgacatatcaagaagttaaagcagcaatcaagtatggaagggatgtgatctcgttggagggtgttcatgcgccattaaaatcaaaggacaatgaattacaactcgagaaggagacgaggaaagacaaagcctatcttgcaagaggaagaagtccaaagagaggatcatcaaggaacaaccaatcaccatcaagatcaaagtcaaatattaaagacaatcgacaatgttatcaatgtggaaagattggccacattaaaagattctgcagtcaattgaagacgcaatctggtttcagatcaaattacaatgacaaaagatgcaatagaaactagaaccactcaaaatctaatgatcatggaaatcaaagaaaagactctgcagctgtggctaagagtaatggagatggaagatcagatggggaattattttctatttcagaaaataataacaataaagagtggatccttgattcaggatgcacttatcatatgtgtcccaacttagaatctttctttgattatcaagaaaccaataatgaaggtagagtactaatgggtaatgatatttcttgcaaggttgttggaattggtaaggtggctataaggcagttcaatggtgaagagaagattctgcataatgtgagaaacattcaaaaattgaggaggaatctgatatcacttggaaccttggaagatgaaggttatggctataagtccttgaatgagagtctaaggatcacaaaggttcaacgcttgtgatgaaaggaaagagagaacatgggttgtatgtacttgagggtgaaactgttgggttttatgnnnnnnnnnaaactctatttcaatgtaatccattttattcaatatca

SEQ ID NO: 32955 - DNA, 1779 bp, Cannabis sativa
  modified_base (40)..(55): a, c, t, g, unknown or other
tagaattcatattatggtgttaataaaacatacttggtannnnnnnnnnnnnnnngtaaaatatttccaacacttacctccctttccctcttttttagatgaacctggacgactttcggaggaggtaagcactcagaatatgagggcatcaattactctacgagtactacccagactccacgtaacctcttcatcatcaagagagacattgacgtctagctttgacgagtgggaagtaacaagcaaggagccaagatcttcaaaaccttccacgcaacaccattattaccccgaccataatggaagtgtgggggtacagacgattcattttggaattgaattgatggttaaggcaatatcttcctccctcttggacatacaaggtccaagcaggagttctgaatacttagccaaaaagtgatccaaagccatcaaagaaaattaccgtggaagtggatattgcggttaacgtcgcacaatatcgttcatctagacgcccgcccatgactaggaaagtggcacaaactaagcaaacttacagaaagacttcatttgaagacccgcatcatgcttggttaatggtgttagttcatgatccttacgaggatgctcctgaagaagaaattgtcaagctacaagaagtagaagacgaaggtgaggcccactcgacctcggctgatggggacaaagatgtaatatctcagaaacctaactatgaataattaggatttattatattttattcgttaattagagagtaatgagcaagattatgtttgtactattttaatgcagcgtaaatcacaaattttgccataagtggataaataagcgtaatttattaattgcagagaattatttgaaatatgtggatatattgtaagctatttgtgaaataaaaatattttcaagtttcacgaccttgaagaccctatcataggaaaaaaaattctcacaatcgatttagttaataatgttaatggaataattgagataagttgattatagaattatcgaggtatttgagggtacccaggttgaccaaataccttaaggttagaaatttcttagtggctaaaaaatgacaaaataatttttattaataaaattttattattatcattattaaagttatatattagtattatgttgttgttgttatctattgtttttaaagaaacaacatatttatatccctctttctctctatcattcgatcgaaccacccctaccaccattaaattttcttcaattgttagacctaaaaccagctctcgttatagttgagggcataggaaattgacgtggaagcttgaggtaaggttttagcttattttcttaatgtttcaaagcttgagctataagttttaaggggttgatttttgttctgttgttgctggggttagttgagccttgggatttttttctaggatggttaaggactgttatcgatgcttatctggtaggtttcttggttgtgaggtgaaagagcatcaagtttgagttttaagctcaaagcttgagctttaatggtgttttcacttttagggcttgttttttttttattgctgttatgttgggtttattgtatggatattatataggtgttattgtatggattttttattgctgttatgttgggtttattgtatggattgttttaagctcaaagcttgagctttaacggtgttttcactttcagggttcctgtttcctgcagaaaatggtttaccgtttggaacaaacggttaagcgattcttgttaggagaccccaaaaa

SEQ ID NO: 32956 - DNA, 3028 bp, Cannabis sativa
gaagaccttgcaacttgaggtacaagtctcgataatagtgagatggtacaaaacgccgcctcatcaccccttcatagcctcccaagtgtcaatctcacattctccattctgcctctggttgatgcacaactgatcccaccaaacaatagcatagtcagtaaatttaatggcagcaagttttacctttttcattttggaatagttgtgacaatgaaaaaccaattccatcttcttctcccactcaaggtatgcttcattatcactcttcccctgaaagcatgaattttcatatttatatttctcaaataattatctccctggttcctagcttctctatcccgactatacctcctatggttacctgctggcatcacatcaaactcttcatcacaaactaccccttccccatctacttcactatcatcactttgttgaaccttgttcctccttggcctctgttgtgttccctcttctactactaaccttgcatgtatttgttcaccacttctctcattatccaccccatctcccccattaaagcttgaatttgtagatttggaaccataggtggtgtagtattttcttttggattttgtgacataattgaattcttcaaaaataaagttagaacagatatagaaagacctcaccacactccctcaagtgtttcactcaaaaaaataatttgtcactcaaatccactcgtgtttcactaaaattcgatggcttttaccctcatataagctcacacttctgcctttttctgctcatattccttttttaagttcttaaaaactaataaaacggtacaagaaaggattcaagcagcaattctaaccaaacaaaccaaacgaacactgattaaaaactggaaaaaaaatgatgatttttggaacacttttgtggggttttggccaataggcctctagaccatgggaactaaaaatagacaaaaaaaaattgaagagaggtttccacacttttttttttgctcttggtctcatttttttctttttctttttcttttctttttttatcaagaatttcaaatttttcttgcttgctaatgacacaaagaaaataggaaacaaattagagaagctttgtgaaacaactatggaaattgtagaaacaaaattggtgaaacaaaataaggaaactaacttgtgacacaaatagaaaaacaaagaattcaacaataacaaattgctctcggtttccttttcttaccttccttttctttccctttttttcttttagaattttgaattcttgtaagctaatgacacaaagaggaaaaaaaaggaaacaaaccagacaagatttttgaaataattttggaaacgatagagaaacaaaaataagaaaacaaatttgtgacacaaatagggaaactattaaaacaaagaaacaaataatttagcaatgtcaaattgtgaatctaggctataaattttgggtttcaaagaaaaattaagcgaaactaataaaaacaaggaaataattggaaacgatgagataagcgaaaattcaaattgtggccctagaatttcaatttcggatttcaaagaaaaattaagtgaaactaaagaaagcaatgacacgattttgacataagagaattattaattctctagtagcttcgggtttcacaacatgattagaaatcgggctaccaatagcaaagttaaacaaaagctagcatacgacaacatgagctatgagtgttaatgtgggtgcaaccgtttattgacaattatatggttccccttgagcaaagaaggtcatgtccttctaaccaatgaagcttccatactctctgaagttggaaaaggacatagtcaagaaaggatccactcggacagtatacagagaaggctctgggttagtggtactcctaacaatctcttctaccctattgatatatgttttcatgggatgtttaacggtattcagacctaaaaagtgactatcgaatcccccttggtccctctgtcagtataggttaggggtacaaaatacatagaagcaccacctattacctcttccaaaagtgttggctccaaaagcaccttcttctaggtatgctgcaataaatatttctaggatgtcctcatcttatgtcaaggggtttgggtggcagagtgcctaatctacatccatgagcttgtcttccttaacagcctcagccattgttttggcgatgtcaagggctattttttgcttcacctcctttgaagcttagctttggcccctataactcatgttaccaatgctttgaaagcagaacattaacccgtgctcacagagcagctttgtagtgaccaagcctttgacttatagctccttaacagagaaaggattgtattaggctaccttcttcttcaattcctctgtctcaagactttgaggaacaatttctaccaataataagaggataaaaacttggttaacacctagactcaagaattttgcaaataaaggacagaaatagtaataaaaatgtttacctgggatttgaaagctcaaaggaagggtaggcacccttcactagaaaacaagtggaaatttaccaatactctcaaagagtaagcattaggtctagctagtggggcagtgcgcatccgagtacctctcgagcttgtaaaacgtaacctttttgaaattggcacacatgtgttggggcttcaaaccataaaagtacaagatttactctaggttgggcacttcaaacttcgagatcttatagaagatataccatccagctaggagcttgtaagccagaggtatcatttggaaaggggctatccctatcctcacatagaactctgcaaagtacgtccttaggggaaggtgtgccccactcactatgtgggcccagctctaagcgctgaacccatctctactaattgaggccaattcatccgctacataaagctagttccacatcagccccagaatgttgcgcacttctgcttcgtcgatatagagctccatcatgtcatatgacctaaagctattaattttt

SEQ ID NO: 32957 - DNA, 3317 bp, Cannabis sativa
aagtgtaatcctaatgttcaaaataatttcacactgtggcataatagattaggccatccctcacaaaagattgtacaaactgttctaaagctttgtaatctgcctgttagcaataaaaattctcctttttcagtttgtgttgcatgttttcttggcaaaatacataagttccctttccaaaaagcttccactactgttatttcagaaccattacaacttgtagtttcagatctttggggcccctctcacaaggtttctcacaatggctataaatactacatacactttgttgatgttttctctagattcacttggttataccttctaaagaacaaattagatgcctttaaagtctttctcaactttaaagaggaagttgaattgcaactaggtaaatctattaaaactctacaaactgattggggggtgagttcaggtctttttccacttacctcactgaaaatggcatccatcatagacacccttgccccactacacatcaacaaaatggcttggccgaacgaaaacacacacacgttgttgaaaatggtctggctttgttggctcaagcttccctacccctcaagttctgggatgaagctttcagatctgctgtgtacatacacaacagattacccacctcaattctcaaccacaaatcacccttagaaattctcttcaacaaacaaccagactacacaacctttaaaacctttagatgcaagtgttttcctaatattaggccatataacaaacacaaaattgatttcaggtctagaccttacacattcctaggatatagtctcaaccataaaggatacaaatgccttgattctaatggaagactttacatctcaagagatgtagtctttgatgaattttcctttccttatgagactattgtggatcatgattcccttgattcatctcagatatccacaatcctagatcggccttaattccaaaatgctctcattacaggcagccttacacaatcaatgaccttgtgcactcacactctgtcactaataatcaaatggttgatcagcatgtttcaatagataatatttctccaatttgtgctactaacaatggatctccaagccaaaattctcttaatgctacaggtgaaccattattgcagggccctatttttgctgtgtgtccccagcctaatctcataccaggtttaggcttcccaatatctgctgagccaatcactactgaagttaatgaacctgtcttaacacctggaactggtgtcagcacagcagctgatgaattcattgctgcaccagttgccactgctcttgatggcactactactgctgctgttcgatctgaaaatgttgatgctaatgtggttcagcatcctatcatgacaggttgttcaaatgatcctagcaaagccaacaaccatcacatgaaaaccatatcaaaatctgggattcacaaacccaaagtatttctggtttctaaactgccttcttgtattcaagaagccttactcaatgaacactggaataaggccatgagagatgaaattctagccttaataagaacaaaaccttatgttctagtcaggcttcctcctggaaagacagctattggatgtcaatgggtgtataggaaaaaagaaaaccctgataacacagtataccagtacaaggctcggcttgtagcgaaagggtttcatcagcaagcagggttcgactacactgaaactttcagtccagtagtcaaacctgttactatcagggtggttttggttcttactttgtcaaacggatggacagtttgccaactagatgtgaacaacgctttcttaaatggtgatttacaagaagaagtttacatgacccagccaccgggcttcgaaattcctggcaaaactcatctggtttgcaaacttaataaggctttgtatgtcctgaagcagactcctcgtgcatggtttgagaagctccatcacagccttgtctcacttggctttacaccctctaaatctgaccacccactcttcatcaagcgatcagctgaattgactatcctagtattgatatatgtcgttgatattttaatcacaggaagtgattccaaggctgtctctcaactcatctctgctcttaacaatcaattctcactaaaagatttaggtaatctaaatttttcctgggaattgaagtgcaaacaacagagaatggtttacacttatgtcaggccaaatatgcacgggacctcctacagaaagctcaaatgattggagcaaagcctgctccaacacctatgacaagtggacttcgtttgtcagcccaacaggtggatcctgtagcagatgttcaattgtatcgatcaatagttggggctctgcaatacctcaccattaccaggcctgagctgtcgtttagtgttaataaggtctgttagttcatgcagaaccccctcaccactcattggttggctgtcaaacgaatcctaacatacatcagtggcaccattgaacttggtctgcatctcactaaacccgtgtccctcaacctaacagcttactgtgatgccgactgggcatcagatccagatgacaggagaagtacaactggttttgctatattttttggttctaatttgattgcctggaggagcaagaaacaaccaacgatttctcgatcaagcacagaggctgagtacagaagtgtagccaatgttactgctgaaataacttggctgcattatctgttctctgaacttgggattcaaatgtcacaacctccaacaattttgtgtgacaacatgagcactgttcttcttactcaggatcccatcctacatgctagaaccaaacatatagaacttgacttgtattttgttagagaaaaagtgatgagcaaaatgattcaagtcaagcatgtcacaacttatgatcaactagctgatggtcttaccaaagctatttccagccagagatttcttgacttcagaaacaaactcaaaattgaagatctttcaattatgagttcgagggaaagtgttggaataggcagttagttaattctgttatcagtgagttgtatctgttagtttgtttgcttcagttagttacaacagctgtgtatataaaccagtgtactcctctctttcaattaatgagatcttttcattcaatctttctctgtctttctttttctcatttcttctttctgttctttcatggttactctgttttctgtatgaacctttgttcatggctagaagatttaacacttaaaaaattgattgaaatgaatttgtgttacttaaaaattgatcatgcaaaatcc

SEQ ID NO: 32958 - DNA, 3587 bp, Cannabis sativa
agtaattgcttgttgtacatgttgtacacttcatacacttcataattttatttgacaaagtacccaatatgatcatatgtttagagaatgggaagaaaaagtacttgagcgcgaagacaacatagaaggatgtgaaaccagtgtgtcaagatatgaagttaatttgtctgatgaatctgtcgcggcaatagcacgtgttcgagatcgtattgctcaaattatgtggacggtttataataatagaaattactcaattatattttattatttgatggtacattcaagtttaaatttatttttataaggatatattgtagactaatagttattttgtatctattttagattaaaaaatttctttaggaatttgataattatatttttaagtattataatattatattcacttattatttaaaattattttttttaaaaaaataaattagatattaatgtgttattgaattaaattaaaatttgtgatatttatttttttaaaaaaagaaaaacaacacaacactaaaaggataaaaaaaaataaacatgtttttttttttttttaaaaaaaagtactttttaaaaacatgtttttactatccaaacatgttttcagtgttcgttgtttaaaaactgtttttaaaatatattaaccaaataccatttcgtttttaaaatgacaaaattattttctgctctcacttttaaaaattgtttttaaaaactaaaaaactgaaaacacagccaaatagcctctaagccaaacaggacaacatctaattatgctctctaaacacacttcttagctaaaatagagagtgagacttaaaaaaacgaattctaaccatacaaaaaataactctatataatagagaatggatatgtgactctctaaatgtagggagctccttatttttttcgtaaattttttaatagtattttaataattaaaaaagaacaatactactttttgattatttgacagacttgagccatcatcaccaagatgatagagaccgtttttatgttttcctttgactagaacaactcctattttttttctccttaacaaacaacaagttttgtgacattcaagaaagacattattgtcattagtaagtttgaaaacactaatgagatttttagtgatagaatgaacttgtaagatagagtttaaatgtaaaggagaagaactatttgagagagtaaaagctttaccaatatgagaaatgacaagcttcttaccatcaccaacaaccactatttcttggctagagtaaggaactatgttgtcaagaggaacctcattataagaaatgtgatgagtagcaccaatgtcaacataccaaccttgataatcaccacaatcaggcacattctgagctacaaaagtagtaggctcatagttaagaaattgtttagtaaagtttgcttgaggttgaggatttccaacaatagatttaggggtaacccaattcttatcaagcctatagtgacaagtaggagcagtatgaccatatctcatatagacttgagataaaggtttgttaggattgaaagaacgatggtgttgagatggattatttccttgagtgggaatcttaaggaaaatttaaacattgatcctctaccagcattattgtaaggcataaatccaccatttcttgatccaaaagtgagattggctaccatcttggtagaaagatccatcatggttgtgtgtcattcaagtctagtttcatgggacatcaacaaggcttgaacttcctcaagagacaaattgtcacttcgagatgtgataccagataccaccgaatcaaactctggtccaagaccatccaggagatgaagaatcaactcaaaatcagaaattcgatgactagcaagagtaagagaatcagagagagctttgatcttatcaacatagtcaaagattgattgattacctttatccatgtttgacaattgagtcttgagttgcaataatcgagccttcgactggctagaaaatttctgctctaaggctttccaaacagcatttgagctggtgtagctagccacagttccaagatggagttgtcgtagcttgcgaaagagcagtaggatcaacaccaactagatatgagttattgccaaaagaagccattgataaaggtcactggatctgataccatgaagaagatgaaacagggaagaccatagagaagaatttcagaaaagcgatggaaaagagcttacctccataagaggctttcactttatttatagtactagagaggagttcaattacaaggctatagaacatttaaccaacagattcagttagtgaaataactagactagccaaactaactacaaagcaatgccaactaactaaacaactaactatgtcggagatgatcttcacatcatcaaaccaatgccatctatgtcagagatgatttccacatcctcaaacatcttaggtgatgcattcaacaaccacattatctctttcttctcatgcaacgactctcgttcctatttacattgagttttgttcctcttgtttaagtgctctagctcgaatgataatgagcaaaataacttcattttacccttcgagagctccaaaagttcagaagcttcatcatcatcaatctcacacttttggtgatacccttacatgatattcactcgatgaagaacaaaactctgattgtacactgaaccttcatgtgtgggacaaaattgacgacgcaacaagtatttcagtttattccatgattgaatggggtgtctctaattttctcgatagaaccaactcaaagcagcttctaatttttctgtcggtgtcaattgctgcaaacttgcaagcccattcatcttcagcatcgtacactagtaatttaattttcaaggttcaaaacttagatcgacgctccccaacatccatgattcttctgtggcaattggtgagtttatcaccaactctattttgagcagtttccaatctatccaatactacctccatcgacctcaccgtagataatactgaatcaaatccatccactcttgattccattctcttagtcacatgcaatcatcaaaaactttcactataataccgaaggataagaaccttgttgtagattaatcaactagtagccaatgcaacacacacatccaagaaataacagtagaaaagtattcaaaccagtagcaaatagcacaaacacagcagcaagaatattatattgagtgtaagagacaattacaagagatgggagcccttaggccccttttatgcaaagagagaactctccatacattgcataccccaattatttccttacttacctatatgtagaacatattctcactcacaaacccattcccagtacaatgactcaaatacacttttttttttatttaataccttctagctcacccaactaatcctaaggcctaacattcaattcaatgccatggtttttgataataaccccatgatcattgaattagtcatgaaagtttgcaacagttgtcaaataaatcatccactcgagcctccatccttgtggcttctaacattcaccgagttgagtatt

SEQ ID NO: 32959 - DNA, 1476 bp, Cannabis sativa
  modified_base (972)..(976): a, c, t, g, unknown or other
  modified_base (1432)..(1436): a, c, t, g, unknown or other
ttttatttagcacacaaaacccaaaatttaggcacgagtggcagtgacatcttagtgttgagttgtgacacgagcttgcctatttaagcaatgtattcccatcagcgatactgattagacacgggcagtaaagacaaataagtgccaagttatggcacaggctcgtctagttagacgatgcaatacattggtgcaaaattatggtacaggctcatctgaatagttgatccagcgacataatgtatgatgccattatgatacgagcttgtcggattaggcaacacaacatatgactgcttttattcccatgcctatggatagttatgttatccactcttgaatgttattgctttatcattttataatagtgaaatgaatatttggttattccatgtatgatcttttattacttttcttgttgattcctagtgactcatgggtgtgctgtggtgcaagtaaaggtaaaaaaaatgctagatcagccatgaggtgacaatcttccctagcaatgtacatactaaccctaccgtcatgtgtgccgagtttctaggagttgtttttgggctgatctgccttgtattttgatttagtattttaagttattttcatatccatcctttctgtaaaacatttacagtagaaatctccaaaacacaattttagtgtcgttatgatgtcaaattttagtattttattttagtaaaatttttaatattatcacatattttaataattaattactttattagcactaaactagtttataaaataatatacatggcactgggatagggcattacaaaaaccacactgcccaaaccaccctaacttctccttcttcctccttgcttcggccattccaccaccaccattccaccacaaaaatcttcacacctcaaccacaccattataaacatcactgtcccaccatcactacatgttagattttgtgccgtaaataaaactcatttnnnnntaatcagatttactaattaatatacgattagaattcgcttttatgttgcatagttaacatgatttatttcatgactatgtttaatgtataaattctattaagtccaaaatatatataaatatatatatatttttttcatgattatagtttcgtcagcatggtggaatataatcatgattatatattcaaaaaattaattcccatgatttgtcaatttactggatttaaattggcatgataatcggtgataaggtatacttacaccgtgtataagtgttatttcctttttatggcattagtaaagtttaccagtatcagatgtatggagtacacattggaagggaccgatattgatctaggataagatagcataaagttactattatatctttctaagtcaatatctatgggtagatctatggatcctaattctaatatggttaggttcaacttagnnnnnttatttatgttcttcaagtttttcgtggatgctaactaat

SEQ ID NO: 32960 - DNA, 1036 bp, Cannabis sativa
  modified_base (795)..(797): a, c, t, g, unknown or other
tgctctaaacatgcttaaataccattactattaatagaaaataatttatccctaaaccttaatttttttccctttcaacatgtttctaccataccatttttttattttacaagaaaaaactataattaattaaataaaaacttcgataatttatattttttcttggaagaaaacatatatttatttctaatatttagattttttgttttgggataatacaaaaattggtcccctctattttaggtaaattttctaatttggccctccattttagaaaaaatataaaaaggatcccttgtgttattaaaatggtaaaaatagtctcaacgacataattttagtcatttttttaaataataatttttaaattgagcttaaattaaatttgagataatttgcaaaaaaaataattgttaaaaatagataatacttatactgtttttgaaagaaaaaaaaattactaaaaatatgttaaggggaccatttttaccattttaattatcacatggtcatttttataatttttctaaatagacagcccaaaatggaatttaacataacagatgagacctatttttttatacaaaaaatattatcttttctttttaactttcaaacctatttttactaggtcaatttggatttttccctctaaattttgatatgtatcaaattatgccctctaattttttggccgttaataatttcccatgaactattgagattgttagatttaaagatttttatctaatttcgttcaattttactaattcggtgattgtccatgtactaaannntgctccccaaacattgatatctaccaaatcatgcccatcgaattttgacatgtaccaaattatgtcccctgaacttttatctatattagactagacaaaattcattaaatccaacaatctcaataatttaggaaagaattttaatgactttaaaagttcagaagacataatttgatacatatgtcaaagttagtagcgtaaaaatctttattagcctttttactataacttttttattt

SEQ ID NO: 32961 - DNA, 1383 bp, Cannabis sativa
catgaaaaatgtggtaggtgagaatacatttttcggcgcataattgtgccggcaaaagtatttctaaaatactgcatttcaatttagggtaagtttgaacctttagccggcgcaaatataggcttttgccgatgcaacgaaatgcgctgcaaaactatatataacaggggtcgaagtcccccctcgccatatcttcttctcccttcttcttcttcttcttctgtaaatttttgcccaacaccaccgcaccaccaccaccatcacacccgtctctctctctctctcacacaaattctttctgtctctattttcattcaaattgcaccactaccatccaccaccgtctatcactagatttcaaatatttttttttattatatcaatatttgtattttgatatgaatataaatataattttggatatatatgtgcacatatgtacatatataaatcaaacataaatttttaacattttttattttaaatctgtttctttatatagatgtatatatgtgtatatatgtatgtataaacttatgtatatatatatgaatttgtatatgtatatgtatgtatatgtatatctatatgtatgtatatgtatatttgtgtgtatgtgtatgtgtgtgcatatatgtatgtgtatattgattgcatgttaattttttaatttgattttttcttaaattagtatttgttttaccgctccgtatcaacctttggggactgctaggagtacatcgttccacccaggtaagaaaatataagacacgtgtcatctagctcattgtcacgtcatagggcaaaaaataggataacatttactgtccaagtctgcatgggaccttctttgtcgcacgtggactttactcgctcatgagtcttgtctggatgggtgacacatgtcttctacggttgaggttgatccgacgtgacttcgactaagggtctcttcagtgtttgaacattaaacacctcttaaaagatgtacctctaactacgcattgacgattgagtgacaatgcatgtgtgatggttgtactccttgtaatgagtactaacgttcacttttggggggaaacccaaatatttgaatttaaaagtgatttatcttcctttcttggtttcctataaaaggagattaaagcttttggtaattcttttagccattttcaccttgaaagaactagagcaaaaatttctaagttttcccttaaatatttgaagaactttgttggaaaacctctcacgatatcatctgagcaaataaaaaaagcttcaaatgagtgagtaatcatttattttttgcttttagatgattgctaataaatatgtgcattaaatttcgctttcatgccataaactctatttgctctttttgtt

SEQ ID NO: 32962 - DNA, 1499 bp, Cannabis sativa
gacatggactttctcatttttgcaggaatatttttggggttgttgtagctgtgttggtgtatcatctttggagggctcaaaatgtgaccttttaggatctcaaagttcctagagttgagtgtgtcgttactcatgttaattaattaagagtacgcataggtaaccctattctggtaaatttttttaaaaaagtaaaaattattaaaattatgttcaatgacataattttatagtaattatgtgaaacaaaggggtctaccgaaaaaatttattaggggagtgtactaacatcgttaaatttaacggaatattcttatatttttaaaatattttattaaactaacaaaaatggttaaataactatattttatatatataaaaatatacatatttatcaatcattaagtagtttgataaaattaactaatattattattttaatcattaataatttactaagtcttgtcctgtgacatggttgtgtactctttcctctagagagatattattctgtgtgttctgttcttgttgaaaaagttcttttttgtcatttttttgtgagtacttgtgtttatcatggcttccagtagtcggcaaggactggtggaagaggagaatggatacaatatttggcttgatgaagaatcggaggctgtcttggactatgacaccaatgaccaaactgagaaagactatgacgatcggtggtgtcttgtaggaaggtttttaacagagagatcaatcgattttgatgctatgcaacacctattggcctccctatggcaaccgggaaaatgtatgtttgttaaggaattggatacaaatcgtttcttgtttcaattttaccacgaaattgacattcaaagcgttattgatcagagtccgtggactttcaataagtttcttctggtgtttacaagactgaagcctggtgagaatcccagattagtagctctgaatgaggtggatttttgggtacaactgcatgacttacggtcggggtttcgaacagcttcgttggctaaagatgtagcgaactacattggtaaatttgtggaatctgatgagaagaattttttgggcctttggagggacttccttcgagtaagagtcactataaatgtcaataagcctctcaaaagacgtatgaggcttcagaatactactggggtcgagttttggacgaatttcaaatatgaacatcttcctactttttgtttcatatgcgggattatgggacactctgaaaatttctgtccacgacgttttgatataacaaccgggtcattggttaaaccttatggggactggatgagagtcaaaccaaaacgtaccagccatatgattggtaagaaatggctaaaacaattcagagtggtaatggaggaatgccagacggatgcaggccagccgaattcagatcatgattccagaacagctccggtgggacaattaatgtcgtatcctcatcctaatcaagcagctgtgatgaaggagaa

SEQ ID NO: 32963 - DNA, 1741 bp, Cannabis sativa
cgtgtcgttgtcatattggtccacatattttgggcaaaattaaggacaacaatatatatatgcatatatatagattattttctaattattttattattttttaattatcatcattatttcattctaatttttcactatcaatgttcatcctcatatagagatgaattttttaaacacataatgtttaattgtttattatttacttttaaaaaagaacataattaaaaagaacaattattattcttttccttttttaatggatattttgaacttaagttttatttaattttttcaaaacaaataaaaatgtataatttattcctacgcttggtagataaattgttaaacctatttatctattttctcgctctttcttttcaattattttctattttttattatataaaattttataaatattaagttattgaaaaatcttcaaatataatttaaaaataaatatgtatgtcatgatataactactaactataaatatactcataatattgttaattaatttttaataaaaaaatccattaattaatacttttacaccatcttttttcactctcattcatcatttttttttatctatcatgatcttatagatgaatattattaaaaaaaaaaattattattttttatctattttatttttttccactaccagaaaaaaaaaggaagtagggtagatctataactgactatattaaaatggtttgaataaatttatagttaaaaatagttgagttggatagactaagcttcactgctaatatatatttttattttttaacttttttaaaaatcttaatttttagtagtaaaaggtccaaacaaatatcacagttgagagttttaaaatataaagggtttgagtagaatcttaatttttttttattattttcagccgaaatataaggttaaaactttaacttcacaaaacatgatgtccaaaatttactatatatatatatacgtatatataaaatgaagactccaaaggaataagagctacaaattagggttcaaactagtattaatctttacttaaaacataaattttccaaaatatagattttcttataaataatttaatattttgatcaaatacaatcttaaatattataagacagttatataacttaaatattattgaaaaaaataaccacacacgaagcgcggtttatttcgtagtatatcaatatagagaaatataaggcgatgatatgacgcttgaaaatctcttcaaatacttctatatattctcactttaattctcttattttttaatattttatttaatttataaatatttattaattaattaattaaaaaaattaatatttatatataaatgagagatattaggcggtgacatgacaccctatgatctctctaatgattattatttgttatttctttaattctttcttttccttaatttttttatgagatttataaatagttatctattttgtaatatttttttttactcaaagtatttcttttcttttttttttctaattttttatttaagatttttttaaccttttcattaatataaactaaattcgtaagtgagtaattaaaatatataatatatataaattaattttattataattatataggtaacttgttataaacaaaattcggctggcactttagagtagaacacgtgtcaacctaagagaatacgaatccataaataaaatgataagggaaatttgattttcta

SEQ ID NO: 32964 - DNA, 1924 bp, Cannabis sativa
  modified_base (456)..(469): a, c, t, g, unknown or other
taactaataaatttattataaagagtgattaattaattaacgtcttcctttcaaaaaaaattaattaaggtctaatttaaatttaaattaaaatttatacaaaaaaataattattattattaataatatttttaaaaaattatctaaattatatctgaataaataaattaaatttaaatattaaaaattattttttaaaagaaaaaaagataaataattaattgagtttttttgctaaaataattaattaatttaacggtgttagttttaaccattaattttaacgaaaaaaaaaattattaaaccaacaattttcgttaaatagatatatttaataggaaaattctataatgcacccccttaaaatgaatgtactgatgcacccttatttgttttggtatccaaaataatttttaatcaaaatttttgttatagccatgtacgttatagttattnnnnnnnnnnnnnnaaattttaaaaaatttataaaaatttaacacgccaaaaatagagttcaaacattgtgttgcacccgtgactattttattttatacgtgtgaaatagactgtttgaacactgctttttatattttaaattattctgaatttctcaaaattttgcagaatatcttaaataactataacgtacacgaatataaaaaaaattagactaaaaacttcttctaaatgtcgaaacaggtagatgatataccagtacattcttttaagggggtgcattgtaggtacaccccatttaatataagatgatatagtgtgcttttacaatgcaccccttaaaatgaatgtactgatgcaccctctacttgtttcgacattcagaataattttttagttcacaggttgcagccccttcacgagggggtccttaaaactcaattttttagtggccacccaaagaatttcagatcgatcatctttggagagacttccactattgtggtccaatactggatgcacttcttcaacatcattactttgactgataagatcattagagtgatttgtatccttctaggtaataggcattttggctttgacatcacatttatctttctacgcagctctacctttagaattagtttggtcaccctgccttgacgcatgatttctttcttttattcaggttggctggtaaatttagatttcttttactgttcaacttgaggaggcttctccaaagttttgcccacttttgctttccctgtatccttacgcgaatcatatgtttcagaatttttaggatcaacttttttcggtggtgttatcttatggggtcgtctgtttggtttagtttccagtgatcagtgttatcaatacaacttccatttcgacattttctcaagcaactgtaaataaaattcttcttgttgagttaatttatttttagttctttctaacttctttaccataatgaccataagatttgactcgtttggattgtccttcttttcagtaccaccgtcagcaggcatgttttggtgatcatcttcaataccattagaactattttctcctgattcgtcgtcttcaactataggatcttcatgattttgatctttactagtttgatccttcttgtgatgactggtagccttagttggatcttttgtatctcttgccttagcattaggatcagtaaaatgaagaccaatcttgtttcgggtgagtaccatgattactgaatgtaattttgagatgatatcactacttccttcagttaagtaaaaatatatttaccaagattttcagaaacgaattatttaatgtaagaactgaagaaaaataatcaaaagaaacagatcgggagagaacactcaaattttttacgtggtttgggcgttaaagaaccttagtccacgagtcagtttgattatttattaggctagaaaagccaaaaggatta

SEQ ID NO: 32965 - DNA, 1752 bp, Cannabis sativa
  modified_base (584)..(585): a, c, t, g, unknown or other
gtacctaagtatatacctgccaaaaaaatttgtaaaactaaaggtatatttaacacttaaaatcattaacgttagttgtaatatatttttcaaattttcgtttctagatataattttctctaaaaaaaaattattttaaaaatatatattttaataattttcaaaaatatcatctattcttataataaagacttaaaaaatttatttttctaaggcttaatacaattcaagatggccttggtaataagattcttagactatgtttgttaggaagaaaaaaaaaatatgaatgaagagtttagagaaaatgggtaataagaaagatagtgataatagttgttaatgttatcatttgtttagttgggattaaagttgtaaggatggaccatttatcattattaatacattatatattaggaataattagataagaaattatttttaataaaaaaaattatatttttacatttaaagaatttttttttatatttttacaattttatataagtacaacacgaaaataacaaaaaaaattatataaaagtaacataagaaaacaacaaaaataacatacagataacaannaatcaacaacaaattaataagaatacaacataaaaagaccgtattttctataaataaaatcaaaaaaattataaaaaatatttaaaattccgtgaaactatatatttgtaattttttttgttatttttgtgcatctatgaaataatctctatatattatttctcaagaaaatatattttatttatttattatctttttcttccatttccctcttttttggagggactctacgcctctctttttctctcctctcaaccaaacatagtgttactatcactgattggttgtggctttttaatgtccgtcgttgtcgtattttaatgctgttttattatgtgttcgtcgtttattgcatttgttgtcgttttcaagaatgtgtttcacatggtgtcgtttatatgaatgtgtatcaaatattgtcgtttattattcatttcttttgtatgtccttttcaatatttgcttcacttcttgtcgttgatataatattattaggtagttttatttgtactttaaaattttataaataaactttattttaataatttttattttataataaaatatatatatctttaattatattattttttttttaaatttttttcttacaatttatacttttaaaaaatatagttatggaacaaaaataaattatattttaaacattttaataaaaaaaattaaaataaaaaagtatgtaaaattttcttagaaaaaataaaaaaaatatacatgatttaaaaaaaaaaaggtgaaaataatattaagataagtattaaaattaatacaaaataaagtgagaatttaaaaatatatattaaaaataatttttaaaaatacatattaaagtatactcatcattggggtgttggttgccggacgttggtcgtctagcttaggcaatagttctcactagaaagaagaaagagaagagaacgaaagcctttgtcgtcgagtacaaagagaaagagagagtgagttgctgatggcgatggagctttggcaaggccgcttttggaggtggcggctagggttaagctgattggagaaggagaaagagaaagtatcggctacaaaaatattttataagattttaaaaactttttgtaaatatatggtaaacctgtctatataaaaaccaaaaaataaaaaataccataaaaa

SEQ ID NO: 32966 - DNA, 1824 bp, Cannabis sativa
agccacgtacatagaaacattattctagtttttaaatttctacttagttgcattgcaattgcattaatattttactaacgctctgaaattagacatatcaacgattacaaactgtcaacaatacaatagtttttatgatatttgcaggtgtttcatatccacaatgcaacaacaaagctatttaaaaaaattataacatggttagttttattaatatattcatttggttgtcataaaattagtttacaaaattctaacagttgtttctctacataatattattaaggtgcaattgattgttgattagtgacaaaaaaatactgacaaattttttcatcacgatacccattcaaattttctatttctagttgcatttaaattgtatattagttgaacaatagttgtggtactataatattattatcatttaaaaaaaaaatagagctcagaattgacaatacacgactcgtacatagaaaactcgattgtagtaagttttgtttgtattacataagggcattattagttgttttaaggtttgatattagttgcctcacaacacgtataattgttgcattacaatttcatgacagttataccatagttgacttacaatacttatattttcaaactgtcaagaaaaagattcaatttcgtttctcatattttactatggacagtttgatcaagtaacaaattatgtatattacgaagctactgaccaatacatttcaatagattacaaatatgaagaactagtacacaagttaaaacaggtgctggaatgcaacaaagaaaatactctactacaactgaaataccaagtgaaagaaggataccaaccgtcgaggataaatgacgatccaagcttattcttctacatacaactaaaattgaaaatccttatttcacaaagtatccattgtgtgtgaacatggtcagcaacacaacaacacctcattttttgcaaggagcaactcattagttgcacaataattgctttaaggttgtatgtcatatccagaatattaacaaaaataaaaagcattatcaatatcatatttgacacattaatatgaagtttcaatttttttcttactacattgattattctgttgaatctttaaaaatttcttattactaaaatagagcaattttcaaggcctaagataaagaaccatggggactcgaactctggagaacaactaaatgaggaactattgcaaaatattccaaccaactacaccacacactcaatggaacaattaatcagtcatttaaaaaataaaaaataattattacttttgtatatataaaaaaagaaacttaaaattcttagagatatttaaaaataaaataaattggatttttacctcccaaagaaactagtaataaaaaaagttaggacaatgttagtgcaaaactataaagaaactacaaagaaaccttcagactctcatcatcttggttcttccctttcttaacttcagagagggaaatattttaagcaacattaaccttcgatttctttttaatagggcaacaatcactttttttggtaggcagagcaaagtctgaatcatcatcttcaacaacgggtcgtttgcctttagatttgttggcaagagatttaacaccaatttttaaaggttttttcgacaattgtaatgtgcccgcttcaagcctccattaggcccttacacccgtgaaatgatgggtcttatacacgagtatatcactttggctgcttcatggactgacgattggccatatagaccaacacgagtgtttccagcgtgcactttcaaggaggtcacccatcct

SEQ ID NO: 32967 - DNA, 1039 bp, Cannabis sativa
aggaattaataatttaggaaatttacttggtaaattctagatctacttattggatgctcagttattgttatacccaaaatttggctggaacttcagaggatgacacatatcaaccttggagaatacgaatcgacaaatataatggcaattatattaaaggatataaattggaataactcattcaatgcagagttgatagagcacatccataactcgttgattgtatagtcttgagcgagacaaagatgtataaactatagattcacgtattgacgagaaaccattttgcatcagaggacatagttcaagggaggacaatgataatacatagcgaggcatctacctcgcgatacgagacgtgttggttgttagaacacttagcgtataatatacaatatactaactaagtataacatcttgatggacatgaatagtgattggcgtgacacctatctctctaaaggaagacatattcttgctaccttcactaatcagctccaaacatccttcaatgagatgcactgctacgtcgcatcagctctctcagaaagaagctgacattcaaatgatgttggctgttgaagttcgccttgtcaccaaaaactccgtttgtcagatgaagcgttatgtcttcacaggcagaaatgacaggatttacattatcaacctcgaaaagagttggaaaaagctccaactcgctgccaaggttattgttgctattgtgtgctcatgtacctagcgagatgccccagcgagatacactttttagcgtatctaaatccagatcaacgttgacccgttaaaagcgctttaaatcacagttgtatgattttcaaataataagtgcatttatttacgtggagcatattaaaagcgcacaatttttgggaaatattgttctgggatttgtatttaattgtaattaactgccaccctatgtcattataaataggggcaaaatgtacagaaaaaggggacaaaaaatccttgatagaaaaagaaatttgtattagactaatctgaataagattgactcgtg

SEQ ID NO: 32968 - DNA, 3041 bp, Cannabis sativa
aaaacacgatgaagtatgggaagtaactcaactcccagcacaaaggccccgactcatgcaccaacccatcactttcacagaagacaatgcaaaatcagtgcgtttccctcaccacgatcctgtggttatagagactcacatcgccaataaggtcgtggcaagaatactagtagataacgagagttctgtgaatattttgttcaaagatgccttcatggccatagggctcacgaaaagggttctatcgcccagcagctcccagctcataggattcaacgaaacaacgcttatcccaatgggaaaagtacgacttcctatcaccctatgcccagacaccccacagagcactttcaaatactgcacctttgtagtagtagatttcccgacagcgtacaatgccatccttggccgaccggccttggtcgattttggagcaatcacctccatccgacacttatgcctcaaattccctacccgggaagccagagtggggacgatgaggggaaaccaaggagaggcaaggaaatgctacaatgttgcaattcacttgtcggtactgatagtgtaaaggggtgaagagccaaaagtgatggaacaagatgagttggatccccacgtgggatccgaaacagctgtagaacctatggaggacaccaaggaagtaagtgtgtgcgaccttgactccactaagtttatccgtctaggaaagaacctagagccggaggaaagaagcaagatcattgaaacattaaaggcagccacagatgttttcacgtggtgccaagaggatatgaccggcataagcccccatgtgatcacccatgtcttaaatgttaacccagacatgcctccggtgcagcaaaagcgacgtcctcttgatccagtaaaagcagacgccttagagaatgaggtggataagctgttaaccaatggcctaatccgggatgtgtacaacctggaatggctggctaatccggtgttggtacccaaactgaatgggacgtggcgtgtttgtatagatttcactgatctcaacaaggcttgcccaaaagattgcttccctttgcctcaaattgatcaaatggtggatgccacctcaggattcaagctgctgtccttcatggacgcgtactccggatacaaccagatgaagatgaatgtcgcagatcaatattgtactagcttcaggactgataagggggtatactgttacctggtcatgcccttcagattaaaaaatgtttgtgccacttatcaaagaatggttaaccgaatgtttaaaggcctcttgggaagaaatatggaggtatacgtagatgacatgctagttaaatctaagacatgcatgggccatgcagatgacctcatggagtgctttgaagtggtttgaaggtatgtgatgaagcttaatcctaagaagtgtacatttggcgtcaaatcgggaaagtttttgggatttatcgtcagccaatgaggaatagaggcaaaccccaaaaaaatccaggccttactgagcatgccttcccccaagaaatacaaagatgtgcaaagcttgactgggaaggttgccgcctaagccgattcatttcccggccaactgacaagtgcatccagttcttcaatattttgaagaaatgtcgaaaattcgagtggattgaagagggcgaggaggcattcaaaaaactaaaagagcacatggccaaacccctggtactgtcaaaactggttcacggagaagacttgttattatacttggccgtctctgagaacgttgtcagtgcgaccttggtccgggaagatgataaggtccagcatccggtgtactatgtcagtaagcgcatgataggagccgagacgcggtatcccttaatcgagaaattagtttgttgcctcctgatggctttaaggaaattaagaccctacttccaagcccatcccattaaggtacttacaaatcatccgcttccgcaagtcttgcagaaacctgaagcctcgggaagactccttaaatgggccatggaactgagtcagttcgatatacactatgtcccacgcatcataaaaggacaagccctggcagacctcataacggaatgtaatgaagcagaggccagctcaaatatgtcaaccccacgaatgccggcatggaaagtgttcgttgatgggacgtcaaatgaaaatggatctagtgtcgagatagcaatgatattgctagacggactccggctccaggctgccctgcgctttgcatttccagcttccaacaacgaagttgaatacgaagcactaattgcgagactaagattggccaaagttgtgggggctacaagggtagaagtcttcagttattcacaattagtggtcaaccaaatatcaggggaataccgaacacgtggagaaaaaatggctgcttatgtagcgattgtcagagaattgctccagaagttcacaaaatagaaagtggaaaggatctcacgagaaaagaatgctcatgtagactgtttggctaagctagcctcggacagtaaagtagaaaaactgggggtggtacccgttgaacacctcacggagccaagcatcaaagccaaagaaacggtagctactaatgagcaaggatcgagttggatggactccatcatcaaatacgtaatgaaaggagaattgccttaggaaatggctttatccaggaggttacactatcaggcacattgatacgtaatgatggataatattttttaccggagagggctcagcataccatacttaaggtgtgtatcggaccctgaagctagacggatcatgcaggaagtccatgaagggttttgtggagatcacaccggaggttcgagtctctcaaagaaaatattgagacaaggatacttttggccaacaatgaagaaagattgtatagactttgtcctaaaatgtgattcgtgccattgtgaacataccaagagccccgcccaacgaaattactctaatgactagcccctggcccttcgcggtgtgggggataaacctcattgggtccttaccaacgg

SEQ ID NO: 32969 - DNA, 3349 bp, Cannabis sativa
  modified_base (2057)..(2058): a, c, t, g, unknown or other
  modified_base (3008)..(3008): a, c, t, g, unknown or other
atctcgtgttgagactcatggccaaggcacacaattaacgtctctcagaggtttaggccacgtcccgcgcaagcgacatactggcaagccaatggaaacatacatgctagcctctgtcagcatttttagatgcactaccaggtcagaccgatagtgttcatgagtattccaactcatggagacatatgagtcctctcatggtcctcatatgcccgccctactagtcccactaactagtagtatctcacttagtaccaaggtgccaagggatggtggagagctaacaccaggtactccctccttaaagagcattctaagtttttagccttctactaagaacatatatgatttttgctttgtagacatatggtcatcaccatataccaaatcacagagtttctcaaatttgattgccccattgtattcatagacccaaatatatagtgaataccaagtcttgtcctgatccagacaatattgaagatatttacgaaaatgccactaacatacaagctaagcatcagcatgcaccaacatgggccaccacttaaccaccacttggccaccttgtgggcatcacctaacttgtatcataccatcttggctcgcacgttacaatctcccccactttaacatgttgatgccctcatcgagagaccgtaggcaaattttccttagctcaactcctaagcttactccaagcttcatctaaattctaagtttgcacttgtccctttatctccatagaaccactctcttggtgacgatttccctcgcctactcttgcacttgatcaaagaacttgtgccattgtcgctattcagaatcacccatggaatagtgccaccgcacttgaatacttcttccaacatgaactctccagagtccatcacaatgcccctccagtgaaccaagtagccctttgtaatgccctaatctatagggacgccacgtgtgtgattttataaactagtttgatactaatagactaattaattattacaaacaatgatgatattaaaaacttgactaaaataaaatattaaaaacggacattataatgacataaaaagtgtgtttcagggatccctgttataaaaagttttacaaaagaactataaaggacgatgccttaaaaacataaaaccaaaatataaagtagatacaacccaaaacaactcctgaaaacccaggtcggtgagatcaatatgtacattgctggagaagattatcacctcatgattaatctagtttttttttttttgcctttacctgcaccacatagcacccgtgagtcacaagaactcagcaagaaaagtaataataataatcatatattttattattcgaatattatcatttataggcaatgagaatcaaaccatcacacagtattcataacatgaaatccaaatcactattggcatctaccatgaacaagcatcagtatacagatatctagtaatacaaaactagtataataataataggaatcatattcatttaataatataaattatatatatgttacctcataaagtaattatcttcattacaccacattgttaaatcaggtaagtcgatgctttagtctgataatcctctattgcattgcctaataaggcaagcccgtgccatagcctggcacccacatatcacataattgcatcacctaattaggtgagcccgtacctatgctcagtactcatatatcactgactcccgtacctacgccaagtacatctcaaggaagaaaccctacaacggtttcattctatgccataacctggcaggaagccctacaacagtttcattctatgccataacttggaaattttcatatcaccgatgcccatacctacgctcgatatgtcatcaaaagcaacgcatcatcaggtgagcccatatatcacatcgtaatatcattacattatcaatacttaaccaatcaatctttttattatataacattattaatcatatctcaatattaatcaattcacaacgtaccatgcaatacaatatacttttcttacctttaatccaggttaatacannttggccaacccaagtagagaactatccccaatgatctcggtcctatgtcacaacaaaagtaaaccaataagtgtttatcctaaaatactgcttagcactcacataagacaacctaaggtttcttactaaatcctgtagcacaaacacactaatataaaacttatatttttgctcttaaacatacaccatatgatagagctcattgcaagctttgaaacggtatatagaacatccaaaacggacacccaagtgaaaagttatgacaaaaatacgatttctcaactcctaagaatttccaaaaacggtagaacacgaaaattctaattttcgcactcactgaaacactaccgaaatctagccaaatcactccaaacttcacagggcacatatatatatcataaatactactattcttatgtaacagaaattaaaatcaagcccttaaatgaaaaactccattaacgttcggattaagctttaaaacgttccaaacttgatttctaactcaaaatcacctcacattcaactagtaaatatcgaaactagtcccgtagctaccaaagaacaattctacgaagtcagaatctccataaccactctaaatctcaaagccactatataaaaccaattatttttaatataaaacgaaattaaatcttaccttgagctctccttcttcagtgattttctatcccgctactaccggagcttagatcactagatttcgggttaaagtcaaagaaaatagataaagggagaagaagatttcattacaccgaaagagaagattttgttcgtactgtttataacttaacatgtatatatatgacttagttttaaaagagtcttttaaaaaaataatatatatatatataatatatattaaattcataataataataataataataataataatattcagaatattaataaaaattttattattnatagttatcttattattttttagctattaagaaatctttaattttagggtatttggccaactctgagtactccaaaataccccaatatttctagaatagacttaactcaataattccaacaataattctaactatatcgttgtgacatttttgacctccaatcgggtctccagggttgtcgcacctgaaaatatttttatctcacaaataacttatattatattcacatatttcaaataaatctcaataattaataaattacatttatttatccacttatagcaaaatttataattatttatgctaaattaaattaccaagatcataatcctactcattac

SEQ ID NO: 32970 - DNA, 1797 bp, Cannabis sativa
  modified_base (908)..(908): a, c, t, g, unknown or other
tgacagcttctacttgcccatttgcttgaggacggaccacaacagagaagcttttgatgatggcatgcctgttgtagaaattagtgaacatgccattatcaaactgcttctcgttgtctgacacaatcttttgggaaagtttgaatcgacatatgatgttcttgacaaaaaagtcaaggacttttttggaggtaatttttgccaggggttcagcttctatccacgtgatgaagtagtctactacgactacagcaaactgtacccctctttttccttttgggagttaaccaattaggtctatccctcaaactacaaagggccaaggagactgcatcatcgtgagcttgttgggtggagctcttagaatttttgagaatctctagcacttgtcacatcttttgacatagtccatcgagtcctcgaccattgttcgctagaagtacccctgttagagtatcttcttggataggctttgcccccggtatggttgccgtagaagccttcatgcacttctatcattagccgttcaacttcgactttggtgacacacctcaagagaggcacggagaagctccatctatacattactctgtctaaaattagatacctagcaacttttcttcttagcttgtttgcttcattcttaccttctggcatacaataggtgtcatccatggtggagtgtcatctaacatgtcgacttcttttgggatggtaatactgggttctcctagaaattttatgggcaccaaatttgccttgtcagtaatggtgctactcgccagacgggcaagtgcatatgctatagtattctgctctctggagatctacctgattgtgtagcctttaagctgactaagcgagtctataattttgctcaagtaggccaccattttttcacctcgagntatgtattcacctaggacttgattcccaactagttaagaatcgatgaatatgtccaggtggtcagctcgtactttatgcgccagcttgaggccgactattaaggcttcatattcagcctcattgtttaaggctttgaagctgaatttgattgctccgtgcagttactgcccccaggtgttataagggcaatacccacaccaaaaaattggttagtgtagcttctgtcaacatggagtttccatgttagttccttaagtttttattactgctcttactcttgcttcttctttggctcttgcttttttctcgagtcttgagagatctcaagagataagttggtgcactcaaccacgaagtttgcaagggcttgaccctgtatggctattcttggttgatatgtgatctcaaactggccaagctcaatggcccacttgagtagtcggcctgatgcttcaggtttctgtaaaacctgtcgcaatggttgatcggtgtacatctttatggggtgtgcctggaagtagggccttagatttttggaagctaagagcaaactgtaagtcagcttctccatgagtgggtaccgattttcggtgtcaattagtcttttgctgatgtagtatatagggtgctataaaccctcttcttctgctgtgaggacagcaatcacaacatgttttgtgactgctaggtacacacctagttcttcattgtttaggggtttagacaacataggtagttgagccaattgtttcttcaactctaagaatgcgttttcacattctctgcccactcaaattttttgttgcctttgagaatgttgaagaagggtacacatttgtttgtagacttggacacaaatttgcctaatgcagcaatgcgtcctgttag

SEQ ID NO: 32971 - DNA, 4531 bp, Cannabis sativa
gaaacgttagaaggcagggtgaaatggttgagaccggaggtggtcagggtggtagaaatccccaaaacccctgtggacgcggtagaggccgcggtattgctccgaggggtggccaataggatccacctcaagctccagttgattgggagcaaaggtttgctgagacgcaagccataattgctcaacaagaagatgagattcgaagactcaggcagcaggatactcctgttgagcttccccggcagccgcctgctgcagttctggcagcttctgcggtgctagtagaatagcatgttgctggtaattgtatggagcctttatatgagaggtttaggaagcaagcacctacagtgtttctgggaggtcctgatgtacttaaggcagaacagtggctgacggtgattgaaagaatattgaaattcatgggagtggtcgggaatgacaaggtggcgtgtgccacgtttcaatttcaggaggattccttggtgtggtgggaaatggtatccctcaccaaggatgttgctagaatgacctgggaggaattctgggatttgtttaatgctaagtattacaatgaggcggtcctcagtgcaaagcgaaaagagtttgttgagttggtacaaggcgagggtatgtcggtgattgaatatacaaccaagttcgatcgcttggctaagttagcctttgggatcgtaccaacagacttcagtaaaaaggagaagtacttggcggggttgaatgccaagattaagcacgatctggttatcacaacaaatgataccacaacctatgctgaaatggttgacaaggctcttcgagctgaaggagcagttaagttcttacaagaaagccgagagactcctggtgctggtgggaccactactctccctatttctaaccctggaaaggagagtggtgattccacttttgagcaaaataagagaactttcccattttcggggagttcagggcaaagtaaaaggtttcaaggaaaccagaataaagggggacgccagacttattcctatcgtgagtgtccgcgctgcaagaaacatcatctcgggacttgtaaccggatagcttactttcagtgtggatcagtagggcacctcaagaaagattgtccccaattgaaaaaagaggaacctaagcctaaagtcaaacctgggcctgtgcgtgtatttactattactcaggcagatgctgctgccagcccttcagtagtcacaggtcagcttcttatcaacggctttgctcttactattttatttgatttgggtgcttcatgatcatatgtatcatcgagagttcttaatcaacttggtaggcctagtgatgtttttgagatggaatttggaaccctattgctcaatggggaattaattatttcaaggaagtgggttagatcggtattaagtagaattgaaggcagagaattgagcgctgatcttgtggagttaccattggtcgagttcgatatcatactcgggatgggctttttctccaaatactctgctagtattgactgcaaatggaaaatggtaaccttccagtcggagaatgaggaaccatttgtttttgttggttcagttcaaggttctcgtgtcccaataatctcagcattgaaagcaagggatttactatgcagtgggtgtgtaggattcctagcggttgtagttgattctagtaaacctgtgttacttggacctgaagaggttaaagtggttaaggaactcctggacgtgtttcctgaggaattaccaaggttactacctcagcgggagatagattttatcattgaactaatacctggggcagaacctgttgcaaaggcaccgtaccgaatggcacctgcagaattgaaacaactgacgatacaactccaagggatgctggatctagggtttacctgacctagtgtgtcaccttggggaggtccgattttgtttgtaaagaagaaggaggggactcttcagatgtgtattgattaccgagagctgaacaagttaactatcaaaaaacaaataccctttgcctagaattgacgatttgttcgatcaacttcagggcaaaacggtattctctaagattgacttgagatctggatctcatcaactgagaatccaagaaatggatatcccgaagacagtcttctgaaccaggtatggtcattacgagttcctggttatgtcatttgggttgacaaatgctctggcagcctttatggatctcatgaaaagggtattcaaggattttcttgataattttttaattgtatttatcgatgatattcttgtgtactctcggtcagaagcagaacacgaacaacatcttcgtatggttctgcaacgactcagagatcataagctttatgtgaagttcaaaaagtgtgagttttggctgtcacaagtgtctttcctggggcatattgttggaaaagacgggattatggtagacccatggaagattgaagcagtgaagaattggcctagaccaaaaacaatcactaaagttcgaagttttctctgtttagcgggttattatcggcgttttgtggaaggtttttccaagattgcaatgtcgttatttgagttaactagaaagaaccaacaatttatatggtcagataagtgtgagaaaagtttacaagagctaaaacaacggctgatcacagctcctgttttagccttgccgtttgatcaagagaaatttgtggtgtattgtgatgcatcaaggcagggtttgggttgtgtgttaatgccggcagataaagtcatagcttatgcttcacgacaattgaaagatcatgaacagcgctatccaactcatgacctggagcttgcagcagtggtgtttgcgctgaaaatttggcgacactatttatatggtgaacggtgtgagatctatactgaccacaaaagtctcaagtactttttcactcaaaaggatctgaacatgagacaaaggaggtggttagagctagtgaaggactatgactatgaaatcctgtatcatcctggaaaggcaaatgttgtggcaaatgccttaagtcaaaaaggacctaatcagatttccaatatggtaatgatttctcctcagttagcttcggagatgactagggcagatattgaatttgtgattaagggattctataatctgacacttcagtcaaacttgttggaaagaatcaaactggcacaactagaagaccctaaattgcttaagattcaggaagatgtcttagcaggcaaagctaaggacttttcgatctctgacagtggaatgctactgttcaaagcacgagtgtgtgtccctgttaacactgaacttaagaaagagattctggatgaagctcacactaccccttactcactgcatccaggaacaaccaagatgtatcaaaatctgaagccctatttctggtggtatggaatgaagagggatgtggtagactatgtcactaagagcttaacctggcagcaaattaaagcagaacatcagcgacctacaggattacttcagccattatcacttccagaatggaagtaggaagacattgcgatggaatttttggtgggttttcccaggaccacaggaatgtacaactttgtttgggtcgtggtggatcgctttacaaaatcagcacatttcttgcctgttaaggtaatctatacagtatatcaatatgttgatttgtatgtgaaagagattgttcgtcttcatagggtaccaaagtctattgtttcagatagagaccctaaatttacctcaaagttctggatgagtttgcagaaggccatgggtacgagtttgaagtttagcacggcctttcaccctcaaacagatgggcaatctgagcgaactattcagatacttgaagacatgttacgagcttgtgtcatggattttggagggtcatcgagcaagtatttgcctctgattgagttctcctacaataatagctatcaaagtactataggaatggctccttatgagctgctctatggtagaaagtgtcgatccccaattcattgggatgaaataggagaacaaaaatacctaagccttgagttggtccaaaagacaaatgaggcaatagataagattaaagcatgaatgcttgctttgcaaagcaggcagaaagttatgcagatcccaagcgccgggatactacatttcagccgggagatcatgtcttcctgcgtgtgtcaccaatgaaaggcatcaggcgctttggaaagaaaggcaaggtaagtcctagatttataggaccttttaaaatacttgagaaggttggacaagttgcttaccggttagcgttacctccatcgttgtcagttgtgcataatgtattccatgtgtcgatgttgaggaagtatgtatctgatccaatgcatgtcctgagttatgaggcattggaattgcaaccagacctgtcatatgacgaacaaccagtacaaattctggatagaaaagagaaggtccttcgaagcaagaccatattgttggttaaagtactctggaggaatag

SEQ ID NO: 32972 - DNA, 1269 bp, Cannabis sativa
aaaaatttcaaggtttattttagtccattttttatctttgttcttctcaaaagaaaattcaattattagccatctagataatactatcattttcaagtttcgttgtcgtttgatttgttttctacgcttgaaattgtcaacggccacattcatttcttgacccatttatataattatataatgatatatcaatttataatttgtcttaattgataaattgaaatagaataattagcaattttttttctttgaacttttgataatcttgattttggcttctaaaatatacgacttgttaagaatttttctaaattataacatttatagaaatttagtttttctcttacgttccgtctcattattctttttaaatgatagacgtgtctttgtcaattggcaactttaccctttaaattttgaaaacttttaaatcgtacctcctcaagataaaaatgagaaagattcaatatttttttttacaaaatcttaaaaaattaatttaaatcttaagaaaaatcattttgaatgattaaaaaaattaaaaaaatagattaaaattttaaaactaattaggcaatataaaaaaaaaatttattttttatttaaaaattcatttagatattaaaaaaaatatgttaaaaatttaatgtgtaaaagtatattaaaaactaaattttacaggaacgaacttgaatatatattattcttattaaaaaatatagatttgtttaagtaaacataattatttttagtttaatttattactttttttttttaaaaaaataattttatatttttattgaatttttaattatttttagaagttttttcatttttacacttcaaaagagtttttttttttgcatttttgcagatttctatatgaaaacacatattgtaactaacgaaataacttaaatcgcaaccaaaatccgcatagcaacccccatggaaactattggagaaaccatcttagaaaatcaaattgtaaatttaagaaaaagttaaaaagtagtatatagggtaatttccttttcttattatttgttaatgtatgagtttataaatataaataagtttgatttttttttttcaaaaaatcttagttcatttaaattatttattagattctcaataattttggtttgattttttaagaaatgtgttgataaataaaacaaagtttgaaaatattttttgttgggttttgtgccgtaaataaaactcatttcaatataatcagattaacttattaataaagatcagaaa

SEQ ID NO: 32973 - DNA, 1419 bp, Cannabis sativa
  modified_base (240)..(242): a, c, t, g, unknown or other
  modified_base (504)..(505): a, c, t, g, unknown or other
tctaggtccgagaccgagacttgcatgcaattcttggtctcgatcccaattctgggtcccgagtcctgttccatgttcgggtctaagtttaggtcttggttttagtcctgcatcccggttcaggtttggattcgggtttgggacccattcccagggtgggtttgtgtctgagtgtgggtcctggtccgattatagtttaagatataggtccaggtcctggtcctgttcctaagtcctgannngcttctggttttggttctagtttcaagtcatagggtatgcgttcaggtcgagtttgggtttgagtttgggttcgagtcctgatttttttctagggcgaggtcaggtctggatttcggtctcggttagggtttgcggttgggtccggtgcctggtttaggtccgcgtccaggtcccgctcctattccaagatcctagtccggttgcagttcaagttttgattttggtcccgagtgtgggtctcggtttggggtcaggtcatgnntctcgatccaagttctgaggccacagttctggtcctagtttgtgggctcaattcccaggtctaggtccccaatctatgatcaagtcctaggtcctggtacgggtccatgttcgtgttccggttcaggttcgggtctcgagtcccgatctgagtccaagtcccagtttgggttatggtccaagtatgggtcccagtcctagtgcgagtctgaggttcaggtccctggtctaagtctggttcttaggtcctgggtcaggccccaatgtttgggtttgggtctaggtctaggttcgggacccggtctgggtcaaggtctcgatcttggtttacgtcctaagtcacaggtcccggtctaggtccaagtctcggtatgggttctggtctgagtttgggtttaggtttgggtcctgttaatgtcccaggtctgggttctagtcctaggcttggttcgattccaatttcaagtccgggatcgggtctgaatcccaatttgggtctgggtctaggtctgggtatggatccgggtatgggtcatggattcaaacattgactacgggttaggtcgaagcctcaggttcagatttggatctcaatcttggagcttagtcttgttccagttcggccctaggtctagcaccgggtcctaagtttgggtttgggtccgtgtttggggttgtgtccccgtagtcaggtcctgggttccgagtccggagtcgggtcctgtgtcttgagtctagggtcgagttttgggtcttagtccctgttccaaggcccagttttgggtccaagtctcctatctagttctgaatacttggtccaggtcttggtctaagttcaggtttggggcccaggtcccccatctaggtttggatcctgggtctcggtgtatgtccaagttcaggttcgggtttgga

SEQ ID NO: 32974 - DNA, 1075 bp, Cannabis sativa
ttaaatgcatgattcaacacccaggcctttgctttcaaagaaaaattcacatcaagacacacagagaaagcctcaaccactacccccaccgtatcagttacaataatgacagcaacagaacacaaacctttgctaccttcactcgattcgataaaacaaatgtttaattatcacattatcacaggagaatgacagaacaaatgttcaaaagaatcctctaaattatcacaggtcaaagaacttacaaaagtcccatgtttatacaatgtgttgaacaacactatctttatggtattcctaaagttttctcactctagattaataatgaaagatcttaaaaatattcctactataagaacaaaacaagtgtacctactataaacatttcctacatatttaaaggtttagagtttagaatttaatttaaggtttaaacaagcaatccacacgaattttgcaagaggacaatgacaaaacaaatgttcaaaagaatcctctgaatcaccacaggtcaaacaacttacagaagtctcatgtttgtacaatgtattcaacaacactgtctttatggtattcctaaagttttctcactttggattattaacgaaggatgtgaaaaatattcgtactataagaacaaaacaagtgtacctaccataaatatttctaatatatttaaaaagtatggctaataataagtaaaacatgtacccaaaagaataagagactctaaagtaataaaggaaatgtgagtgtgatttttggtatggaatggatttagtccccacattgaggataatcaccaattctaaaaagtttgtaaccaatttcttaatgtggttagttatttaattttgtataaagttggtaacatgtttatatgtttaaataatcattttccaaaattgaataattaatttcacaaactagcgatcttttttaaaaaaaaaaaaattaaaatgacatttattaaaaataatcagttaatatacatcatagacataagatggataaacatctattcaaattagttcatcaactaccctaagtgtgcgaactactaattcatgtgcga

SEQ ID NO: 32975 - DNA, 1970 bp, Cannabis sativa
ggagatggattctctatggaagaataaggcctggtagttgtgtcgaggccggagaacaagaaaattgtggagtgcaaatggattctcaaggtgaaagagagaatcaatgagaatgaacctatgaggttcaaagccggattagtggctaagggttttacttaggtggaaggtatagactatactgaaatcttctcacctgtggtaaaatacaagacgataaggttgatgttgtccttagcagcacatttggagtttgaagttgaacaacttgatgtcaagactgcttttctaaatggattcttggatgaagatatctatatgaagcaaccacctgggtttcaggtggaagagaaaggagttgaatcagtgtgcaagcttaatagatctttatgtggtttaaacagtcctcaaggtaatggaataaaagattcgatacgtatatgatcagatcgagttcaaactattcgcatacaatcactgcttatattttaagaatctaaagcaatctacagttgtgttcttattgctctatgtggataatatgctcatcatgagtaaagacaaatcaatgatcaaaagtataaaagccaagcttaagagagaatttgagatgaaagagcttgggcaagtttaaaaaatacttggtatcgaagtctcacggtactggaaggaatgaactattagtttgaagaagtctaggtacatcaagaagattattcagaagttcaacatggaagatgcaaagagtacatctgttcctttaggaggtcagtttattctgtcaaatgaataatgccttaacaatatgaagagagagaagaaatgaaggatgtatcatatgcagtggttcttggatgcttaatgtacgtgatggtgagcatgagacgggacataactcacgctttaagcatcctaagcaggttcatgtccaatctgggcatggaacattggaaagcccttaaatggttactgagatatttaaagagcacatgggattatggtctgacctatgagaaaggaaaaagagaattggagttcgtggatgcggactatgcctcgaatagagatacaagaaaattaaccaccttttatgttttcttgagaaactagaactgtatatgctcgaaggcttagttatagtctgtggttactctttccaccacggaaccagaattcatgacaactacgaaagcttttaaagaagtgttatggcttcggggaatactttatgagttgaaacaaatcaaaagaagagtgattgtgtattcttacagctagtcatccatccatctatgtaagaattcgatttatcatgaaaagagcaagcatatagatataagactccactggattagagaaaagatagaagaagggttggttaatttagagaaggtcagtactgaagataatcctactgatgttgggactaaggtcttaaccttaaacgagttcaagcattgcttaaacttgatcaataaaagttagtatacgagattcctagaacaccaactaataatggctgaattctttcttcatcgtcatcatttttttaatttaaagtaactaggtggaatttgtagtatagttcctccaaatgaaaaagtctccattttcgtcagtttactcgtggtaccaaaaggagtctcgtagaatgatagtcccggaaggaagttcttggatgtctatcatgtccactctgagtccagtcttcatgatagctagtccttccctagaaaggagttccagctagctagttatccctcttagaatgatagatctggatagtcgttttcagtgaacttatatcctatccgaaagtgtcttcagtaagtgtctttggtccgtgagtctggaagctcgttcatgatcccggaggccttagtacttacgttgacatagagactttgctaaatgaggagttggttaagttagttatttctaactaacttaaacaaccttgtttcttgcag

SEQ ID NO: 32976 - DNA, 1167 bp, Cannabis sativa
aaagatagcgattctagagatcaatctcattttttccagacacgaagacaatcactataattacgggattgagtcagagaataaatgcaacacattttaattttctatttcttgcattgtaattatagaattaatatagtttcttattttactcattataagcaaaaagaaaatcattcttcatgtattaagtccatataaatagtagcctaacctcaagaggatcgagaaaattgctttaaaaatacattcaagagagaaaagagtgatctaagaaagaaagttactcagagatcaattgtaagagctttcgagaggaagaacagtacgtcgttcattctctctcaagtcaatacaactacaaggggagtaggctattaccatacttactgggctggacctctttaaaatttggtgttcactttattttaatgtttttggtttctttaatttattttatttcgtcgctttatttttgattcattgtcgttatcgctttattatcgaactgcacaagccctacatccaaaacaaaatcacgggaggcttcatcctagaaatttaccagtaaaatgtcattgttcattctaactactttctccaaaccttgcatcaaaaaaaaaaaaaactactttctccaaacccaaattaccccatacctttcttgcaaaccccttgaaattttttaatagggaattttctcctaaaaccatacacaacatagtagtctttgaatatttagattcaatataaatttcctcaaggtcaagcttagcaaatacatggccatccttcatgagaagtggagaaaaatagagtttaacccccacatatttcgcctacgaggagagatcaaaccaaatctgttgggcatgtttctaaattatgtccttatcattctcgacattcctcaactggagtaaaagctcttagaatcgagccttaattgaggtactcttgcacctccttggttgggaaaaatccccatcgagagcatctgtgaattctgtttgtgatcctcttgattcacctcttcttgaactgctggttgtctcgcacatccttctgtggtgttgaattaggtttccttggtgttgattcaaacttttgatgagtcttctttacctttgccatcaggagaagagaagcacacctcacgcctttgtt

SEQ ID NO: 32977 - DNA, 1266 bp, Cannabis sativa
ttaaaaaaagaaaaaatataaaaacaaatataataaattacaaattaatgattttatttaaatttaatattttatacaatttataaaaaaaatctttttaacaaaatcctctcttattctaattttcttttctttttcaaacatacttagtattatcattcaaatttattttaattatttaatctaattaatactttttgacatttgtattacaggtgttactttatcacttcaacacttataccaccatttcatctctacccattttctttaatataattatacatttataaattttactgttattattattattttaattaaactaattaaaaaaaataacaaattataaagacaaagatataataaattacaaattaatgattttatttaaatttaatattttatataattcattggtattatcatcaatatttgttttacatctgtattacagtattacaggtgttgttttttcacttcaacacttgtactaccattccacttctacccatgagaaaagcatgcatttcaaagaaaacataaaacaaagttaagaaagctgaatattggcttcttcaccattttcctttttagttggtaagattttaattttttatacattcatgttcttccttcaaactcaaattttcttttgcttatcttcttcccctttcaaattcataatttttttttgtcactttatacaaattctactttttatttatgtcttctcaagctcacacctttccttttcttttttcttttgacaatctgaagttcattctttcatttgtcttccttcaaacttttttttctattattttcctttctattgtttatgttcttctttcatcaatcatatataaattattatttcctattaataatataactattattttctaattatagatataatgaagaaacagttaacacctcttaacaaaataactaatggaccacgacgatggacaactagggttgttgtctctgaaaaatttactgaacgtcgctcacaacatacttcaaatagataccagcacatggtcctatctgattcagaggtattcttttgtaatttttttttttattattcatataactttgatctcatcaagatttatgtgttttatttttctcttgagttagaatcagtaaattattatagctaattaaatattggtatccttaaataaaataaaattaagtatgtcactagaattttttttaaacagggcaactcagtccaagcaacactctatg

SEQ ID NO: 32978 - DNA, 1860 bp, Cannabis sativa
atacgatcattgtaatagttcaaggttataaaatttttaaatagcctaattttgttattattttaaaaaaaaataagtaaaaatacaattcgcttgacctccctatggcccctcctagggtctttgtctggttccgacaatgccaatcgcaacacgacatgtcgagaaggtactaaccaccactggtgccttataataatgcactagaaatcattataattttttttttttttttttgcatgaatttatattgcaattgaatatatatacagtgaagaccactggtatcacatttggacttttttttttttgaataactatcacatttgaacttgcacaaggaaagtttcaccaaaattctatatctaatcttagtaaaagagaatatatctgagtcatgatcattaattgaccaccttctaagaaaatataattaatttaaataataataataaaaaaagaattgttctttcaggacaaattttcttccatagaccattattatccctggagttgatctaagagaatattgagtattgaccgtccctccctgctactattctcttcttcttatatttaccatttattaaaccaatggtcacaatatttcattaaaatgcttatgatacgtatactatacagtatttaaaattaaaataaattaataaaaaaatataacggaataaataaaaaataattagaatcaatatttgtaatatgttatttactaaatctttttggaaatagaatagttatgatttatcttgtttatttttattaagaaacgtaatccgaatgcttaaattgattaaattacccttttaagttaaactatattatatggtatttattttgtaagatatattttaaaggataaaattatcattatatatttaatattttttaataaaataaaaataattaaaacttattacttttaatggcattccttataaaattaatagtaaaaattctccatttctctcatatttaattaaattcttcttttcttaattttaataatataataaataaatataaagaaatattaccattaatttttattacttattaagcatgttagtttaaatgatgtattgagaagttcgtgtgtaacacgtcattagagttttgtatataatgaaaggaaagaaaataggtacatgtataatatgatcaggtgggtttttttgtgttgatgttaataattaatcaaaataataataataatgaaaattgagacgataaattcaaaggaataagaccctacctcacccaatttattattgtatttaagtaatgagactccatttcttgtgtaaattccaagttccaactccactcgccggttgagcctctgttctaaatttttattcatttatttactttcatcaaacatttaataacttttcactgtaccaattcaatttcaaattttctttcattattttttttttattatgaataatgattaagatacacttaaattacacacattattatatttgataattaagtgtgtgcaattacagtgtttgtttgtctaacacagaaaatatgcattgatttccaggtaaattgaacgcaacttaatataatattagtccataatattactgttggagaaatttggtaacaatttgaaaagtattcaaaactttagttttacctcaactttaaaattaaactaggtctgttgattaacgttgatgctgcactttttcatcatgagaactcatatgggttcggtatagttgcaagggatcatatgggcaaccttttggaagcaaagacaagctacaaggcaggttcttactcacctgaagttgtggaagcactgggaatcaaagaagctcttag

SEQ ID NO: 32979 - DNA, 1736 bp, Cannabis sativa
gagagagagagagagagagctgggattgagaaattgtattgagcaacattgtcaattatgttggctcgggttagtgagttaatgagtgttgagattacatcatggatgattgaatttgattattttcttgtagctcatgaaattgatatctctaattctcattatcaataaagattggtgacaatgcttttaaactagagtatgaccaagttcacattgaacttaggatcagaaccaatataattctcatgtgttgttgtgtctggaagttatctaaattcatatgtattattttttctgatttaatgtgtgtgctggttttttgttcttaatttctttgttttgatttaacttttatttgttgaagtgtaattttgaacttggaattaagagattaatttctatgtatgaaagctaaatttgctataatgtgcttggttttagtgtcaaacatctattatacataattaattatgctctctttcacaatatagaggaagaaatattggaagtaaaatatttagattatgactaaattaggatgttcaactgagaaaggataacaattttccatctatttcataataatgtttttttttttttttgaatcaaggatggaatttattcaaaaacattcaaaagatacatattctttagagtgctagaagcatcatgctcactaaactcacaatctgacaaataacaagaccctctagcaacacaatgagcagtcttattagcagatcgtttagcaaaaatcaaagaaacattagaaaaagaaaaagcatctcacgacaatcccgagcgagtaatccaaactgagaaggcataagaatagagctattaatagcttgaaccaccaccaaagcatcagtttcaattacaacactagtccactgtttcttctttatccaactcaaggcttctttgatcccaattatttcagcaatttctgccttgactaagccaaaacaacttacagacaagaccgcaatcaaacaaccattggaatcacgagctacacaaccaacaccaaacttgttttccgcttcaaaaatagctccatcaacattcaaaaaacttaaaaagtttacaaagtacaatcatatttaggttaatcatatttaaaagtcacaatacggctaaccaaacaaaaacttttgaatcctatgtgcatgtggagaaggaatacggctaatcacagtaccacttcaaagttcaaacccaccccccacctttttctttcttttaagtaaattctatttagtacaatcgaacttattaataatatgattaattagcctcaaattgaattaatgaatcaaaattacattaaatgattaatgaaaattttgtagtacaccccgttaaggtagacttttatttattttgatattaaggagggattattagtcaactttttttttttttgttttttattacaattatattcatcaaatttatttagaactatttgtaaacttttaataaattctgaaggaccgaaataaagtttaaacaattacttaccgtacacgtatataaaaacaatcacacatgtaataaaatatttgaatcttgtttttcatcaatataaaatattctaaattttaaaaaaattgaccttaaataattacaacatacatacacaatcataaaaaacaaattgactaaagaattttttttttaatgttaaactagacagaggtctagtggaacctctttaagaggtatat

SEQ ID NO: 32980 - DNA, 2295 bp, Cannabis sativa
ttttttttttttgcggtgcagtgtggtgcaggcggtttgaacagtttaagcgatttgatgaacccctaattaatattaatttttatttattttaattaaaattacataacttcctagcttgttttctatatttttatatgaaatgagctcctattgatattaaccgcttgaatataattcaatttaaaaatgtttaaaaattatcactaactaattacggctaggctgccctatcaatgcgccacttttaatccttcttatttcaaggttaaacacattatattcaagttttttttttgaaagagaagattagttaaaattcgccaaaatgatatgacaattgacctcaaattgatttataaatggaaatgaaaattttgggctcaacttagagcattttcagggttaatttattttatattattattctttttttaatctttcagaatcccaattcccttttcaaatctcaactctgtctacctttctctcgaggagtgcctccaatggcgtcggcgtaacgcgaagcttccatcactgatgacgaagaactgaagcccaagcactgtgcagatttcattcccgcagactacctcaggtgttttcattgtttccctcaattccttaatattgaattagacatggtaaacttttaaattgaaattagttattggggaacatcacattgcacaacgatgaataatcatgtaaatatgaatgcgcatacaaccataccatttacttgattttttcccccttaaatctctttcgggatttatatactaaagattatcgtttgttttagctagtcagagtgcaaggtgatggttgtattttaatattatttatgttgtgattaaggtaaagaatgatgacactagttgaaaatgaaattccttaactttttcaacacctgaaaactgaacgatcaatcttttatgattatatagaggttcagctctatgttgaaattgaaaccgaattatataattagaaatatataaatttatatggcatgaaaggaagacattcttttttctagattgaaagcagtggactacaaggatatctggatgcgcataatgcaagtgaaaagaggtgttactgtttgcgtgttcgctgctatgctgattttctaatgttggcaaaattatgtccctccaggctctagcatattgagatggagaacactgcccctgactctactggacatgatctagtgggaaagtggaggcacaagaaaattttcatatgccggaaaaggttatggcgatgactttggagtttgccatacaattgtctgcagtactgtttttcttgaagaaagaccatttgcttccattggttcaagaaaagggttgggtgaatcaaataaatctgatgcttgtcctcgtccaacagggataagagtagcaaatttctgcatgcaaaagcaacaatggaaacagcattattcctcacattttgcgtttaaaaaaatgttttgtccataagttcagtgttgaagatagactgatccctgaaggagattttgaggattagatgctataatggggtccattttttctgatattattatacatttcaaaatgataatgatggtgggcttgctagcatcaggtaatactaccaatgtgcttttcttgcatattcttccttctttatctttatgcacgtttgatgtgtatggcttccacagaagatgaatatctttattggtgccagggctttcgcgtagaagtaagataactaatttgatcgcctgagacaacttgtatattgaaattccatatgttaagagccaccaatactctatgcaattatgtaattgaccagacaaatgtatctaagaatgctagtaaacctggaagataacctatttgaccatattatgtacacgaatctccccaaatatgcaaaggagaaaaaaaaaattgcaatatcctccatggtcaaagttatgggatttctgttgtaactaattccttgttatgtctaaatctgttatgtagccttttacttcctccatttcgttagtagcttacatcttttgtcgtctgtcttatccattgtataggcaattggacatcttggaagtacaagatcatttccacatcaagcgtatcaaggaaaatggaaatgaaaatctgtgcctttaggcaactactcgtggaattcatttaactaacgaagttcattttatcaagataatgatagttgttgctggacttatgaaagggctcaaaacctatggtagataaaagattaaggcaatgcttcaattctgcctctatt

SEQ ID NO: 32981 - DNA, 1390 bp, Cannabis sativa
tgattaaataatgtcatatttagtagaatttactttttatgccatatttatcataaccttaataatttttcccatattttttaaaatagcccttatctttatcctataaagtaccatctctaataaaatatgaaatttggaatgaattgagattagcataatatttaccattatgtttccatacataaaatactatatacaagattatttgaagtaaacattctataactagtagttctaaatctacatatgtatgttactaacaaatattaattttacaaaattttcttacctttttttttcttttttgtgtgatcaaaattaattgggagtaagttgaaatatactcgttttttttcatcagttaaccaaaaatagtcttattttcaattcaattaaaatgtatccctttttataagtcgattaccgattataccctcacataagggtactgtactcagggaggtgaggaaattttttttcattaagcataatgaattaacaaaaaaagagtataaagtgcaatttccataattaattgtaacatactaacaataatatgtatatatataaataggataaatatttttttaaaaaagaggataaatattatttaagactctataatttgtaaaagttactcatcaaatattttattttaaaaattgataattcagactctgtatttttcaaaataatacataataatatcttgagcctaatactactacaaaaattaggtttctcgtcaggtgtaaatcgtctgcatgttatttcgtcggctcttaaaatcgacaaatatgtgggcgccataaatttagacgccttagccatcaattaagaatcgattataacatcccttttctagaaagattatcactgtcacttaaaaaaatatcaaatctgagctacacgaggcaagatctcaccacaatttgctcatgcatgacgaacttatatctaaacaaaatataccaaaaaatacaacaaaataaactatgaacatataaacaatctaaatttcaaatttgacaccatcagagtcaagagagaccactagtaccattgatgtaaccttaaaaataaaataaaaaaatacttctttgagaaagtttgacaaagagagaaagcttgaaagagaggagatcgaggaggttacctatgagtggtggtgagagagccaccaccatcgcctaaaaatcgagaccgagagagagagagtgtgcaagagacatagattgagggtttgagggtagtgtgagttgcgtttgtagtgggcttgtccgagcgggtgtgtgtatgcattcgtggtggctggtccgagagctgtgggtcgtcgttcatgtatgaggctagctaggacttctggctgagagagagagagagagag

SEQ ID NO: 32982 - DNA, 2160 bp, Cannabis sativa
ggatttaaagagtgtatttcatttggtaaatatttttttgcttcatagttgatgataatagaattagaattgagtataaaattttgtaagcctaaactagtacactataaattgtaattatatttgtgttattgataaatttctatttatgcttgagttgtttgacaattatgattatgatataaacgaatatataatgaaaatctaaaattattaaaattttaaaataataaaaaagtaggttattatactataggtgatggtttaaaatcgtcgcctatgaaaggtaataggcgacgatttacaatcgtgcctaatactataagtgattattttaaaccgtcgccctatagtattaggcatggataaactgttgcctatactctatcataggtgaccgttttaaactgtcgggaatgaaaaaatagcaacagtttcaaaccatcgctaatttttcccgtgttttgcgattatcgaataggcgacagttatagaaatcgatgtggatactttacccgattgtttaaagcgctaaaaagaactaatatttttagtagtgcaagcaattataaaattgttttacattattatttatcttttgtaaattttagaaaattatgcttttaaaaaaaattaaagtattatctgctatgcatataattattttattttatattttaatgttagcctcacctatgtttataatttttttttattatattttttttctttctaatttttattattaatcatttttttttttacactatactttttgttgacgttgtaaaacgataaatttcatattattttataattgatggcaacaaaaagaaaaatatgaactaaagagaaagaacactacaattatatagtagctcactgctcgtgtaagccgataatagatttatgtctactcgagcttttattaatcacgaaaagtaagtagcttactagagaacttgagaaaaaaagaactaaggaaagtttcacctcagaatttctagagagtgaaacacatgatgagagagaatatatgaccttgtagagtgtattgtgaatgtgaaaattgaaatagaggagcctcctatttataggaatggaggtccaactaaataataataataataaaacaataaaaaaaaattactaaatttcattgggatttcataactcagcttgcgactaaatttttgaactgaaatttttaaaattgcaagaaagctattatataagtgtagatggggcttgaaaatatctttaaaattccacttgaaccacatcatttggacaagtaacgagtgagttatggccaaaatactgcaaggtgtgcagtaatgggtggccagcttgacatatgggcgaccaggttgacataaaacattaaactatgtgcccataactttatttcatgagttatgggaatattttaagatgtctaagtcatgtgaatttatcccttagctaattccttaactaagttgttcaccgttcttggtgatttcactcggtgcacacaggtgacgatcgaatgacaaacaggtcatcactagtgcacaagggtgtcagtttgcttaaatgtgacacatttacatgacattctcacttgtcaagacattgaaatcttattttggaggcaaaataagatcgattcccagagcaaaacttgttgggttttatgccctagataaaatatttttttatgttatcttatttattaattcaataaggaaaaaaaattatttatgatgtaatcaattgcttggttcatacattttgttcatacatgattatatttttaataaataaattctattaaatttaaaacatatagttattcacatttataatgatgtcatcacaatagaatatatttgtgattatattattcaaagtattagtcccttgagtttattagtgcacagaatttacactaatatgataatcaacaatgtggtctatttatacaaaggcaatgtgttatgttttttttcaagacattaggaaaatagacttgtatcagatatattggtgtatatatatatcggactaaacctatattgactaaataatagatcttaccgttatatctattcttagtcaatatcacttagtttatcagagattaatttgatattaatcctgacatgattaagcttt

SEQ ID NO: 32983 - DNA, 1374 bp, Cannabis sativa
gcgaaagcaagacattgcataagatgggattgcttgaaggacaactttaattagagtctccttacctgccttagaaaaccatttatggtgccaggaatgaataatggaagaaattctatcctttaaaaaagtaaaagactgatattttgctcgagaaagacattgtggcaaacctaggtacttagtgataaatggcttatcttcaagctgaaaagtcctaagaaataggtctctaatatcattttgagtattatgagaaaataaaatggaggacttagtgaaattaatcatctgccccgaagcttgagaatacagggatagagcctgctgcaaagcatgacaagaattacgatcagcagtatagaacaaaatactgtcatcagcaaacagcgaatgggatataggaggggtatttctagaaattgaaataccatgaagcaaacccctatgatgatagtttctaagaatggctgaaaggccttcagcacataaaataaacaaataaggagataaaggatctccttgcctaatacctctcgtgggcttaacattaccatgcacagaaccattaatagagaaagaaatagaagcagaagacatgcatttaagaataagagaaacaaaacgaacaggaaaattaaagtgaaacattatattacataaaaaatctcattcaaccctgtcaaaggccttagccatatcaagtttcaatgcagcccagccttttttaccaacctttctattattaatagcatgcaccagttcattagcaataataatattatcaaaaattactcgacctgaaataaaagcactttggaaaggagagataatcctatctaaaatccttttaagcctattagatataatcttagatataactttataaaaagtagtacaaagactaataggtctaaaatcacctaacttattagcatgttgttttttaggtattaagacaataagagtagaatttatctcagaaaaatcaatatccttattaagacagtctaaaatagcatttgtaaaatctctacctaaaacaacccaattcttttggtagaaataagcattaaaaccatctaatcccactgtcttatccccagacaattgaaaagcagcctttttaacttcttcagcagtaaaatcctgctcaagaaactccacatcaggagtttccaacccaggatccaaagcatcaaagattacagcagcagcatcaacattacaaccctgggtactaaaaaggtcagaaaagtgagagataactaagttagctatcccctcttgactattaaccacattaccctcattatctttaagatattttatggcattagttttcttcctaagagtggctttttttttaaaaaa

SEQ ID NO: 32984 - DNA, 1198 bp, Cannabis sativa
attttttgaatgtaaaaaaaaaaaaaatgaacgtaaaaatataaatattttataaaaaatagtaccttatgtaaatattccctattttttgtatttttactctaatacacaaggtataaattaactataaaggttaatattgccattaatactcatttaaaatatacaaaatgattaattttatttatattattttaatatcttataaatatatcttatttgaagtcaatgaatagtattaataagtggcaaaaaggtaattaaaaaaagtaatatttattgtgagctaaaatttagctcatgctattttctgtatcaaatttaacacaatttttagcttaggccaaatttgccacatattttacatcaatattgaagttaaattatagcaaaatgttttaaaaaatagtagcacaccacatttatagctctccatagcaatatgatgggtatcagagctattctgtaaaaaatggtcaagttatgtaaatttgtagacggtttaattttaagtttaatttctttttctttctaaaaaacaatttttttaatagtatgtttcttatgtttaatttaattaggtacaattacaaattaagtggttttaatatgttacctatcataaaccacaggtaggcgtaataaactcctttgattagtaacaatacatttaatcttatctttatttatcttttaatttttatgttggtttatgttattaatagtgatcttatttttttaggaagtattttaattttggaagtagaagctttagctctttcttattgacttaaattttgtcaatacctatttgtagttttcatattcaagctacttgtctgaattcactatttttagttttggttttggcagttaggaatatggtgttctattcgcatataaattagcattcttgtaattatttattcaaaataattctcattataattaaattagtacgcaacattttgtgaaaattgaatacgcaaatgcacaataacatcttgctctaacttggtctaagggcacatagatttagacatgcggtattggttggtaatcggctgtgaaacagcctttgcttctttcatagaaaatttttctatgatcttggtgatgtagtcttcctgatgtagcatgagtttccttttgcccctgtcccttaggatgttattccctaaaatcttagttgccacac

SEQ ID NO: 32985 - DNA, 1556 bp, Cannabis sativa
  modified_base (1318)..(1319): a, c, t, g, unknown or other
attttgatggatttgagcatggtgacctgactaaaagtatcctcatagtccacaccttctctttgggtataaccctttgcgacaagtctagctttaaagtctcaacttctccaccagcacctctttcttcttgtagacccatttacatctaattggatgataatcatcaggtgcatctacatattcctagattttatttagggaaatttacaactcatgtctaaaatgtaaagtattttacatttttacttgtgctccgtatttttttcttttgtacaattcattattttcatcattgctttttaaactttcattaattacattttttacgatttggacttatatgaatatttttgtctatctctctctccccactcattgttttcttgttcattttctatgtacattctttctctcaacacaattatcctctacaatcacgtcatatcaacttcttcttctctttttttaatttttttttaaaaatcactttacatagttagtatatacccatttcacatacagtttttacaacctatagttgtaactagttctagttcatcttccccttttttttattttttttttctcaaaaaaggctaagaaaaaactccaaaattgttcttgttatgggtaaaaaatctcttttaaccttcgtagctaactgtaattgaggaaggaagccttcttatttctgaaaatatttttttcgtgagaagattgaatctcaaatggctaagcaccgtaaaaagcatataaaaattgaggccctatcctattttagtattctctatagctgattttttttatattattatttttatttatagttttaataaaataaatttatatgctaaaaaatagtttgggtccaactgattgtatttgaaatatcacattaaatttatttgcatccacacgcattaaaaaatttgctaagctaattcaatagtactcacctttcagctcccacccccacttgaaaaaaaaatacacttgtcacttaatttaagatataaaaaatctccattatagttgtttttaagtgtttttttttttctagattatttgtgtgttgttttaatttttttttttttgagttgacccaatgtgttgatgcttaattatttaaattccatattaaattcaggttattattcattatttgtacatggagatttagttgttcaacgaagatcaaattgagtatatgtttatttgtcatggcataagtgatttgtagttgcttttattttattgagataaatttcatgttgttcttacgtttcttttaggttgtcaacaaaatatattgatnnttagctaatttacatattaaagcagtgttgttatctagttgttttttaattgtactagaattatccaaaaaagataaacaaatgagtatatatttagttttttagatatatgtttgagtagttatctcgttgttttgtaggtgattttcagttgttgtgcaattattttgatgtatattttaatttattttttaatttttttttttgttgtatcatggtgttgtataagtaatttgt

SEQ ID NO: 32986 - DNA, 2144 bp, Cannabis sativa
  modified_base (1756)..(1778): a, c, t, g, unknown or other
gtggtacatagttcttgtgtagaattcaacacattgattgtagtatgtggtcaagcatgtaggattaggtgggtgaggtcgagtgcatttgcttttgaagtcatttgcagtctcgttgtgtctgagctttgagactgtcatatctatggttgttacaaattcacgcaagcaatattaattcttctctaaaaatttttttagagcggagttgatcgattcgcaacgttgtgtggttctcattcctacaatgaatgaaccccttaaataagtttctacccactgttttcttatatcgaatgttgtttggcaccattcattatctgttagttgttggcttttgatgacgtctaaccttcttgcttcacattcttcctccgcgtagtagttttacattagatctttaaatgttctaagaagattgaatctttaacctgtttggaagcatttgtattgagatgccaagcgcatggacggtgtgtaacatctggaatgtgttccatgagggcctgtttcatggccagatcttggtcagcaactacaacatttggcttcttatctccatggcattcgagaaatttttgaagtagccaacaataggattgaagcttctcgtgggggaggagagcaaccccaaagatgcatgtattgaaatggtggttgactctaatgagaacagtgagaggcttattgtactcatttgtcatgtaggttgtgtcaaaccctagtacatcccccaaagccacatcgtccacacgtgagtttccatctgtccaaaataagttagccaatcgattctcctcatcaacctgtagacaataaagaaatttggatccttctctgcgagacaatcaagaaatcccaatgccccttctgagtccatctctatcttttcttctcgcttggcaccagcaaccctgttgtatacatctcaaagttgacatggcattctctcgtaacctccactatgcaaagcaacatgagaccttatgttggcagttttaattcctacggagttcatcgacctaacttgggcaagcaagccatcagacacaatttagtatgatctcaaaaattgtacctcacttgatgaagccagctcgtgattgtgtattgtgctgaactctttgcatttcaaagtgttacacggttgtgtgagtaaaatacgaaatgttgcctgacaaccggttctagtgagatcatgaggtcttttttttttctttgtgtgtctgttgatgtgatttttctcaaaccctcagaacaacaaacccacctgcacattacactgaccccatgagaacgtcgtacatcatcttttcttgtgccgaaacccatctgtttcgcataatttttgtcgaatgcttcccatttttccagtttgtcgagactcttgcctagcatgtcatatatttgaatctcattgactggttttgtaatgtatagctctgcagttatgctttcccattcgtaggtttgttggtcattcatgttggcttgtcattgatgtctaagaattttagatgaagaataagggaaagagagttgtgaggagagtgaaattagattttatgagtttcgaggtctgagattatagagttgtatgggttggtgatcacatataaagctgttgggctgattttaatgggcctttatattaacacaaattttcgttaactaaatttgagcctcacgaaaatgattcaacacagaaaaactataaaaatatgaacaccagattttacgtggttttgcagttaannnnnnnnnnnnnnnnnnnnnnnatcttattcagatttctgagtatgtttttttaaggtctctcgcgtaagagtcctctttcttctcccctttgtttgatcttatctgccaatatttataattgcatagtggcacttaattacaaagttgaccaaaatgtaattacagtcattatcccttaatgtagtaaataggttgctggtgcttaccctcccctcttctcttctcgtctcgcactatacctgcataatcgcatcttccgagatggctagataaagaaataacgtctctccaattattgattttgcccaaattgggggcgttgcaagatgcctttttatgttttaaaaggcctccttgcattattttgtccactcgaactttttgtt

SEQ ID NO: 32987 - DNA, 1500 bp, Cannabis sativa
gtaaaataaattccaacagaagatcctattaaaataacaataatatgatccaaaaaaatatggaaaaatacaatttggctatgttggaccgtagatgatgatctaacagtgaaattgactgtggaagacagtcgtcaacttttagagcttgaatcgcgtccccggacccgcttcgagtaaactataacttaaatttaaaactctcttgagggtaaaatttagagtcgataacttcagaattgtaattgtagtgtgcaacatgacttgacagagcatggaaataactataaaatacaagttgaatggtttcaatcagaaagacattgagtgagttatggtcattttattgaaggtttttcttagcccagcgctgaggttgacatgttatgtcaacctgggtgctaggtgagtaggaagacgtgaaaccgatatatttttttttgatgcctaagtgatatttagacatcacttagcttgtttctatgttctgctgaaactggttaacagttctcgaagatgatgttattttacgggaatgagagactcgaaactcccaatttcaaataagccactttgccagaaaagtgaaaatatgatgttgtgaatttgactcttctaacttcatggctcttagaaattatgaaaaactagatgaacaataaggacagaatcctaatcggataagcaaaacccagcacaccaggccatttgtcaacctaggtgatgggtgcttctttcaaagcttttaagatgtcgttttggcacttccaaggttcttaaacttgaggatgaggtcttctaccctattttttttttaccattttggatgctgaaaatggaatttgcatctaggtgatcaaaaccagcacactaagttgattatcaactttggcgttgggctcagttttgaagcccttgtatttttggttttttccccaagttttcatgtatatttattatttttaatgacagaaaaaatactcataacactttattggaaataagattagaaatggcccaggttgacaatgtgtcaacctaggcgttgggcccagtgccaagtgtcaacctgggtgctagttcaagtttaaggcctcttggaagttccatttactccttggaaataattgaatcttaatctttgaacctagaatatgcccaatatacatttaaaaaaaatctcaaaatgtcaacctgggttctagtcccttatttcgaccccaggttggtttatttcttccttgagtgcacttgtttccccatttttgatgaagatgaagaaaatgcatgagtcaaagttttgatctaatgcttggaaatggctcaggttgaaaaattatcaacctgggcactaggtgcctgggcccaaggtgctaaaaaataaaagttctccagatctaattttgatgcctcaaatatgtctgtgttaattctagctcatgtcccaatgtaaagtttgacccatttacactaaggtggtcccaaaaactaaaaccctag

SEQ ID NO: 32988 - DNA, 4399 bp, Cannabis sativa
  modified_base (27)..(29): a, c, t, g, unknown or other
  modified_base (2600)..(2605): a, c, t, g, unknown or other
  modified_base (2729)..(2736): a, c, t, g, unknown or other
aaacgtgattaactgctaatttccaannnaaactaagcggtctttacagaatagcttgtactacagccttaaaagaacctctttaccaccaaccgcaaatagttgttctttacaagaactaaggagcttccaaattttatctgtgatgccaccaaagagcttcattttatcgcacccagcaaaggaggggagtcctatgtactgttcatgacatggttgaattgccataccaaaaagatgttggaagaagacttgatcttgtttccttgtattatttgaaaaagatagaacacattttttggggttgattgattgtcttgaagcttggctgtacaggtcgagagatcttttaatagaccttgttgattgtttactagctcaacagaaaaaagcacgctgtcatcagcaaagaaaagatgtgatatcaggggagttgaccttgagacttttaaaccttgcaaagaaccaatactttcttcatgttgtaagagtcgtgagagaccctgagtgcgaataagaaaaagatatggcgagagaggatcgccttgtcttaaacctcgactagaaatcagatcaccatgtacaactccatttaataaggagtatgaaactgattgcaaacaacggagaataagttagaccactgttaacccaaagcccatcttcaacataacttgagccacaaagtgccaccctacttgattaaatgacttgtttatatccaatttgattgtcgcataacctttggaacctcgtttcttatttttgagagagtagagcaattcaaaagtcacgaggacattgtcagtgatgagtcattgtgataataaagcactctgatattcgatatgacctttggtatgaaaggctgaagtcgtagtactatagccttggacaccagtttataaagaacattgcacaggcttataagacggtattgagtgatatggtttggcttcttaactttagagatgagagtgattaaggttatattaaacaaggttggatctgcaccattattgagtacatccaagaccgattcagtgacaaggggaccaataatgtgccaataagttgttaaaaacatgacagacatgccatcctaaccggggcttttatcactactcatagttttcaatcttctgcagtgtaaggtgctgagattgtctgttgagaatcaacatctattgtggttgggatttttgccaaaataatgtcaatggatagttgatcaataccttggctattgaaaattccttaaaataagctatgataatattcaaaatggcaagggtgcctatctgagtgttgccattagagtctatcagcttcttaatgcgattattgctgggtctagcacttgcacattggtggaaaaactttgtatttaaatcccccaattgcagccataaaattcttgatcgttgatgacaatagtcttcttcttgtgccaataattcatctagaatagatttagagttttgtaaagcgtcaaaatggtcttggtcagttcttggtgagttttgaagggctgcaacatgcttatgagtttctttgatttccttcttcagatgtccaattttggattgatgacaggactgacaaccaccatggctcatctaaaagcttcaatttgtactacatttcgtgatggaccaccaatcatatcttcattagaaattacttcattaaagtcacctaatataagccaaggtgataatggagccacatcaaaacacctactaagaactgtccaagtatgagatctttgagcaacacaaggatgaccatagaatccaataaaatgtaaaaaaggattgtcttgaatctctatgaagtagtcaatatgattggtagaataattatttagtgaaatagtgatatgagacttccaaagtagcatcaaaccaccaccttggccttgttagaatattagttgtaaaaattagggtgatttgtatttagtagtaatccatttagtctccaaactttggatataaatatatactattctatggaataacatacaattttattcaccattctctacatagtattagagccatagaattataattcaaattcaaaattagatttctttaaaaacaaaattagggtttgagtttagggttcctttttttagaaaccctagttagagtgtgatttctttctcaccacccatatagacggattgcccagttgtcgatctacaaaaccccgaagtccagcagccaatatcaccgtgcgtgggccccacgcgccgcccaacttccaccgctttgaatcccatgtgctgacgtgtgagagcgcgtccgacctcctttttggtgacggtcaccgtccgtcaagctcccaccccttccccgacatcctagcatcggtctccagcagttcttgtcattttgtggtttgatacttttgtcttcattgtgtttgggtattgattctttggtttttgctttcttccttttgtctttcacttgttttgctttcgagatcttaaagagataaaattagattccaaatcagtggttgtttctgatgtgattcccgtgatgtctaaaattatggaccataaattgattggttcaaattatttnnnnnngagtaagacgattcgactgtatctaaggagtattgacaaagatgatcacttgactgatgatcctcccaaagaaaaagatgattcaaggaaaatatggccccatgaggatactcgcttgttcctnnnnnnnngatattctatcgataatgaggtaattagtttgattaatcattgtgaattggttaaaaaactaatgaattacttagagtttttgttttctggcaaagacaacatatctcgcatatatgatgtttgcaaagccttttatcgtgtagagaaacaagataagtctcctatgagttactttatgacacttaagaaaatatatgaagagcttcatgtcttattaccatttagtcctaatgtgaaagttcaacagcgccaacgagagaagatggctattatgagttttcttgcaggactctcatctaaatttgactttgcaaagtcacaagttctctttagttctcatgtcttctctttacaagatgtgtttacatgtgttctttgcatagaaactacccttcagctcctcttaatagcttcttggtgagtcgtaataattatgcattgcaagaaaactctactccaagtggatacaaaggaggtaattcacaaggacctgataattgaacaccagattatgggagcatcatgtgaaactattgtgagaaactaggtcacaccaagtttgagtttaggaagttatagttcaaaaatcaacaacaacactctgctaatattggaagcactggtgatgcatttgacaaatcgatcctcatttttgctgatgaatttgccaagttctcaaggtatcaagaaacacttaagtcttcatcttcttctatcactgcaattgctgattcaggtaactctaatgcatgcctctttccaaatctttaaaatgagtcattgattctggtgccacaaatcatatgacaggtaattccaacctcttttccactttttagtctcatagtccccacttttattgttaccttagctgatcgatcaatatcctctattcttggatctggcagtgttgttcttacacctatgcttactctgtcgtcagtcttacatttacctaatttgtcctttaatttactttttattagtcaactcacttgtaatctaaattgttgtatctcattccttcctgaccattgtttgttttaggatcttatgacgaagaagattattggtaaaggacatgaatctggtggcttgtatgttcttgatccactttcaccaacttctattgcttgtttgagtgttgcttccgcttttgagactcattgttgtttgggtcatccatcccattctttactcaagaaactttgtccccaatatagtaagttgtcttcattaaattgtgaatcatgtcagtttgccaaacatcatcgtgttagtttgagtcctcaagtcaataaacgtgttagtattccttttgagttagttcattctgatgtttagggtccttctcctattttgtctcaacctggatcttttgtgaatgattattctcgtgtaacttggttatatttaatgaaaaatcattatgagttgttttctaaattatgtgctttttgtgctgagattcaaaatcaatttaatgtattgttcgtactttgagaagtgataatgctaaagagtacacatctgctcaatttcaatcttacatgacctctaatggcattcttcatgaaacttcttgtgttgatactgcacctcaaattggtgtcgcaaaatgtaaaattagacatctttttgaaactgcatgtgccctcttgt

SEQ ID NO: 32989 - DNA, 1394 bp, Cannabis sativa
cccacccgatgttcagccctaccttatatggcccttcccagtttggtccgagcacacctactgtactatctttggtgttccaaaatactcttcgtaggatcatatctcccacaatgaatttcttttctctcacttgtttgttaaaataccgagctactttttgctgatgggctatcagttttaagtttgctgcagttcgtttctctttaacttcatcaagtgactctgtgaggagtgcatgattggcctcttggctatatgttaatcttctgtgggatggcaattcgagttctacgggtaacatggcttcatatccatatgtcacggcaaatgtagtctgtctggtcgatgttttctcagttgtacggtatgaccatagtacttcaggaagttcctccggccaatttccttaagcatcttcaagtttcttcgttagggtgtccttgagtgtcttattgactccttcaacttgaccatttgcttggggatgtgccactgcagagaaacttgttaggatcccatggtttgcacagaaatcagtgaaggattgactgtcaaattgtttgccattgtccgagactatcttagatggtaatccgaaccgaaaaattatgttctttacaataaagtcttgcacttttttggacgtgatggttgccaatggctcaacttccacccacttggtaaaataattaactacaaccactgcatactccactttgcgtttgcctttgggtaactgtccgatcaggtcaattccccaaatggcaaaaaaccaaggactttgcatctgagttagtttgttaggcggtgcccgaggtatctttgaaaatctttcgcatttatcacatttcttaacctagtccttggagtcctcaatcattgttggccagaaataaccttgccttagaattttcttggataaacactgcccggctccgtggttgcgacaatatctgtcatgtactttgacaaaagttgtgcaacttcttcttgtgttacacacctgagtagtggcatagagaatcctcttctatacataactccctctacaatgatgtaccgtgcagcctttctcctcattttccgagctttggttctgttatctgggagctccctagcgttgaggtaggctgctattggcgtcatccagtttggggacgtatcagtaacttttaacatcttctgtgccggtgatactaggtttttcgagaaactggataggaaccagatttgctttctcatttatgttgatgctcgcaagtcgagctaatgcatcaacagttgttttttcttccattagaatttgcttgagagcatagcttttgaattctgggagcagatcatgtattttgctcagatgtgctaaaatcttctctccctgaggctcgtac

SEQ ID NO: 32990 - DNA, 1209 bp, Cannabis sativa
ataaattataattaattgaataaaattttttaaaaaaattttaagaaataatttgttaatataatttgatgttggtataattttattatcataaaaaattgagaaaataatgtaaaattaaaaaaagtataatttaatataactttattttataaagataaattttttattttaggaattaaataaaaaattagtttaaattataatcaattatataaatttttaaatgataataatttgttttaaaaaattattgatttacatttgtttaattttagaaaatatgtttagtaatatgatattttttaaataaattaataaatatcataaatattaaaaattaaaaagttaatagagaagaatttgtttattttttaattccaaaattaattgtaattaaatgaataaattttttatttaaatttttaaaatattattgttatacttaaaagatgaaataatatgtgtgtaattcataaaataatcataacattttacaaatatgttaataagaaatagttgaaaagaatatgtcatagctttggtaaatttacaaatatatatcatagctttgttatatttgaaaatttcgctgattttggataatttgggagttccttgcaggagcaacaattttttttcaactcctattcttaaccaagctgagttgggaaatctaacactgggtttatcatcagatcaagcatatgttccttcttgccacggccatcgggaactcgtaatgataataatgcggatcaagactttataactcgagaccttaatgaaaattttatggaataatttgtttatgttttttaataatttagtttaattttgagacaatattgtaatagaattaacgtcgaagtagtttatttttagatatttttaaattattaataaattttattagatttaaattatattatttataatttgatttattatatttcaattattttttataaatttattattaattatttgatatatataaataatattatttataaaattaatatatatttttttgctttaaaagctatgtgcggcggaccattagtgacgaggtcccgctgctaatggtccgccgctaatactattattagcggcgggacccaattctgccgctaataatagtattagcggtcatttattagtagcggacctttagcgaggaacttccgccgctaataacctattgcg

SEQ ID NO: 32991 - DNA, 1317 bp, Cannabis sativa
actaaaccctttattacggtaaatcttaaacccccctaaaccctaatccctaaatcctaaacgctaaatcctaatccataaaccctaaatcctaaaccctaaaccctaaatccctaaacactaaacccaaaatgctaaaccctaaaaaaaactaaatccttaacccctaaaccctaaacctagacctaaactcagacttggacccggaagtagaactgaaccaagacccgaccaaaatcttgaccctaactcgaactcgaacccagacgtgtaactggaaccgaaccaaaacctggccctagacccaaatagggactaggaccgagactcaaactcggacctgaacccaaacccatatctagacccgaacccaagactcaaacctgaacctggtcccaaacctgacccggactcaaactcgaacccagacggagatcataacctagactgagacactgacttgcacccgaacccagtattaggatcagaactcgagacccagagccggacctagatctctaccctaatctagacctggagctagaagcaaacccagacccgaccccgaaccggaatagggatagggaataggatcaagactcagaccttgaccagaacccaaatccaaacaaagaccgagattagaactcgggaccccaaccgacccgaatgacccagacccagacccaaacttgtgaaccaaactcaaacccgaccttgggacccaaacccggactcgaacctaggacccaaacctaggaccctaacccgaatccgaacccagaccccgacccaaatagagatctaaacccatatcgggaacaggacccggacccgaaccttaacctttactcgggcccagacctagacccagacctagacttagactaggatcggaacttgggacccgaacccagacccagacctgaacccaaacacagaccaagacttggacctgaactcgggacccgatcccaaagccaaaccaaaactggaactcaaacaaggactcagaccccgacccagacttagacccagacctgaacccagacccagaaatggaactggaattggaactagacaagtaatgggacaaggaccaagacctgagactagaattgaaatgaaagcgaaacctaaacccagaccggttgtcgtatcggaacctggaccgggacctgcacccagaccgagacttgggaactgggacctagactgggagctggacctgaacctggacctagacctggaatgggactcgagacctagacttgggacctggacttgggctagggactgaacttgaacctcgaatta

SEQ ID NO: 32992 - DNA, 4429 bp, Cannabis sativa
  modified_base (55)..(59): a, c, t, g, unknown or other
taattaaataaacaaattttaatcaatcaagattttcattaacctcgttgattannnnngagctgcacaatatgtttaaaatcacgttaacacgcctatgctagttagggtgttacaaactatctccgaatcacaagtggtttttttttcacttgttggctcttggatcaattttttttttcgaatttttggtggttttttttttatttagttttacttcgatcggtctgttttgggtcggatagttgttagaggtttttttttttgtttatttttgctctgataccttgctagaatttgggataaggtgaatgaagttctatctcaaaattaattgacaatgagagaagtagctcattcatcttatatattttattatcttttcacatattatcaatggtggactctctaacataatgtaaattatgtgctagacttaagtaggtgaagatatgttgggtaattcactcataaaagtgggtagattttaatgaaatttaatacgagagtatttttaattaattaatagatataaaaaaaaaggtatttctcaaattatcccattatatatatgaattaacaaacaactatggctgtccataacaacatatgtttaatcttttttacgtataccacaattttggaaaagtggcatttttgatcatatttagtctgtactatatttaatgcaccgaaaaagtagttgagataacgagttttaattacgtaaatgggaagattagctccatcactcgcatagaacataaaatttcggggataaagaatgggtttgcatgcatggcatgttagctcccaacatgattttgtcgcttgctcatcatcactcatcatactcaactctataatcatactggtcgaagtatagtaacttattactcaatccagttgggttgggaccatttattaatcaaatgatctttatcttccatttggcaattttatttaatagatccacacttacgtaattcaatccaatggagactagtatatgagagatgtattattggtgtagatgtatgtagttatatagttttggggaccgtatatctataatatcaatataactaaaaacaaaaaatgtgatgatttttgtatcgtatgatattgaaaggatgtgccatttgactctctcacttcatctttgtcggtggcgccaatctctgcacatgttcagtttacatatatatttgtttttatattatctaattctctctgtggggacatggaaaaataattaaatatttatgttcatattgtttagcttctcctagaaacacaaacctatgaccatatttcttgctggcataataaaagtcgttaattttttaatatactagtacgtgatacattaattagttaagaatatagctaattatatatatatataatatatatattcttgacctaggtacttttgttttgagagtgtagcaccgtcataagttcatataaaatatatagtagtctctttttttcaattcttattttaatatgtttgtaagaatctatttaataccaaaatagatttattaaaaaagaaaaattaatttgtttaaatatgcaacctccgcgtaaaattgcttgcgattattgataagacaatccgacaatgcatacatgatttttgttatgagcatcgaaatgcaggtgtcagatcccagccccagaggatgcctttccaaatacaagaagcatgtgaaagacacttagcatgaagtaagctagaatggggaaagtaacaattcttcaacatccaggctaagaaggagtggggttggtggaggatatgccacccttgtttggcaagtagagcttgataaaatttcatgagacttcgtattatggggtacaaagcttatcccaagtgttggtcgaaattagacagcacaaaataattcaagtatccgagtaaatcaagaacacccaccaacaattatgcaagtactcacttaaaataacgagtactcaatgtttaggttgtgaaaatagataaaaattggaacaaaaaaataaagggcaatagagaaatatagtgattcagtcggaacgcggtctctttagtccacttttgtaatagtttcaacattgatttggatcacaccattaaatataaagcaagtgtcacttgatcttacataatcggtcactacaacaaataagggtttcacgcgcaacactatcaataataataaaattttgttcctaatagtcatggtatatcaggtgcgacttttcaaactctttccagataaaatttattttattttaaaaataattaaataattacttaaaatgacttatattttatttggcatgaaattttcgttccccattttttgtattattttactgttttgagagagggagaattttcgtcaacaacatctggcgcaactgtttatttctaatactttcgagtctgataaaaaaaataaaatacaaaaccctccatttgagactcacagccttcgccctctcatctccgaccgagcacctccgccctctggccaaggacacaaccggtcgtccctccggcgatcgagctccagtaagttttatctagatctctctagatctaaatctatctctctatctctttcatatctctaatctatatatatctctttcatatctctaatttatatatacaccataatatctatgtttgttattaatatttttttctaataaacctctgttacttaatctctctatcggccttcctggctttcttcgctaactgattggagaggaggcattctagttgcggggctgctgagtataagccgttgggttgtcgagctcgacttcatagcctcacactcacaggtacggtcccctttcccttttctaagtttttttccctttaattttctgtgtaaattttcgtctctgcttgtgagttccctgaccactgtctcagctatggttacacagtcgccaacccatttcttcttcttcttctctttcctattacacttttttctctctgacttagattcatcactcgctctattacctgagtcatctcgttcgaagtaagtatttgattgtatttgagtttggtgtttttttggttcatatgctatctaacagttaaatctaatttggttatggatctgtgtgttttgatccaacctttgtgaatcttttcgaggttttgatttttactgtttggttgattgactggaaaattgtgaaatttggagagtgtttaattaaggatattcgatgtttggtttatgtgaatttctgattcggtaatggtttttcttagttttgctttcggagaataagtttttgtgtttttgacagttttggaaagcgctagaaaattatatgattagggttgttcattttcttactcgttttggtaattttttttattaaatgttttgtttttggagcaatggaagtatattgtgaactaaattatgcttctaatatcgtagattaattcaattgggcagtatataattgtcacttttcctacatcttcatcatctactctgatgtcatagtttcatatgttctagatgtttatgctgatgatgtcacagtcaccgcatatgatgtagatgatatcgcacgtacctcagacgtcacagataccacagatgatgtcgatgccacaaacgcaacaaccatcacagattccaagagtacaacttacaccttcgcaacagactctagggaatgaaaatggtggtgataatgagtccacatcttagatgtttagcttattacttttgttggtttgaacatttataaactcttttagtataaactcttttaaatatataagcaatatttagtattaaatataaaagcaatgtaaggactcttttagtatcaaatataaaaatatttagtttttaaagaaattatttaatagaaaaaagtgttatattaaaaaaaaattatttaatttaaataattattattattctgaaaaatgactttagaaacgacaatttcgttgctgataacaaaacagttgttcctgataatgtgtaaaaactaagctgcgagtttaattttctggaacgacatttatttttcaggaacaactcatctttgttccaaataatttagcatcagcaacgtaactacatttttttcatgatatcgattttcaggcacgcgttatcaggaatgactagtcgcgccaaataatcttcaggaacgaattaggaggttttctagaacaaaaaaagtcgctcctgatgacagtttttgttgtagtgacaggaccgttggttcatttaattacataatttaattaatacaaacgttcaaaaaaataaatgtaagaacaacttcgtctgttttttgattaattgctcaaatgcctgcaacttacaacaattttcttcattagcggtgggccactccgccactaataaat

SEQ ID NO: 32993 - DNA, 1583 bp, Cannabis sativa
aaaccaataactttattaggaaattgacataaacttggtattttagtgatgagcccatttttccatttgtcttttcttttctttgtattttgtttgttaaaccctatcccactaaaagtatattaacccattaataaataaaatagacttgaaaaaaagatatttggacttcaattggactttagtaaattaatcaactacatcaaccacataattcaaattgttttctattttgaccattttgacacttaataagtccaaattttacatttattgcaaaactaaataaaaccaaataaaagttactaaaataaactagaaatacttgagaaaaaagctaatttaatgcctagaaagatgtaaataactctattttcatagagttatcactggtcatacactcttatttgagccaaataatggtgctgccaaaaaggattattagagatatagatgctatttgtagaggcattctttggagtggcactcaacatctcaaaggtgttgctgctgtagcatggagtaaagtcttccaggctaaatcagaaggggtactagggctaaaacaggtaactgaatggaacattagtgctatatttgagtacgtgtgggctattgctaaaaaagaggataacatgtgagtgaaatgggtacattgtgtgtacatttaagaacagacctggtaggattacaaggccaaagctaataatagttggtattggagaaagatagttacattaaaggagaaggtgaaggagatgtatgacatttctgagagggagaatttatgcagcaagtaccaaatcactcaagggtatcaaaggctaatccctgtagaggttaaggaacactggcctagtattgtgtggattcggttcaactatcctaagcatagttttattttgtggatggctatgctcaatagactcaagactaaggataggattgcaagatacaatactgctattgacactcactgtttgttctgcaacattgaagaggaataagtggaccatttattctttgcttgctcttttgtccagggttgcttcaaccaagtgaaatataggctgaaatggaacatgagttctagatcattgtctagagttatcaggtggctaggcaaaacaaaagtgaaaaggtttagaagatatactctggctgctccattggcagccctcgtgtatacaatctggtgtacccaaaatgcaaaattttaggagaacaaaaatgaaaatagtgacacagtaataacaaaggttaaaattgttactaaaattcgaatatcatgtatttggccaaaaaaagtttataatagtgataaagtatggtttgacactttgtaaatattagagtttttacaagtcctctaggctgaggatgcttatagcttgtacaaattgtgtttggagtaatgaaaatcatctgattcatcaaaaaaaatgtgaatcatttgtaagaacattattgttgggttttgtgccctaaataaaatccattacaatatgattagttatcaatatagaattttgaagtgatctatgtttacatatatgttatatgtttatggtttaatatacata

SEQ ID NO: 32994 - DNA, 4128 bp, Cannabis sativa
gtgccttatgtaattattcctacttaaaaattgaaattgggttccaaccaaattcactattcaggcccataaatatgttaattataaaagaaaaaaagacccaaaaaatatttaaataaaaaaaagatgatatttttaaaaattaaattttatttgagcacgaaaatgaaatattcaaactcaacccaataaaactcgaacccgaccaagtgaaacccgccatacccaacccgaaatctgacatacccgaccactcaaaaatcaggttcggttgtgcattttcaacactcgaaattcaaaaacctaaactcgaccacccaaaaacccgacccgtgtgcagcctaactatatcatgttccaccttataaaactaattaagaaaaattcaatattttttagtaaattttaaaaaattaatttggatcttaacaaaaaatcattttgaatgataaaaaaaattaaaaaaataaattaaaaatttaaaactaattaagtagcatattttatttaatgtgtttgagaggggtatataattagaacatgtatttattttaagcatgcattgttaaattttctatttttgtgtttgatcttgcttgtacctctaggattcgtaccaattttgtatcgtatcaaaaaagcccgacttgtatttatagctcaaacatctatccaattcgccatcttgaagagatttttagtataacttttttattatcgtattacgttatatttatttaggattatctataaatttttataaaattttaaataatttacaatatcaaaaataagattaaatattttgttatacgcctgactattttttatatatgtagcaaataactatttgaactttattttcgacactatacattatttcgaatttttttgaaaatttacaaataattttaaataactataacgtacataatcataataaatagactacaaaacacatagaggtctgccaaaacatcccttgaagggagtatattgacattattatcatcgttgaatcaataaaatgttattgatcactaatggtacctaacaccttttataggtggtgtcctacgattggttaacgatattcactaaaagttattttttaagttatataggacccgatacctaattacaccaatggcagtatgacaccgaggaggatgctaggcactagtggtgccttttagcaattctcaataatattggaagcttctacggtgcacttcccaaagaagggtgcaccaatacaccccttacagtttcaatatctatttttttattaacgtgtacgttataattatttaagatattatgtaaaattttgaaaattttaaaataatttacaatataaaaatgagtgcttaaaaagactattttatatgtatataaaataaaagagtcacacgtgtaacaacctgtttgaacactattttttacatattaatctttttcgaagttgtcaaaattttacataatattttaaataagagtattgctaaaaggcattactggtgcctagcactctcctcggtgtcatactgttattaatgtaattaggtatcgaatctcatataatttaagaaaataacttttaaaaaatattgctaaataatcacgaagcaccacctataaaaagacaccactactctaatgaccaacagcaatattttttaaataattttaaggtacatttatacgatgctaaaatagattagaatgttaaaatttttcttataatattttattctaaaagtaataaataaagcaaaaatttgtttcattaaacaaaaaaaaaatatgcaaaaagtctgaggaaaaggaggggaatcctaatagttatggccccaccacaataattatacctataaaagcataagtaataagaggtcttgtcaaaagtagaccatcttggccatattttattcgaatcagatggcctaaaaagcaaaactttgaagcaccattgaaccgataataatgtattgaaaaaacaaaaaaaaagtttggtttctgctgtgaagtgcttatatacatgcatagtactgtagataatgcatcctcagtgatcaaattcaaatctggccgtttatttacgaagcagatttttatggactattcaaaggacgaggaaagcagtattatgcgccccttgaccgtgcccacttgtcaaacttctaaaattctcccttgaataatcccctctgggcagtttcatgctctctactgtgcatctccaattgatgattaaggatggttgctaaaattgcaatggactgcccaaagtcatttctttttttttttttttttttaacgagaataatagtaatgttgagtaacaaagctaatttttcgaagattaaaagcttcatttactaaaaaataaactagggatgtgatgaagctcggtattaagactgatgtagattatctatagactaacaaatgaggcgcggtattaagactcatgtatatttatgtattcataatgttttatagtttataatatcatatattaaaaaaataattaattataataatattaatatattatgtagcatgttatttttttaatcaagtaaaaattcaaaaataaaaaacaactataaataaataaatttaactttattttttatcacaactttacacataaaaataaaatttaattagaacaatccacctcatagtacaattatttatttgatttttcaatgtatttttattaattttcgtgaaaagaagtagccaattatattttttgaactttcaagaataaagtgcaattatactttaaaataagaagtacataagtaattataagaaaatgaatacttgatgcaaaattatttttctccctttttcttgataaccgaattatttttctcttcactaatatttactcaataatttattgttatttcttaagaaaattatttatcattattatatcgaatttaaaattaatgtggatggggcagtttttgaagacacaaatgagatcggtactggttttgtagcacgcgactgtgatagtcagataattgaggcattttcaactatttcttctgtcagttgccgacctaaatttgacgagttctgaacacaagaagccccatctattcgatgttacctgttgggcaatctacgctaagaatacttttaattcccattttcattcctatagtgttattcctgctgaaaaaattggcatttttaagtttgttgactttccggcctgaccacgaacaagacttttccagacaaccccaaaaatttcggactttcttaacattagctcttcccaaaaggataatgtcacccgcaaagaagaggtgagataatattggcccatcactacctagcttaattctttgattctaccacttcccaaatcgctttaggactccaaaatttttaagcacctgctctataaaacaaccaactcaacttgtcataaactttgaaaagatcaattttgaccgcaaaaaaccctttctcacccttcttaagcttaaaggaatggataatttcttgcaacaagacattattgtcatgagataaaagcgaattgagtgggacatataggtctaggaagtagaggcttcattcgattagcaataatcttagagagcactttatagatgacactgcacaagggtataggcctgaactggacaccttttggggatttaggaccttcagaataagcatcacattagtcgagttgatctcctcgtgcatcgtactcgaaccgaagaaatccccaattgaagcatagaaatcctcaccaaccgtatcccaataacatttgaagaaaagtattgacataccaaccacaccaatagttttaacactgctcatggtgaacaagattggtgagagtataattattatagaggaaattacaccaataaaaagaggtatgtttcaaataaatataaaattaaaagtaaatttgattaactgattaataaaaggggtatttttcaacttaccccattattatatctgatttattcttaaaccaaaataaaaccttaagcccattttaatctgaccaaaaaagcaagataaggaaaatttcataagaaaaacttcaaaaaattatcatataaattaata

SEQ ID NO: 32995 - DNA, 2338 bp, Cannabis sativa
  modified_base (1203)..(1204): a, c, t, g, unknown or other
atacattttatattttatataaaaataaaatatatttttcatcttattttttaagtttgtgagaattttatattatttttcccatatacatattaatataaaggaaagcacacaagagtgtaggtgactttctataattttttcttcatatttttctaatttttttaaaagaaccatgttaatgtactaagaaaatattattatttaactaagtttattttttgtaataatctcacattatttagaaaatatagtagaacattacatatacactataaataaatcttttctcatagcattttaatttgtcccaaaatatttattttcttccttgactaattgattgaatgagtcttattcaattaattaattatattttttttgtcccaaaatatgtatttttctccttgactaattgattaaattagtttattcatttaattagttatatttttttgttttcaaaaaaaattatctattctataatagtctattataataaaatacattttatattttatataaaaataaaatatatttttcatcttattttttaattttgtgagaatttcatattatttttgacatgatttctatatctatatattaatataaagtaaagtacacaaaagagtaggtgctttctataatttttttctttatattttctaactttttgagaaaattatgttaatgtacaaagaaaatataattattcaatttacattttgtaataatctcatattattcagaaagtatagtaggacattacatatacactataaataaatattttctcatgccatttaatttatcccaaaatatgtatttgaacttacaacgcattttctttttgagtgtaagtgtagtatcactaacctatgtctatgactactcttaaatgataatttagactttatgtcttgcaacatgaaatatagcaatatcatgagtccaatattagtgaaaataattatagttaagatagattagaaatcggatcataattgttaatgaaggttaggaagagaaagttttaaggttagtaaaaatttttttgattataattagacttagtgtatcgttatatttatattgtaaatgttcagaaatatgattttttagtaactttttttttcttggtaattaaaattttacatggattaaaaaaaatacataattagtatacttctaaattataannaaagtattcttacattcattttaatttgcctaaaaatacatggctgatttattatttaatattgcctaattagttgtaatcttttttattattattttgagtcatcaaatcaactctacatatttatttaatatatttatatactcatttaataaataaaaaatacttaatatatgaatttttaaaataaaaaatacaaaaaaaaataatcataaataaaatttgatttttcaataattataatgattctacgaggcacgatataattataatgatcccgcaattgcacaaccaacttcatatggtatttatcattttaattattactaaagagtaagacaaataaatatttcgatgtagaagcaattaaccatatgaatcgtgatctacctttttattattcccatttaagacatatttttctcatccacataatttattataattaatcttcttattaaatattttatatagatcaattttatcattaatatttttatataaatccctcatttttttagtttttaaaaatagataatattgtgacgcccttttttatcgttgtcatcttatgaaataaaatgtaaaaaactttctgttatacccgaaattcggctagaggacacgtgtcaagataaagggaatgtaaattggtgcaatatctttttatagaataacttattaattacgtaagtatcagagtatatttgtaacccgctgactataaggtcttatgagaggaatcaatatacaaactgacacttagtgtattaacgagaaaccatacgtcgctaaaagtgaatagcgaggcaccggaggaaagtgacacataccttagcttgcaataagcaaactaagtgtaaaagtcggatcggctcgaagaataagtatgcgagatgaccatctcgctatgagaagacttcatgtagcttcctgtaactattgattgattgattgattgatattgatattgatatattgattggtcgagatcatgcttttccaaaactaaacaaaggtagtcagtttcaaataaatatatttttttttaatttttttttttttttattttgaccgtttttttacttggaagagagaaataaataagttgtttagttaataaactacctcgtg

SEQ ID NO: 32996 - DNA, 1466 bp, Cannabis sativa
  modified_base (40)..(74): a, c, t, g, unknown or other
ataaaataataaattagacttttactaataataataatannnnnnnnnnnnnnnnnnnnnnnnnnnnnnnnnnnaataataataataataatatgacagttgagtagtttttgattgattttttttttttttttttgaataaagatgagattgaaagaatgtaagaaaccctaaaattaattggtaaatggggaattttaaaattagatgagggcaattgtgttaagtgaaaaattcattaaaccaaaattgtagcttcccttaaaagctaaaatcccaaaactagagtgggccaacttttcttaaaagctataaagttcacttaaatttttgaaaaaactatttttttaaattttaccaaacacatattaactcataactttttccaaaagtgattttagctttttaaaaagctcccccaaaaggggcctaagaaaactatagcaaaataattataacatatttcacacattgccgaattgcatccctacacaggctttataaacatccaaactaatctaaagagttaaaagaattaagcacacattttaaaaattttaggacatttcacaatcaacggcaacatacaactatctttagcttattttcaaataaaaaacaaactaaactaaagcaaattaaaaattttaagtcccccaccccccccaaaactgaaattcacattgtcatgtggtatgaaaactaaaagggaagagacttacctgaggtccatgtcacattaacaagcggttgtcacctataataagcgtcatgcaagataactttaaagttatttttgaagatgccctcaagcttgacatgtaatgagtttcaactaaaaatcgcaccaacaacaaaagattttggatgagcttggggagaaaccgttgataactcgtagagaatacaacatggagaaccgttgtattagcagagtataagattcattggtggttcataatatcgtggtgttgacaacctcaaatcaacaactacaagtgattcttttgccaccaatgacacctcttttttgcttttctcaaatagcctctcaattggttgttcagttttctcatgaccattcacatctttgactgtgatttgatcttcaataatttcatcattgaggatggatgtttcttcattcatcatgtgcatgtataatgattgtagcttttcatcatgttatttctcaaataaaataaaacttgatttagaaggttaattgtaaattcatcataattcataagctaattatgtttgggatatatgatataaacttcattcttacagtcacggtgatgaaaatttgacaatatgttccatggtaatgatgatcacgtttttaggattattacttttacacgtgaatataaacacatgaagaaatattaattactatatatatatcattatatattaaaagtctctatctaggaatgtcaatggggcgggtcggatctgat

SEQ ID NO: 32997 - DNA, 3467 bp, Cannabis sativa
  modified_base (196)..(207): a, c, t, g, unknown or other
  modified_base (1295)..(1301): a, c, t, g, unknown or other
  modified_base (1382)..(1392): a, c, t, g, unknown or other
aattaccaattggaccctctgttttgttaaatgacaaaatagaccctgtattttccaaaatggtaaaaataggaccctacgcttaattttcgacaactttttttttaatataaccaatttgaagacaattcttaacacgaacagatactaaaaatgtaaataattttactataacacctttagatcggattattannnnnnnnnnnnttgacaaaaaatcagttcagagttctatttgtactattttgaaaaatacagtgttcattttgttatttaacaaaacagaaggtccaattaatcatttttgcaaaatagaaagtccaaaataatatttacccataattatataatcaaccaaataagtgaaaatgagtaattaactcgaattaaactcaaacccaattatagaatgaccttctaaacacaccgactaaattaaccaaaactaaaacaaaattatatcatttttttaattcttcccattattcttccaagagcttcaatcttacatatataatattcatcaacacaaacaactttgtaccaagtactaaaagctaggcctttatacctccacaactcttaatattaattttagatagttaccatacattattcaagttttatttaaagttttagcattagcaacacaagaacattgaagagtcgtctatattctcacccaaacacacttaactttaagtttttacgtgatcttttcctggcaaaaaaactcgattgcggtattctgcaagcgcccataatggaaaaatgtctttatacattggataatgcaatggacaattcatcttgaaaactccaactatatcctgaatcataataaaaaaaaatataaatcgactattactttatttgttgaaaaccataccaaaattaaattagaaaattttaattttatgtaaatttgttgtatatatgtttaaaatatagtatttctttttcttattaatattatttcttaaaaataatgctcaaataaacaaaaatacctgttctgaaaaatcaccattttccatttgagaattgataatgagttttgcagcacgatgaagaggtgttgggtctctttctgcttggccagcatgaatcaaagccatcatagcccatgaagtttgtactaaatttgatctattttgaggaagggctatatattcctataataataaactcaaaaattaattaaaacaaaaaaaaaagaagaaaaaattgaccaatattcttaatactacatatttgggatttcagtatagttacaataaaaaattacttgtgannnnnnnatagtatttagatacaagttgttactaatttagttttagtccaacaaatattgtgcctaaaaatacatttagtcacaatannnnnnnnnnnttgtgactaatacatttagccatgaattttttagtcacaacataggaatgatgttttataataagccataacctttttacttttagtcacacgtttattttattttatttttttgataacattttagtcacaagtttttactcgcatattgtacaatatactttttagttaaaataatgattgagttacacttaaattacatgattttttcacgcttaatgatcgatgtaaaataatgtataccttttttggacaagaaaggtaactctctccccaaccgccatcgagtgtttgtttcttgagtagaaattctactgccttacgtatagttagactattgttgtaagttttaccagctgcaactagtcctcctagggcaaaccacgacgcatatgtaaagcaaattccccaatttccatacctataaatcaataataatttttcaatgttaatttaatttgtttatcaaaacaaaattataactcaaattttgaatgtgttgtaaatatgttaattatgctaaccatgaaccgtcgtgcctttgtatgttttccaaaaaccgaactgctcctgttatgaacatctttatttcttgttctctatgtccggggtatagctttctgaagagaactaaagattgaattgcactcgaagtacattccacatacacatgctcgataacaatttcttcaagaaattcaacgggattcaacatctgaatttgtaaacacaaaaattacattttttaattatttttttaatacaaattatgtgtaaatatttttttttctttgtagttttatgttgcatgtagaatgaactacttacttccaaccaagctggtgatctagcaggctcccatgctgcttcaccaccacttttactctaaaacaagtcaaattagtagtctttgttatttagagataacactaattaattgtgaaaaataatttaaaataatataagaaaattagatccaagtatgagtacttatatcagatgctttaaaataaaaattctctaaaatatttaaagaacttaactaaaacacgctacattagatgctataaatttattctctattttaaagcttctttaaaattcactatttatattgtatttatagaatattattcattggtctaaatttattttattaattgttgggggttttaatttttttttatatggagatgtgtataaatataaatattatatgtttgaaatgaataaaatatattaaaaaaaaataaaaaaagaaatagagttttgtagatgtattttaaagaagttgatatatgctctaccataaaagtttaaggtaaaattgaaaaagtgggggtttgactcgtttgagtgatgtattttaaagaagctgatgtataatttaatgtaaaagtttgaggtaaataaagaaagcaaaattttggtaatatattttgaagaataaaatatagaagtttataataatgctcagtcacattgtgcttatttttttttcttttcttttctaagaaatagttttatactaattaacaaagaaattttgtatagaataattctcacctgcaaagaaagtataacattaacagtatcatataatttctcagcttcaatatgttctccaacaatttttggtggcatcattgacaacattgcacaacactgtagattaaaagtattaagaaaatgagttcaaaacattattaatcttattgtgaaaataaattaaaaacattaatttggttaaattatattaattaacctttaaaccttccgtggtacaatcagaaagttgccatccatgatcttgatcggaaaacgtccatgatccttttgatatgtggcgatacatacttttaaagtcaccagaaggattgtccttgacctaacagaattatagggccgataaatatcgaacataagagaattagttaattcgagtgaaataaaattaattattaatatggacgttcactgttagattgatggtcggttattctgttaagtttaacacttgacagttaagtttgttaactgtctattttgacaccaaatgacaaagctataaatag

SEQ ID NO: 32998 - DNA, 1123 bp, Cannabis sativa
ggagatccgtttgatacccaaaaaatgctcagcaacagtcatacaagtggggaaaccccaatatcacatttcagcggtcttagtattttagtcataactctctcgatatatgtaaaaatcagacgattcaaaatgcgctgcaaagatgaaaaaatgatctatggattttatgtttatgacaagatctaattaattttaaatgcataattataaaaatcatccaacaatttccacttagtaagttgatcttactaactctactcgtacctgccagcctccataaaaaaatacctcaaacaaccacatatacatgatggaacttttaatatcttcatagaatgatgtcttaccctttatgctttccccacttataaaacacttcgattgtgcgcggtcgtgagtccgatctccaaaatgcttggagaagtctcttggaattgtaaacgacaattcttagagttaacaacgggttaaccgttaacaaaactcaaaagttagctttgctaatttttagagttaacacttgccctctagtctacaataattcttttaagtgttcttattggctgagtgaattggggtcttgctcagtttaagtgcgagccttcttttctccacatttttcaagaatatgcccattatatatagagggtctcccttgcatgaatttcacttcacaatcagcaccttggagtagtggtaaattcttcccaccttgtctaagaggtctcatgttcgaaccttgtctaaccctttttttcttttctctctttttttgttgcctagtgacctaagtcaccatgcaaccgagtgactttaagtcgctcttgaggctgagtggcattttttcactctttgaccgagtgactttggttaccacaagatcgagtgatatttttttactctttggtcgagtgactctggtcaccgtgaggtcgagtgatatttgtttactcttcggccgagtgactctggtcaccgtgaggccgactaacatttgtttactcttcggccgagtgactctggtcaccgtgaggccgactaacatttttttactctttggctaagtgactctagtcaccgcgaggccaagtgacatttgttcactctttggccgagtgac

SEQ ID NO: 32999 - DNA, 1538 bp, Cannabis sativa
ctatagaggatctattattgttgaaataatggataatttatagcatgtctattcttggtgaatagagtgttctatttaatcagaagtgtaattcaaaatctatagtggagttaggaggaattgttaagatagggaatttactaggtaaattctagaactacttattgggagcttgatttataggtccatgttcccacactagttgagataatattgtcttgtagactcaatttattgattttaattaatcaattagaattctaagcaagggcttctttgagaagaaaaagaggatttaaggttgtttattaattaagtgactttgaggagtctaattaataaataatttaaatggcaattttatttgataataaattataattattaaatagttagatttggtgtttatagagatagaattaaatatagcatttgagaaaagaaagataagtttcaataaaataaaaaattgaaatacactagaacccacatagggtttgaacatgatggattaataaagccatttatttattcttttttttttattattacattttaattctaaacctaatcctaaaagctatcctataaatagaataatatggctcttatttttctaagctaatagaaaaccctaaacctaatcgtctctctttgtgagacaaaaaaaaaaaataaagagagccattatctattttgaaatcctcttcttcctcttctaaaattttagaaaccctagagttattgaggagtttctcacacaattcaagtcaatactcatgttatcggcataaatttaccctccccgtgagaatgacttgtctatagagaactcgcggtattacagtgctcgcaatattaactgaaagagacctcgctatattgagaaaggcaaacctcgcatatttaatgaagttgcattatcaacaggaaaaggcgcgaacacacaccaatcaacggaagtcaacaatcaagcattcaaggagcattaataacaaatgttatacatattatataactattgtaattcattcgactaataagcccattatgatcattatcattattattttgtaactctctcattatcgccattatttgtaaccgattcctactatctatacgtaggggcttccccctccattcaaagggggctgatctgaataaagaaacagagccagagtactcttttcaacagtggattaggcagacagagcccgaagctcctgctaaaccactatatttttctgtgtccattttatactatttacaatactcgcatacattatacactatattcttcaagtactcgctattctaagtgagtgctcgcatatctattttttggtattcaagcaacccttgtatactcgcacaaatccggtgttctctaaattcctccgacaacaactcaagatagtgtggaagaatatgtagtatttctatcaactgaaggagaatccaagttcagatcttaattgatacgaaccacaccaacagttgtgatgaaaccagacaccaaatatggcagacactaa

SEQ ID NO: 33000 - DNA, 1508 bp, Cannabis sativa
ttttttaaaaaaacaataatatatatggaacaatttttatattataaaaatttaaagtttaaaattatcgtggtgggaaatcttaccttttttactgttaatatatatattaatggttgtattacataaagtataatagtgaataacaaaataacacatgcattaataaataatatccaaatgaaaagttttgcactagaaaatatctgaataatctcgattaccgttgatctcatctaaatttaatttcaacctaagggcgagttatcatctggtcggtaggagacaacaacctgatagagaaacttgttggatacttatattgaaggattggtataggctttactagtatatatatttaacaaggtaaatggttaaacaaacagttgtttctttggttcccacaaccctgacgatgacatgcttgatccaagcccactaaattagtttaggatctcacaagacttgatcggtctttttaatttatttttaatttgagattaattttacttaattaaacaattttaaatctgtatgatagtatgttattgatcttgttattatttatgggaaaattcatatatgaagtattttttctcaaaatttgtaattattatgaacagtacaataagatgtgagataaggcattaatatatcatccaaatataataagttataaaaaatttaaaaataagacatttttcaatcatattcaataatcaaattatcaccctaggtatctcaaaagatcaataattgcattataattaagattatttgtgttgagttaaactataaaaatgatccaatcggtttagaaatcgttgtcaatcaaactcatatatagtagtttttagtaatgctagttggtaaaagactctaattagtgtgtggttcaattatatttctttttctatttatacttattttcaaattttgacatatggggcctcaccatgtcaggagtttgtcccttgcgtcaaacccagggagtgcgtgcaccaccaaaagaaaacaagatttttgttaacaaaactcatatattaatttacatgtttataattttcaattaattatcttttttaattatttacttgatgaatatttataaattttcaattaattatttttttaattttgaaattatatattaatttttaattaattttattttccactcaacaataattgtagctagaaaaatacaaaatattcaagttatttaatctacaataatcaatacaactaacaatataatcatggtgtaagtgataaagttatcttatatcaagtacaatggcatgagttcaatcatttaaaaagatatgattttttatttatttatttttaatttaagcttttaaattaatttaataatttaaatttttttctaaacaataatttaagtttctttaagatttattaatatagaacaattcttatattataaaatttttaaagtttataattgttatggtagaaagttttaaatttttatttgttaatat

SEQ ID NO: 33001 - DNA, 2080 bp, Cannabis sativa
gataacaatgtcattgttcaagaaatcatccactcgtttaataggaaacgaggcaaagaagggttttttgcagtaaaaattgatcttgtaaaagcctacgatagattaagctggagatttattgatcatgttctctcgagctatggctttcctcagaaattctgcggctgggtatctcagtgtataactaccacttctctgaatatttgtcttaatgggggtcaggttggtaagattaatcctacatgcggtctgcgacaaggggacccgctttcaccctacctatttatatgtgccgctgatgttttatctaggcttttggaagaggctcttggtttgggcactattaagggtattcgattgagtagaagtggaccggttttatcccatgttttctttgcggatgaccttatcctggtgggtagagccaatctgaatgaggcaaaaggtctatgggattgtctcgaaaagttctgctcttggtctggacaacaagtgaataagcttaaaacgtcaatctttttcagtaagaatactcccaatggtgtaagaagaggtattaaggaggccctgggggttaattctccggagggtgtcatcaaatacttgggacttcctctgttcagatcaagacagaaggatgctgacttcaactttatactggataatctcacttctaaattgcagggatggaaggcaaagacgttatccaaggcgggtcgtgctacactcataaaatctgtgggtctgtctttgcccacctatactatgcaaactaccaaactctctaatcgtcttgtcaacagaatagatggtttggtgagggacttttggtggggttttgagaaaggtaatcgtggtcttcatctcagagcgtgggacaaactttgccttcctaaatctcggggtggcttggggtttcgaaaatctaaagaaatgaatcaggctttcctggcaaaatgggagtggaaactcttaaatggatgtcaatctctttgttgtaagatcttggaggccaagtatcttaaaggaaaggattttctcagctgtaattataaggattctgattcctggttttggaagaacattgtgaaagccaatgcaaccttacggaaaggagtttgcaagaagattgccaatgggagggatacacgcatttggagggatccttggattcctcatttaaaggtttcattccgaaaccgattggtaatggcactcagggtcatatctatgtggccgatctcttattaacatgtggcagatgggatgttaacaaattaagaagcctttttgatcatgatactgtctctgctatcttaaaaggtggcaatccttctgggcaaggtgaggacagatggatttggacattagagagtaatgggcgattctcttgcaaatcggcctatttaactcaagctttggaaagagcgcctcattgtgaggtggctccatctctgtggaataaactatggaacagcaaaattttggagcgacataagattctgtggtggtgcatcctgtccaacgcactccctgttagatctttaatcggaagcaggtttcagattgagactatgacttgtccgctatgtggattaagggaggaatctatcgaacacttgtttcttacttgtgatttggcgtcacatgtttggagatcctcgccttggggtatctacccggtgtgtgataacggcattcgcatgtgggactgggttaagtttatttggagtctcaaggacaggggtatacgagctgaagaggtctttctttatgcttcaattgtagtcgacaccatctggaggacaagaaacgaggtggttcacaatgactgtctgcctgatgtgaaaaaatgcattgactctgtttgttactcatttgcagatattcatcctactatcttgcctgatcatgatcagattcggcgagagttttgggctcctccgcctcaggactggattaaacttaattgtgatgttagagtgggcctggagagtatgtgtatcgcagttgtcgcaaggaatcacctgagtgaggtgatccgggttcactcgactcagttagacttctcggatgc

SEQ ID NO: 33002 - DNA, 2569 bp, Cannabis sativa
  modified_base (552)..(552): a, c, t, g, unknown or other
  modified_base (1715)..(1722): a, c, t, g, unknown or other
gcctgaggcgccgtctggaagaggcgcagcggcgaaatgcagagttagaacgcgatgtagccttggccagggcagcacaggggacgaatgatcaaaataacctaaacctagagtgagaagaccatgaggcagacctcgtggctcacgaaccaggagacaggaaaaggcccgagaagaacaactcggggaaaataagataccccctaaaaattaggatgaacaaccagatgggagacaaccgaaagctgatgaacaagaaatccatcatgagaatgaggaagatcttgggactcaaccgggagaacagaggtcacctgctagaaatcagcaatgttcttcccaaacccatagagcgaggactcatacgtaccctgatgggggaaatacaacaaactgctctcgggaggaaagaacaaagcctggaaaagcaagcgtgacttcaaggcggtcaagaacccatagtcgatcaactcgaagaggagaaagtattcaacaagtaaatgatcgataaagtatgggaaccagtaaatccgcgagccactcaaagacaangtctatgagtaggacgcgatctgtgagtaagacaaggtctgccagcaattactctcaaccggatctgcgagagcacttgaatcggaaaaaacctgacctttgccaacaacttggtccaaagcaagaggatccaatccaattgcggataaacgagttggaggataagttcaggagatatcaagtggggaataagggaaactatctcgatacgactctgacgaggaacttgagccgtatcacccagatataatgagcacccctttccctttgggatttaaaaacctgcatgtctcatcatacgacggaaccactgatccgatctcgcatttgaataacttctaacacaataatgcgagcgagtaatgtgacgaacaatttacgctgtatttttttccccacctcgcttgttggagtagcgagtagctggtttaacaagtttactcaacattcaataacttcctgggagcaactgtccagggatttcaagaaacaatttcaggctgctagggatagacgacccgaagcagcctcgctaacgaatataaaacaacagcatggcgaatcacttaaggcgtacttaagtcgttttagcatgactgcggctagggttagaaatttggatgacagcacacaacttacagccgttcagacaaggatctctactgatccattaaccgtagggggcgagttgtgggatgacttataaggacgtccggtgagaagcatcactgagttcagcgaaagggctcaggtgtttgtccggaaggaagaagcccaaaaggaaatgaacttgttgaaaacaagctcgggaagcaaacccagcaatgtttcaacaggtactacttccacgagaattgataactcgggggcttctggtccaaagagaatggacgaaattaaggaaccgtcgaaggatagaaaaaaaacaaatgaagcatgacaaatacgtgccagtgtatattatttataccgagcttaatgaaactcgagagaatatttacctcgcacatgagcaggaggtggccttcggcaaactcgagcctatgaggaattcaatagcaaaagagatcctaccaaatattgtaaattccataaggatattgggtatacgaccggcgaatgtcaccaattgaaagaagagatagaaagtctcatcgctcgannnnnnnntaaacagtacgtgaaaagatagggccagggatacaaccagcgcgatctgcccaataacccaaacaaccaagggttacaacctattcctgtggaaggagagcgcatcttggttatttcgggagggctacatatcataggggaaagcaataatgcccagaaaagatatgtgaaagagataaagaacgagtagtcggtctttgccccaaaaccttctaagaaggtgaaaaccaaggaacctcccattacattcacggaggaagatgagaaaaacctgagaattcctcacgtcgatccattggtgataaccattcaactcgccaataaaaggatcaagagagtattaatagacaatgggagctcgataaatatcctttataaggagactctaaagaaaatggggctcgaaaaagccatgttaagaccttgtatggtgaatctttgcggattcaccaaggacagcatctctagccttgtcataattgagctcacgttaactttaggcgaggcacctttatctgctactgttatacaagatttcttagtcgtcgacctgccctcggcttacaacatattgttgggtcgtccaacactgatcggactagggcaatcagtttgatcaagcacctatccttgaaattctaaacgctaaaaggtgtgggagtggtgcatggcgaccacaggctagctcgcgattgctatcgcatagagcttcagcctaggaaagtcgttcataagttgatggcaatcttggcagaagaaactgaacaaaaagacgaagatcttgacccccgagttcaagatgaaagaaacttgctaaaaccagtcgaagaattggaagaggttattc

SEQ ID NO: 33003 - DNA, 1576 bp, Cannabis sativa
  modified_base (1136)..(1145): a, c, t, g, unknown or other
catatacacttaacatatacatacgttcgcatattcatattacaccttatacacagttcttacctcctttcgagattcaagtgagttggccgacctgaatggaaatgtctcgtgctggattgatgccctcctaatcacatattaaaatcgagtagtaaatcgcatgtccaaaaccctaatccgggaaacctgaatctccaactcaaggttttgttatatttactagggattacattaacctagaaaacagggaaacacccaactaaggcactgaaatgggcaaaaattgagaaaacgagttgttgagggaatctgccaaaaccggttaacctgttttacagggcctggcaaaccggttaccggtttgcaccaggtttccccaacaactccaaaacttgctcaaaacttgtctaattgccaccaaactttccagaatacctaaacagggtatacacaataaaatccaactagcagaacccaaaaaaacacaccaaacaaaaacataccatggaagaaccaagcttgagttttcaaactcaatcttgttcatccacaaccccacagcttaaaagcagcaactagatcatcctttatgctcaaaataaacttagaaaacaaattatcaaacatcctaaccctaacaaccattaaacttcaaaattacataatcaaaccaatttcaaagcttaaaaacacaagatcaaaggttctagggtttaccttgcctcaaagctacttgaatccttagcttaatttcagaaaaatactaggttttaagggtgattccttctggtttgcttcaactaaaagagagaaagagagaattctctattttttttttatttttttttttactttttccttaattttttatttcttttttaattatctaacataatgcatcattaatcaataaaaaggcagatgtcaacaaacccacaagccacctaatcccctttccataaatgactaaaatacccttaaagccttaacttaggctaacttaagcttaggggaaaaatggtcaaaaaaccatatatccccgcttaaactcgatattctattttctccaatatacattctactaaaaaataagattctagacttaccgatgtgatcaaactagccatccatcnnnnnnnnnnttgtcgccgagcaaaaattataaaaattgcataattcacatataattcaaataataaacctaaagtttaataaaatttccagaatttagaaattataactctaatgcccatttctaataatgggacccataattaaattaattgacaaatgactactaaaatattaaggggttttttcaatattatacctaaaattgattttatttataaaaatacctttaagaaaattatttgcacaaataccgagtgccacgtcagcatacataccaaaatttaaaaaaattatcgaacataaaaaaactgaaaaaaaatttcgttttcagaaattttcgctgtttgggagttttgaaaaaagcaaccatttaattacttttgatgtgaataagatatcaattggttactttttcattaaaaaatttattttaaaattt

SEQ ID NO: 33004 - DNA, 3054 bp, Cannabis sativa
  modified_base (2063)..(2065): a, c, t, g, unknown or other
accataaaacttgcgaaagttcttctggccatacccccttacgttcttcgagttttcctttgatggtatgtttgattatcttgttgacggcttctgtctgcccattactctatgggtaggcgactgctgaaaacgccttttgaattcctaactcatcgcacaattgtcgcatttccttacaatcgaattgctttccgttgtctaagatgagtttgtaagggatgccaaatcgatagattatggagttatggacaaactcgtgcagtttggttgctgtaatagttgcaagtgcctttgcctcagcccacttggtgaagtagtcaacggcgaccacggcgtatttgactccgccttttcctttaggtaactcccctattaggtcggtgccccagaccgtgtagggccaaggactcgtgatggagtgcaagtggctcgatggttgattgatatatgtggctatccgctgacacttgtcgcttttctttgcaaagttgaaagcgtcttgtcgtagtgtcggccagtaatacccttgccgcatgatttttaaggcaagagaattaccgccagtatggtttccgcagataccactgtgtacttcatagaggatataatcacattcttctccgtcaatgcattttagtagcggctggctgaagcttctgcgataaagtcttccatcatagatgacatatcgggcagctcgatgtcacagttttcttgcttctattttatcttcgggcaagacctccttttccaagtaattcactatcggagtcatccaagtaactcctatggaaacgtctatctccatcacttcatctcgactcaccgttgggtgagttagcacatcgacaggaatcacatcgagcaattcagcttctcttgttgaggcgaagcgggacaaagcgtctgcgtgtgaattatgagcacgcggtacttgggagacaatcactttcttgaatttttgtaacaactcgcatgttatggcgaggtacttagacaaacacctgcctctggccagatattctccgtttacctggcatatgacaatttgggagtcgctaaaagcctgtacgtattcaatcttaatttcaagggcaagctttaatcctgcgatcaaagcctcatactcagcttcattgttagatgcagaaaattcaaatcgtaaagcagcgtgtaccttaaaattgctaggactgatgagtattatgccaccgccggagccttcgctattagaggctccatcgacgtataaagtccatccttcgccatttggtacattagtatcaattttttcttctacgagtgcaacttcagtacttggaaactcgagaatgaaatctggccaaggcctgccccttaatcgcatatcttggtttgtacttgatgtcgaattggcttagttctactgaccatttcaacaaccttcccgatgcttctggctttgctaaaacttgtctcaaagggtagtttgttaacttcaacgctatgggcctgaaaataaggtcgcaattttctttacgctattaccagggcaaacaccagtttttctatttgagggtaacgagtctcagcgtctagcaaatgtttactgacatagtacaccgggtattgccgaccttggtcttcgcggattagtactgagctaatcgcatattcggataccgccaagtaaatggataaaacttctccacgcattggtttcgacaggattgggggctgtcccaaatgcgtttttagtgcttggaacttcttgttgccttttaagatttgaaaaaattctttgcctttgtcagaggatcgtgatatgaaatgatttagagcggcgactttacctgtcagactttggacttcttttggcttagtcggagatcccatttctaataatgctttaatctttgcagggttttcctcaattcctcgctgattcacaataaacccgaggaatttccctaagccgaccccatagacacacttaagaggatttagccgcattttgtatcgtcgcagtatttcgaacattgcttgtaaatagttgacatgatctttcgcatgttgagatnnnacgagcatatcgtcaacatacacttccatggtgtccccaatcaaatctacgaacatcatattcaccagcctctgatacgttgcacctgcgtttatcaaacaaaaaggcattaccttgtaacaatacaaacctcgatttgtaatgaaggaggtatgttcctgatctggttcatacatcgggatctgattatatctcgagtatgcatccatgaaactgagaagctcatgacctgcagtggcatcgacaagttggtcaatgctaggaagtgggaaactatccttgagacaagctttgttcaaatcagtgaaatcgatgcatgtgcgccatgagccattaggcttgggcacgagtacgggatttgctaaccagtttgggtagaacgactcccttatgaagccgcatgcaaaaaggtggtctacttcttccttcagcgcttggtacatcgcggggtccattttgcggcgcttttgtcgaacacctcgcacttcggggtcaatgttcaatcgatgatacataacctgcggagatattccagccatatctgaattttttcaggcaaagacatccaggtttttcttgagaaaagtgacaagcttttctcgctcgatagtgtctttcgcggcctgggcggttgcggcgtagtcgaggatcctaggatccaaatctggctcgtctttatgcagtacttcttctattctcaatacctcctgacgaggaggcggtgcctctagtaagtaaatgacattaactgacttcttttctgcgagttttactgctgtgttgtagcattctctcgagtccgactggactcctcgcacagatcctactccagcgggagtaacttcatggtgagatgatagatggacgtcacaatcttcatcccctttaggataggtccaccaatcacagcattatatgccgagtattggtcgattactgcgaagtcagccatcgacttagctactacgggtgcggttcccaaagtgatt

SEQ ID NO: 33005 - DNA, 2441 bp, Cannabis sativa
  modified_base (336)..(336): a, c, t, g, unknown or other
tcactaaaggacaaaactctaattgggcaaaaagaccattttgcccccacttaagccaaaaagtcactaaaccacctaagggtaatttggtcaattataaaatctcgactaatccttgacattctcaatgtctaactatattgtcccactatactaaaaatactaaaatgtgattctaatggccaaacgccgcgttctaatattgtcgggcacaaaacatgcaaaaatataaaatttcatatatgacatatataatgcattctaaattcaaataaatctccctaaaatgataattcataactaatatgcaagtttcataattaagccctaattatntgctaatttccaaattaaaattaagtggtctttacactcaggctttactcgctaagcaggcttggagagtttggaaaaacctttcctctcttctgtcttgtcttcttagatccagatactttaaacataatgactttctaagtgcttcaaaaggtcattgctcaactgtcacttggagaagccttctttggggaagggacttgttgttgaaaggtcttatttcgagagtggaaaatggtaaagccatctctttgcttaattccaattggatcccaggtttgaactctctcacttttttaacaatggcatttgggacactgtgaagcttcagcaatacctacctcaatatcaggtaaattctatcttgcaggttcctattgatccctcatttgatgactgtctcatttggggccatcatcagtcaggtacttttactgtcaactctgtctatcacctggctaactcacactcttattctaattctccctcttcatcaacacctgattattttaaacattggtggaaaactgttcagaccaccaaaattcccccaaaataaaataattcatttggaaagcctttcaccatatcttgttgtgtgcccttaacctatttaagaaaaatatcattaatagcccaattgtttcttctgttggagtaaagtggagattgtaacccatgcccttttaaactactccagagctaaatctgtgtggaagaacacttcttttaatcatttttatagcagtaatcaaagatgtgatattaaagaatttcttctaagggtctttgattcccttagtaaagaagactttgttgtttttataggtttggtctgacagatttggtctcggaagaatgatgttatttttaacaaaaaaattaaatgttttatagaggtagaacctttgtcagagggtttttgcaagattactacgaagcacaatccctaaattagtatggaggatgtccacaactcaggtataagcccgagccctcccaaggaaggaagcccttctactcccctggtgatgaaggatggaggttacaaattaaacatagatgcagctcttgatacgtactaagaagttttgcacaagcttgggagctgtagtcagaaattggaggggccaaatagttgcaggttgttcaattccaaaagttgaagccttctctccactatatgctgaggcacaagctcttcttgaggctctttggtggtgctgagcaatcaatctaccatttactcacatagagtcagactacttacagttggtttcaaagatcaagcacaagtagaaggatcaatcagtgctgtctggtttagtcgcatgattcaagaatccttatcgaaatttcctacactacaacatattcatttattaggggcgacaaaatcacctataagtcgcctctaatgtcttttaggggcgatagtcgctcctaaaagatcgcctctaaaaattcgcgcctaaaattaccattaagggtgacaaaaaagtctcatgtcaatttgggcgacactatcgcccctaaaagtaaaacacggattgttattttttacttttagtggcgacaatgtcgccctaatacccaaaatgtcgcccctaaaaggtgttgtcaaaattgttatatttgacttttaggggggacaatagtttttaaattaaaaaaatatatattatttgaaatattaattttaataaaataattataataacaaataaaataaaaattaataattaatatcaaatataaattttttcattaacatagtagcacaataacatgataaaattaaatagttcttacaaatataatattattaactaacacaacttaaaaaacaaaaaaaatatattataatagtaattcttacagaaaaaaaatataattgtaatcttttagttctataactaaggcaaaaaatcatttcatctctcattctcatcgaactctagagggtttggtggctgacactcgatgtggttgtagcagttgtggtgtatgcagtggttgtagctatgatatatgtggtggttgtaacagatgtgattcgatggggtaaaacaagaactaatttcacaaaaataaataaataaata

SEQ ID NO: 33006 - DNA, 1165 bp, Cannabis sativa
tatttcatttgcattagcttttattgctagttcttgtgaattttgaaagagtattaatatattagaagacttatttcacattgacttattgtattaattttgttcaaatttttttaaatactttctaagccactatcactgtctcacaaactaacatgtcatttgcacagcaggagatgggaactttattgaaggagcccaaattaatggtgaagatctttcgttctatataatatatatcattttgagaataagcttgagcatttatcatctttgtatctaaattttagtatttagcacatgtatgttacttgatgtttgtccattctattttgttttcatttgttatgcatattgaatagattgtaaatgtaatcaaaatgttctacatgtgttttatgctctaaattgatagatactttatgcagtcaataccaattcatttaactcattgaaatgatatttaagaagctacaaatacatcgaaaaaataaaaacaaaagacatgggctcaatgataaattaagatacataacaagaataagcaaacactttgatcaagtctctcaacttctctcctcccttcgtcattcaatagcaaatggatactttgttcaaatgaaagaaagtgaaaaggtcattcattaccaaaacaaggtctctgcaatttacataagtagctcttggatcggttgacacatgtggtgtttttttttcttttgacttaccatctttccaataccatttgacaaagactgaatattgagtcataccaattccctcctctatatggaaaaggactttcagattctaaaatctcttccatctttcctcccaaatggttccatcatgaagattggtttcccttcttccaatcaccatttcaaaacatcttccaatgcattttctaatattggttctttgataaagtctgattagcctttaaagaagctcacagattgtgatgctctattaactagtattttctaaagatgattcttctgtgtactcaaaaaagtatagtatagattcagtccaactcatttcactactctcctaaacatctatacccaactcaagaaatttgtatctattatcccaacttgttcgtcaactttcccaagaaacaaacaatggaataccagactttgagccaagacatgta

SEQ ID NO: 33007 - DNA, 1987 bp, Cannabis sativa
  modified_base (178)..(184): a, c, t, g, unknown or other
ttttcattttgtgctagcaaaagttctaatatcaacgttgatttgtcaattccttttgccaacacatcagaagtaaattctattttaccagcataatattaaacttttgtcatcacaaatgtgctggcaaaagtgacatttcttgtaatgtttcaaaatataacttaggtattattannnnnnnaaattaaacttaagtatttatttgtaactagacgttaaatttaaatatttataccataaattactggaattatctcaaatatatttatatatactcacatttggttttcaatgatgaaataagttatgtataaattgtacgagttttgaaataattgtttaattattatatatatttaaacatataacgtgtttttaattaactaaatttcaagtaataattatatatatacgttaaaaaaaagttgtaattatatattaaattgccttatttatatttgtataaataatttttgtatttgtatataaatgaataaaaagtgaatattataaaatataaataaaaaaacctttaaattttattataaaaatattgtataaataattcatatttaaaattgacactaagattacgtacagtttttactgacactaagattaatatgaaaattgatgcacctcaattatattcgtttaacaataaatattataagaccattctctgctgtaaattttatacaaatttagctcaaaaaatgactaagtgttatatttggtctaaattatgtagttgtactgtaatatatatatatatatatatatgtatatatatataagatacaaattaaattccaaagtcaataattttattcaaattatataaaaaaaaattatttaaatgaataaataaaatgttaaaaagttttaattaattaataaaaatcattaattaatggtaaataaataaataaataagtagatttattttagtataaatttagcttaattatactatattttgtgtaaaattttgttcaatttttagcatatgtgttaaattggacacacattttacactattaatatatattggagcttcatatttttcttttttgaaaaaacacgagctaaaatgtacaccactatttttcttttttggaaaaacacgagctaaaatgtacaccactttatagccgtctatgaagatgctctaaagaggtgttagataatactttttgaattaatttttttaaaagtgataatatttgaaaaaaaaaaaaaatatgttctacaaaattattttcactttctaatttttaaaaaatcaatatttttaaaacaaaaaaaaaatactttcaaaatttatttaaacagatttgattaaaaaaattatttaacttaatttctttttgataactataatctatttgtattttcttccattaataatattttagacattgactccaattccgacctcgacctgccccctaacccagactcgacctagaccttagcccttgtttggattcggacttgaatcctgccaaagcccgaacccgaactcccggcccaaagacctaacctgaaccctgtcttggattaagaataggcccgagactaagacaagccccaaccccaaccctgagccctatttatttttgttttaaaaattttagaaaataaagttataaaatatatttttactttttgtttttaaaattaaaaaataaaaataattatgaaatacacttaaaaaaaaaaaagaaaacaaaaaacaaaagtagacacaacatatttttattttttaaaaataaaaacaaaaataaaaattttactatcactcgtatatgatttacaaatttaaaaaatagaagtgttatctaatggtatctaaattaaattaaatactttgaattattgcaattattgcatatatatatatatataaatatagatgattagtatttttggtcttaaaattttgacattacctgattctactccttaaaatatacggctt

SEQ ID NO: 33008 - DNA, 1947 bp, Cannabis sativa
gaacccaaagtactttaggtagtttgttgacccatctacccttagtagcgtccaacttctttttgatataatccatcaaggttttattaacagcttctactttcccattcgcttgaggcctggatactaatgagaagcttttaataatcttgttcctttcgcaaaactcggtgaataagtcaccatcgaactgagttttgttatcaaaaactatcttaatgggtattccaaacctacaaaacatgttcttcatgacaaagtctagaactttcttgtaggctatggataccagagatttagcctctgtccactttggaaagaagtcgacagccaccactgcgtactttgctcctcctcaccctatggggagtgccccaattaaatcaattccccatattgcaaatgggtaaggtgagatcatcattctcagttctattggttgtattcaaggtatctgtgagaatcttttacatttatcacatttcttgaaaaatttgtgagtgtccttatttatagttggccataatatccttgtcgaatgatcttttctgacaagctttgccaacctgcatggtccccacaaaagccttcatggatttctctgatgattttgtttgcctctgcgtgaaagacacatcgtaggagaggcattgaatagccccttctatacaattttccctctactatcgtgtagcgagtcactggatacaagagtttttgtgcctcgtttttttcatttggaagttgtccgttgagaagatagttaattataggtatcatccaggtaggcgagctatctatcatctcgacttcttcttcctcatatatacttggctcgtttaacacctctatcgaaaccaagtttaattcgtccaattcattctgcgaggccagttttggtaaggcatcagaattagagttttgttctctttgtatttgctcaattttgaaataattaaacttatccaaggtgtttcaaactttctctaggtactttgccatttttaagcccttagcctggtattctcatagtacttgattaagaatcaattgcgaatcactatggcatataagatttttaaccttcaacactttagctatcttcaaaccagcgatcaaggcttcatacttagcctcattatttgatgtatcaaattgaaatcttaggcatagtgaaacttgaagcaatctaaaaattagtatcacccctgcacccgagcaatgctcattggatgcaccatccacgtataactcctacgtatctatgtctcgctgaacaagtggattttcttttagagttattcattctattaggaaatctgccaatgcttggctcttgatgaacgttcgtgggagataagttatgttaaactgccccagttcaattgaccattttatcaatcttccagaagcatctggttttgacaaaacttttctcaggggttgatcagttaacacctcaattggatgtgcttggaagtaaggctgtaacttacgagatgcgtggattaggcataatgtaagtttttcaagagggggatacctcgattctgcctccggtaacctcttactaacatagtaaccaggttgctggtgctttccctcttctcgcactatcgcgacactaatcgcattttttgagacaaccaagtagaggagtaatgtctctccagttattagttttgccaaaataagaggtgtcgacaaatgattctttatgctctgaaaagcctcctcgcactcttctgtctactcaaattttttgttgccttgcaatacattgaagaatggtagacacttatctgttgacttcaaaatgaatttgttaagagctgccattcttcctattaaggcatgaacttccttcagtttagttggtgatggtatatctatcaaagccttgatctactcaggatttgcttcaatgcccctcacgttgactatgaa

SEQ ID NO: 33009 - DNA, 2699 bp, Cannabis sativa
  modified_base (285)..(289): a, c, t, g, unknown or other
  modified_base (1467)..(1467): a, c, t, g, unknown or other
gatttatatgacttagggttttctatattaaagcactttaggaatatgtttagatctgtgatttatatatttctttgagtgttttataaaccctaacattgaaaaccctaaaaaatctgaacaaaatattaaaaaaaaaattacatgtgtaaaatgacgtgtactgcctaatggcagccacgtcatcactccgttactaaaataaacggaacaagacagaataccataaattaagcattgtcaatagttcgaggaaaatttttaacgtcaaaaatagttcagggnnnnngatttagcaagtgtcatagttcggccggggaaaattacaaattagccttattaaaactacatagcattacgcaagcactaaatattttaatgaaattatactatctaggtaggacatataataaattatgaaataaataacatattggaaagtgtgtgatgttttaattaattgatcaaatttcaattgtattacactggtgcctagcaccttctcgacatgttacgttgtgattggctagcgatacttcctaaaagctattatattaaattatgtggacccgatacttaattagaccaatagcgatactgacacataagagggtgctaggcaccgttggtgctctttagcatttctctattagttaatattgcatatcgtcattattggtacaaaagaccaattacactaatcacaccggcgcccttctctcattggtggacaatagtttttattaaaattataagccttataatattatcatatgctaaaacaaaacaatatatatgtgtctatatataaaagatcaacaacttaatcaactcataaaagatggcttcaaaactagtaataataattattgggtggtggctatggctgcaggcactaagagcaagcccacaaaccaagttgttgaaccaaggatgcagccagtacaatgccacagactttgctgatttcttctccaatctcaacgccactttctccgatctcgggactcagcttcgagacggagataagcggtttgcaacggcgcagcaggcacgaggatcagatcctgtctatgccatggcacagtgcaggaactacctctcgagtgccgactgcgccgcttgctttgcagctgcagagaagcaaatccgcaattgctctgcagccaatggtgctcgtgtcatatacgatggctgctttctcaggtaaaacatcattatacacataattaactacataaattttactaataccacatcatttattattctttatacaaattaatattgggattatatatgtgagatttattattgatttacatatatacatgtatttatagatgtaaaatgtgatattaaattatattttttttaaaaaaaaaatttatatgaatagcattaatagtttatgtggtagttagttggtaactatcttcctaagtttttagtttttttctttttttntttaaaaaaaatattttattttaagttaaatagtcaatctttgttttagagtttttttttgttctttcaaaaattttcttcctaaaatgtattgatttgattcgaatcagtagtcttaccccatagagcatggttttctttttgatgtcatattaatattattttaggcactaattttgttcttacacttaccctaaaaaaaagaatttattgtttattttttttacaaatatttttattatttttaaatattgttctagtctattgaataaaatagttgaggtcatctattgctgaaaaaataatgaggtcattgcttgtagaatttgacaatgccatattgcttcagcaattagctaatattgtcaaaagattaataaaataaaaccttatcctaaactttattattaactaatatcaatccaataaaagacaaagagcagccgttgaacttgaaatttatattatatattatatatatttctacataaaataataaaactatataaaaattctaaagttgtgactaattgcaagaagtcccagttacataattaatataacaataaatatactttagtgatatatataataattattgaacatactaaatcaattatacatattttattttttctgtttgacacgaaatccattataatttagtgctctattaactgatagggccatgtaggaaaaacgtggttggactataaaaagaatatatgtataattatgcacactaataaaaaattgaaggactctatagtttattaaatgactatttacatttaaaaggaaaataaaaaatacatacattgcacatataacagaattattatatatattttgagttgattaatttatcaaaagaaataaaaagttaatggatgaaattatatattgtaatgacaaataatggctactggtatagttgacacattaaattttaggtaaacactcacttagcagagccccaaaattataaacttgtggaatagtttaattatatagtagagaggtttaagaaattataactaaatagagttatattaaaaaaaaatttaaaacaccaaaacatattaatgtaacaacaataacaataaacaaaaaacaatctttaatactacattataatagaattatttttaagtaaatataatatttatacatatattataatttagaacaaaattatttattctacctaaataaatttataacataaatgt

SEQ ID NO: 33010 - DNA, 4858 bp, Cannabis sativa
ggaatgccctctgttggtcgggtcttgaatgcagcagaatttgtagaagtagcagcagtattcaaatgattgacagcagaatgtggagatagagttgcaataggatcttgtgtactggtagcttttatataggttgttcatatatgttgttgcatgtaaagccagagcagtagcatctttattcttatttccatgtattattttgttgcggtcagtccatatcacccacataatgcagatcaacatctcaaactcatcctgactaagcaaattggctatatggaaaagataatcaccattaaccaaatgtagggccttagcataatcaataggataattaaatagtttccaaacatccttagcatgcctacagcaaaacaatgcgtgcccaatcgattcccaagcttgtgtacacaaagagcaaactgccgaagtgaggacttttttttgaaccaaagcagaagccactggtatagcattatggatcacccgccgccaagcaaagattttaatcttggaggagggagcttgttgagaagattccaaaaaaatttccaccattcactatgtgagtgagaagtagaatctaagtccttttcatttaaatctgaagctagatgaaagccagatttaaccgtgtaagtcccagcagtagtgtaatgccaaattagcctatcttgagcttgaaaaaaacttaatgggatggtcaatattctgtccacatctatatccccaaaataagcttttaataaaggcaaattccactctcttgtctccgaaatgaaatgggagactgtcaaagtggctggtccaacatagttaataggacagaaattagaaacagctggtatccacgggtctgttgcagcaaaaacattgtaaccattcccaattttatatcgaagtcctttgataagcaactcacgtccccaacaaattccttgccacgttagagacggagaatgaccaagattagcatccaaaaaagatgattgagaaaagtatttgtgctggagtaatcggctcagtaaagaattaggcatttcaaaaattcgccaagcttgcttagccaaaagagcttggttgaagtgaacaaatgatctaaaccccattcccccttcaaatttcgacttgcaaagaagattccaatttttccaatgaatcttgttgccatttttgtttgaaccccaccaaaagtttgccatcatagactcaagttgattgcaaaatgttatcggaagtttgaaacaactcatcgcgtatgttggtattgactgaacaacagctttcaaaagcacttctttacctccgatagagaataatttttctttccaagcattgagcaatttccatatacgctccttaatgttgctgaacatttcttttttgtctctacctgaataagcaggtaagcccaaataacgttcatggcaatcactaataggcatgttcaaagcttgattgaaaaacatctgaatagcttgatcagtatttggtgagaaagacataactgatttttgtgtgttaagcaattgaccagaagctctgtgataagtctgaagaaccctttgaatagctaaagccgaactcttggtagcatgacagaataggaggctgtcatctgcaaacaagaggtgagagattgatggtgcatggcgagttaatttcagacccgcaagattacccatatcttcttcatgatttagtaaacgagataagtcttcagaacaaatcaagaataagtatggtgacaatggatctccctgccttaaacctcgtcctggtttgacattaccaacaatttctccatttaaagaaaaggaaaaacttgttgacgaaagacatttcatgatgagcgaaatccatgtacttgcaaatcccatcttttccatcacagctgctagatatgcccattctacccgatcaaaagccttactcatatctaatttgagagcagagtaacatttcttcccttgagttttatgctttaaataatggaccaactcaaaagcaaccagaatgttgtcagtgattaacctattagacaagaaagcactttgagactctgagatgacaaatggtagaacctctttgaaccgaagaactaacaccttggaaatcagtttgtaaatgacattgcataagctgattggtctataatcacccataccagaaggagaacttatttttggaataagggtgataatagatttattcagcatatccattggttgcccatcattaagaatccccaagaccacctcaatgactgaagagccaacaatttcccaatagttttgatagaacatagccgacataccatcgctaccggggcttttatccggactcatcagttttaaggctgcttctatctcggctggtgtgaatggttgtgtcaaattttcattcatagcagcagtaacagtagtgggaattgtgtttaaggtgtgattgagagcagtgaagtcgataggctgagctgtgaaaagatcctgaaaataggcagctatgattgctgtcatgccttgctgagaatattctataacaccagcagcgttttttaatgatttaatagcattattgttgcgtctcgatgaagcgtgagcatgaaaaaattttgtattttggtctccactttgcatccaatccactcgagaacgttgttgccaataagtctcctcttgtgctaataaatcatcaagaatagtttctgaatgtttaagctcttccattgaaactatggttcggttgggactgtgatttaatgcagaaactttctgctgcatttttttgatatccttctgcatatttccatatttactggtgtgccaagcttgaagagaattggaacattgttccaaattagtcaaaaacagatcagccgctacagtagtataagagaaatgccagttttgcttgataatggcagcagcttcagcatcttttagccataatttctcaaatctgaaacgagacttcctcctcacttgctgagtttgttgattgagtgtacgaacagtaaccgtaatagcccgatggtctgatctgaaaaagtctaagtgagtagtgatcataggttcaaatgtagttgcccacttgtcattaacgaaacaccagtcgagtctttccttaattgtatcagctttatgtggacttttaaaccaagtaaaaggatcaccatggacaggcagctcagagaaagaacaaaaatccaaaacctgtctaaattcatccatttgcatttcatttctcaagcacccccttgcttattagcatttgaaagtatctcattaaaatcaccaatcacaatccacggtagcaatggtgcaacatcacgaagacgctttaaagttgtccaagaatgacatcgattagattgctcaggagaaccatagaaagcagtgaaatgcatagtaggaccatcaccataagccaaatagcaatcaaacaaagtagtattatagtgtaaaagtgttacattgacatcatctttccaaagaagtagtaaaccccctcctagacctaccctagggacttcaagtccattattgaaatgtaaagcttgacgaaaacgagaaattacattagaaataagtttagtttccataataaaaagtacatgaggagattgctctttaacaagcaaacgaagatgacggaatgcgctcgggttccccaacccccgcgcattccaactaacaattttcatggctgaaagcggggctgagaaccagcctccgctgaattgtccatgaaacctgacagatcttcttgtgattcagaaacaatctggtttggaccctctccagtagacaaggttggagagaacataggttgtgtcagtcccctgcatcgcttcaaagttttcctcagtgaaatattatcaggttgcctcttgaaaagtctgtttggggatgtattttctttgtcaacaacctgcctaaccgatgaacaaacaacagcatcagttgctgtacttgttgaattttgcaacagcttgaggttatgcgcattagatggcacatatgacagagtaggatttggaggataagttgcaatagtaccaacatcagggataaaaatatcagatagatcatcaacatcaaccaaatccgtgcgtgcttttgatgtattaagagacttagaagaaccctccatgtttggcattgcactagtttgcttgttgataattccatttaaaagtgctggagtaaacttgacaatagttgctggtgtagcactaaccgatggagaaggcagcatagtagttgtggcaggtttgttatgaaaaattgaaggtgatggtgaaactgaagcagttgcagcagagttagaatccatgattgagacgtggagaggttcgagagtagaagaattatttggtatttgttggatagcagacgattctccttgtaacaatggatgagttatggaatttctagccaagcgagtaagcaagggccaagcattacccttggaaaaatccgttctgtacctatcagtccagaagtaggcagtgcaaccccctttaattcaagaccatatggtaactcgggttcgataccattatcaatcttttccatccaaaccatgcatttctgaaatggatgtccaagtcttccacattccatacaccactccggtagtcgttcgtatcgaaaatcaacccagaatttgtccctagtttgtctaagttggatgtttcggcctctgagcaatggtttggtaacattgagtttgactcggaatcgaaggaaaggaccccatccttcatccaaagactcatcataaacctccataaattccccaatgatgttaccgagtgccttggctaaagatttagacttacttaggaaag

SEQ ID NO: 33011 - DNA, 1019 bp, Cannabis sativa
  modified_base (460)..(494): a, c, t, g, unknown or other
  modified_base (839)..(841): a, c, t, g, unknown or other
gctgcagccaggcgatacacgccctgagggaggagctgattgaggatttcagacaatttttgtctgaatctgcgcgtgcacccttccttgtccgaggctgctggtgcgattgggcaccaccttgataccattaacacccgaatttcaaaactccataactttttaaattttcatcggaattgagttctgtaaaagacaaaattgcttaatttttcacaaggaatccaaataaagtattttcagaaagaaaataaaattattttcatagaaaaatttcgtaaatcacatacattcatcaattaacacataaaccaacatgaaaccatccaaataaacacaaacatcgttctaaatccatattttatgaaagtaaatcattaccatggctctgatatgagttgttggaatacgtttaccgggatctagatttactaccatttatgttatttaacatcctaannnnnnnnnnnnnnnnnnnnnnnnnnnnnnnnnnntaaagtttcagaaaccttacagtgggtgcgacggaattaaatgactcattttgcttagatctctaacccctgtatcctttctgtagcagagtatcaccaagatctgagcccgaaactccttccttgtgtttgaattcttcactgtcttacatactatgattgatgaccaacttgatatgtgcgggcatgtactcaataactaatggctgaatttattttgtgaagaaaggcttaggtattttgaaaattcaagaggaagaaaacgaaggaagtggtctcatcagaaagctaggtttttagctttgggggcattagttggacaatgagaccatagccttccttttnnnctattcttcaatagggttagggtttaattattaggaataaaaaattgataaaattagagtagaaatcccacctaatggccggccacataatgggccctacgttagtttgggctttgtcgtttttctcaactattttatctatttttcataaataccacttttgcactttcaaccctat

SEQ ID NO: 33012 - DNA, 910 bp, Cannabis sativa
ttcaacaaagttctcaatacaaaattcatgcctttttttttcattttataatgtgtaatattgaatttggtttagttgtttacattattattatttgtatgttactaatagatttttataattgttattttatagccaaatatgacagaattttaattttatgaacttcctgaaaatgaagaaataattgcttatattaagataataaaacaagattcatgtgaagcagtgaaggatggaaattcaacattatttctaaacaattcatttctaatgctgcaagttctcatcccaatccaatcgctaagatgaacatcattgcttgtaaatatgtttttacttttgagaatgcaatcactactaaagatgaaggtcacaattatgaagtttcactcttgtaacaatagcaacctttaaatattgttataggtttttatttattttagaaaaatagattgtatttttaaatttttgaaagtttgtaaataactcacacgagtagctatagtctcactagtaataacaaaaatgtaatatagtatacaaaaataataaaaagaataccataaaatataatcgaacttagagctatcatatttaaataaaagtaaattaggattttcgccctctaaactttaacatgtaccaaattatgtctcctaaacttttttggccgttcgaactttgacatgtactaaatcatgcctgaactttcattcatgttagaatttttttttactaaaattggacaaaatttcttaaattcaaaaatctcaataattcagatatttttaactacctttcaaattcaaggaacatgatttgatttgatgtaagtcaaagttttgagaaaaaaaattctccttaaataaaatatatttttttctgttaatttaataaaatatattta

SEQ ID NO: 33013 - DNA, 1340 bp, Cannabis sativa
tctaaaaattaatttaaatcccaaaataccctcctcataagttatacctttcctctttctcttggccttctctccctctccctctaactctcaccaaacccaaccaatatccacgaccacagaaccatatcgaaccagacccggaccaaactcacgaccaccacaccacctccggcgaaacccactccgaaaacaaaacgtaggacaaagctgatgaggatatcgcgaaattacaaagagaaatcgtgaaacccaaagctccaaaatctatgagttctcaactcgcttgttttcctggtttttgacgatgtcgcgaaacatcgcgaaatcataaaacatgctaaatgtctccaatccacaacatcgtgaaacacccctaaatatcgcaaatcatcgctaaatatcgtaaatcatcgctaaacttcatccataaccttagatttattctatcattgcaaatatattgcaaaatattgcaaaaaaaacttgtaaaccagaagaaagaaatgcaaaaaacgagagaggccgcaagagaagatgacgttgaggccttgcgactggggttctgggtctgtgtgttcaacggtaggggctctaggtcggggttaatgccaaagagagagagagaagtttttttttctgaaatgtaagggtatttttgggaggaaaaaatattaaaagtatatatatactatttctaatttggtggtatattaaaacaatatattttacatttaagcatactaaacaaaatttctctaaaaaaatataggtcgtgtcctatcgtaccatagaaaaatatgggtcttatcaagctgtataattttgtagggtaggcccaacacgacctgcaagtccactagtttcgtgttgtgcatgaatttgtattgtgttttattcgagtcggcctgtttttcttagatagatcagtcagttttcttatactaactcaaattaatgcttcatatttttacatttttattacaattgatgagcttattactaaaatttatgtgtattttataattttaattattttgatatcttttttcaacaatagttacacacaatcatataaaagagataattataattattagaatttgaatattactatcattttaattgataaataaacatttattattgttattattattaaattattgagctttttaatgtgccgtgtttttgagctaatatatccatgcttatgtgttgtgttttcaggcttgtcgtgtctaagctcatatttttcgtatcgtgtcgtatagtgccaatttgtaatatcgtacagtttcgtgcctaagcccatattttttgtgccatgtttgtaacat

SEQ ID NO: 33014 - DNA, 2227 bp, Cannabis sativa
ctcagaccttgtgggagcataccataggccagatcgtttggacttacccctctagattacaaaattgttaatattagaataagcataatttgagccgtcagaatatactttgtaagatttaaaagtggaggttcatcaggatatttttctgtgtgcaaaaacatcaaacctagctgaactgcaatagaatatttcaaaaccagaaggttaaagaaagtgtaataattcacttattaaaagaaaagtgcaaattttaattttataagtaattacctggagaagattcaaaatctgcttcatcatcttgttagtacaactataaaaaacatagtaaggattacatacttgtggaaccacttttatttggaagctccggttggaagtatttaattaatccactctccagagtgaatttctagcatgaaaaatcaaacaaaaaataagtgagcagagacaactcagtattgggaggaagaaaatggcaagaaattacaatcttatatatatgaagtaatatttaaacgttaaatctttgaactcatccataagaattgcttctaatgctttgatttccatctcttattcctgtgcatagcttgtagatatgtagttcacagcaactaaatgtaagagcgtccaaaattttaagaacaaacaatttagagttacatctaaactcaattgtatagcaatctctaaatgaaatacttatttgagcgaaaccttcaaagatgaattagaatttaaaatatatttaagtttagcatattggtatcaagctcactgataaatattcagcactctttccaatattcagatgtgtttgctccatgtttaagtacttagagcatgcgggtccaaactgggtttggtggtcaagaaattcaattggttttcttcggtaaaaattgagcaaggacaattattcctcagagatcatcatagtccaaatgactatataaacaaaataactcacgccacacggttatacaccaattgttatcatacacaaatgttctataatgattgaatataaccacgtaaaatattaattaagaagtgaatttcacatataatcataatcaacaccataaggctatttaaagaccaaactcattcaattccaaacacttaccaaatataataaacaaatagtacatagaaagatatgaataattacctgattcaaatgagtgggattaacaaaaaaaatcgtgatttttttatatttgatgatgaatggtcgagccgagctgagttgagcaaatcacaaagacctaaatataaattctcaatgatcatcaaaagtcaattaaaaaaaaaaaaattaaatatatatatttattgagattagaccctcaatatctctgtcgtcaagaactgaacaataacagagtaaattcacttgattgatccgattgaaaaagaaatcctagaaaacgtaattgaaggagaaaagagtgagaattgtgatgtgggtcgagattggaacctcagtctacaaaagaaaataaggggaatcggaggcataaagatttcaatgcatctcggcctttaggactgacactgagattgaattattattttgtagatgaattggtgtctcttttgaattgcactgttttgaatagttacaattactaattaacagtgttaattttaaactgttaaacagaaatccacaacaaatctattaaacacaacaaattccatcaaattagatttagcttagcttgtgttccgtgttggttatacgattaagattttaaagtaattgtaatttatttaaaaattaataaaaaactgttatttttgaatagaaaacttaaaaaaaaaaatcacccaataatttttcataaactaataattctgtccgtgcttcgcgtgcggcaatcaaattattatataaataggtattaaaaaattttaaattatatatttattaaaaaaaataataaatttatatagaaaactttatagaattctaaaaaaaatattatacaatttcttatataaataaaaaagcacacaatttttttaaaagtatattatcgtgaaaaaaaaaattagaaactgaacaataaatctatgatatatttttttaaagtatatcatagataatttttttagtacatacatatttatttattagttattatatatggttgtatagttttatttttattctttttaattgattagtgatttttaattaaataaaatagaa

SEQ ID NO: 33015 - DNA, 1510 bp, Cannabis sativa
cgttgtatcaaatttggtctaaaatataatattgactaaattttacactataataaagatcacttttaatttacttttttgccattcattaatataattaataattttttatatttttatttatatatttaatataatttttatatactttcaataaaaatttaatatttttgttgatatttttatacatctcaattaaaataaaatttattttaccgttgctgtattggaacacaattataaaatttaagttaaatataatattaactcattttttttatcaaatatagcacaaaacttacaccatacattggagatagttttaaaacaatatttaaacctaatcaaaaagactttttagttgttgtagtaataagtacaacgataaaagggtcataaacaataatgagaggaaaaagagtagaggactactatataataaagggtaagtctatactataatctctaaagaagtgtttcggtacaccttttatttgtttcagcatatggaggatttttagtcaatttcttttttatcacgtacattatagttatttagaaccacttgtaaatttttcaaaaaatttcaaataatttacaatgtcgataaaaaagatatagatattttgttgcgcacacgattattttttcttatacgcgtggtatgtgattttaaacttaatttttggcattgttaattatttcaaatttttaaaaaatttactagtggttctaaatagctataacatacgcaattataaagaaaatagactgatttttttagatgtcaaaacacatttataatctaccataacggccctttagggggtctactacagaaatttcctataatactaaaaaaaaaaaaaattaaacgggttagcagataataacctatttaagagttagccttaaatgggtttttggtcattttcgaattaatacagctaactgatttatcaaacggactatttttgggttgacacgttaaatttaaaaataacacgataatgacctatgtaagagtatatacttttaaatttattacatgtaaattatattttttagttaaataggacataaacatgttaaatagtttataaatgtgtcataataagattataaacatattaaatttattgaaaacatattaataaattggtaagttaaccaaaagtataattttttttataaaagggacaagttaaatcaacctgtttataaacgagttagatgtagattttaatttttgacataattaataaacaagtggagtttaaatttaacatttagttataatacctaaatcttaaaatgacataaaccacaaacacaaattgttacttggaagttggaacccctaagaaaaagaaaggcataaataaatgtatggattgccaacataacatccattactttttatgaattgccaaaagtgggtcccaccaatgtacgagcgtgacatgctcgcacatgagatctcgtgccacgtgtcatccagccttacaac

SEQ ID NO: 33016 - DNA, 1447 bp, Cannabis sativa
atggtttgtggtcatggtttctcagaaagttacatgaccttatagcggattagagtgaattggtcttcattttagataggcatcaaagcatcatcaatgggttgtcaaatattcaaaagaagtcgcaacatgggcactgtaggtggcatttatctcaaaatattaaagcatgtgttaggttaaaggtgtcgtaaaattatttgaagaaactgctaatgcttataaagttttcgagttcaaccaactttatgatgaattgaagaataaatattctagagctgtgaatcatcttgaagagtcaaatgtaccacttaggaaatgggaaagctctcactttacaggttgtcgctacaatattatgactacgaatggtgttgaatctattaatgcagtaatgaaggaaccaagagagtatcctataattgcattgttggaggctatgcaagcaaaagtctctgaatggttcaaaaaccgtagcaatgttgtggcatctatcaatacataatgtacacctttaagtccactgaccgagaatatcattttgaaaagattcaagaaaacattggaaatgaatgtcaagtagcttaatcgatttgagtaagaggttactggtaagggcaacgatgccatagttgatttgggtcaaacacaatgctatggttgtttttttgaccttgataaattttcttgcgtgcatgcattagcaacatatgaacaagctggaatagaagtatatgatttgtgctacacttattataagttggaaacttgggcgttggcttatgtggatacaacttatctagtgcctcaatgaaaagaatggaatatcgatgaagttgaattacttctgaaggtttttcctccaaatgtcccaatcaagcgtggtagaagaaaaacgaatagaatcccatcaattggaaatggcaaaaaatgggttaaaaggtgtgggttttgtggaaagtctggccattccacaaagacatgccccctaagagccacgaattctaaattctattttttttatggatatgcttatttcaaattactatggttaattccattaaaaaaaattactatggttaattaatttatatcaatgtatttgaatattttagtatttttgtgtctttactttagttaaaactcgattggtttgagttaacttgaccatttgtcgttgaaattcttatatatttaccagactttgaacacaggctctactgacaatagttgagctttacatatggttgagatttataattataaaatatattttcaagaaatggctcaactgacattagttgagctcgactttaagtggttgatgttagtatagattaaaagtatcgggcttgagtgaattatgtggagcttaactatatatggttgagatttataattattaatcaaattttcaaaaaatagctcaactgagagtagttgagct

SEQ ID NO: 33017 - DNA, 1266 bp, Cannabis sativa
caagagcttaaaggtgagttaattggagttggtaacttggtcttttaaaaagagttgtgagatttgagagtgcctcctaaagtcaaagatttagtttggagggatgcttccaattgtcttcctactcgtgtccaattaggcgtgaaacatgttcccctctcctcgttgttgtgttcaaggtgcttgcgaattggacagtctatttctcattgtcttgtggggtgttcgtttgctttttctttctagcagatggcaggtatttcaatgatagagattggtgacaatttttttaatggatggtttcatgatatattttagttatgagattctgggatgaaacgtatagttgttatgctttgctgggcgttgtggtatgtgcgcaatgacaaggtgtgaaatggtaagaacaagactattaaagaggtggtttcgttggctaagggtagttttgatcaatggagttatgctcaagataaaaaatttggttcctcattgttttctttacaagacggcaaaatgcatgagcactagattacacatgtaggtaatatgatcaaaatcaatattgatgcaactttctttagcaatcagaataagtatgggtatggttgggtggcgtgaaactctttcagtcagcttattatggctcgaacaataagccggatgggggtggttgatattgttcttgctgaagttatcagggttaacgaggtgttgagttggttgaaagagataggacgacataatgtagtggtggagtcggacagtttgttcatgatccaagctatctgaagttcgttagatatgatttctattcttgagttctgcatttctgagtgtagaggaattccttatagtttgaataatatctttttaattttgtcaagcgatccgctaattgtgttgctcaccatttggctaaagcttcgtggataaatgttaattgtacttattcacattctataattctgagtagtttacgtgatgcacttttgaatgatttgagttaataaaattgtacttttttattaaaaaaaattgctccataattttattttatttttttaaatttatgttttcaggttgcttcggtaatttctacgtgacttgttatgtgaattttggttgcgatttaagttgctctattgattgctatgtgagttcctatgtggatttccgtaaaaaaaatataagggaattatcacatatactatttttttaacttttattttcaaatttacgatttgggtttctaaagtggttgca

SEQ ID NO: 33018 - DNA, 1526 bp, Cannabis sativa
tgttgtaacaagatttcaatatgttattgcaaagtgcactgttgtactttaattacagtttcaaaagaaataaattaaaatattcaaaaacacggtctttcaagtttgaacttagatttgggactacgcatctatcgtaatggttgcggtggtggtggtagtggtttcatccattcgtctgtcagagaggaataatgaagaaaaaaaggtgaaagagatgaacacaaaatagaatagcgatttaaaaaagaataaaagaaaaaaaaagataaagaaaaaaatatgagaaaaataattcattaatttttaagataatttgtttagtttttttatttaattttaaattttttaaatcaaaattataagttgaaccaataaaatatcaacacgtggcactattagaataaattaacggatgagttaaaatgagtactaatagaattacaaaaattaagcgcttgaatacttttgctattattttttcttgattagagatttatttgcatcaaattaaattttttgaatataacatttatatatatttacattttcctctctcttctctctataacctagggtttcatctctttctctttttcttgctcggctagagacccagctgttggcctggctgtgcggttggtgttctctagccgagagggatggtggtactcttggtcatggttccttgcacgacgaacatggagaagccggcaacagtgatgctttttcggagtcgccgtcgaggggagggcaaggtttttggggcttcgtggtctacagcggttgaggttcgaaggtggcaccgatgggcctccgacaatgtcagccgatttttcttggctggtttttgcatttttggccctcttcctttccttttgaagctcggggacgaactgagagggaggggcggtcgggttctgcgttccctccggctccgagagcttgttggtggcgagttgtctcttcctctcccgttggtgtgggttctatggtcttgtttttatatattgatgttgttttattttagatctattttcagatctattgctttatgtttgtcttttaagtttaggcttttggtctagtaatggatcttttcttgttagagatttgagggtttgtatccttgtattagttctttatcttctatttatggtggtatggtacttgaaaatgactatgacctcgattggtcggtctattggctttattgctgtttgctcgcccttgttggtattgatttgtttttgcttattgttgagttttgtaatggattttgtccgttttttttttgttaaatgaaaacttaaatctttccgtaaaaaaaaaattaaattttttgagaacaattataatgtatatttatagtatcatatataactagatatatatagggaatatttttttttttgtaacatatatagggaatattttgttttagaacaactatagtttttgtcggttttataaatatggtatggttgcacttgcacgctttggatttagtttataattgatttttt

SEQ ID NO: 33019 - DNA, 1474 bp, Cannabis sativa
acgtgaatttataacatacaaaagattttaatatatctaacattaactcatgaagtacctagttttcaaatatttcttcttgtaaaaagaaaaacgaattacatgatatacttacacacaccaagtgtataaatatatatatatatatatatattaaaacaacatttattctgctgtgtatagtgtatagcacatgcttgtaagttgtacatatatatccattacataatagtaccaaaacgaaagtagataatgatacaatgaatacatacatataaatcccagacttggtaatattagatagttaaatatttacagtgaaaaattaagatatataatagagttacagaattattgggactagggtgtgatgagttctagtcataaaagtcacaagtaagaagagaaattggccaatagaaatcctccaaatgtataaccccacgtgattagggcaacccttttctgggccactgcacgtgatggtgcacgtgacagtccacatggagtatatttaactctattgatattgttcatatattattacatgtttcatctatataacacgtactttctaataagatcttcctcgtaaatgttggtgtgcagacactattatatatatatatattattattagttatatatagcttatatatatatatacgtgtatatatattgatcgtatacagtaacgacaaagtttgatcctcaaaacatatctataaaggaaatgtacgtgtaatttaagatgtgatcaagttttgatggctctattttcttagtgttgaagaatcatatattaatgatgatgatgattccctatatggaagttataagttaaaaggaatattttgtggaagttaataatttaatggtatatagtccaaatatatatatatatatgtgtatcatataataataccatgtgtcactataattttgtagcaccacctaattatatatagatgactcatcaaagccatgcaactacgtacgtactttagatttttgttagtttggtcactcatgttagtcaccatgatacatgcatggggtcatcactcgtattcataatttttaattttgttgatatattttaaatatatatatatatgtatatatatattgttaggtttggataaaaagaatcctatttttattacacaattaatgcattatataaatatatatatatacatacatatccttaatttttcgaataattaagcgtgttatagaaatattatgcataactttcaaaaaaaaaaaaaaaattatgcatgtttgacaacaaacaaatgataataataagaaaacgtgactcgttttatttgataaaagaaaaaaaaaacacataatatgtaataagccatgcatattttattttattggcaatgtgttctagggaaatgtctagtttacttccattgccacatgcctttatctatataatacttgattcatagcaaaa

SEQ ID NO: 33020 - DNA, 1817 bp, Cannabis sativa
  modified_base (647)..(669): a, c, t, g, unknown or other
gtgcttgaaatacaaatagtgatcaaacttggaccttctaaaaccaatctcctgaacatagctatcaaatagtttgttccatttgattgcttaaggtcgtatagggacttttccaacttacaaaccatctcttttccatcttgttccacctaaaatctaagtagttgctccatgtatatctcttcttctagataaccatttagaaaatgcagatttaacatcaagctgctccacttctaaaccttgttgagttgcccttgacaacataagcttaatggtcttatacttcaccacaagtgagaacaccttggtgtaatatatcccttccacctgagtgaaaactttggcaactaatcttgccttaaaccttactggctcatcctctgtcacaccttctttaatctttagaatccatttgcatgaagcttttcaatgactcccttcttgtgcaattccctcatccattgttcactcatatgcccaagcctttaatgccatagctgcatatcactttctaagccttttactgtatctgcctcggccacaggtacagtttcaccctcgaatacatacagcccatgtgctctctttcctttcaccacaagcattgaaccttttaagatccttaggctcccattcaaggactnnnnnnnnnnnnnnnnnnnnnnnaaggttccaagtgatatcagattcctcctcaattctggaatgtgcctcacattatgcaaaatcttcacttcaccattgaattgccttatagccaccttaccaattccaacaaccctgcaagaaacatcattacccattagtactctaccaccgttattggtttcttgatatttaaagaaagattctaagttgggacacatatgataagtgcatcttgaatcaaggatccactctttactgttattatttctgtaatagaaaataattccccatctgaactccacccattgctctcagccacggctgcaaagtcttttctttgatttccatgatcattagattttgagtactggttatggtttttgttgcatctcttgccatcgtagttggatcggaaaccagattgcgtcttcgattgactgcagaatattttaatgtggccaatctttctacattgataacattgtcgattatcttagatctttgacttcgatcttgatggtgactggctgttccttgatgatcctctctttggacttcttcctcttgcaagataggcttcgtcttttctagtctccttctcgagttgcaattcaaagtcctttgattttaatgccgcatgaacaccctccaatgagatcacatcccttctatacttatacttgattttgattgctgctttaacttcttgatatgccattagtaatgatctgagcaatatgattgcttgactttcttcctctaccttgtgattaatgttagctaaaccaacaattattttattaaatttatcaatattatcatctaaggaaagagaagaattcattctaaaccaatataatctttcaagaagattaatcttgctcgagattgatggtgccatgtacagctgctctagtttattccacaatccttttgcggtcttttcttggattagctttcttctaactccattggacaggtacatgatgatggtgtagtaagctatctcctccatctctgcaatttcctctggcttcttctcagccaataacttttcatccttgagtacctttgccaccttttggtgcacaagtatacccttcaaactctctcgccatagtgcaaaatccgttgatccatcaaacttctctagctcgaaccttgcc

SEQ ID NO: 33021 - DNA, 2731 bp, Cannabis sativa
  modified_base (603)..(616): a, c, t, g, unknown or other
aaaatacaattcaatataatactagacaatacaatacggtgtaatacggcgtaccaaacaaaccctaagagtattaaaataccacccttatcgactaacataatttgtcttaagatttatttgaatgtcttccaatatttttttcctgaattaataattactcataacttccactcaacagcaagtgtctagtctaacgcataccagagcatacatctcactgttgattcttaaggaattcttttcatgacttttattttttctggaatactttaaactattccttagataaataaaatctatgtttatgagtcaaaagacttcctttagagttagccattagaaaaatgctccaacatcttactaaagtaagttgcttgcaccaaagtaagtaaattacaaggtatcccacaagctataagtttagataatttcaaacttataatactaggatcgaaaaagttttgttaaggtcattgaatagatttattatagaaattttccttcttgttcttgtaatagaaaactttagttactccatacgaatagttttaaccatagttctcttggctttgctttttagttccttattctgactatccnnnnnnnnnnnnnnctaacaatagatttttatcacaagtgtcttccaagttataacagggtaggttccttgaaaccctcccactacgatgaggtaccatgactttctttctaggaacattaatggtattattttcatcgattgtgtcaatacaacagaggtagtgggaccatcttatatagaataagatgattgaacactttcgaattaaaaaaaaatatctcctctactttgcttttagatttagtcacagtcttagaaaaatagtattgttaaaacaaacactttcttatcttaatgaccacaggatggtccacccctaatcactttagaatagctatcaaacagacaaacttaagttaatagttctagcttttcttaagttcatgatcaggacatccataaatctagtaatggtgcacactaagtatatgatcattccatcattcgaaagttttcttgggattagacttagatgggatgacaagaatatcgtttgctatctctaaggcatttccctagaaggacccagacaactgcaagtaactaatcatagacattacatttttattaatatgtgactttaaaatactggggaggtaagttaggacacaattcaaagttcaacttaatgatctttgaactacatagctaaatatttctccacccttatgagttcgcaagatctttaaccaattaccttaatagtttttaccattactaaaaattcatgaaatttttcaaacatttcaaatttctttattcaaggtatactctagaatgattgtgttaaaaattaaacgataactcatatctacccctgaatgtacatccatatatctaaatatagatgatctttcttccaagtggatattagcatgttttctctttacagagaatagtcttctcaaaatcgctatgaacaagatgtaaatgtcatagatgtattattgtggttgttgtcttttgatgatccataggtttagttacaataaagagttcttagaatagttcaagtggattccggtcacagaatacaaaactcataattcatacattaatatatagttcaaatccattgttataaacaacttgtgaaagtttgactgtagtgtttaatgtattatggaaactgaacttcaattattatttggattctaaaatttaaagtcaaagacataaatttataccaaatattttttgagtaattattcttccttagaccatcactactaatataactcgaagtttaagttgccacatataagcatatttaagtaggagatttttctaagatcaagtatttatatcattacgggataaaatatctagaatatagatattgcaaaattgtaaaatatataaatatccaaagcatataaaaaaaaatataaacaaattctttttagaatgaaattccatttagcatggatacaaacctacagtagatactctatccaagaatacacttgagaccaaataaattatattctaattgagatgttataactgaatagagtcatactaaaaaaatatatcaatgtagcaacaataacaataaataattcttaatattatattataatagaattattttgagtaaatataatatgtatacatgtattacaatttagaataaaattattaattctacataaataaatttataaaatatgtgtatatattctattgtgatgtaattattcttatataaatgtatactttgttaatatgagatttagagaatgtataactaattacaatttagaggttattcttatttataacgggcccaaattgagacttgattttttttttatatatatatataataaattagaggttattcttgaatagagtattcttagatagaagttctactgtattaggattctctagtgagtatgtataatattttgactttttagtggctaaaaccttctaactgtagtttcacttgtatttaatcctccaaacttaatttttggcggtgaaatcctctaaattactgaactggtagttgtacacataatacatttatattggtacacctaatattattatttaaaaattatttttaaaatttattttgaaattaaataaaattataaaaaataaaatataaaatat

SEQ ID NO: 33022 - DNA, 3358 bp, Cannabis sativa
  modified_base (325)..(327): a, c, t, g, unknown or other
tatttccccttatggatcacgggactactaactgtcttaatcacccctgttacggggtccgacgtcctcgttgataacacttctgactgggtcgagactctaaactcatttgtaacatccccttttcaagccttcattgggccttttcccacaaatttatggttcttttacacgagtacgtcactctgactacttcctggactaacgactgaccttatagacgtctttccaggttactttgtcctcactcgcctgttttttgggaaaacttcctaaggggtcacccatcttggaattactccaggtcaagcatgcttaactgtgnnnttctttcgtgatgggctaccagaaaagaagatgcattttgttgatataggcactaccaattaatcattttaagccctcatcaaatgtgtagtctcatacctcacagtcttaaaatcatcacagttaaccttccccatgagatgtgggattgcacaactcgcggtcttttcccttacagatcatgggactttgactatcacaccagagcaagtagaacacattgttaggaacattaaagccttaaagagaggtcccatgtccccaccatgtttgaaggaaacaaaagctttgatagaattaacaaaatacatgaggggatagataagataatatactattggaagtgtttattgaagtcacgtgagaagtacataatcctgatgcacacactcaatatgtcacatctccaatgtagcctaagagcaaattgggaacatttaggacatgtcggggtagatgaggctgaatgatatgacctactcatgatcaaccttgtagatcaatacaagattatcgactgtaatggtactaaaaaagaaatatatcattaacccagtaatgttgtcatgtttgaattctttcaaaagttaccaatctcgtcaaactcggtgtatttagaactcgactatgtagatttgacagaagatatattagagaaagggtcagacatagaagattagaatagtcaagttgtattttatttcatgtgtttatgtatttatgtaataaagggttttagtatgactccactttagttaggagttttagtgtaactcctttaacttgttatcctttagaatccataaataaataaagaagttttattctatctcgtaaatatttataaatatatatatatatatcttcttatgttaagtcttactaaatagttataacaataaattgttgcggatttaggaggtatatctcttaaaattaaggtgtcaaacgaaataatacttataaaaatcaaaaacattctatcgcttaagatcgaaaatatccgcctcgaagaggataagattcttagagctctacgagaggtcatcgcaattaataaagaaatcaaaagagtcgtacatgaaaggggagccttagtcaaatcacaagaaaagtttctagtgttaagggttgcattgtcacatgtcctcgaactcctctactatattgatgatgtttgacaccgtgtctcgggtcttggcgatgcaatcagatacacaaccttcatatgtgaattgacacttgacttcctcaactttattttcaaaaagacttatattgtggaaataaacagcatggaagaagaacatgtcaggaatatacaatataaactaagagacgacagtaaggaggacttagctgaatttgtgaatttaacgaatgaacgatatttggaagaataaaaaatgtcagactattttgaggtgactgcataaatgctagaacttgaactaaaatgcctacctcaaatagaagtagaggaaatagtagagctataaagattccttcagatgaagaacccaatgatgaggaaatgccagaagggtacaatgaactggattaccttcaagtgttgaagagcgaggacttagattcaagcacaataacaagtatcgatgaaccagaaggtggcatacctaactatcattatgaggtggaaatcgatgagttaggctcagaacctgaaaatataccagcaccaatccgagcaactgtggaaatgaaaattgattccaaggagaagaatttgaggacgagtcatgcgtggaggataattagtagtttttttaaattgtccaattttatccaaggacaagacttttgttcatattctaataatctagtgcttatataattaaagatttattatgcttttaaataaatagagattgttccttcaagtaaattcttttcttttgactaaagttaaattcatttacgcattaagaactcaacaaaatgaatgaggaagacattttctctctttacttaggaattcacttttcaaaatgaataagcaacattaatttttacgacgagactaaattcttaaacctaaacaccaataacaagaagtacaaaaatattttggcattccaattggcacccagaacactgcaaggcactaagaatattggtgacaccttaaattagtcaaacactctgaggatgaagtgagtgtttaaaattaggtggacgaattcattgtcaaatttgttgatgacattgtccatacctcaattagtggaaggacgttaaggatacctaaggctgactctgaaccaacttaaggagaccaaactttatgtcaaattcaagaaatgtgagttctggttagagaaggtggcattcttaggccatatagtttccaaagattgagttgaagtggatccttcaaagatcaaagcgattaagagctggccatcacctaagactgcaagtgaagtaagaagcttcttgggtctacgtggttactatagacgtttcgttgaacgattttccaagatagcaactcctctaactaacttgactcaaaagatgtaaaagttaatggcgtactgcgatgcatcgaaacaaaggatgggatgcgtactaataccgaatgagaaagtagtagcgtacgcctcaatacaacttaaggagtatgagcaaaggtatccaatacacgatttggagttggcagcagtaatttctgcgttaaaaatatggaggcactatctctattaggaaaaatatgaaatctataccgaccacaaaaggctaaattacttctttaagtagaaggaactcaacatgaggtagagacgagggttagagcttgttaaggactatgattgtgaaatccactaccacccagggaaggccaatgtagttatagacgtgtcaagcagacacattgatgcgaacttgaaaatattgacataaatgaaaagcccctacaacggaaactccaaagaagtagtataaaggtcaacaatgggctaccgaaaaacaaggtggactacacagttgaagagagcttaaatggatt

SEQ ID NO: 33023 - DNA, 5539 bp, Cannabis sativa
  modified_base (39)..(41): a, c, t, g, unknown or other
tggaaactgatagcttagtttgtgttcaagtcgtgcaannncaaattactttgtcatcctcttttggtcttttagttcatgatgttcatactcttctcttgtccttaaataatgttaagttttgttttgtcaaacgatatgcaaacaagctgcttcatgttttagccaaaattcttgtttctctacaagtcgtgtattttagttagaggattattccaatgaagtgcgttctatagttattagcgattgctaattaataaagttgataagttttattcaaaaaaaaatatttataacttactaatatttaagtatttttgagcaattgaggcctttcctcttttgtttgtttttttctttagtcatttccattttccagctgtgcttcgccaattttgaaggtaaagccgctttactcctactcggtttgaacggactgtgtccagctcaagttgaggtaagcgtttgaaagcgacagcctctctcgtccatttgtagaatgaaaagttcattcatgggctcatctgggcaatagagtgatccactagggccctgtatatggagattaggtgaggggtaaatattccaatgtaataaatgcaaaggagaggaatgggtcaatgggtggtgattttggtactacattagttattttacggttttttgttttaaaagctacgcggcatcataattacagtttgtttcaaatgcatttgacattgtatatgtccgtgaaaatagtaatcaaagtcccatctttctacggtttcgcatcattttatttctcaatgttgccatttccattaagaccatctccaattggttggataaattttgtgttaaatttaatttaaaaagtaaattaatattatatttaatttaaattttataatattattccaattttttagtgataaaataaattttattttaataaaaagttgtaaaaaagttaatgaaaattaaactctcaaagagcatcaattctagatgatcagatcgaaaacacaaaagtacaatcgaaagtacagatgatgtatcactaaagcttgcccattttaatcaaatattcaaataaaatagcaaagtttttcaggatctaacaagaccacaaatggtatgcactaaaagtcctatttctacaagacagttaggatcagttcaaggcctaagttctatgcatcaataacataaagcaaacatacaactatcaaacaaattgctaaatctagacttttatgatgatttaagaaacataccaaaagaagctcacttgataaagaacagggtggtgatgaaaaacttgaagaaaattgaaccctcggagaaggaatcctcatgtcaatagaaggtgttcaagaaaactctgatatggatggtcgatcaagacatgcgaccctagtttgaagggcacaaacttgattgataataagtttgtcgatcttgacattgatatctagtactctcaatgacagtgaggaatcggcgattagaactgggggtggtgctcttggactctctcgctcataaatctaaggaagaatatgtatgcagtgatcgatgtaatgctctagagttatctcgttcatcattgcctttcctctataggcttgaactcaacttgaaatttgggtgaaagtggtgaacgaacatgtttacatatttatgcacacaaacagaaattcgagtattcccagatcaacgaccagggttacgctcaagaaaaaaggaagaaatatccaacggtctgggaaaaggtacagtcagacatttaatgcaatgttttgaattgagaaaatcaaaacgattatcttctccttaagactcacactgatttaatcaattgtcatttcatcaagcttcgccacacacggctcatcgttgaaatttacctccataaactgataatataatgctacattttgatctatttttttttttaaaaaaaaaatggagagttgtcaaccacaaacaagattaatgtagaattcttaaaggttccacctttagtctccatttgtccatccacaagcaaggatgcaagcttccacaactcctagagttcttgaagcttgggagtaaatgttatctgtgtttctgaatgggacacgtggaattccaacatcgaataccatttagttattttaggcccaacagcgggcccaatcagaataatggaccaggtccattagcaagaacatactttcaagatggaaggcagaaagctcgtccatgtgagatacttttcaagcacaacgcacatctgaaagacatcgaacagaacatccagaaaagtaaacaatgagcatccaaatatccagctcagaagcattctcattaattacgagatcttgagatatcaggaattaacttccaaggatcacgctcgaagatcatatcttcataaatatggtgagatagtaattagcaatcaagaatttaatgagtctttattctccatagatataagacacgatttttggcaattgccaacgtgatatggaagccacatcaacatacattgtgtgcctcatgggctgggctttaccagataatccaatgtcaatatgttacttgtaatcatcccattagtgggcaagggctaattagcaaaaaccttaaatactataaatatacgaaaaatctttcatacaaaggggtaagaaactcattccttaattgctcaagcaagatttagagtttagacattcttgtaaaccttaaggcttttccaactgacaagtaataatattgattcgtgaactaaggctcgttaacaccccaaccatgtaaaaatctaattgctattttttttttatctttgatcaatttctttagctttcacatataataaatcggtttgtgaaaatctcagtgaacacttctaatatctcatactcccaaaaatacccttacatttcaataaaccctccctctctctaactcttcaactctctcactctccaacgtagaacccccatccaccactggtcgtcccccctctctcattacctctctccaactctcattgtctctacctcaaagcctcgaaaaccacgagctcaaccaccccaaaaatcttgaaatccatgagcttagccaccctaaacccctaaaatgcacgtgctcaaccaccatgaagtctcgtaatccacacacattaggttttttgatcaccttaaggacctccgtcaatgtggataacaagacttgagccacccgccatctattctcaccacattttggtatggatttttatttttgtgtgatttttccatggattaggttttgtaaatgaaattttgggtttgttttgtgattatgcttgagcttaagggaatatgtttgattttacgttaaattatgtgtttgggtttgattttttttttttttttatgtatgttcacttttaagatttttttataattatcaatatgttgcaatatcgttaccgatatatatcaatatcaaatgaatagagaatacacgattagtgatctttagcgataatgttagtaatatagaatgatattaacaacaatagaataaggaatacacgattattgatctttagcaatttgttatcgacatgtagcaataacaaaggaattatgtttgctttttgtttaattttttgtgtttgggttggttttttgttgatgtcttctaattagcgatgtgttatgatatctttagcaatatataatgatattgacaactatataaaaggagaatacataatcagcgatctttaacgatttgtttagcgacataaagggaatagacttagcaatgtttagcgttggagatttaaatttaacgatataattagcgatatcattagaaatatgtttgtgatatatttactttgggttttaatatgtcgtttctgtttattttcttaaaatttttgcagatggctcctgggcttaaacttctagttatcaagcctttcccaagtcgtcttacttatcgagacttagataggtttacacttattaaggccaagtttgaaaagcatagttgactgagagggttaaagcatgctcttttgggccattctaggtagctggagatttgactttctctggttcgttggtacacaacctactgttgcaaaaaaataaaagttaataaagatttggaagatgagatatgattttatgtgagtaaaaatgacatgagattcaggcacactgagtttcaaatgattattagcctccgtataggtagttcccctacagacgaagagatagaagccaagtgcagtgaccgcttcctgaggatgtattttgaagggaagagtggtggtcagttggaggcacttatgctccaagtagagagatgtgagattgtagatgatatctacaagctcgaactatgagcctttgttgagggagtattgattttgaaagatagcaatgtccatgtgttggccaaaaatgttgaaatttgttgatgaactcgagttcttcttccattattcgtggggcgggcatgcttttcataagttgacgtagtctatgagtaaggacatggagcattgcaagaaaaacgttgagaagaagaagggcaagaagttttctcagtaggcaaagtacaccgtacatggctagcacctgccatacagtattgggtatttgaagccacagagaaagtgcaaaagaagtatggtcattgcagtgggagcaatttccttaggatgataaatttgaaaggccttgagggctagtgaaaacaagacatcaaggcgagtgacatcttagaaatgtttaatacaagtgtaagttcttatttttttggccatttttttatattagcgatgtttctcgatatttgtttgttggttgataaattattaggtgtttatatatttagcaaaatatatcgatatatttggcgatataagtgactatgttcattatttaagcagatggttatttagtgatatttttcgcgaaatgttgtaattaagttaatgatgatttactttactagttataacatttgatatttagcgacatagcgcgacatggtccaatatgtttagcgacacttgctagtagatagttagcaacatttaacgatgtgtggcgacttgttttgacatatttcacaatatgttttttgagattttgggatttgtaacaaaatttgatattttttttatctttttttttggaagttaaccacacatcactgcttgtgcccttggtctactgagaaggagtattacagttccatcaacgatagtaaagcccttctttgtgttgagatggaaatggatgacacggtggacagtagtggtacacaagaaggtttggtgtttgaaacataagccaaaaccattgttgaggtcatgagtaaggaaaatatagttccaccaccattgccttaggaactaatcgagccatctgccttgactgctataactaatacactagactatagagcagtggtagaaaggttgaatatacttggataattagaaaaagttgaaggagttcttcatggttcaaatgggcgacatgatgacatt

SEQ ID NO: 33024 - DNA, 4641 bp, Cannabis sativa
cgattgcctttgaagctggctgtatcaatcagaacaaaggagctcgagaaaagcgatggaaatttgtgccaaaagggagtaagactcaaacaaaagggaacatgaacactggatcaagatatgacatcctatctaaggaagtttcacagcaatgtgattcaaccgtggaacaaaagaatgaagcggcgaactctgcattgcagggtcgccgagaacaatgaattccctaatttggaatttccaagggcttggcaacccttggactgtttcggctcttgccacacatgtcaaagatttcgatactagattggtttttctgttcgaaactcgttcaaggttcatgctcgcttgggttttgagggttgtttttgtgttgatgcaagaggcaaaagtggggggttagccctcctttggaaagctcctttttctgtgtagataaagtctttcaatgattttcatattgatgcttggatcaatatcgataatgactttaactggcggtttacgggattttacggggaccccgatccatcacaaagaagacacccatggaaactgctgcaacgtatagcaagaagatacatggggccttagttatgtggtggagacttcaacgagatcagaggcactcatgagaaacaaggagggggtgaaaaacctcgttacttaatgaaaaattttaacaatgctattgatatgtgtgctttaagggaactagagtttgagggcagcaactttacttggtgtaacggaaggaagaacaatatgatctttgagaggtttgaccgagtaatggctaataataaatggtggaatcattttgtagtggcaaaggttaaacatttaaggcgttggtgctccgatcattgtcctctagtggggacttttaaagctattccaacgaataataaccagaaacaagcttggggtcatcgatttcactatgaaagtgcatgggctgataaagaagactaccacaaaattataaaggagagttgggaggagggccgattaattaattaagcagcagagtttggaagcaagttggatctttgtggagaagtgttggggcaatggaataaacagcaaagaagagaatgccaagctcggattaaagttttaaaaaaagaagtataaattttgtctcgggatcactcaaaccaaggctttacccgattgaaagaaagggagaaagacctgaatggacacttagcaaaagaagaacttttttggaaacaacttagtaaggcgatttggcttgctcatggtgaccgaaacacaagatattttcaccaaaaggcgtcttctcgcaggaagaaaaatcggattcatggtctttttgatcaaaatctgaactggttgaactctaaagaagagatagagaagaccatttctgagcattttcaagacctattttcagttaaggacctcaagtgcgacataatggctcacctccaacgatttgttccctcacagcttagtagaagacaaaacgaaatcctccttactgagttcacagctgctgatgttcttcaagcaatgaagtaaataaaccctctgaaggctccaggagtggatgggatgccccggttgttctatgagcatcattggacagtcatatgttcagacgtaaccagaatttgcttggatatcctcaataatcatgcggactgccgagcgataaacaagaccctcctctgcctcattccaaaaaccaatagaatgaaagatagcttgaaggaggtaatctaggagaatcaaagtgcatttattagaggtcggctcatacacgataatgccattctggggttcaaaagtcttcattgtatgaaaaaaggtcgttttggaaatgggaaaaagatggggcttcaactagacatgtccaaagcttatgatagagtcgggtggaggttcttagaagcaatgatgctctgtttgggttatgataagcgatgggtggataaagtcatgaactgtatcacaacggtatcattctcggtccttgtgaatggagaagttagtggccttattcaacctcaccgtggccttcgtcaaggcgatcccctctctccatatatgcttctcctctgctcggaaggattctcttgcctcatacaagaggctgaaaaagcggataaaatcaacggtattaagtttggaagagaaggtctcaaattatctcacatcttcttcgccgatgatagctttgtgttccttgaagcaaccccaaccaaatgtagatgcatgaaatctatattagaagaatactccttcctgtctggtcaacaaatcaatcttctgaaatcagagctgtgtgttggaaggaagatcaagcaaacaaatggaattatgctggcagctgaccttggggttaaattggttgactgccacaccaaatatcttggactaccagcaacaattgggagaaggaagaaagaagtatttgagtccattcggtccaagattcgggataaacttcaaggttggaaagctagcttattctcccaagcgggtagggaaggtctactcaaagccgtaattcaagcaattccaacttatgtaatgagttgtttctgtcttccaaaggagctaattaaggacatccatgcaatgatggccagattttggtggggatcatcggagtcaaaaaataaaattcattggggaaaatgggacaaactctgcaagccaaaggataaaggaggaatggggttcaaaaacttagaaaaattcaaccaatccttattagcaaagcaagggtggaagattatcaacaatcctagttctttgctggcctgtgttctcaaggcttgctatttcaccaactctacattcttagaagctaaacttggaggatttagctcctttatgtggcgaagtatattatggggtaggaaaataattgaaaagggtgttcggcggagggttcaatcgggtagagaagtgcgcatcaatgaagacaaatggctgccccggtcctccaccttcgctcttcgcactcttatgaaagttaatcatgggacaactttggatcaaatgaaggataatgaaggttggtggaaacaagataaaataactcaaacattccacccgaatgatgttccctttattctaggtatgactccttgttttaataacgctaatgatgatttagtttggcactacacaccgaatggtatgtacacggtgagtagtggttataaagtggcaaccttcaatgagataaaagcagggccatcctcggacgagaatcataggaaatggtgaaccgagatttggaagttggaagtccctcctaaagtttgaaattttgtttggcgtatctataatggttggcttccggttaacatggtgcttaggactcggggaatgaagatagaaccgtggtgttgctgctgtgggactgaggaagaaacaatagaacatgggctatggtactgtccgtcagtaaaggaaatatggcagcatttttcgatgtggaagaccattaaaaggtggaaaggcgaaactaaggacatgctcatgactatatagcaacaaacaactcaagcagattttttaatgttcatcatgctctcttggctcatttggaataggaggaacaaaaaaagactcaatattcatcttcttcctaacaatttatggtgcaggtgggctcaactggagatggactttatgatgcacaacaattccaaaactgaaaagcagttgaagccgactcccacatcagatggtgggtgggaacctcctcaccctgggacatattgcatcaatagttatgcgagtgtgcattgtaaagaagcgaatctcggattgggggctgttatcaggaaccacacgggggctgtgttggctgctgaaatcaagcagcaaagaggctcatacacggtagaattggcggaggttttggctctaagaatgggcattcatcttgcttccaaagtgaaggcctacccgttcatcatccaaactaactgtcttcgggcagctagctatttgaacggtgattatcaagccaaaacggattggagcgcgctgcttgacgacattcgagagtcccctgcttttggccattgtgttgcagtaaagcatatagggagaaagaacaaaagggctgctcacttattggccaaagaggcattgttttcaaattgtaataagttgtggttgggagaatatcccttttctgcgtctgccggattaatggcggacttgctgaaacttgtgtaatccttttgttagttaatatacatatttcaaaaagaaaaatagaagaaaggaaaatttgcggtataaataccatatatttttaattttatacatttaaatattatatatattttttttttgcgaatttaataccaagctttgtatattttaggtctctccgttattactattttgttagttgtgacttagtgtacacgtgtaaggtccaaaataaattcccatttttttttaaatattaagttaaaactaaaaccttaactttttaatctaatatatctaacttaaattttagttccataaaaatattttaatgaattaaaataaaaaaaataaataagaaatacgaaaaaaaaaattctggggaaatatgaaagggttgaaacccttaatcttatccctcttcttcctcct

SEQ ID NO: 33025 - DNA, 1656 bp, Cannabis sativa
aaataaagttttattgtaattattataattaaatggcttaactgttggtgatctttcgatgaattagaagcttttaatcatgtgccatttttgtctagtttgtttgaagaaatgatttgaaaaactagaaaaatggcacataattctcggagaatataacggttgcacctcttcccaagttaagttagtgtggattcctttgtgaaatctataatttcagatgcttttgcccagatacgcatcacttcgtcaagtgttttccacggtctatggtgaaagcaaagtcattgatcgtgtgtggcttagtcttctttgtcgatcgggaagaattgcatcgctataaatcaaagggtacttaccatcgtgtttgagactctgttcaggtttttcgttccaacttctatattcataaattttaataaattctttgactgttctaaatcttttttgtcattatctacacattacatatgaaaagttagtaatatatgtattactcatatttatatttttgtcatatgccatacatatagaggaattcttagctcaggagaatttttcatgaaatttgcttttattgatcttaccttgtattctctatatctattagaaaaacacatttatatttaaaaaatttgttattatattgctattgttgttaaggcggctatgggatgtgaaattcttagtggttgtttgcttggcattacttggcagggataattactcattgaacagttactactggtagttactcttggtggttgtttgcttggcaccactcgttaggggtagttactcatagaacatttactaatggttactggttactggctactgtggtgtgatttgttaaagatagtaaaaattttctcagttttatacattaagtacttaatatatttaaaattatatacactttttgataatcaatataaatttttacattttacgtggtgtttttgtagaggagtagtggtagtggtgatgaatgtagaagcaacattcatatgctttcaaggatcacgtttcaacatgttcatactaaaattaatgataagtattctatctcttaatctttgtttttcaaagttggattcatgttttgtggttaattctagatgttgttaattccatgaaatgttcatattgatttaattcttttattaggatcttcatcaataattttatttataattttaacctgtgaattcttaaaagtttacttttaatgttattattttgattttttcttccaatcatatattttttgttccttaaatttttccattcatacccttcattcaacaattttgaagataaaatttcaatattaaaattaaattattaaatttatttcatattcagttattttttagtattttttagttatttattgatctgtattttttattattattaattaaaattatctagattaaaatgttgtattaataaataatttttctttcaatcatacacatatttcttaatcattttaaaaatttctatcatataatttttttcagataattttttttctattattaaatctttttcatatagagtaattaaattagattattacaatataatttaagatttaattttaagttattgattatttgagttataaagttattattgttttttaag

SEQ ID NO: 33026 - DNA, 2633 bp, Cannabis sativa
cagcgtcggtagcgaatttcacgaaaaccgacgctgaaagggcttaaaaaccgcctctaaagggtgtttttgtagtagtgtgtttttctgatttttttaaattaactaattaatcaatatatataaacttaatattttggattgtgtatgattatttttttagccgattaatattgtataggaatagatattttgttgtagatttgattttttaaattgtataaaaatatttttaattaattaattaattaaaataaatctttgttggttgctttgctacgattggtattaattttagttagtttgaaatttttttgaattgtataaatattttagttaattattcaattagtatatataaaaaatttaaaaattagataaaactattttaagtgattttagagtattattttattactttaaatgagaaaatagatagagttaaattgagtgattttagagtgctatgtcactgccttctcctctcctttatatatatactagtaaacatcccgcgcttcgtggcggatgtgtaaaatattttaaattatatgtaaaaataaattatgtaaaatataataattacttagtaaaattatcttaaaattttaattttactattaaaaaaattgtgacataaatacttaaaatattaaattgattgctaataaaaattggaattcaaaaaatagtagcataaattctcaaatttttaaacttaacaatttaatttatcattttattggtacccaatttaatggtcttgaacggagaccaatccaaagaataagaagaagacagatttgagtttgactttgactcagttatggttcaatttttatttttatatgtgttaatacagccgctcttcgcacggctcttttaatttttttagtagaatattaaaaaacatactaatacaatatataataatttaaaaacgttttaatatttaataatattaaagttgcattatttattttcatattattattattaattttgttatattaaaaaaatctcctaagaatatctttaaaaatattgaccatgcatattattaatattaattataattattatatttttcttaatatttatgaggttgataaaattttgttccctattctattatttactatttattgatataatattttttttataattgataattgttagaaaaatgaattttaaatcgctaatataaaaatgtgttatactttttcaaaaacttacttagtttagagtccccaaaggttaaaattcataaataacttgttatagtaaaaaatagagtgctattattattatttaattaaacactcttccccttataatacatcatctttatattatttaaagttagggccgactctgagggataggcgagttagaaaacaactactaaaaaaaaaagtaagaatttacatcgactaaaaagataaggaagcaaaataaattgaaaaaaaaaatgttacaaaagttacacagtaataaataaataaaatgatctccaaaaagtaataaaataataaaagatttaaataataattaaaaataactatttttttttaaaaaaaagaaagatttgaaaaataactaattgataattttataatgactttttattttcaacaaataattagttatttactaaatacaaattctagatgtttactaaaaaacaaaatatattgcattaaataaactaattacattaaaaaaataaaataaaaatcccaatagaaaagtaagaaaaaaaattataaactattattgtacatcgaggataaaattgtgaaaccatcataaaaattagtatttaaagtaaaaatttgtgaatattgaaataataaataattgtgtgcttctatcatgatcataaattcataatcatatattgatcaagaaatattcaactggtattataatgtcaatttttgatatgtatactttcgtatatacttataattaatgactcgcacgttagttttaacttttttaagactatatatattaatgtttattagaaaaatttaaggtccgtaactaaattagtgtactacaagctacttttattaggaaaactaagtttataaatgatatgatatagttcaaaaataaaacataatttataaaaagtctcaagatttaaccgtcaatatatgaattaactttatttttttacaaaataataacaaaaattgctttattgtatttacaatttccacaaaataattataatattactgtgaaataacttgaaaaagattgtaaattgatgaatagaagtacacccgcacaaagaccgataataatatatagtattagcgaactcttgctatttgatgtccacccataaaaataaaaatactttttgcggtactgagtatatttcgccgtaaataatttccctgcattcttgtagtgacaattgataatgatctccgaaataatttcgttgcattcttgttgtgacaactaatattgatctccaagtagtgatcaattcacactccaaaattatataattacatactatttatataccaactaacattcaattttcatcattcaaaacaaaaaatgtagtttatatatgtatgcttatatatatacaaatatgttta

SEQ ID NO: 33027 - DNA, 2153 bp, Cannabis sativa
  modified_base (2087)..(2124): a, c, t, g, unknown or other
agactacaaaataatattattcgagttagtgtggggaccatggccctatgtaaccaagctcccaataagtagatccaaaatttacaaataaatttgttaacttattaattcttcctaactccactatagattcaaaattacactcttgattacacaaaacgctctatatatcgaaaatagatgcactttgaattacccattatttttaaataattaaagattctctatagatgatttacatcaagtagggaaaaattactattctacccctcaatgttataatttttatgaatatcgctacacgccaatttgttgaatccatttatgacaagtattgggaggaaatataaaaattgaacctattttttacttgtggttattatacatgatccttatcataacgagtcatttttaaagatatattttgagatgatgtgtggtgattcggttgaagtttcaagacatgcaaacaatgttagaaagattttgttcatgtacaaagagtatggtcgattataatgatggtatgcataattatctaatactcaccttggggaagagagtagggacaatgatgatgaaaataattatacttggttcgatcaacaatgtaaaaaaaagttaaagaaattgaatactcagagtacaaaatataagttgataagtattcaatagaagcatgtgagaaatctaaaaattatgattttgatattttgaaatagtgaaaatagaatccaatagatttaagattctttcagagatagcacaatgtatatttgctatttttgtatctactgttgcataagtatttgtactttattagggcactcatatatactcagaatttgattcgccaaataaaaaacaattaacattgatggagcaattggagaagtagaagcattagaaaatggtaatgcattatatttttactatattttatatgtgttttcaatattgaatacttaatattattatttttgtagaaatactaacttgagttggtgatatcaattgaatgacatttttattttggaccaatgaaggatttatgttctatgatatatgtagtttgtgcacttttatttattaaattagcatttattattataattttatgttaaatttctgttacaatttatgttgaacatatgttataatttagattggattgtaatattttgaactcattaatagtttcatttggatgaaaaattaagtttaatttttttaaagattggattggatggatcttatttgattcgataaattttagatgaatccgattcaatatatggatgcatccaataaatagaactaatctaatccaataacttatttgattgaattactcggagaaatccaacatccgatccaatgtataattgggattgaatcaaggtctaaaaacattaaatatctaattaatcccaaccagagcattaattactcgcacccttctttctcttcatctttccatcttccccatcatacctttttgtcttctcctcatttactcccgatcccccaaatcttagctcagaaaaatacccttgaagattgcaattttgaggcggatgatcggattcccgaagttgttcaactcctcttcatcattgtagcttccatggatgccactagggatgtgactagggcgggtttgagacgagttcttcgtgggttttggtttttcttatatataaccaagttcaggtatttctctcttcactttcccacttcgattttaactttcttttctgttgtttctggtgtttttctttctactatcatggatgagtttttgaatactgtttctactgccttagctcttccccctgataaaaccaccatttttacttatgatgctctggttctttcagttcttctcctactaccattagccttcttcttaagcttcacaccattcgaccctacaatcgtccttccctcatgaaaactctctctgcatttggtcattgcaatgtcactttcctgtttttgtgtctgaacatgctgatggcatatttttggttacttttggctgtgagggggataaggtgttcgaatatgttttaccaggatctagnnnnnnnnnnnnnnnnnnnnnnnnnnnnnnnnnnnnnnaatttctaaaacaatgtaaataaatacat

SEQ ID NO: 33028 - DNA, 1023 bp, Cannabis sativa
aaaatttcatttactattacaaaatctctatacttattttttatattacaaatgacaggcaacatcgaaaagcaactcaaaaggttgaaagactgaaaccctccaagttgcactaccgccatatgtacaatcactgccaagctccagctcactgttcctccagcttagctttttctttacctacacaggatagcaaactgatgagtcaatagactcagtaagatatgcataacatatatacaagcaatgctataccggctttatgcttaagccgcccttagcccaaatatcgagctcactaaatggttaagaacgttcttaatggaagtatgaccactgtaccatatgcactaaagtaccaactctatactcgtgttggtagagccattattgtactctcgggagttactaagtgttgtaccacatgcacgacgtaccccctggtactcgtgttggtaacactgtaactaccctaaaatcctacactatactaacacccttaaaatcacataaacgttagtgtcagtagtgtaaacatccaatacaagcatccattcacatatatgtaatatttatgctatcttacctcgttttcgtgctcaggtgtgtcggtcagtctgagtggaactgtagctcgacgtgttatagggtcctaaaccacaatatttaaaactcgatgagagacacgcctaaacacatttcggggatttaaaatcaaaactaaggataaccctattgatgaacaagatgctaacaccccaaatatcacaaaaatggggaaaactaaggttctggaaaatggcccaaccggcagaccgattcccaaccggaagttcggttcctgggtaccaaccggtcgaccgattctgtgctgagaacccaaaaattgaacactacacttcaattcaactccaaactttctaatattctctagtatacctgtatatactccaataaccccaaatcaagcaataaactcaataattcatacagaatcttatttcaccattaaagctcaaagct

SEQ ID NO: 33029 - DNA, 1938 bp, Cannabis sativa
ccaagctgagtattgaccacgacctgtcacaggacctcctttgttttgttgcatctgacctcggcctggatagggaccatgagtctaaacttgattcaagttaggaccaaaacctagaggagggtgattggcagagaaagcactaggaggaccatgtgtaggataatgacccctatacattgcagagtgagaagtagaggctgaagatggataataaggtgaagagaaggtacctcgaccacatgtaaatggctttgtatgaactagattggcttctggtttggcaatgtcaagttcaatggagtctttatcaaatctcacttcttgagccatgagcagggcctcgatttcagcaatagtgtaggcatcaagtcaagtattgacagaagtgataaacacattgtaatcactagaaagaccattaaatatcacctcaatgtgttcttgatctgacattgaatgaccaatggaagcaagaagatcaacgaggctcttcatctttaacagaaaatcactgagagatccctgcactcttgaatttttgagttgagttttatactttccaacattggccctgttcaatgctatgtagtaagttcgaagtgtatcccagatctatgcaattgattcacatccaaccatatgcatgaggatttttttagacatagatgacagtaaccaagaaataagtatattgtcttgttaatcccagatttcatattcaggtgcgtatcgattgtgcagtcgatcttcattggtgagaaatttgggaggattacgagttggatcaagatgatgttgaagtcgactgcctttcatagctgcaaacacttgatgtctccagggaaggtaattatgctcatccaacctaatcgagagagaatgagagaaggttataggagcagatctaggaagattaacaccaagattttgagttactgtttgagacgaatccattgccatgaatgaaagctcaagaaagaagaagaagaagaaaagttaaaagaagaagagaaagaagatgctctgatatcatgtgaagataataagagtagagagaaagaattgaaagttctgtacattgatgaaaaatatattacagaggtttatatataagtattggataagcaagtaaagaagagaagttgttacaacaacacagttagttacaacatttaactaacaattaacaaaaagttagttgagtaaaaactaacttagcttctcttgacaaaataatagtataaatatctatttatacatatttataaccctagcattatatataaactgtctcaacctacaagtatatataaaaatttctctaatatagactccttcatcaccatatttatctattatataaatatatatacaatatacatagacttgaatatttatagatttatctatgtttctttattttaatctcttaattgtactttgaactacaaatattattaatcttatatttcctatcatgttagatggtatctcttcatcttccttgtccacatctagtattgtataataactttgtaattaatttatttgtgttctttctcttggttagctattcctcatgcaactttggcactttctttttttgtgcatgctgactgttgttatttttgtgtttgcttggttatgggtttagtcttgtattgattttgttgttatttgcaatttacacttgtgtcttaaaatttgacgaaaacagagaatatgcccagaagactcctcaaaaatactccgtggaaatggcccaatttgacaaaatgtcaacatgggcgttgggcccagcgcctaggtcaaatcgggcactaggtctgtaatgaccgctttagtaatttggattagtaaaggcaattagcactaatttatattattttattattatttatgaatttatttaattgtggaccccaatatttagaa

SEQ ID NO: 33030 - DNA, 2484 bp, Cannabis sativa
tttattattcatttaatttactattgttcttctagttgtggttttaacttttggatcttcctttaaaaacatgatgatggacaatcaacaatactgtgattcatattatatctcgccacaagtgtatcaatataattcctactacgatacttacccatacaatcaacaatggggagattattctagcacttcctgtagtgggatcaatcaatacattcaaccaacttcttactatcctcctatagcaccacaagatcaagatcattttctgatctgctcaacactttgggggcttctactatttagatggaacagaatcattcacaatttcaacaacctactcatgttgcaccatatagtgaaaagccaactactactaagctgattgaaatgttagaagctaataacttgcaatttagcaaagctttcacaaacttgtgtagaacacccaaaaatctttacaaaagttagagaatcttgcagagccaacgaaaacatctatgagtggatatgaaattcaaaattcaaatactttacctacacaaatagagagtaaccaaaagaatatcaatggcatcactatccaaagtgctacacaacttgaattaccaccaagcaaagatgttaatgagttgattccaactaaaggagaaaacaatttatcccttgaagagtaatctttaccaaagtttgaatctcctactttagttggtccactatcactgaaaaagccataaaaaccaattgtaccaacttatgtcactccttcaccttttccaactagattgaaaaaatataagaaagaggagcctcatcaaggagattcctgaaactctttagaaaattgaggtaaaaattccatgtcttgaggtaatcaatgaagagcctcattgtactaacattttttaggagttgtgtccaaatgaaaaaaagttgaatggagatgagaaaataagtgtgggggagaatgtttctattgttcttcaaagaaagttgttgcctaaaacaagtaaaattcaatgcacaattagtaaaaccaggtttggtcattgcatgatagatttaggataaattattaataatatgttttattccaaatctgcttctttaaatcttggttcgttaagagaaactcagattttaattcaattgactaatcaaactaatccttatccgtcagggatagttgaagatgtttttgtgcaggctaatggacttgtcattccagatgatttctacataattgagatggaagatgagggtgatcctaatcctatatcaattttatttgggtgacccttcttactcactatgagtaagaagtggaatacgaaagcgtgaatacctacaatagaattttacggtgccatggttaagtataatatgttagattccattgataaatacataaagaataagtctttttagaagatctaacttgaaggccaaatgagcacaacatgtagtcgtgctaacaacgttataacaaagtaaacttacaggagttttcttacttttttttttcttttattttgtattgattttatttgattgagccttcagaacaatttctatattaagtgtgggggggagattaactatcgtgtctatccagttttttttaatcatttttttcaatttatattagtttttcttactttaattttagtgagtgtggtttgaatgaaattctgttgacaatgattgctcgtgtttgatatgtatttttactttgatatcttatgcatggtcttgtggaaaataattttgttaatgatgaaattcttgattgtgtgatagttataattctaggaaaatgatagattctcatgatttgtgtgcttagctcataattaattactgctcaaacttgattttttttttaaaaaaaactgacttttgctcatcagttgaattatcatatttgctaatatttggaaagataaatgcatgcttgactggttatttaatgtctcaaccactctagaaattgtttgataatcatttgaggcaaaatcgattaattacacataattttgagatgtgatataagcaatttttttttttttggatcgattgagcttttcaagcctaccttatttgttatatctctagttttacccaattttagcctaaatattgacatcttgtttttcttgtgaccctatacaataacgttttgagccaaaaaaaaaaaaaagaaaaatctcttattcatcttttttcacaccatagtatattaatattttatgtatttgtataggtgtgagagtttcgttgaggggaaaatattgaccgttatgtataagtgatgatgaagaaaaaattatcattcccttagaataaatgtttgtaagttctaagtatttaaaacataaataaaaaaaatcgatgagaaatatgtatatatatatatatgaatacttgcaacaatttaaatgtggaaaaataataagttttatgctgaaaaaagagatacaagat

SEQ ID NO: 33031 - DNA, 1237 bp, Cannabis sativa
  modified_base (299)..(314): a, c, t, g, unknown or other
attttcattattaaaatatatggagtaaaaatatgattaattaaaaatatattattttaattaatgagctttaataaataagatattcgatctccattgttggtcttacatgcttaaatatttcaatataacctcgagacgctagacttcgttccccttatgaatggttattcgttaaagcatttaacactgtaagatctcgtatgataagtattttgtatgttttcgtttctattagactctccgctatggtgactacttagaaataaacttatagagtatgaaacaatggtggaagnnnnnnnnnnnnnnnnaaccttgactctcgcctaccgggaaaaaccactgctaccagttctagagcatgagtggggtagtgttgttcaaaatctttcaattgtccagaggcatgggcaatgatcttccctgactgcattaacacccaacccaagccttatctaaaggcttcacaatctatcacaaacttctcatcactgattgggaggctcagaactggtgcggtaattaatcttttctttaattcgtggaagctatttttacatttatccgtttacacaaacttacaattctttcaggttagctcgatcaaaggagtagcattcttggcaaaaccctccataaatctcctatagtacccagccaagcctaagaaacttctaacttcagttattgtcttaggtggtgaccgatcccgaacagcttcaatctttgtcagatcccattcttacttaccatgtgtcgaaagaaactcacttgggacagctagaactcacacttcttaaacttcgcataaagtgttgtgttctctgagatgttgtaataccatacagaggtgttgctcatgtgcttcttttgattcaaaataaacaagaatgtcaataataaacacaatcacaaagttattaagaaattccttaaacacccaattcattaagtccatgaatgcttctggtgcactagtcaagtcgaaggacattgctagaaacttgtagtgcccatatcgagtatgaaagtagatttagaaatattctctttttgaatcctcaactgttgataactagatcgaaggtaaatcttggagaagatgctctttccctgtaactaatcaaacaaatcatctatcctgggcaaaagatatttgttctttattgtcaacttgttcaattctcgataaccaatgcacatacatagtgacctgtctttcttcttgataaat

SEQ ID NO: 33032 - DNA, 1669 bp, Cannabis sativa
atgattaattctctttccaaattgtttataaataggattaaggatctctagtaatccttttagccattttaactcttaaataccaaagcaaaagacttttagccaaatttcctcccaaatcctttgaggaattcacatgtcaacttctgatgattccatctgagcagagcaagaaagcttcaaatcagtgagtaagttcttcatttctttcctttacacatttgcactgaaatgcatgtatgatttctagattttgttgctatgaatcttgcctattcttgaactattctaggttaaccatagaaaacataggtttaggacttgaaaatttcatttatgtttaaccataacatctgattatctgactgcgcttcaaatttaaccttacaaccttcatttccactcgtccatagagttttagtgaaaatcaaattttaattcgaagtttcaaacttctgggattgaaaattttatttctaggtgaaacctttgcttttgatttcttagtcgaacctggttggtatatacaacctggttttcattcgttactccgaccaactctcactttcttgtcttctaccttttgtagatgaaccctggtgagttttggggaggcaagcatcatatcgaccaggatttgcttcaacttttatacgaggatcacactcatcttcgtgctagcccatttttgtctagtgacgatctttcaacatcatttttatcccgaccaaattcgaggtgaaggatacggttgtttcatctagaaactcaagaaaggttggaggtgttaccttcttgctaactggacttatagagttcatccgaacgtggtcggcactttgcctgagggccgcccaaatcctgttgctgtgggaaaactcgttgccaattttgttatgaccattgccaagcacacttctaataaaattccacccaagcgtaggatgatggcgcgaactaaatatactgttaggaaatcttcattgaacgacccgcacgttgcccatctagccacttgggctaaggcagagcagacccgtcctgccactgatgaggaggatactgtcgtggacattgaagtctaagtggaggactagggcgaggtctgtcaactaatttctaaaataacttataagaaactaaatttttaaaattgacatcttctctgttgtataggatgcgttgatgttacttatttaaagtaaatttacttagatactagaaattttttaaatatacgatattataatatttattgtagtaaccaataaaattagatgacgtgacacgttaatatttttgcaaataaatttgttgaaggtatttttataaataaaatcaattttaagtataatattaaaaaaaattccttataataggatttaagagacttgtagtgatgaatgtaatgtaaatgtaatttaagtatttaatccaccagaagtaaaaacatgtgatatataagtgtatgaaatttaaaacataaagtatttatgccgtaaatactctatgtttgataggatttaatagaaaaatagtgacagaagtaacgaaagtgtaatgtaacttaagatatttaattcgtcgaaaaaaaacgtgtggtatttaagtgtataaaatcaaaaacttatgatatttataccgtaaatatcctaaaattatttagaaa

SEQ ID NO: 33033 - DNA, 4937 bp, Cannabis sativa
tcccattagccactatgggctacataattacaagtcctcttaatattagagaaaatacaaccagagaataaggaagaacgaccattacaaaatgagacatagttttcaatgacccaactggactccttcccattgagagcattgataaccaccctcgaatcactctccacaataacaaattgggccttcacttccagcgctgcagatatagccaaacaacaagccgccgcttccccacaaaacgcatcagcaaagtccattctagtcgtaagaacacgcaccacctcacctaaatggtttctggcaacaactgctaaacacatgctatcaagccccactctaacatcacaattcagtttaatccaatcctgaggaggaggagaccagttctccttcaggctagggatgggctagggaaaatagtagcatgtaaatctgcataagaaaaacgaatagagtcgatacattgcatcaagttcaaggtaaggttattatggaccttatcattacggatgcgccaaatagtgtcgaccacaattgacgcatacaagaacacctcctccacagcaatctccttgtgtttcagatcccatatgaatttgacccaatcccacatccggatacctgtctcacaaattggataaatgccccaaggagacgcccgccaagcatgatgagccacctcacaggaaagaaataaatgttccatagtttcctcctccctcccacatagagggcatctcacatcctcaatatgaaatctctttctgataatagatctgagagggagagccttggagaggatacaccaccaaagcaccttgtgtcgttccaacactttactattccagagtttattccagagagagagggctacatcgcatgagggagctctttccaaggcttgaactagataggcagatttgcaggagaatcgctcatccttctctagcgtccaaacccacctatcaagccccacaccagagggagccccacctcttagaattgccgctacagtctcacgatcaagcaggctattcaatttgtggatgtcccacccaccattaggagataacaattccgctacaagtctatgatccacagaatgagaaataaggggcttcgggataaaatcttttaagtgagggatccaaggatccacccaaatcctagtatctcttccattccccactagcttgcaagcacctttctttaagatggtcttcgttttaatgacgtttttccaaaaccaggaatctgaggctttgaaaccacaattaaggaaatcttttccttttaagtacttcgatgcaagaactctgcaacatagagattgacaaccattcaggatgttccacccccacttagctaaaaaagcttggttcatttcactggacttcctaaatcccaaaccccctaaagatttcggaaggcacattttatcccaagctttgagatagattccatggtttcctttctcaaaaccccaccagaagtcacgcaccatactatcaatcttggaggccattcggctggtaagtttagtagtttgcatagcgtacaacggcatagagagacccactgatttaataagagtagctcggcccgccttcgacaacgtttttgctttccacccttggagttttgtggagagcgaatccaggatgaaattgaagtcagcatccttctgtctagatctgaatagaggtagccctagatacttggcatttccttcaggggagcctattcccaacacctccctaatctcctgcttcatacccctaggagtatttttactaaagaaaattgaggtcttgagtttgtttacttgttgcccagaccaagcgcagaacttctccaaacaatgccagtagcctctggcttcattcaagtttgctttacccaccaaaattaggtcatctgcaaaaaagatatgagaaagaaccggacctcctctactcaaccttattcctttgatactattcttatcaagggcgtcatggagaagccttgataacacctccgcagtccaaatgaacaggtacagagaaagaggctccccttgccgaagaccacaaaaaggtttgatcgttcccacaggccctccattcaggcagatgttgagtgtggtagtcgaaatgcactggaaaatccaacttcggaatttctcgagaataccaaagcaagtcatcacctggtcgatccattcccagttcagcctatcataggctttcatgagatcaattttaatggcaaaaaaaccttctttgcctcttttccggttgaacgagtggatgatctcttgaactagcacattattatcttgaatgtttcttccgggcacaaaagcggcttgagtggggcagataaagttaggtaacagaggctttatcctgttagcaatgattttcgaaatgaccttatacataacattgtacagagagataggccgaaagtggttggttctcttggggttctggaccttagggataagcactatattcgtagcattgactcctttgtgcattttcccattcttgaagaaatccgaaacagcttcacagaaatcatcgcccaccgaatcccaatagtgcttaaaaaataagacggacattccatctggaccaggggctttatgactattcatggcaaagagagtgcttttgatctcctcataacttgaggtcatgatgagatcctccttttcctcccccgaaatgttctcagggatcaattggttacaaataagcgactgtacgctgcctgatcttgtgaagattcttctaaaaaactcaatgaactcctgaccaattaggtccctagaattgatccaaatattatccttgttcaagatactttcgacggtatttcttcttcctctaatggtagccgacaggaaaaagaacttggagcatttgtccccctcttttatccaagaaattctagccctttgcctccagtaaagagattttctctcccttgcctcattcagggatttccggatattgcattcggtattccaatccctgtcacccgccggaagactctggatcaagtttagacgatcttccaggtctttaatacaattatctaatttgccaaattgagttctatgccactggcccaaagccactcgagttgctccaatccttttgaagacccgcgcaggggcccaagggtgaacaacggaactccaagcctgagcaaccacaagcttacttctctcatcacgcgtccaaccctcttcgaacttaaagcctcttttgaatttagtctccgaaccctcagtaaacagacacaggggtctgtgatcagaattacttgtttgataggaacagataactgctttcggaaataaattgagccacgcaccattaactaaacctttgtccagggccgacttgacgtgtttcgaaccagaccgatgattatcccacgtcatcatgtccccctgaataggcatattgatgagaccacgggagtccaccaacccagaaataaacgggatgaactggtccctaccagtggctccttccctctccgattcacgaagaacaaaattagtgtcacccataattaaccaaggcccgccatacctgtcacccagcttcattaactctgcccagaaagccttcttagcatggaaatacggaggcccatacacacaagagagaagccatgggttggacgggggatccgagtaaacaaggcccgaaatattgttacgattacaagcgatacactcaaaacagaaaccatttttccaggccaacataatactaccagcagtcccaatacccggaacaaaaacatgacaataaaaatgaagagatttaagaacacgtaccagtggagcggcatccacttttagctcagagagaaaaacaaaatccggggaacgcgatttcaccagggacttcagctcaagaaccgtagaggtctgccctaaccctctacagttccaagcaaaacctctcatggctcctgtggaggagatttgacattctcctccacaagggtatgagagtgaacaaccacacttgagccagagtcatcaatcgtgaaagagccaatcaagtagcaagccttcacaccactagagcaactcacggcatccgcagattcttcagacggaacttccaactccaaattagtcacgggatccttctccttagtgtcccgttcaagatcacggatcacccccggaagttttcgaagcaccttttgaggtctagagcaaacagagtaagaggcttcaaattttctcttcttgaatggagtagttctttcattcacttcagaaataggcttaactccgatatcgcctcccaaatcccaactttcaaacaagtcaaggctaccaaacttttttaactctagcaacgtagattcatgggcttggaaaaaataagttaaagcccattcttcattttggcttaagagagcctcttgcccacaaatgaaatatccattggctcaaaaacagctaccaaatatcattgtgttagtgttggttttatgttattttggttccaaagtaatcattgcgttgttttatactaaataatggtgtgttttatttcaataaataaataaataaataatggcgtgtttagaccatctccaatcttaaaaatttatacattatttaaaaatataatattttattttatctctcttctacgttatttttgacacttttacttttaaaaatacttcaatgtagtactttttaaaaatgctataattataatcacatacattattatttagaggagtgctagggaaactcatttttgcactctcttttgcactctcttcttaattgaatggcatgtgtaaccttccaaattatgtttataaatagttacaattatgccctcatttaatttttattaataataattaaaatgagtcatcttatttacttttttttt

SEQ ID NO: 33034 - DNA, 2645 bp, Cannabis sativa
aaaaatcatgtgtgttcatactttcattttacagcttttattttttctgtgtgagattgtcactgtgataacgaaaatctgcgttaacaagggccaataacttcttaaaatataatttataaatacatttatatacatacaaaaaattatataaaaatacataaatacatataaaaaaaatcattcccctcataaatagttaatatgtttcgcgaatggtcataatctttctttttactaacaattttaagaagagaaatgctaaactatattagtggtgtctagcaccctcctacatgtcaatattgttattgatacaattaagtatcagtcccatataacttaatgtaaaaattttagaattatttcataattacacaaaaacaacaaaaaaaattataaaaatacggttgtacaaaattttaaatattttttttttatgatttttatgattttatttacagataaaacagtctttttatgttgtaatcttgttaatttattgttgattttttgtttttagtatgttattttctgttgttgttttgatgttatttttctgttacttttatgtagtttttttgttgtttatatagtattttatgtaattatactaataatttttagaaaatatcactaactaattgcaagaaaatatgtttagaaggtgttattattagtgcttaataataatattcttttaagaaatattagcattaaaagataggaatttttgttattttcgcttctttatctccttttgtaaaaatcaataaatggagtaactcatctaagaaaattttaaaataatcatgagaaatatgaattgttttaaaaaatgtgaatgtgtggtagaaaaagtaaaatagaagtatatgataagatgtatgaggtttcattttaaaaataagaggaataattcatacatttctttatataatttattatttaagactaccaatacaaattttatacatatttataaacatacgaatttgtttatgtaaataatttacaagtttgtaaaccatttttacaaatttataaatatttgttgtaattaattatttttaccataaaagcgattataaccatgcaaaatataacttctttaatattgcatgttagttgatatggtgacgtcaatatgaagcactagctaattgagggtttttttttctttttttttttttatgaacacgtgcataatattaaaaattaaggaaatcaccgctggtcattacaataaacatctgtagcaattgtctcaactggaataacacaagtcttactcagatatctgataacccatttataagccacaaaattaaattataataataaaattaaagttacatccagaaaagtgatttttaatcctactaagcctcagccaccactttgtccaatctcccgaaaagtaagattgagtaccgaatatttataaaactattattttttttttagtttcgtcagtacaaactcaattttgaatttattaaataaacatttgaaagaaaatattgactcataattaaattagagaaataattaatattaagtacttatgctattaaaaataaatattaaattatgctgcttacaaacataaaactttaattacttatgccgctatttacctttaatagaaagatcatacaccacaaataataattttttttaccaagtaataattaatgttgattcactagatatgctcgctaaatatatacttctatatttacttcatcattaatatataaaataagttagctaaatttcaaattgtcaacaaatgttataaatggaaaaataaaaatatacatataaaaaaatttatctgaataaccatatatataatatatcttactagatacatcgattcaactgaaaaaaaaaaaaaaaaacacacacacaccataaaataggtattttccatcaaaccagtccttccaaataatcactacttgttagcttttcaaatttgacgtttgttgttaatcgactttttgcaacgttgaagagccattccatgtatataactatatagtatatactcttaaatcttaatacacaataaactacaaattattcttatataaaaaaaattaaactacaaattattcttaacgactttgaattggtaagtaagacgtacgtattgatctttatcatgtgaatattacatcaacttttttcttctatggacaattgaccctagattttggaaaggctttgctttgaattttatgttgatcgatcttatctaacatacaagtttttaccataaattatcataaattgctaaagtctatattggataagggaatattgaaagtctagctagcctaaaacgtacgtgtaattgagttgtacaaacattctattctatcgacgtacgtaacaatataaagggattaataaagtgatattggttaaagactaaaactttagttgacattttaaaaataataataataaaaattgttcaaatgtattaattactcaattaataagcttaaaaaaaggtcggtaaattttgtcacttttttagaggacgcaacattttgatagggttgagcccgaaccagggccggccctgaaacaaagtggaccacaggaaaaaaaaatttggacccttatgt

SEQ ID NO: 33035 - DNA, 1661 bp, Cannabis sativa
  modified_base (371)..(371): a, c, t, g, unknown or other
aatttacctgtaatcatttaaaaaaaaaaaactaagagaaaatttgtaataccctaaacggatgttgtagtaaaaagtgtgctgtcatttaatagatacaagacaagataaacttctataaagagaaaagttttgaaatattattgttattgtaattttatatttttattatctcgctatcgagatttttaaaactgtgaacgaacttgagaattttaaacggtctgtattgaccaatcgcaaagtgacatgtctagaggtactatgcactactggtgtctaatagcaattaatactctagataccattaccacacactcaaaaaaaaaaaataccattaccacactttatttcaaaataataataataanaataataataataataatagtagtttatgtgttattaaaaaagtgtgttgtcatttaatagatacaaaataagataaacttctataaagagagaagttcaaaaatattagtattattgtaattttataattttattaggggtaaaattggtatagtcagtatagataccattaccacacagtagcattcaagtaatgtcctttgatttcccctattttagcctgtgatttataaattacttctgcacaaaataagaaacggtctctccaacgattgggaatttaggttctcatcatctttggtaaaatcaagtccaccgcgaagacattcataaactgttcaaccgtaattcttagcgaataacctcaatataaatatattaattaaaaaataaaaaataaatatgtatttgcaaagaacactaattttatactacaatattacttcaaaattagcaatcacttactatttattatatccaatccattgtattattatatttggttaatataataatttagtttatgataaaacaaaaattaatttataattataaatatatatccatttttatgcttgaattttccattagcaattaataaagtgagaatacgttttatttgttaattatttatcaaaaaaattcagtgaaataagtcaataaaacacaacttacaaccaatgttagcatatgaatgtgtaaataaacataacagtagcataaaagacaaaatagaatagataaaatctatttatttatgcattcttcaatataattatagtagatatataataagagtaaaatggtcaattaaattatagacacttagtatatgaatttgtaaataaacataacaataacataaaagtttgtaaataaacataacaatagcataaaagacaaaatagaaaacataaaatctatttatttatgcatgcttcaatattgttatagtagatatataataagggtaaaattgtcaatttaattatagacacttagcatatgaatttgtaaataaacataacaatagcataaaagacaaaatagaaaagataaaatctatttatttatgcattcttcaatatagttttagtagatatataataagggtaaaattgttaattaaattatagacatcaacaccacatttttataatagtaagatatacagtagaatctctatcgaagaatacactagggactaagaaaataatattctaattgagaggttataactgaatagagttacacttgaaaaaaaaaatcaaaatatcaaaaaatatcaa

SEQ ID NO: 33036 - DNA, 2501 bp, Cannabis sativa
ttatataaataaaatctaaaagtctgtaaaaaatattaaaaattctatacaaactgtatttttgtatttttctttttgttatttttcgttttttttttttgaaattatctcaatttattaacttttatttattatttttctaacccttttttttccccttttcttaccaaaataaaactttcaagagcaatttgcggtgaaactcttttatgttttaatttttttacacttaatcctcttatttttttttttgtggcaaactctcttatgtttaagttttaatacacttaacccccttattttttttagtggcaaaatctccttatattttaatttttatatacttaatctctttgtattttattttggtggcaaaatcctattaagtttacttttctttgcaaatttaaagttttagttagatattaccattaaatactaactggattactactgtatcgactttgaggttttaccgttacgtatacacaggtgtatacagtggttattcagttgatatttaactgacgtgttaaatttgtaaagaaaaataaacatttaatgggttttgctaaaaaaaaaataaaggagttaagtgtataaaaattaaaacataaaaggattttacttaaaaaaaaatgtataaaagttaaaacaagtttcgccacaaattgctcaactttctttttttttctttttttttttttgattcaagcgtttatatattacacaatacataacctggaactcgaacccaggacctccaacacacacaccctcctatggccacttgagctagcctcaagtggttaaattgctcaactttcaaacatagcaaatttgggctttgcagtctcctaacaataaatataaatgttattgttgatagtggcacttaattcaagtcatgggagtcctacaatcacagataagtctctctcgggtaggtggtggctgctaactgctaaagccaaaataaatgctgtgatctctccctatttatacagatatatatttatactccgatttgacacatgttaataagtcactaaaaattagcttaatagtgaaagagaaatgggaaaaaagaagaggtcttggtcacctttaaactattaagctaatatataattgtaaaatacaattacgctacaataaaaaaaaaaaatttgacacatgttaattaaataattattataaaatatttttaattagagtatttttaatagtatttttgttttttttaattaaaatagttaaaatattaaactatattttctattgtagttagtattttataatttaaatttattaaatataaatttattttataaaataataaaaagtaacagtatttttaatgaagatactattaaaaaaatttaacaaaaaataaagagttccttacttttagagaattttctatttattctctattaatagaaagttattttttttttttatagttaaagctcatttaatctcacaccctattttaactaaaggtgtgtgagcataattgaagatgttcttacgatgtaccacctttaaatagtggtaagtactagtgtctaatatttataatctatatatatatatatatgaattggttttcaatgggtataacatattgatgagaatattaaaataaactgtaattaaatatcaatttaaaaattttaatttctaaaaatgacattttaatttaatcaccgataataaaagaaagaatagagttttctttgattaattttattatttaattttttttttacactatatatgtttatatttagtattatttttattcgtgtttctaactcaagtggatatataagagcttcataaacttacataccaaacataaagtataattgaaattgatcattcattaatttttttttttatttttaaagaaagttaaaatgataaactataaattgttctgtggtacggatctgacataagtagaagtctttatatctattattatctacacccactatattgttttttgttaaatgatctagacttgtcatgatcataaacttaataggtaactttaatttattagaattattaaagatgaacaacttcgttctgaaaaaaaaaagaactacttgtacatacatcccaattatttgcgtgatacacactttgtcccaaattcatcaaagcgatcttaatataaaattacataatcacatactatttatgtataggtatatatatataatcccaacggtagcttcctctatttttagcgatattatcatggatgtttctagtcttctattatttttttttaatgtaaatgtctctcatgtcaaacgtaaagctaatatggctgctgacggtttggcaaaatttgcactaggggtagataaagatcatttttggtcggattgtattccttcgcctataaattctgttattataaatgactctttggtttaatttataatagcagttttttcctaaaaaaaaaaaaagagaaaaaa

SEQ ID NO: 33037 - DNA, 2076 bp, Cannabis sativa
caactcaacctaattggttgttgcaacgagttgaatgctgggtatgcagccgatggctatgctcggtcacgcagtgttggagcctgcgtggtgaccttcactgtcggcggtcttagcattatgaacgctatagccggtgcgtacagtgaggatcttccggtcatttgtatagttgggggccctaactcaaatgattatggagctaataacagaattcttcaccattctattgggttagctgattttagtcaagagctcaaatgcttccaacaaatcacttgtcaacaggtttttaataaaataacttaacatcatatatttaaatgtattattaataattagtattttgaattaattataattatattgtaggtggttgtgaataacttggataatgcacaagagcaaattgatggggccatagctgcagcattagagcatagcaaacctgtgtacattagcataagttgcaatctgcctggattatctcatccttcctttcttcgaaacccacttccattctccttaccagtcaggtatattaatttctttaacataatctatatattaattaacataattaatggacacatacatatctcttaggtaccacccctcctatataagtatagaatagtcccataatcaatacacttttataatatttaaatttgttatgaaacttttttgaggcattaactatatttgatgtttcattaatagtattgaaattaagggtaagttatgatttggtatctagctagtcttttattcaaatagatatttatgttttgagcattgctattggacactagtggtgtccaacactttttataggtggcgtctcatgattaattagcgatattccctaaaaactattttcttaacgagtattgttattgggcaccagtggtgcccaacaccttctataagtgacgctccacgatcggttagcagtattccctaaaagttattttattaagttatatgagaccggatacttaattacactaataacggtatgacaccaagaagggtgctaggcaccaataatgtcttttagcaattcgatctcttattttatgtttgatatgttttctatttacacatcttttcaaattaatttagaataatttcttaaaactttcttctatacgttttcttaaatattttttagacaaaattacccactagtaaataatatcatttaaaattaaattttcaaatttccaaattttagttaaaacaaaattaaaacatctgtagtagtctcaattcaaaataatcatttattattaattaaaaaaaaaaagcaattgcagtttttgatttaaataagaacaaatacaaacacaaatattttgttttatttaagtattcttattagaatcaaagtcatcaaaggataatttggtccattttgcttatcaaagaatcacaaatattcatttttaagcttttaaaaattaatgtacaaaaacatcttaaaaataataaattaattagaataatccattagttggaaattttcataaaactaaattattttattttctttttaaatatttagagaggacacatttatgttaaattatacaaaataatgaaaagggtgtgaaaagaaagtgatgatgagggggtaactctctaaaattttacaaatatgactaagggcccatttaattggcacagcttttggaaaagctataagctactttttgaaaaagcagctgtaataaaaatgtgtttgctaagcagttaaaaaacagctttttgaagaatttttagagaaactaaagctaaaagtgctccaatccaacttttagaaaaaattgttttgattaaaaggctataatatatatattttgtactaaaatcatatttaattatttattatgtattaaaaaataaaaaaaattataataaataattattaaatctcttattttttttttaaaaaaataatttatatgttcttttaatattaacaaatgacatcaacctagaatttttcttatatatttgagtttttaatatttttttaataattaccccatatactatttttttaacctt

SEQ ID NO: 33038 - DNA, 1183 bp, Cannabis sativa
  modified_base (134)..(136): a, c, t, g, unknown or other
  modified_base (356)..(357): a, c, t, g, unknown or other
catgaaaactactttatctctgaacgtgtccaatagaaaagtgatgcataacaatcttggcttcatccttgtgaaatttcatgattttcgagatgtgtaaagtgaaattttaacagaacactaacgagtgtaannntaacgaaaaaacttgttaaaatttaccctgaaatgaagaatattttaaatttttaaattagggggcattttaaaaagaatttaacgctaatccaattttcatattcacgtcttagtagtaagaattcattgtgactagtggagaaaaatatttcgagatggggcctggccatatttcacaaaggggtaccactataaaaaatgtgagattttcactattnngattaaaatgattgttagtgcatgaaaactagtttatatctcaacgtgtccaacagaaaagtgatgcacgatagtctttgcttcgtccttgaaaagtttttcacgattttttgagatgtgtagggtgagatttttgcagaacactaacaagtgtaagatgatagaaaaaacttgttaaaatataccttgaaaagaagaatattttcaattttttaattagggggccattttaaaatttttttacttgaatccaatcttcatattcatgtcttagtagtataaattcttgtgaccagtgaaaaaaaatattctacgatgggtccaagccacctttaacaaaggggtaccactatcaaaaatgtgtgattttcactatttcgattaaaattattgttagtgcatgaaaactactttatctcgcaacgtgtccattagaaaattgatgcacaacattcttggcttcatcctcataaaatttcacaatttttgagatgtgtagggtaagattttaacagaacaccaacgagtgtaagagtaaagaaagaacttattaaaatttaccctgtaaagaagaatatttttaaattttgaattaaggggccattttaacaaaatttcatgagaaagcgatcttcatattcaattcttagagtacaaaataatatcttccattacattcgttgattcgtattctctaaggttaacacacgtcatcctctaaagtgccagccgaattttgggtataacagaaggaaagaccattccaatgtaacattagaaaaaaattaatgatttttgtcaatattttatgcattttaaatgttat

SEQ ID NO: 33039 - DNA, 1874 bp, Cannabis sativa
gggcaaagctcggtagaggtatgctcgaactttaaaacacaaaccaaaggaagtggttctggccgtagaggaaaggaagcaaaaaataccacgggtaggggaacccactataaccatcactgaagaagatgctgtcgatgttcacttgccgcacaatgatccattagtcatggaagtacaaatagcaaataaaacagtggcccagactatgatagataatggagcctcaacaaatattctgttcaaaaaaccatacgagaagatggggctccaacttaaagatctaatcctctgtctctagccagtatatggtttctccggccaaagtgttacacctttagggaaaatttgcctacccctcactgttggacaagctccaaagagcataactgtaatggcacaattcctggtagttgatgttccatcatcctttaacgtcatgttaggccgaccagctttatatgacttaaaagatgttacatcaattttccattcgtgcatcaagttcccaacaaagaatggagtagggtatctaaaagcaaaccaacaagttgcacgggaataagacaaccttgcactgatcaaggccaaaaaggaagaatcctcaggtcagagttctgacaaggggaaaaggattgccaaatagggaaccgcccaaggcggggacaaagatgtggatccccgacatgggtaaccaaacacaaatgtggggccggtggaagaattagaagagagagaaatcgacctaaacgttccgaccaggaaagtcaaaattggaaaaggcttgttgcttgaagtaaaattagctttgataaaatttctaagagcaaacctagacatttttgcttggtcacatgagtacatggtcggtatcgatcgttcaataatttcacacgccctaaacatcgatccaaacttcaagcctgtttagcaaaaaagaagatttttggacaaataacgggcacaagcattaaaagaagaggtagaaaagctgcgcaacaacaacttcatcattgaggctttctacccggcttgggtagctaacctcgtactggtacccaagcccaacaaaaaaaggtgagtatgtcttgacttcaccgacctcaacaaggcgtgccccaaagactgttttctagttccacggatagatcagctcatgggtgcaacatgcaggcaggaaatattaagcttcatggacgcctattcggagtataatcaaatcagaatgcatccagcggaccaagaacatagaagtttctgaacagatatgggtccatactgttataaggtcatgccatttggtctaaagaatgttggagccacataccaaagattggtaaacaaaatgttcaaagaccagatcgacaaaatatggaagtatacgttgatgacatgctcgccaaatgtaggaaggctaggggcatataggtgaactggacgaatgtttcaatgtcctcaagaaatacaacatgaaactcaatccattaaagtgctccttcggagtaagcttgggtaagtttcttggctttattgttaacacccaagatattgaagccaatctagaaaaaattcaagccctcctggatatgaaatttcctacaaaacaaaagaagtccaaagtttaactagtcggattgccgcactcagttgatttgtttcaaagtcatcaaacaagtgtgttttgttcttcaacatcctgcgaggaaacaagaaatttgaatggatggaggaatgtgagaatgcctttcaagagctaaaaagacaacctgcgaaacctctcgtactctcaaaacctctagacggagaagagttagggatatacctggctgttacagagcatgttgtaagtgtcgtactgatcagggaagaaaaca

SEQ ID NO: 33040 - DNA, 3137 bp, Cannabis sativa
tgtcgttggctaaaagcgtggtcaacattttggtgctttcattgagagcaaaaacccaagtttgttgtttgtcttaagtttaacaagcatggaagatggtggtgcaaacttgcagaggcatggttgatcagggtgacccaatggtgacaaatcctaatgtacaaacccttgggaataaatatgtatgagaagaggaccaccagggacggacaaatcccaaacaggccaatacacaacctccgtgcaggcccttggactcatgcaaggacattataatgctttgcattatgattaggaggatctccgtgctgttataaaccgcatgttcgacgagtaaagatgccactttgtagagttgagggatagggagatggaaactttaaaggctcatgaagcaaccatcgatgattgcacgaggaagaccaccatactaataaggagggcctaccaagtcgctaatcaacaaccatctaccgtgtccagtatcccattgagcagtatagaagagtatgctactgggcataccatccaaactcataatggttagccatccaatccctggccataggtctaacctgtgggccaagcgatagaaagccagatccttcttgaccaccctttggctagactatacctaataacttcatcagggctaaaaattctggccaacccatcaaacaaacaagtcagacactaagaccagctagtacctcaatatttaatagattgggtgcggcacacaacctcagggctaacctgaatagaagaaggggtctggacgaacactacgtccaaccagctgctcaaccgggcatccacatctaggacccagatctaagagatcctgatgtgacacaagttagtcaacaagctgaactagttcatccatttgtgcaagtgcaattggatcaactggaaagcatggtacaaagcctgaccgacccaaaactcactaatctcgagctggaccgagtacgtggatcatccttctcccaggagattgaagtccttgagttacccctaaaattcaagatgtcaacctagaagatgcagatgggaaaagaggacccattatcacatcttagatattttgagatacagatggacctgcaagggtacgaggtgacgtaagatgtagaatgttccctggtacacttggagaggccaccctacaatggtacttcaaggtaccaccacgaagacttaatttgttgaaagccctctcctaaaaattccacacacagttctcctcctcccgtgaactcccctggcacctaaagccttggtcaaggtaaaacaagtcctaggagaacctctcggagcttatataagcaggttcatgacaaaagatacaaaggttaaagggttaaccgaggagggaaggctaaccaccatactggggcgcattgagtcgcttggggaactgttgaaatacatcaaaaggttttgacccgtggggtccatagaagaatttctagatcgagcagatggaattattaagctcgaggaggttgttcagtgtgtggacacaatcgaacataagaaaggccagcaacatatctcctttccaagggcatctactcaaaatccacagtatcctagtagtttgaatccgagtgggaagagttctaataaagtagaaaacatggtaacaataagaagggaaagttcattggcactgctgaacataaccgtaaagaaaatgcctcaaagtttactacgttttctgttctgattgacgatctagagacaatttacgcaaaaacccagtctatggtcccgtacaaaaaaccctctcctatgaagaaggaagtaagtaagagagatacatctatattctgccaatttcatgctggtgatggccatgacacaaacgagtgcaataacctgcagtgggaaattgaattcttgattagaaaaaataaccagcatttgcaaaattatatcaaggccgatcataatcaaagggccgcccaaacagacgtaatcataatctattaataactccaccagtggatgggcatttacaagttattattgggggcccacatccagttggagactcggggaatgctcaggaaaagtatgcccgagcctgaagcacgaacaaaaagaaatagttcttaccgtagaggagagaaagaaaaaaataccatgggtaggggaacacaatataacttttaccgaagcagatgctattcacgtctacttcccgcacaatgaccccctggttgtggaagtatagatagcaaacaagacagtggcccgaactatgatagacaatggagcctcctccaacatcctgtttaagacaacatatgagaagttaggactctaacttaaagatttaatcccctgtacccaacttgtatatggcttctcttgccagagcgttgcacctcgagggcaaatttgtctacccctcattattggataagctcccaggaccataactctgatggcacaattcttgataattaatgtcctatcatcttccaatgtcatgttaggccgacggaccctatatgacttaaaagctttcacatcaatttttcatttttgcctcaagttcccaacaaagaatggggcagggtgccacaaagtgaattaaagaatagcatgggaatgctataaccttgccctaactaaggtcaaaaagtgaaataccttcggctagaggtcagacaagggaaaaattattgcccaatagggagtcccccaaggtggggacgaggatatggatccccaacttgggtgaccaaatacaaatgtagggtgggtagaagaactggaagaagtagaaattgacccaaatatcccgaccaggaaactcaaatttggcaaaggtttgttgcttgaagtaaaatcagctttaattaaatttctaagagcaaaccaagacattttttcctagtcacacaaggatatggtctgtattgatccttctataaatattcaccgcccttaaacattgaacccaaatttttgccgcgttcagaaaaaaaaaagaagactgttcgacaaggaacaacacaagcattgaaagaagaggtagagggactatgtgacaacaagttcatcattgaagctttatacccagcttgggtagctaaccacgtactggtacccaagcccaa

SEQ ID NO: 33041 - DNA, 1551 bp, Cannabis sativa
tatactcagtactctagtcatactgatgtggtagccgttaactcataccatcaaatagcctaacatataagttggcatctctgtgcaactctatgtacacttcactaaaactcttatatactaatttgatggctgttgatttgcctaacatatgtatattggtatctcagtgcagctctatgtacacctcactgaaaacctgatatgttattctgacggcagctaacatgtacgctaaacatgtatacatatatgcaaccattatactaatcttaccttgattctgaatgcaagtatgtcggtaactctgagtgaaaactgctgctcgactatttacaggtccctaagtcacaacatacgtataaactgataagtgtttactctagaacatttttgtaatgtctgaaaagagcctagggtttctaccaaactatgtggtggagacactctaaaataaaatacacaatttggctctaatttatataccatatcgtcgagctcatcataagctttaaaacggtatatagaacgtctaaaacagacacctgagtaataagttatggcaaaattactaaaatagacctttctcgatgcagtccaaccagaatttcggttggtacagccctgaaccaaccgaaattctggttgtctgtgcaaaaaaaaaacacgaaaatttccaatcttccaacccccataacttgttccaatcaaacctaaatgctaccaaactttccagaatatcaacacaccacataaggagcgtattacatagcttaaacacaaaaattatactaagaatcaagatttgccatggaagagcaaagtttgagctcttaagctcaactctttctaaacaacacaacaagcatcaaactaaacttaattcagctcaaataacaacaaaataacttctaaaatcataaccaaactcgaatgaaacctagagtaacccaactcaacaatcctccatgaaacctaaccttcaagtttaaaagaaaagaagacaaagagggaaaagcttaccttacaaattacttaagctacaactattgaattcctctaaaaatggtctaaattgaacaagacaattgctaggttcttccttggttcttggtggccgactcaaagacagagagaaagaaagtgttttgtttttcttctaattttgaataaatcctaatgttctctaatattcaataacgtaaattcagattaactaagcttaatatcaacccactaaaggacaaaagaaatctatggcaaaagactattttgcccctttcttccccatgaacttacattgccaccaaagggcattttggtcaaattaaatacctcaaatattcccaacatctctaatgtctaactaatttccccactaatgctaaaatactaaaccgtctaaaatgtgactctatcgaccaaacatcatgttccactgttactggacataaaacatgaaattcataaaaattcatatataacctaaacaatgcacctagcattcaatatatctccgtagttgataaaataatttcctaaggcctattt

SEQ ID NO: 33042 - DNA, 1015 bp, Cannabis sativa
agttggcaatagtctttctacaccctcaaacaattgaaaaaattccttgaatattctaagttaggatattgttatcgagtattagtggtggttagtattttttaaaaatagtattttatgattgattagcgatatttcttaaaatatattatattaaattatataagatttgaaatttaattgcaccaataatcgtatgagtttgaaaaggtatatcactaacatcgaaatggtcataccaattgtgggtaaaaactcacttaaccatattatgagctacaaaattaaaagaacgaattatattagaaaaaatataatccaagaaggagtacttaaacagtaacttgagtagtttgcaattttccatctgggctcgagcaattcctttcagcatttttaatcataaaaaaatcaatcttggtaagagttggaaagatagatctagaagcacaactctttaacaaggccaagcccaaagtgacatgtgggctcttaacaaatggcccaatctttattctctttaaaaaatgttgtttttcaaacttcattttataccaaaatagtcactattatcactaaacatacacacctaccaaatgtaattaaaggtatgatatgcatagaacataaactacaactaatatgtctctgtataaaaccccatatttttttcaaaaaaaattataaattgaattgactaaaaagggacccctcctacccctaaattatccttttaacaaaccccaccatttttgtccctatcaaggtttggacttggagtcccatatgtttaaattgatgtgtccgtacagtagtgataaatagtgaaaaacacccaaaatttgggatgaactcaatgggtaaaccatcatttcttgtctcagcttaggcctacatacataatccctaatattacaaaaaaaaaaaaaatacacatgaaaaactcattttatctcctccatttatttattatatgtttgttttttctaagtatttatttagtgaaagtgcttca

SEQ ID NO: 33043 - DNA, 4341 bp, Cannabis sativa
tattcagcataataaaacttatctaaagctcacaaaaggataaacactataagaaaaatggactatttcaacacaccaatcttggtgggcctgcgtgtgtgtgccgagattggtctctatctcgacgggctcttgaaaaactaccataattgattagaagaatatactttttttgaaaaaaattataaattttagaccctatctcgacgggtccagcttggaccactgagattgggcacacggttgtacccaatctcggcggtccaatttgggcccgtcgagataggcccaaagactaacaaaaagtagacaaaaccctaatcatctctaacttctcagccgcacctttattcactctctttctctcatcttctcccttacaccagcagacaacaggtctcaatggagtcctccatatctttcttctttttgtttttcatgtgcggtggtggcgccaatggaaggcaaatggctcgacatcgtgaacggtaggggattagtccttctctctatgtgtttatcgtttattagttttcttcttcttttgtattttcttttcaggctgacgacgtacgccggttctagggaagaagatgctcctaagatgacgccagagctagggacgacactgatgttggaggttaagaaatattgccctcatataaattatagaatagtcttcttctcttcgtctgagaggtataaagttctttttctttttagttttcttattttgcctcttttttcttttttttttcttctaggatggtctttttccatatcaaaggcaagaactttcaatatcattgtaaggatatttttattgatttcatttttaaattgggttgtatagcataatttttttttatttatgattaataggaatttattgatgtatatataaatatttatttttgtttctatgtctgtattgtatttttttcttttcttattgatcacttggattgtttttccttaatgtacatgatgtttatttgagtttgtttattttgaaagactttttattttctgtaattttttaatttttgtaattttgatttatgattttttttaaataaaaaaatgacctattacggggggcctagcccgccgagattgctcacctatctcggggactaggctttcctagatagcttacatatctcgaccggcctagcccgtcgagaatgaccctttctcaatatcggcattcaaatttacgacggtttgtgcccgctgagatagaacaataacggggggtcaggcccgtcgagataggcctattttcttgtagtgtaagtactaaatggtcaaaaagaccactttgccccccactaaaaccaaaaacttctaagtcacttaggggtattttggtcacttcaaaagctcggatatcctgacattctcaatgtctaactaggttgccccaaaactattaaaatactaaaatgtgattctattggccaaacgtcgcattccgatgttgccaggcataaaacatgtaaaaatataaaatttcatatatggcataactaatgcatcctgaatttaaataaatctccataaaatgttaaattaattgtaattattattctattttcctaattacacctaattatctgctaattttcaaaacaaagctaagcgttctttacaacctgattagcccataatatatatattaaaccctaagtattcactattaggtttatcaagatattacacctcaatcccacaagaaaactaacaaggacatggtttatttacgcataaaatggctagaacttgaacataaagtcaaaattgtacaagaaggcccctacataatgcatggtcgacctgtgccatcttttggcataaaaagatggcacatgtctctacttttgaaacaccaaataagacttgtccaaatatgatccctcaacaccaaggagtaccacaaagtgaaagaaactatttttcaccgaagaatcatgttagtcgacctatgccaactttgtgcacaaatgagtggcataggttggccacaccaaatgggaatgatattttgtgctcaaagtactttttcatcatcaacatatcaaaaccaagtgaggaaggccaccaagtggtgtagagacccctagccaacttgttccatctttggcacaggtcgaccacatgaattggagaggaatttatagggccaaagtatatttccaacatcaatgaatccaatacaagtgaaaaaagtcatcaagaagtgtagaacacttataccaatgccatctttgtgtcccaaaagatggcacatgtctctcctaccaattggccaagaactaatatgactaaagtatttttctagcattcatatgactaaactaaccaagaaacaccatcaagggcttcccataaaccctagccaacttgtgccatattttggcaccaaaagatggtgcaagtctcccgttaggatttcgagcatcgaaatgagattttggggtcccgagacccccaaaatataattcaccataaaaaaagtcaaaacacacctcgaggtgttcgagaacatgtatggctgacctgcaccataatgaggtgtcacgaatcatgatgacatggcacaggttgaatttggagctgaaaagtgcatactacccttgggtaaaataggcataactccctcaaattttatccaattgatttgttttaacttgaatttgaaagatatttttcatagcgcaatttcgaagttatcgagctcaaaattgggttataagacaagttggcacactttacttgggaattaattagatttaaaactaagtgtgggccataagggattttaggagagttgtgccacaacacttgtgcctctctacatgaattatctgacacgtgccatcccatggtcatctctctcaaattttccattcccaaagcacaatgccacataagcaagttaataatcccaatgattgtgggatattttcctatgaattaggaatattttataggtctttatttattcaccctctttttaattcattatttagaaaaagatactggatttgaaagtgagacacccatacatgtgggggatcactaacaaaccctaggcctatataaagatagtgataggctagggtttgggggagattgaaaatccttgattgcttccttcatagctttcaagacctctaattgacttggaaatattatcatatcccttcttcccccttcacttttttcttaagttcttcatatttgtacgacaccaagcctccattatcccaccaccattgacatatacacacttaccaagaataggagaccattctctattcttactctcattggtgtattgttcccaagaaaattaccaccaccattgtcaggtttatggtattggatctctcatgagccttttacccataagcttcgatattgatttcgcctagaaatctccttttgtactataacccacacactcttgagaacataactctggtgtgtcgaatcgatttaataaaaataaagtagacgtagccccattagtatcgcaacatggggtgatctactataaatctttggtgtctttttttcatttattgtggttttatttagccaaattaattcgttgcagtcctcttgctttttacggtcctcttagaccagttgaggaaaaattgtgtcaacaataatattccaaatattttcttaatgtaactttgtactgattgcctattcttaatgaagttactaaatttttaccgaaaaaaaacaacctttgaaaaggcaaaagttacaattgtgtttaatcatcacatttatttagggctgaacatcgagcaggttgatcagattttgagtttcacaagtttcaggtcaaaaaatatgaatctaaatccactcgttcacgtgttgtgggttcgttggttcaggttgggcgggttgacttggtcaacatttttttaacccaaattttttatttgttaaatttatattttaaactaaaaaaaattgtaaaagaaatatattatttatatataaaaaaattgtaagttgtactcaaaaaaaaaaagaaaaaaaaaagcttttaaaaaaatagaaaaaaaaaattacaatttgcgctactcatgaggtgtggtggacgttggatggacaagacgggggagggggagtggtggtaggttgttggctctggtcgagacactggcaagaaggagagcttcgtccgtcttcgtcgaggaggagggtcgatcggcttctcgacattgctgtcatcaaggctaggggacagggaaaaggggtggttcctgttcgttcgtggtcctgagagagagagagagagagagagag

SEQ ID NO: 33044 - DNA, 1404 bp, Cannabis sativa
  modified_base (1348)..(1351): a, c, t, g, unknown or other
tattaacacttgttcacaaatataaataaaaaagatttaatctctattttaataaaaacagagattccttgaaaagaaacaaggcagagtctattttaatctctatagtattatacataaataaataaaatggaagaagaataagttaatcaaacaaaacaaacctcagattatatgtcctaaatgcaacctcaattagtaaaattcgacttggtgtatgtgactaatcttgttccaatactcctcattcccactctccttcccagagtactttttctttacaagaggacaattggagatttccaaagaggtgagggaggttggaaacccttcttctgacaatgtctccaactcagggcagttgaagatgcgaagtgcttgcaaggaggtgagttgtgtaagcccatttttgtccagccctctaagttttgcaaaaaaattgatactaagagaggtaatagtggtaggcagtaacccttccttggggaatgattccacatcttcttctgttaaatctccacgaatagaaagatgggtaagatggggtaatgtttgccaattccatttcatcctcaaaagttcatcatacgatataccaagactagacaaactaacaggctgaccaccttcaccttcagggcaaagctctatcaacggacaatacaagattaccaaccactctagagatgagagggaagtcatcttctctggcaaccacttcaatttagggcatcttctaatctccaactcactcagcttgggagcaataagtccaccatttgggaatgatacaaaactatcacaactatcgatagataaagatgttagttcctctagagatttcccatccgacactgtgatagcttcaaagtagttgctggattcaatcttaagagttttgagattgggaaataaatccatatggagggatctaaacgatgatccacaagactccaaatgaagctcttgaagattccatggctttattgcctcatacaacaactctgaattctccgaattcgcaacaatcatttctgtgacacgtggtaatcttgggagacttaataatggacactgattgtttccctcaattctaatatttgttaatgaaggaaggaagcaaggcaaaactccctcgaacttaggacatctaataatctgaagtgttttgagcttcccatatgttgttgcctcttcagtttgcattgaattccattgctcccatgatgacatatcgctgaaccttaatgtttccaatgatgaaaatggctttctcacagaacaattcccataaaactcaacacccaccgtcactaccgaattgcatcttgagatggaaagatctttnnnnaaaggaagttgcccaaagggtggcaaataggagcaatgctcacaaccatcaag

SEQ ID NO: 33045 - DNA, 1245 bp, Cannabis sativa
  modified_base (40)..(55): a, c, t, g, unknown or other
  modified_base (775)..(787): a, c, t, g, unknown or other
ataaaccaattttaaaataaatatggttaggcaattattnnnnnnnnnnnnnnnnaataaacaaataataattatcaatatctcaaattaagtctttctttagatttttccaaaaatattgaagctatttaaatatttaaaatactatttataaatttttaataagtaaaatgatataaaatataatttttctaacttatgatttataaacaataaaatatttaacaaaataaccaatttatgaatttgaaaatgttatggttagggtgaaaaaatcacccaaaaatagacttttgggttgaaaattggtggctgcccatgaaggttgcgtgcagcctaggtgcgcgcgcggaagagggagttgcagcctccttgaccgagaaacattggtcagctgcatagtctccctcgccgtgcatcgtgtctgaaggcagcatctggcgagctggcctagctttcagacaagaaatgtcagggtcatgcgcgcggaaggaagaccttgtccgagtgcctagtgcatttgatgcaccatctcgacccccatacgcatccgattttcaaatcaccataactttctcgtttttaatcggaatcgagtttcgtaaaaatcaaaattaattaatttttcacaaggaattcaaataaaagattttgagaatgaaaattaaagtatttttatggaaaagtttcgtaaatcacatacattcatcaaataacatataaaccaacgtgaacacatccaaatccgcataataaacaatattcatcgttttannnnnnnnnnnnntgaaagtaaatcattaccatggttttgaggctagttgttgggaatattttaccagtatctagatttactaacaagtatggtaaattagcatcctaaatataaatatttctaaaacaatgaaattaaccatataagagttttgaaaaccttacattggttaaaatagaatataatgactccttccgctcagatctctaatccttattcttttctatcgcaaagtattattgtaacgccctaatgctaagacacgctagtgctttttcaattacagtgctgcctttgccaatcaaaggattttcttgaaaaacgtatcaaattaaaacttttattttagttattaaactttataatttacaatactacttacaagtaccgggatcccctttttaaactttatacacaatattacaaaatacataatatccaggtcgcacaacgactacaaaatataaccc

SEQ ID NO: 33046 - DNA, 1474 bp, Cannabis sativa
  modified_base (1024)..(1028): a, c, t, g, unknown or other
attattatatagtatgcctgtgttgtctttttcaggtgtgttctgacaagttggggcggtatagtcacaaccaggtatttcgggccgaactaggttcagggcggaaatacaattttgggataaattattggcattttattagtgtgtaaatattttgaaaatttgtttaagtgtggaatgtgataaaatgacaattttatccttgtatcatgcatatgttatatataggccgtaggggcattttggtttattgggcttagtagctaattatcaacaaaagagatttttgcaaaattagaaatgcaattttttggtttcttctcacagccattactgccccccttcccttctctctttctcaaattctcttcactttgttcttggttttcaattgggttttggtgttgtgcttggaccttgggatttaggtgcttgtgttgagaagatcttgaggtagtttttcatccttttatattgaagtttgttgctgtaaatctgaagtgaaaatgtgtgtgttgccatgaattatgttcttaaatgcatgttagtgaaattgaaggtgattttgatgtttgttgtgagttttgagctattaagattgtgtatattgcatctagatggttttgattgattttagggttggtttatgttgttcaaattttggtgtaaggctttgaagttctgggttttgtcttgaagctttgaacttcaagcttgagcatatgtatgcaaccttggtgtttgatgtatgcttgattttgtttgttgttttgattttcttgagcttggtgtgatgctcaaatcaacaccaatgttagattggtttggtttaagttaaaagaattggattttgtatggttttggttgagttttgggtacggtttggttgaggttcgaatatatggtaaagtgggcattttaagaccttaaaatctagttttctggttttttcgaacccagtggccgcgaccaaaacccagcagagagccatccattttctcgattttgttttggccataacttnnnnntcgggactccgtttgggatgttctttatatcaatggaaagctcgttccgagctctatttgattatctatgttttgaatgccatgtttgtattatgtgaaagtggatataaggattaaccatatatgagtaaatcctagaatttgtgactaggattaccggcacttggtcaggagcacccagggatttggaatctcttctactgcaggacattaggtaagacagtggttgcacgtagagttatgcgcggtggcacttatgttgaaatgttatacgtgagtaattagaaaccaggattagtgttattaccctaacgtgagcggtttagccgcctagggttattaccctagtgatatatgatgagtaaatgctatgccatgttaattatatgagtatattgagatttagggttatgcgttcaagccataaccgggttggactcggtaat

SEQ ID NO: 33047 - DNA, 2893 bp, Cannabis sativa
attgttagtatttttaaatttaacttctaaatctcatgtactgttggtagccgtttcattttgaatatgaggctaatttggggttttatattgtcattttttaagtatttatataaatatatgtatatataatttgattcttgaatgttggatgatcttgtagcctttcattcaacatgttttcagtcaaatccttttcccatttaatctaaagatgaagatgcattgggcaagaccaagttgaagatggtgtcaattgtattttttgtttcttgatgctgttaattttttttttcttttgatgaaaccactgtctttattgaattggggctcattttttgttttatgatttgctcataatttttttatttaatgaattttttaaaaaaaattaattgtaatttttttatattggtttcttatcaaattaatagctaaactaaaatatattaatccataattaaaatatatggttaattaaagtattatgaaaatataattaattaaattgttattgtaaattttataatatataagttgaaattagaaaaattaaatattaatatttttattgaaaaaagcaggatatagtgatttgagtgtggttgttatcagaaaaataattaaaataaataaataaattgatatagtaacgcgctatgtgggtagctattacttttacagtctaacaaggtgtgactctaaaagcttatagtgacgcacggtgagcaactctaaaagggtttagcgacccatactgaagggtcactaaatagtatttttccagtcacccacattagtgacgcacagtgagtgtcagtaaaacattttagagtctctcaacgtgggtcattgaaacccattttttgtagtagtgtgagaacatgttatacaataagtggaatctaaacattccgagaggatcaaatattaattctctttaagtgttaattctaagaatgaatttagttattgagctcaaatcgataattggattatagattaactagttattgtggattaatggtacttaaggattcaagagataattaaaagggtaaatagttattttgactagctctaattatgaactaataaattggagaacaaactacttatattgattatatttacaccaaaagtagccctggtgatgtggacaagtgtttgacacatggcaagaaagaaaatatcccgaaattgagtagtccccgaatcatagcaaaggtcaacctggaggggtccctagccctgtgcccaagttgactttggaaacttcggaatgggtgtttgaatcccgccaaattgttttcaacccactatctttcattattttttaccatgaagtcatgatttcaaaatttaagtcacctggtgaaaaagcaacagtgactgaaggtaaaaataaaggcctcgctaagggaatgatagataaattttgaggctcaggccaagtagcttctcgcaaaaagtggcgtttaccctcaattatttcttgtaaatatcgcctatatcatcctgaggtttcgtcttgactagtcttaacgagatgatcccaaatcttttcattgtttaattcaagaatggttttgggtatttgtattttgggtttgaatttaatggcagaaatttgaggataatctgattctagaaattttgacattgtgatttctaaaacgaattgggacatacttataaataacaatatcccaatctccaaaaaaacagaacacaaacttaactccgaaaatctacgaatcgaataacctaaaaatattcctacccctataattattcaaacaaacgaaatcaaaattacctaaacagtaaaacaatgcaaacatgggaacactaaccaaattatgaagacagaataaaaaaatcacaaagaaaagagagtgtgtcacttactgtcttgttgaggatttctgggcaacagagattgcaaatgaaatctcgaagattgagaagctaggtcctgacgatttttagaactggaagattggtcagatgtaatacgcaagaaaaatgtaagagacaacaagggcattcaaggttgagaaagagcaattgaaaaaattctctacagaaaggtttgaaggtttgaaacgtgaaaatggcgaaatgaactttcgcttccaattttatacccaaatactgatcaccatttgatcaaaagaaatctaatctaacagatgggaacattgtaaatgggaacagtcagagcattaaatgctaatgatgtgcctcgaagttctgaatcgccaaaactcaaggcatgcaatttttcaaaaacgggttaatacgattgtactcctgtaatcatttaaaaagttctttttaatttaaaagtactttttaagaggcaattgtattacccgaaattcggctatatagtagaagctaacatgtgtcctatagaagaaatgtgaatcaactcagataatataataatgatgtatcattaaatgtaatttaaaataactcgtccctattaaatataagtttaatagataatgttcaaacttgtgatagcaacacacaaccgcctcacgttacacatagcgagaagatcacctcgcattattaataccaataaaggaatacaacgaagtaaattattttccaacacaacgattttttcctaataagatggataagaaggagaactcacatctgacaagatataaccttccaaatcaataataaccatcaagaggataagaataaagagcggttgggtagtttttagatattatctcttgtgtgattaaatgaaatgtggggattgtccacgtttcatgatcaattatatatgaaccaatcccaaaaagaataactgtcaacctatatttttataaatagggacagaatccatgaaaaaaagaacagc

SEQ ID NO: 33048 - DNA, 1352 bp, Cannabis sativa
aggtccacccccatttgcaaggaaagcctgattcatttcttttgatttccggaagcccaatccccctaaagatttagggaggcaaagtttgtcccaggctttcagataaagtccacggttacctttctcagaaccccaccagaaatcacgcaccaaaccatcaatcttagacgcgagccgattggataacttagtagcttgcatagcatacagcggaagagagagtcccacagacttgattagcgtagctcgtcccgctttcgaaagagttttagctttccaaccttgcagcttttcagagaggttgtccaggatgaagttaaaatctgcatctttctgacgagatctgaacaggggtagccctagatatttaacatttccttccggtgagccaattcccagcatatccttgattctctgcttcataccatcaggagtgttcttgctgaaaaatattgaagtcttcatttatttaccttttgtcccgaccaagaacagaatttctcaaggcaatcccagaaactcctagccttctctagattggctttaccgactaggataaggtcatcagcaaagaatatatgagatataataggacctcccctactcagtcttatcccattaatgattttcgacttttgggcgtcctccagaattctagacaaaatttccgcaacccaaataaataagtaaggggataatgggtcaccttggcggaggccccgagtaggagcgagattgccaacagatcccccattcaggcaaatattaagggaggtggtagaaatacactgagtaacccaattacggaactcaaggggaacaccaaaacaatccaacacatgatcaataaagccccaactcatcctgtcataggctttcatcaaatcaatcttgattgaaaacagaccttctctaccttttttccgattgaatgagtggacaatttcctgagctatcacgttattatcctgaatagcccttcctggcacaaaggccgcttgggtagggcatataagcttaggcagcagcggcttgatcctattcgcaatgattttagagatgaccttatacaccacattgcagagagagattggccgaaaatgatttggtctcttcggattctggactttaggaatcaagactatattcgtggcattgactcctttatgcattcgccctgtttggaagaagtctgaaactgcatcacagaagtcgaaaccaacagaatcccagtagtgtttgaagaaaagaactgacattccatcaggacccggagctttattactactcatggcaaacagggtagtccttatttcctcatgggagggcctttttataatctcagattg

SEQ ID NO: 33049 - DNA, 1894 bp, Cannabis sativa
aacttaataaacccatctgcttggtccaaaaattctgccatagaccccacagggccacatctttggatgtccttccaccgttctctgagtggctcaatgccccagtatggcggttagccttccctcctcggttaaccttgcaacctttgtagcctctatcatgaaactgattatgtaggctctgaagggttctcccgatatttattttaccttgactaggtcttctaggtgcgaggggagttgacgagaggaggagaactgtgcgtggaattctgaggagaaggctttccatgaattaaaccaccctggtgatagcttgaagtaccattgttaggcagcttctacaagtgtagcagggaaggctctacatcgcacatcacctcgtactccctgcagatccatttgcatctcaaaatatttaagttgtgataagggatcttctttccctgtgtacatcaaggtcagcatcttgaatttaaggggtaattcaagaacatcgatcttcggagtaaagggtaatccgggtgctcggtccagctcgagatcagtgagttttcggccggtcaggccttgtaccatattgttcagttgatccaactatgcttgcatagaaggatgaaccggttcaacctcttgaccaacctgtctcacatcaagatctcttggaattgggtcttggatgtggatacccggctaagcacctggttgaacctattgtttgtccagacctcttcttttgttcaggtcagccctgaggtcatgggccgcacccaatctattgaatacctacgtactaggtggtctcggtgtctgattggtttgaccggtgggttggtcagaactatctgtttggatgaagttattaggtataactccacatgaagagcgattaggtaggatctggctatctaccacttggcccacaggttggacctgtggctgggactggacggttgaccattatgagtctagacggtatgcccagtagcaaattctcctataccgcccagtgggatactagacgcggtagctgcgttgcagattagaaaacttgtaggccctccatatcagtatggtagcctaccttgtgcggtcatcgatggctgcttgctaagccttcaatgtttccatctccctgtccctccactcaatgagttggtgtcgctgctcatcgaacacagggtttatagaagcatagagatcctcctgatcatgatgcaaggcgttattatggacttgcatgagtccaaggacaacacggaggtcttagatctcagtatcatcccccaccgcctctagcattggtggtggacgggactctagtattgggagttgtttggtcagctacagaactggtattcccaatctcttgcacacctggtgtgatcccaaccaaaggggaagtcacaccatggcccacagtaggtggctgtgtgttggcctgctcgggatcgatccttggtggtaccctcgtgttcccatgggtttgtacagcagaatctatcaccattgggtcaccctgatcgacaaggcctctgtgagtttgcaccatcattctctatgcctgttaagacttaagacaaagaacaaacttgggtttttgctctcaatgaaagcaccaaaatgttgacctcacttttagtcaacgatagtgagtcaatcattaagccattaagaatacaataaaaataaaacaaaaaccaataaatgataaagaacactagattttgaagaggttcggccctatagtacagtaatagcctactccccacagattgtatccactagagaacaagaacacagtgtttctctctctaagctcttgaaatctctgagtatttctcttagatctctctctaaagcaattctttcgatcccttttacagtgacacta

SEQ ID NO: 33050 - DNA, 3063 bp, Cannabis sativa
cttattgatcatagcgtaatagctaaaaaaggggttacgccatctgtcatgtcgtttatggtgatttcaatacgtcttcccccatacggcattaaatgcaaggtgatcgttcaattccagtacctcccagaactgccttagtatgtccctggcctccgggagcataaagatccttcttatgtctcctctgggagacaccttcccaaagacgctcctcttttgtctaagacttagttgatttctataagagctggtcctctcagctccacgtgtcatccttatccaggtccacgtattttgagcaaaattaaggccaacatttacccccaagcctcgtttggtggagaataaacgaggcttgtttggtgcctccggttggctcatcagtttagtggcacgtgcttcaagcacgtgggctgcatttataatagtcatcattaacatttatttctttttgcaggcagcgattcgcttcccgtccattaattatctggcgtatttaatcggtgtgtcagaaaggtactcaagcatttttaaccgcctgatgagcatttatcataaccattggatatgcagaatgcgaatcgattatgattcccaccatacgatggcgcctggtcatagttgccttgcaccctttctggtatataaaagccagcctttctgcttcactgggttactttcaccactttgccatttcacctcaaaaacacttttgagagaaaattccagaaaccatagattttttactgttattcctccgtcgctgtcaattcgcgttctaccgtcgatcaacaccaacccccagttctcaacctttgtgtaacttttttgggtactttatgtttttattgttcatttgcatgctagggtagaacttttggttaagtgcttgatttctgggaaatggctttggcgaagactgttgtaaggtgtatataccctctcttatttgtgttttgttacttatctttcttctattttgcaatcgaccctttgtcgaaagattgcttaggatatgggacagttttcgttccccgttctgtgtcttttatttttcctctgctttcgctgcttttgagatacttgcacccgatgtttacctaagagaatccttggaatttccatctttggcaaacatcaggagggggcctctttccagcggtcaggggacccccgttccctcttttaacattagggtttggtttgggggctaactgctggattttctttttacagaatctcaacaccttctggaaatgtctacccctatgtccggagccaaatcttcctgcaagggggcggttactctagccaccctagaagaagtgatgaagggccctgtcatctaggagaaatacacgtgtcgatccaacggttgggaggaggatcagcttcgctcaaccttgacttgtgcccatcagttggagaagatcgtgatcgtggctggtatcaagccgtccgcttctggagtgtttcaccgcctgcctcgagacgaagagacgcccaaccacaactatggtggttttggggcttggagccagacccaccttatgtccggagccatgcttccacttcagggttacctcataaattttttagtttttgttggccttgcgccttaccaactcattccccaagcataccgcctgcattgaggcttgtttatttttcatgtagcccgaggttgggcttcacctagcccggctgaaatcttgtatttttatgaacttgtgtctgtccccaagaagggggataaacttaaagacggttttttcacactctgggcccatcccgctaatgaaggtccggtcccttataattttcaaaagaatgtcaaggagtaccgtcaccgatttttcttttcttccggtttccaagccgtagagcgccctgaactactcacggagtaggtcagggttcctccgatgcaccgcaccgctcctacccaactcttccttcagcacgccaaggtcttttccacatacgacaaggacagtcttaatgtgcgggacttagtcacaacggtgcactgcaggaaggctaagctcatcacggagagccaatcggtggacgacttcaacctatccaaggttctttaccccaacattcgcactcgggatgctgaaaaggcactctgggcggacattatcgcctcagcagaggagggaacaggagttagcttacattaaggctcaagccgctgccgggagggctctcttggtagaggctggtaaagagcaggtgccttctcggcctaagctactgctcccggttcccaacattggggctcctgacgccagaacttccggatccggtaagtctcccttagttgttcatcatgtcccttctgctcaagattattctcgaagtaggcctatagaatttgacggacgtctccttatatttagaatgccccctacccgatggggtgatcatgccaagggcttttatttttccaacttaggtcattttctaggccggtcccagatggggttcggtcctcccgcacctatccttctggatcattcagcctatttgtcctccaactggtttctcccatcagacagctttcttggggatgacgaagctagtattatagtgcaggactttgctagggtcgaattagattttctgggtaggattagttttacttctttgttcttgtgtgcataatttcccgtgaccgttctgacacttatttgtttgtttcttgaagcagctaggccaattgacgagcttttggcaactcttgcccagatctacagtcccgacccaaccttgcccagtcaccaaccagacggtgactcctgggaggtcttcttcgagcattcccttaggccaaatcttcttgatcaacgaggacggggaggttgaagaggaagaagagggcgagattcttacccctctggaccggaagcgcaagggcaaggtggtggaggtcgaggctaccaagaagctgaggagggtagatactccgactcccagctctgatttagggatcctgctcgaggcggatgagtacactgtgcctcccggtatagtcctgactcccgttcctgc

SEQ ID NO: 33051 - DNA, 1967 bp, Cannabis sativa
  modified_base (221)..(224): a, c, t, g, unknown or other
  modified_base (306)..(311): a, c, t, g, unknown or other
  modified_base (840)..(840): a, c, t, g, unknown or other
acaaaaatgcgttctgtaaccacttttgttttttaactttaaaaacaaaaaaaaaataaaagtttgttttgtagaatttatttttatttttattttttgattttatttatgtcgggtctaggttcggggtcgaattcgggttcatgtccgaggtcgggttcagcgccagggccgtgggggattttggttcgggtctaatcgaagtccaaaatattgattannnnaaaaaaattgtttaaaaaatattgaaagtgacctttttggtttttaaaattttgatttttaattaaaaaattaaaaagtaannnnnnttttatagaacatgtttttgaataatattttcactttttcaattttaaaaacacaaaactgattaaaaaattgttaccaaacgttacctaaatttttgtaaaatattttaaataatagagtaaattagtatgggtgtgcacaaatcgatcaaatccaatgataactgaccgccacacattggatatccaattgtgatcggatcggattggatgttatttttatatatccaattagatcggatcggatgttagatgtggtgtccaaaaattcaatacatttaacatttaatcgaattaattagtattttcatttagtttggatgaataatgaaattttatattattatacataaaatatatatgcaaatataaaaattaaaattaatgttttacctttgtttattggattggattgatccattcaattcaatactatctgaacctaaaatattagatagataaacctaaattaaacaaataaatatatttgaaatacatccattagatagaaccgatccaatctaatatncaatagatgttggattgattggatgactgaaattaattggatcagatcggatttggataaactaaaaatattagtgtgatctaatgaacattcttactgatgagaatgctcttaatcaacaataagtcctacttgttaagattgacttgccaaatgacaacctttttttatccttttattttaatcaacatgagtttgtggaagattaatattaattaatactattcttatagagttctgtgagcttggtactgggaagaaatctgaatatgatgaggaggaagaggaccacgttagtgttgaacttggttatagagttgtacaagagctagccaacacatcaacttttgaaaagcaatttcaggatgaagccatagactctatgaagttagaagtacagaaattaaatcaaaaagcccaacagatattacaacatttttcagcaaacaattaattcttggcttggtaatgttatttggtcagagtcttacctgaatttgctggtgtgtttgaatactaatcgtgaccgtagcctactttacaatgttgtcgcggctacctgtgcagtatcagtttacttaatttggtgaaaccgaaatatttgtatctttgaacaaaaaaatgtttgtagtctcttatatgaataatttaattagagtggtgtttagagtgagattacttcttattaataggagaaaacttttaaaagaaattaacaaatttttgattttgtttgtaattttaagtgagtccgtctcttgttggattgtgaatactaatttgtgtagcatttactctgattattaaaagtctcttttaataaaaaaataattgatcattaatagtcattcaattcatttatttgtcaagactaacactactagttgtttcgtacaataattaagtatttggccttcttttatatttcgtgtcacacgtgttgacttattttttgactcgtatcgaattttctcaatcctaatccaacctgtaaaaaattgtatcgtgttactgttcgtgtcgatccaccataacccattttactattattaaagttggagttataaagaaaaattataaatttaaattctattaaaaaacttatatatatttatatgttatataat

SEQ ID NO: 33052 - DNA, 3309 bp, Cannabis sativa
aatcacgtaatacgcctaaaatagttagggtgttacaagactgtattgtaaggaccccataaatcacaatgaactaactcaaaaattcgagaagccttattatcactcataggaaatgaatccctagtttgtttggcacgtggacacacatcacatggcttatttaatttatctctagagttacgaaaaaaaggcaatgattttactactttctctgaaggatgcccgagtcgttgatgccaaagctccaatgaagcatgagatccagtcgttgtaatagcttgcactctgggcagttgcttgtagtagtaaagtccatctctccgttcacccgctccaatcagcttcctcgaaggtaggtcctgtataacacacatattagaggcaaaatggacagagcaattcatgtcgtcaataagttgtgtaacagaaatcaagttgcaatgtaaattaggcacataaagaacattgttcagagaaaaatcttctgatagcgtcacacttccttctttggtagcaacaatgttttttccatcgggaagtccaacgggacatgcaacaatattcttaatgtcaaataagtatgatatatctcccgtcacatgattagaagccccagtgtcaataatccaataatttttagagaactcaccgttcaaacgattgctagaatattgaacattaccaaacatggtagcaatggtttgccattgttccttactcatattaggaagagatacgggagtgtttgaagaagtggtagacgaagtgggctgctcaaccacagaactgaccatgcctgagttgctgccatctatcgttacggcgcgaacagtggcacctctgcctcgcccagcagctgttggatcagaactccgaccaccattacctttgccacgagcaaacggtgcaccttgagtgcaaggtctatccccccaccaatctggataaccaagaagctgaaaacaatttgcaatatcatggccagaacgatgacagtgagagcacatgagcccagacttatcaactttctctggtttcccttttcctcgtccctccgggcgcacagaaaaacccacaacctctggtggagattctttgttgcgagtaatcccacggacttgttcttcttgcgtaacttgttgataaacacgatcaagtaaaggtaaaggctcttgagataatatagtagagcgtagttgggcataatattctgaatttaaacccattaaaaattgatgaagacgctcattgtcacgacgtttctcatgagccttacccaaattgcaagtacacttcccacacgtacacgcaagaataggttcatgattagctaaatcatcccataaaactttaagctttccaaaatatgtggcaacagacatagttttagactggtcagacttcacaatatcagtttttaattgttgtatttttggaccattagtaacagaaaaacgagccttcaattcatcccacaagagtttagcatcatcataaaaggagatagtagacttaacctctgaatcaatagtatgcatcagccatgagacaagcatcgagtgaatagtgaaccaatcttcttgtgtgaagggtggcgtgggttccataatcgtgccgttgacaaagccaaattttcgacgagaacgaagagcgagacgcacagattttgcccattcatcataattattatttcgaagccgaacatgggtaatcaagtctccaggtctatcctgcgatccaagaaaaaaaggtgatgtatggtcatttctggaaagttgattaggtggtgtagcatcttcttcaccaggcatgatggtgatcaattgtgtatcttagccgtgtggctgtctgataccatgaaagaatagtaattgggttgcccttgtattgatctgaccatatgatatatacaaaaagaatagaagacattacctccattcctaaacttacgcctaaacttacgccctctttaatagcaagcctaaacacaagccttaatatcagaatattaaatatgagatatatattcctaaaatacatgatatgagaatatatgaaaatatatgagaatatcccaataccccctctcaagttggagcatgtggatcaagaatgcccaacttggagagaagaaactcaaattgtcttgtacccaaaggcttggtaaaaatatcggccaactgaactgaagtaggaatataagaaggaagaatggtaccatcctggacagcatcacgaataaaatgacaatctacttcaatgtgctttgttcgttcatggaaaacgggattttgagcaatatgtaaagccgattgactgtcgcaatatagaccaatagcagcagtatgttgaatacccaaactaagaagaagacccttcaaccattttaactcacatgtaagagaagccatagagcggtattcggcctccgcagaagaacgggccactgtgtgttgcttcttggttttccaagagatcggagaatgtccaagaaacacaagccaaccagtgagagaacgacgagtaagaggacatgctgcccaatctgaatcacaccatcctgatagagaaagagagctgtcagttcgtaatatgatgccttgtccaggagagcctttcaaatagcgaaccactcgcaaagctgcctcccaatgttcttgccttggttcttgcaaaaattgtgatagaatatgaacagagtatgccaaatcaggacgagtgactgacaagtaaattagacgaccaatcaagcgcctataagactctgggaaagacaaaggatccccagaagcattagcaagacgatgattttgttcaatcggaaaggacacaggcttggcccccaaaagaccagtctcagcgatgatgtcaagagaatattttctttgacaaagaaaaatacccttaggactacgcgctacctcaataccgagaaaatatttaaggaccccaagatccttcatatgaaaacaagtgctcaaataagtcttaaaaagtgataaagcagcggaatcatttccagaaataataagatcgtcaacatacaccaaaacattaatttgaatggcatccttagccaaagtgaacagagaataatcagcacatgactgtgagaatccatactctttcaaagcagtgacaagcttggcaaaccaacatcgaggtgcctgcttcaaaccatacaaagattttcgaagacgacacaccatattaggagtggatgactgaaaaccaggaggaagtttcatataaacttcctcatcaagatccccgtgcaaaaaagcattatgcacatccatctgatgc

SEQ ID NO: 33053 - DNA, 1214 bp, Cannabis sativa
  modified_base (586)..(602): a, c, t, g, unknown or other
tatcatattttttttcggtaaaatatatttttcctccataaatttttattaaagtaatgctattagtccaatgtatacttttttttcttagagactaatctctaataaataatatttttagttgtaatttatttgagttttaatactcgctcactaaagtatcattgattgattattttttaagaggatagggatgcgtaatttatattattaatgtaattaataaattattaaaattaaataaaataaatttattataacattgaattgcaactcaatgaaaaataaggttaatataatgtaagcccaagaactcaatctcatcatgtattattgctggtctaatagacttagtaactccttgattttattttcaattttcttgtaaagtcctttatttttttttttatagtgaaatgacagctaattaaatataaagaatcttaacggagactctttatttacccaaaattaagttacgcctgtaatagttccactatttttcttcttgttgtgtttgcctcaatgaataatttttttcattcaaaatgtagaagttattaaatgttaataataataataatannnnnnnnnnnnnnnnnaataataataataatatattttgaaagaagtaatcacatcaatttactttgtgatattaattatattttctcccttaagttattgttactgtgttgatattcaaaattctgctcaacaagttgatcaagtaatcaaattaagcagtcattgaactctagttttgaaaaacatggttacttaccaaatattacctatgttgagtcaaatgtcaaaacaatgaccatagaaaaaaaattcacattggtatgtcaagagaaagaaaaaaaaaaggaaagacaatcaataatcatacaaagaaagaaatccataccataattgttgaagtaatagtcacgtccttctcctattttgatatattccatggtaagagcatacctttcatagtacaaaacttgtggtatagatcctttcccacaaaacaactatcacttcaaatctttttctaataaaaaacaacatgaattactttactgtaaaaatagagctttgaatcaaaaacataactcagagttaattaatcaaataaaattgttaaataaaacaaactatataaatctcttatcctattaataatagctaagtcatatcacactttgtatatataaatatat

SEQ ID NO: 33054 - DNA, 1631 bp, Cannabis sativa
ttgataattgaataaaaaagattacaatgaaatagaatttcatttagggcacaaagcccaacataaatcgacttatatatgggcacgtgtttggtcggtttaagtagaaccgtcctcttatgagtgacttctcatgtcaatattgtagtagtgactaaattactaacttgtaacaagtcctaattctatcaaaatttcgacaacataacaattataattgaacattttcaacaaaaattaaagctattaataataataaaaaataatataatataatataatcaaaacaatatttagcaatacgaaatttgtcaccggtctgactgcagtacaggttttcacagaacctacttcactatagatgaatatttaagatattaaaactcatctaacatgcatattattccacccatccgaccgtagtacaatatgttaaaaacctacttcactacggataaatatttgagaaattcaaactctttgaagaattcataatttatcaataacaaaagttaatgaatgtatacctttagccagtgttgtaagttcgcgcgtgtcatgctggcctgacctgtatgtatctgtgcttttcaaaaataggtcgtgtcgtgctgtgacacagaaaaatataggtcgtgtcgtgtcttgccaatatttttaaaaggtcagtccagcacagtctataggcccgatattttcgtaccatgctttgctcgtgccagcttgtatttcttatataggccagcccatttttatatccaagcttaaattcgtgctttactttttcatattttttttttacaattactaaattatatgtatattacaaagctttagttatatttatataatttttgaacaatactttacagataatcatataagaaaattattaacatcattaaaatttaaacatttacttataaatattcaaaattttatatcaaactcaataaataaattaatatataaatttttcatattttagtagttttaattatacaactataacattcagtattatatttaaattttattattattttaacttatttataattgattttgggcattttgggcttgttgtgtgttgcgtttttcgggctaatctatttgtgcttacgtatcgtgcctttcatgcttctcgtgtcgtatcatgcttaaggacctattttttgtgcggtgttgtgccaatttgtaatattgtgtcgtgtcatgcccaagcccgtattattttgtgcttagtatcgtgccctccgggcttgtgctggtttcgtgtcatgttgaaaagctcaacccatatttatagcaatacctctagctagctagaaactgatcaacaccaaataagtgaaatccttgtaaattggcctcacaacctacaatataaagaaatgctataaaattaaaattgtaattacttaacgacttacaagttatatgatttattattacctaattactaaccagttaataatgagtagctatttaataataaaaatacatgaataggaatgaaaattagtaactaattaagtagttgtaactaactatttgctagctactaaaaaaaacatgaataaaatcgaaaataaaaaaaaaatgataaaaatataattaatttctaaact

SEQ ID NO: 33055 - DNA, 1306 bp, Cannabis sativa
tgtgggacccaacttttcaaccaatatatatgcatgtctctatggctccataaaaaaccgcatgcttatgtggttggttaaattagattaggaagctttaaatgaagctaccttcgaaattcgaaaatatatttttcaagaaaggagaaataaaataaagttattccaccgaccttatcaagcattgtccaattgtattgaaactctttccctcttgcatgttcactttgtccacattatacttggctttactacttcttaatggctgacaatgcctaaggtgaatggttatcatatttagctaccaaattctgtattggtagtcttttttagggagaatcttcataactaatagtgacagaacggtaataaatagatgcacactatatgggaaaagatacataaattaacatacacatatacataccctcaaactatttaagtttcctaattaagctaaaccacgtaagtaactaatataattctgcaagtaataagtataaccagctggtgctaatgttaatgaagctttttaaatcacgggttgatataattaaagcattctgtgagttagtgtcattgtgcattggatgtatgatgagaataaaagttgtgttgctgcctcatatataatatatattatgataattgataaagttattttaattgaagcattagcatgccctagctcgttattacaggtcatgaccacttgataataaagtgagtacataaaaaaataaagacaagaaagaaaattgtgaattttcttttcatattctgttgaccaataatacattttcatgaagccctcagaaaacgacaacatatcaacttgtctctctcttttcctataaatatgtctataaggcacttgttcagcactacaaatttcaggccttcctcatcactcttcatcgtcatcttttttcctttctctggaattattaaccttagctacaagagccttcttttgagtttgattcctcgtcaaaaaaccagccatggaaaacaagttcaagaaatcacaagtcctagtgctttcactcctagcaattcttcttgtcatagcacctcttctatcttcatcactaaggcctacttacctctacttcatcaccaatctccttataattgttctaggagccgaggccggccttctctcattaatattttccaagcctttagaggaaaacaacaacaaaatcaagaacactacgtatgttgttcctcctactcctcctcatcatcaaaagccagctggaataataatagcctcatcatcagaagaagcctctcctctcaa

SEQ ID NO: 33056 - DNA, 1477 bp, Cannabis sativa
tgggcttagggtccaatgtgatatgggccactttgctatcactactcccctcctcaaaatggaccttgtcctcaaggtcgaacaggtcgtataacttgcaaaacggagcaaagtcttcccaagtagcgtcttcgatgggactatgtgaccactggacaagcacttgaggaatggtcttctgaccccgctgaatcaaacggctagaaacaatagcaaccggtaagaccaatggttggtggcctcgttgtagctccggtaagggaaaatggtgtgcagtagcagtcccgataaagggcttgagtagggagacatgaaaagtggggtgaatgcggctggtagaaggaagttccaaggtataagctactggccccacacgtgcaacgaccggaaagggaccaaaatagcggcggcataacttcgcattcaggcggtgcgccaccgtggactgtcggtatggttgcaacttaacgagtacgagatcaccaatattgaattcaatgtgacgtctttttttgttggcctgctgacacatgcggtgttgagctcgctgtaagttctccttgaggcgagttaacaaagcgtcacgagatagcagttcatcttcaacagcctggagtgatgtagcaccgcgagtatacatgggaatagagggtggaggtctgccatagacggcctgaaatggtgtcataccaatggcggagtgatggctggtattatagtgatactcagcccatttcaagaactggctccatttgtgggggtattccgaagtaaaggcacgcaagtactgttccaagtaacgattggtcacctcggattggccgtcggtttggggatgaaacgaagtgctcatgcgaaggcgagtacccatgaacttgaacaactgccgccagaattgactagtgaaaatagggtcacggtcggatacaatagagcgtggcaacccatgtaagcgaatcaccatggacgaaaaaagatcagctactttggttgctgtataatgggtgggtaaggcgccgaaatgtccatatttcgtgaatcgatccacaaccactaaaatcgatgtatacccttgggaactcgggagacccacaataaaatccatggccaagtcctcccaaactcgctcaggtaattccaatggttgaagcaagccatatggagctgcggtagtgtgtttaattgtctggcagattgtacaggcagcaacaaaagcttgaacatcctttctcattccaacccaaaaaaaatttgcactcaaccgcaataaagtccgttccacccctgcgtgtcccccaatcggcgatgcatgaaactcggacatcaatggcagcttgagagaagaagaatcactaagaaagtatctgtttcggtgaagaagtagcccatctcgattagtgtagagtgagtctgaaagttggccacttcgtaacttctcatgtaaagtaaccaggtctgtacacagagagttttcacg

SEQ ID NO: 33057 - DNA, 1281 bp, Cannabis sativa
  modified_base (509)..(514): a, c, t, g, unknown or other
taaaaattacataattcaaatataatacacctaaagtttaataaaatctctgaaattgagaaattactctaatgctcaattctgataatgggacccataattaaataaattcacaaatggctattaaaatatcaataattagtgttaattgcctttactaatccatattataaatgcggtcattacatgttaagtacaatacatttttgaaaacgttatatgtatttattatatgttcaatttttttaattaggtaatgtatttttatttatttttttatttttgaaataaggtttaaaattttaatctttgagaattgtttttagctattatggctacattattgtactctttactctttagatgtgattatatatatatatatacgtattttatatatacaataaaagaatgaattttattactatacgtactttatacgtattttatattaatctctctatatgtaaaaattatatatattagaaaatattttgacaaaatttgannnnnnttagagtattaattactttcaaaatacattttatatattatgcctaaatatatattttaaaaaaataatgatagtgatagatataatattttaatttgtaattagaattgtgtggttataataattataaagtatacaaattactatatatagatgtcatttttatttttaaatatacataattaaattaatttttttatctaaaatatctacataatttttattttaaaatatatttaataatattataaaattaataaggaatattctgttaattaattgggatattctgttaaagttaacgtagaaaataataaaaaaactttgttaaagtaaaaattctgttacatagtcacattttatatagaataaatattgcttctctactatatgtatacatgtatactatataaactttttatatatactatatttctctactatatattatctatattatatatattttctgtatctaatatatattctattaatatatatttatgtacgtttatatatatatatacttttatattattttacatcaatatatattttgagttttgagttgtaactcttatttttttatttgtatttttgctttgagattgtaacttttatttaacttaattcttgtaaaattttacttaaaagttgtcttggtcttttaatcacctgattttattttttttattgtaatctctcgtatatttataacaatagtattttataaataattaataatattttataatatatttttttaa

SEQ ID NO: 33058 - DNA, 2102 bp, Cannabis sativa
  modified_base (27)..(32): a, c, t, g, unknown or other
aaaatagattacattgaaatggagttnnnnnnagggcataaaacctaacatatattcccaataataaacccttgagcttaattggcttctaacaaagtcttcaaggatgagagatcgaggtcgaattgcagaatggtgaagactgaagaatagtgaagaagaatcgatttgaaaaagataattagggttaaagaaaagaataatgtataattgatttgaaaagtttctgttcaaaaaaaaaaaattgatttaaaaaagttagtggaatcggaaatttaaaaaagaaaaagtataattgtaaaaaagatagtaaatataattatcctaagatattttataaaaatatctattacgtttgaattttatatccatcgagttataattttaaattttagaatataatttgtgatgatatcttttttttcgttatttatttttctaagggtttgaatttaaattataaaatattattttttattttaaaaaataatcatttgaaatttttttatatatatatatatatatattggtttcaactaaattaagctagctactacgtacaatgcatattccaaacctagcttgcaccgaagtctttgagctgatcattgtgaacaactaattaacttttgttaatttgtttcctaatactcaatacatgttttctttttttcctttttacttctttttcttgtatatatatacacatgtatatatgtacgtatgggtttgcatatatattgacatatattatgtttttgtcatcagtgttacaactactatttcaataacaatggtgttgaataatcttccacctcgagttagattttgccctaatgatgaagaaatagttggattttatgtatataacaagggttatttgcggcgtaacctctttaagtggttaggcttttgcaactaacccctaattctaaaatttttgtggtaaaaccccctaaactcgtgttctgttagcagtttaacatttttatccatttttagctgttaactgccatggtggaatgtctacgtgtgcacaatgtacacgtggcacaattttattggtcaatgtaataaatatttaaaattataataaaattaattattttaaaaataattttttttttaaaaaaaaaacctaaattccgtaattccctctttttctttcgccctccttcttcttcctctatcttcatttgcaacaccaccaccacccatggcaactcactacaagctctacattttccagaatgaaaaagcctacaatctctgtaatttcactcaaaccacgcttctaagcaaacccaatgccacttttcacacggtattttactctttctttctttcagacaaaataacaaacaccttatatgcattatttaacttctcttaatcacttcaataaatgacctcaaactatggattcccaacatgggtttttctcataaatgcataaattcaaatagccataatctaattttctgatttctaacataaaaattaaacttttatcttaccctaaaaatatacagtggtacccatcttgctctggtttcttatacttcactttcaacaatagctctctcagtagtacctgccaaggctccaaaaagctcgccgtgaaagtgacttcttcaccagaaagagacagatctaaggagaggggtgcagagagactgattcggggtttttgggtcttcgttgagttcatgtggtggtggtgctgggttgagatggtggtattgggttacgatggtggtgagttgccatgggtggtggtggtggtcatgtctacaaatgaagatagaggaagaagaagaagaagaagaaggagggcaaaagagaaagagggaactagggaatttaggttttttttaaaaaattttatttttttaaattgtttttttaattttaatttttttaaaaaaagatttttttaaatatttattatgtggaccaataaaattgtgccacgtgtacactgtgtacgcgtagacattctactatgacagttaacagctaaaaatagatggaaatgttaaactgctaacagaacacgagtttagagggttttattataaaaattttagaattgggggtta

SEQ ID NO: 33059 - DNA, 1703 bp, Cannabis sativa
caagacctgggacacgaacttgaataagactgggatccaagaccgagatctgaatttgaacctgaggctttgacctgacccgtaatcagtctttatatacaagacacagacctagattcgtacccagacctagaatcgaatcgtataaagactcgatcttggacccacaatcagaatctcagaatcgaaccaggattggaacaagaacacaagaacccagacaaacctaaacccaaactcaaccagaacccataccgcgacaaggacgcgggtttggatcaagtctcaagttccagtctcggtttgggtatagggcgaggttcgagtttggttctaggtctggcaatgggtccttgtcacggtcctagtcttttttgagggtcctggtcatgcggttcttgttcaggtttcagtttttggtcccgggtcagggtcagggtccaggtttggatcttggtctggtctgggttggagtcctgctctgagtctcagatctcgatccctgtcacatgtcccggtctagttctggttcaggtcttgagtctcaggtccaagtttggattcgagactgagatttgggtgtgattataggtcccggtcccaattttgtgtcccaagtttggttacatgtttgggtctgagtttgggtgagagtttggatctcgagtcaaggtctaggtagggatccgagtctgggtcctagttcgggtctaggtcttggttggagtttgggtcctgctctacttccattttcggttccaatttccggtcacagggtacgggttcaggtctatgtttaggtgtgggactgggttcgactccaggtcttggttcggttcctggtctgggtcgggtctggggctggtcccaaatctagacaccgactacgggttcattccaagccccaagcccagattcagatctcgatctcgggtctcggtctggttccattttgagtaccgggtcacgagctgggtcctaggttcaagtcaaggtctgggtcgggtcttgggtctcggtcctagttccgctacccaagtccctatcctgattctaagtctaggtcccgtctggtcttgttttaggtcccgatctaggttcgggtttgggtcctagtcacggttcgggtttcagtcttggtctgcgtttttatttaggtttgggtcttggtcctggtcctagtcctagtcctggtccggttctagttccagttacgattccgagttcaagtttgggttttagtttgagtcggggttctgggtcccagtctatttccacttcgggtcctaggtctcggtacgggtcttaggtcagggtcagggttcaggtccggggccaggtcttcggtctcggtcctaatttttttgtctgtgtcccgagtccaattcccccatccaattccgagtcttgggtttcggtccgagtctacgacatggtcggggttcaactcctggtccaagtttgggtttgggttttgatctcggtatgggtcctaatctgggttcgagtcttggtcatgtttcgggtccgagtcttgagttctgatatgcgtctgggtttgaggcccaagtctaggtccctaattcggttctggctcctagatcccggtctgggtctatgtcttggtttgggtccttttgccaatttcgattttgattcagtgtctgggtttgggtttaggtccgggtcttgtttggggtctg

SEQ ID NO: 33060 - DNA, 2310 bp, Cannabis sativa
atgagattccaagtcacaagtatgagtttgactaatctctagatttaattacatatatatatattgtgtttaatcccctttctctttccattcactagctctcttttgtttttgtgcatgtgtgagcttcttctccttcttcttcaaggatcacaacccctggatcttgaagaattttccctcaaccttaaccttaatcagagtttgcagcaggtatatatatctgtagcttaggtttctgatttctttagtagttagttacagaaactagttaggtgtggattgatgacctatcataatccattctaactaatttttattagggattaagatgtacaaggccgaaggccacaatagtaatttgcatgtgtagttttccttgtaaacacttgatgaacagatatcagtgtaagtagaggtttattcaacaatttctacctaaaccttcactgagttgatatcacggtagtcaagacaaatctgagggtctttgctctgtgatcttaaaatcacattatccttggtccaaccctattaagtttagacaatgtctaatcttagatagggtgattaactttgtctccatgtctgcaggattctcttctataggcactttatcaatattgatgtgtccttatgtcacattatcccaaataaagtgatactttatttcaatatgtttagttctgtcatggaacataggattcttacataggtgcacacagctcaggctgttagagtaaattacaggtgtattgtttagcaaccttagttattttaggaccccctttacccagatactttcttttatggcttttgtagttgcaatatactcagactcagttttggatagtgccacaactggttataattgcactttccaactcacacaatttcctcccattagaagtatgtaggcagatgtggattttttgttgtccttgtcccaagcatagtctgcatcactaaaacattatgtagttgtctttccttgttgctgctgtatttaagtcctagtttagttgtcccaattaggtacctcagcaaccatttcataacaagccaatgtgtctttccagggtttgccacatatctgctaagtacactaatggcataagcaaggtcaggtgttgtgctgaccataggtacataacagatcctatggcattagcatagggtatcttactcacctcttccttctcagctttggtttcaggacattgtttcttagataatgtgtactgagtagtgataggctgactagcaattttagaacccttcattgagaatttctcaattattttgtgtatgtaatctacatccaaaaggttggttatgtgatagctaatgtggagattaacatgtggccgagaccttgggtcccagagaaatcaatagaggaagttaagtctagcttccactataataggattcacgctttcaataagtagcttgcatgtttgttgatggtaccaaaacttggaatgagtctctcatcagagcttattttgatgatgatgttgcggagtctattcttcgtatcaaccctttaccaaatgggagtgacatcttattctggaaggctactaaaattggatttttctcagtcaaaagttcctattggagtagccaagctaaacagtttcgaaccccaaattctatgtggacaactctctggaaacaaaaggctcactttagatatgcgtttcttatgtggcgtattctgtctgaatgcatgcctactcagagtcaattgggtttttattctttagctgataagcttcgtgtcttctgtaattctaaggtagagttaactctacacattttttgtaagtatagtatcacccatgggatttggtttaaaagcaagtgggggctgcacatgaatactttaaactggatagatactatggcatttggaaaatggtggattgatttaaaggatgaagacatcaagttgtttgcaatctgcatttgtgatgttctatgattttggagaaatgacattgtacataactacaagatctgggacttcttagctgtttttaatgattgcatgaggagatttgctaaattttcagcagttacatctcctactgaagcttctgtcccttctactcttgtgctctctggttcagaacctgtgtggtattatttagttactgatttggattctcgtgaagtgtttcaagtagatgcctctattgtggatgaagatgcaggtcttgctgttgtgcaagggggttgctcgaacatgggagaggctaggatagctttggactttttaattgtttgtaatgtcttagaagc

SEQ ID NO: 33061 - DNA, 1193 bp, Cannabis sativa
  modified_base (381)..(383): a, c, t, g, unknown or other
  modified_base (466)..(473): a, c, t, g, unknown or other
tcactataatcaagtttctgtcgagacatctccaggttcaacagttaaagatgtgtttaatacacgatagttttgacccagtaaaagcggaaaaatcatagctttatgattttctgatcataaactgcatttacactacataatatgtaataaaatcccacaattttagggatcattgctgtaaaattattttggtcaaactatgtaattataaatagtggtagacaagctcaaaaaagggacaaaaaaatcttatacaagagaggtcctaaagagaaaacacaatcagacatctgaataagattgacttgtcgactatgcagaattttaacggcaaaaccacgtaaaaaatcctgtgtttatatattatttttctatagnnnttattttttctgtgtgaaattattacggtgaggctcaaatttggttaacgaaaatctgcattaacaatttggtgctttcattnnnnnnnnctgtgaaaaagctcagaaaaaaccatcccttctttcaaagaaaaacaacctcctacatggctgaaaatccagaaaatgttaacaccccacatgaggaagccaaccatcgttttggaaaagagcccatgggctctagaagatctaccaatccgtagtccagaaggaccacccgttccaagagggctcaacctgagggttgccccagtgcgcggagagaactcaactcgacgttggtcccagtatgcggacaacacgattgaggggaactcagcgtaggaatggtcagattctcgggacgagggatgtagagctcaatcgtggaggtgcccaagctatgagaggaagaacttatgaaatagaaagtcgccgcctaagacgccgtctggaagaggcacagcataggaacactgagttagaacatgaggcagcctcgaccagagtagcacaggggatgagtgctcaaaatcaacatgaacctggagtgagaaaaccacgaggcagacctcgtggctcacgaactaggagacaggaaaaggcccaggaagaacaacctggggaaaatgagacaccccctgagaattaggatgaacagccagatgggagacaaccagaagctgatgaaagagaaaaccctcatgaaaatgaggaggatcttgggactcaaccgggagaacgaagatcaccggctagaaatcacaaccgttcttcccaaacccatag

SEQ ID NO: 33062 - DNA, 2058 bp, Cannabis sativa
aacaaatatttagatttaattaaatatcctataaagaatagttgtaaccacttaatttgaaagaattcatggtgactacgaaagaattcaaggaagctttatggcttcgacgagttctttatgagttaaaacaaatcaaaggaggagtgactgtgcattcggatagccaatcttccatccacttttataaaaatccagtttagaaaagagcaaacatatagatatattagactctattggattagagagaagatagaagaaggactggttgatttagagaaggttagaatagaagataatcttcctgatgttgggactaaggtcttaaccttaaataagttcaagcattgtttgagcttcatcaatctcagaagttagtatattgagattcttagaacaccaacaaatgatggctgcattctttcttcatcatcttcattcttttaatttgaagtaagtaggtggaatttgtggtatagttcctccaaatgaaaaggtcttcgcaaacgtcatttttagaaaattgtttactcagggtttctagtccaacaaggagtcttttggaatgatagtcaggtccgaaagagagttcccagacgactagtcttcaagaaaactagcctcactttgggatggaattctggttggccagttgtccctcttgaaatggtagttttggatagtcgactccaggaggctctatcctatccaaaagcatcttcagcaagtgtccttggtctatgagtccagaagctcatatatgttctcgaaggccctgattgtttagttgacatggagacttcactcaaagaggagttggttaagttagttatttctaattaacttaacaacttcgattgtcgcagccactgactttaggatcttaatccgaagcttgtaaataccaccttgacttgttattttgagagataagtttaagaactcaaagagatgacattgagagtttaagagaggaaatattgagaagtagagagagaggcgtagagagaagagagagattggatttgggttttgtaagaagaatcttctgtagatgaagaagattcttaggtataagtgcgagagttgaaacacttagtgaggactcaaaagagaatcttgcctcgattgtattgtacctattcttgctcaatcaataaagaaggattacggtggtgttccagaactaaactagagccataaatcacaaggatctatcaaacttgaaacaatacatatcttggtgttgatttctttattttctacatttatcgttttgttattttacatactctatttgcccctgctttactttcgattgttgttcttaatttgttaatcttgtcatcgctaattatttaattgtttagagtttcattgatttaatttttcacatttagtcgtaattttttcacacaatcctttctttaatttattgctgaatactctaattactgtatagtattttagcacttccatctagtttttccctacacaaatcactcaatcaagacaccatttactttttgttcctgaaccttttcaatatctatatatatttatttagttaatgatttaccctgagaaaataattactattaaaagtcatcaatcttctataaataatataactactccaaaaacgaaattctttattgcttggattaacaatatcgtacatatacattcagaacataaatacttacacttattctttaataaaattgataaaaaaaaatgcaaaaggtggcaacattagtaattgctttgttattcaagtatatgtgagctgcttttttggctagctcaaaagaactgatttttctttcttcgattctagtggaatgttttgatattaaatttcaaactatacttcaaaaacattattgtatgttgataaacttattatttaatccacaaactaacacttcggaagatctttgggtggtggtagaacagattcactgggcccttttccattgtccacaacaaatgccatttttagtccccatgttgtatgcacttccaagtgacagtgcataaaccaaacacctaaaa

SEQ ID NO: 33063 - DNA, 1206 bp, Cannabis sativa
acatgacactctaaaatctctctaaatgatattatttatttttattttttaattttttattagcttcataaatatttattaattattgatattgatataaaatatatacttttatttttccttaattatctcaatttcttttttattttattttttaaaaaatcataacttttattttcttaattgtcttatttttttattaagttgataaatatttattaattattgatatagaatatatacttctatttattttttcttaattctctcaatttcttttttattttattttctaaaaatcatttcttcaaatttatcatcacacgtattaggtttgttggctttattttttattgattttttttaatctaattaagccatcagacgttttggttttgttggctttattattttattaatttgtttttgaatttaattaagccatctatgtatattagaaggaagttacacgccgagttacgtaaatgttagttttatttaaggtttgattttttttttttttttttagatttttgtaactaaggtatgattattgtgtcattgtatttggttagtaaaacataaattgtgtgtataaagttatgatatgtacattgatcttaataataaaaagtacataaatcgaaatatttacataatcataatgtagttacccgtaatgtgaaaaaataatttatgataagtcataataatatatgacttttaacattttttgttttatttgtttctgaaaaattcaaaggaataatatattttttttgcaaaatttaaatcaaatattatgtagccaaaattaaagaaaaattggcatcttaaaatagaggaaaaaaattattaaataaagttttaatatagaatattattagaaaaattaatagagtatagtgaaactttatcctaatattccatcagttcagttgtttgaatggtgaattgattatactttagactcatcgatcgttttggatctacatacaactggatctccattttttggtcgataatttttttgtaggtttttggacaaacaacctatgtttttgaaaaaaataatttttaatattatttttatgatgattaagataaaattcattgtacttttatttgggaaaatgtagtatatatataaatttatatatttaactgtttaaatttacctcatccgaatatgactttaattgaact

SEQ ID NO: 33064 - DNA, 2294 bp, Cannabis sativa
atagccaaggcgttgaaggtcaagaatctcatatgtcatagtgatttgtagctgattgtaaatcaagttctcggggaataccaaggtatgagcctgaaaatggctaagtacttagagaaggtttgaaagaacttggaaaagttcagttactttaaaattgagcaaatcctaagagaacaaaactctaacgctgatgccttagcaaaactggcctcgtagagcgatttggatgaattaaacttggttccgatagagatgctgatcgagccaagtttatgtgaaaaggaagatgtcgagatgatagatagctcacctacctagatgactcctataatcaactatctactcgatggacaacttccaaatgacaagaatgaggcacaataacttctatatacagtacctcgctacccaataatcaaaggcaaactgtacagaaaaggttattccatgcctctacttcgatgtgttctacctgtagaagcaaatgagatcatcagagaaattcacgagggcttttgcgtggatcatgcaggttggtagagtttgtcaaaaaagatcattatacaagaatattactagccaacaatcaataaggacacccatgagattgtcaaaaaatgtgataagtgtcagagatattcacatatacctcgcgtaccaccaacggaactaaggatgatgaattctccttacccattcgttatatgggggattgatctaattggagcactccccatcaagctaggaggagctaagtacgcagtggtagcagttgatttcttcactaaatggactgagccgagcctcttctctccataacctgcaagaaagtcctagactttgttgtcaataatattatttgcaggtttggagttcccatgaagatagtatccgataacagaactcagtttaatggcgacctgctcgctgagttctgcgaaaggaacaaaataatttagagtttctcatcagtatctaggcctcaggcgaatggacaagtagaagctgttactaaaaccttgaaggatactatcaacaagaagttagacgctgccaaaggtagatgggtcgacgagctgcctcaagtactttgggctcacaaaactactgagaaaatagcaacgggacacactcccttctcgctagcattctgctcggaagcaatgttacctgtggaagtgaacatatcgactcataggcgagagttctataaccaagaagaaaaccaagaactcctaaaaatgtacctagatctacttgatgaaaaacaaactgagtcacaagtcactaatgcagcgtatcaacaccgagttacaagataattccctaaaagagttaagaagaggctattcaacattggagacttggtgcgaaggggagtattttcgaatacaagaaatgtgtctgcgagagtattcaacccgaactggaagggtccttatgtgatcgaagcaatagtaggaaccggggtttataaattggctgggccaaatggttcgctaataaagaactactagaacgtggaacatttgcgaccctactaccagtaaattaatgattataactcacattactgatgttatattttaaacttcagttatgaataaagtgaatcatttcttttctttaagtaattacaaatcgttactctttaaaattactgaaggggcatttgagtatgattaaccagaattcatctgggaatacatgatatagtgcaaatccataactttaaaattttctttttgaaatttttaaagtttttgatcaaacctttctgacgagaaagggatcaaaccatcgtaactttttgatttaaaacctgtttgacgagaaagaaaaatcaaaagttataagttagatattactcataactcgcgtccgtagctgaatattaacggctcgcacaataaaggaaagtattaaatgagacatcaaggtgttttgatataagtacttaaacctagtgtatgaatagataatataactattcaagtaagcaatcaaaaatgtagaaagtgattagatcattaaaagtatattcaagtttgcttaaacctagtgtatgaatagataatataactgttattgcaaggtagaattgataactgctcgtaaattataagcttggtagataataaactgtctgcgcaattagtggattgctaactacttaaataggaaaattatgagcaatggtaaaaccaagagtactctacatttcatcaaaatataattgtttactttgtgaataaaaacgcaagcaaacataaatatattaagttcgaatg

SEQ ID NO: 33065 - DNA, 2124 bp, Cannabis sativa
gccatttatagtcactatgaacctgagtttttcagtctagctaaggggattccattatgggactatgctatggattgtgagactgatgctcttgaggaaaaccacacttggatcattgtttctttaccagctgaacaccatgctatgtggtgtagatgggtttataagatcaaatacaatgctaatggatctgtagagtgatgcaaagcaagactcgtggctaagggatataatcaacaagaaggtgtggattatattgataccttttctcatgttaccaagttggtaactgtcaaacttatgcttgcccttgcagcaataaatggatagtatttgcatcaacttgatgtcaataatgcattcttgcatggagatctctatgaagaagtgtatatgactctacctcctgggtataatcctaagagagagtttccaccaaatgttgtatgcatacttaaaaaatctctatatggatttaagcaagcatcaaggcagtggtttgcaaaattttctagtgcttttgttgaggaagggttccatcattcaaccacagatcattcattgtttatgaggcacagtggagacaacttcatcatccttcttatatatgttgatgatgttatcttggcacgtaataatctggttgagatggaggctcttaaagttcaattgaacaataaatttcaacttaaagatcttggagatcttaagtatttccttggattagaagttgctagatctcctaagggaatcattatatctcaaaggcattatactttggaaatgttagaggatcttagtcatttggggtgtaagccagtgaatactcctatggaagctaacctgaaattaagtcaagatgaagaagacagattggctaatcctaaactttatagaaggacaattgggaaactgcaatatttgaccattacaaggctgtatatatctttttcagtcaacaaattaagccaattcctggttactcccaaagctagacatatgaaggctgttgagagggtccttcaatatgtcaagaattgccctggccaaggattattcttccctgctacatcagagatttaacttaaagcctacacggatgcggattggggtgcttgtcctgatattagaaggtccactacgggattttgtatttttcttggaaaatctctgatttcttggaagagtaaaaggcaacatattgtttctagatcctcagctgaagccgagtatagagctatggcaaatacctcatgtgagcttgtttggctaatgtctgtgcttaaggagttaagaatcgaacacaaaggtcctgcatggctctactgtgacaataaatcatctcaatacattgttgggaatctggttttccatgagagaacaaaatatatagagattgattgtcatttcgtgtgggaaaaagtgcaagaaggagtaattaaaaccagtcatgttggtactaaagataagcttactgatatatttaccaaggcactttttcctactcaatttaatggtttcaaagacaagatgggattgataagtattagttcttcatcctgagggggagtattaaaataggcttgttatttttcttttactgccactgctttagtggttatgttcagttgtattctgttatgttagttgtattggttagttgttctttcaactaactttgtactgtactcctcttgagcttgagctatataaggctcactcccttctctgattcattaatgagaaatatactctgttcttcctcttctcttttttctctcgttttatgttttctggtttgtaataatattagaatacaatgtcaaataatgttgcagcaaatgttaaaaagtttgtttatttttttttacgcaaattagcattatgtttgaatatttgtaaatggtcttatatgaggtaatggtatggtcattcaagatcacctcagcatagttattacgtctacaactacttggtccattagagcatctccaatggtaaaaaattatatggatgcttacttagctggattgatgaagtggtaaaatattgagatgctataccattggagggaaaagaatactattctatgaatatgtgtgaatgatatacagtagcattgat

SEQ ID NO: 33066 - DNA, 2646 bp, Cannabis sativa
gttttattttgtttgaatttgctgttaaattcttcttagttgtgattttactagcatttaattttttaaactcaaattttaacagtaaaattttccaaattactgaactgatagtaaatttaaggtgttatccaattaagtgttaccttaaaatgaatggtagcagctaacgatagatactacataatatataaataaaataataattaagaagatttaaccggcaaaaactccccatagaaattagatggctttacctaaagaaatggtgataaaaataaaaactgtaaaataaaaaattggggaaaaaaattgaaaggacagagtttgtagagaagtgggagaaaacagataaaatgatctacttagcttattttggtttctcgctatataaatctcatccatggatcttactcatggcggatatttcaaggctcaagcctatccaacccatcatcactcgcgccatccacactccacgttcccatttctctattatatgatttttcatcttctctaacatggcttatctttagtttcttcttctctctctttctctctctttgattcaattcttttccattaacattatttgaagaagcaaaaaaataaaaaaaaaatggcggcggctttgccttctttgggtcttggggttcacttcaataacagttgtagttccaggaactttactattcccctctcaactggggctctggctaaggggtttggtactaatcactactacattattcctaagaagaggttatgctaatataatatgttgtttgtattgattttgtaaaaaaaaaaacataaattattgttctttcttgtgtttgtggaaaagggtttcattgaatttgttctgactttagtttgctgatttgggttcttttccatttaaattatttcctgtttggtctgttttttgtggttgtcaaaatatcaataggttcttaagcttaattcattaatcttaaaggtggtggatgattttgatattatatagttaattatcttaactatatatagtttcttattgtattttatatgattacccttttattgtatagtaatttagtgtttatgatgaattcataagtaaatctgtgatgaaattaagtaaatctttggtaaatgatgttaatttactactagctccaaaatctgaccagagccatgatttgttggtgttgagaaaatgtgaaaaatctaatacggctatgagtacattctgttaagaaaaaaaaaagtagttttactgatttgaagtcctattgatgccattctttttggtttaagttatttgtcatctttcacagacatttatcttcatcaacaatatttgttccaagagcatcatcttctgcagctcttgaggtagttctcaactctaattatgttactagtcatttttgctaatcatctttgagagtgattgggtcaaacttactgtctttatggctgtttgtatgcttggttggttggtttacattgaaaacaggatggaaatagtgacactgatacaattccaatccccaaagttataattgatcaagactctgatcctgatgcaactgtggtggagataacctttggtgatcggcttggggcgcttcttgatactgtataaaacacattactttacctctttcttttgtttccaatactttcctccattatggatattctcttttgtaattggatgctgtgaaaatcttttcttttacccctttttggtaatgtattcattattagcaagttctaatatagtactgttgtccacaaatgggttgcagatgagtgcactcaaaaatcttggcttgaatgttgccaaagccaatgtctttctggattcttctgggaaacacaatttgtttgccataacaaaagcgtgagtgacacttcatacttttaatggtgttttttttttttttatcttttaatttaatgttattctttgatatgaaatttttacgtttattcttatttgtctgcactgtgagttgttaattgtttctttcattcaacactcccttgaaaagttaaaggtttcttgtgcttctatggaaatttaaatattgatttttgaatatctttcctatgcttgttttctttacaaggttgatttacctacttttcatagttgaattgtagctgttttgcttcacctactgatattcattgatgattataaggagaataacttcagagttagtttgctagttaaaatgggaagaccttatttcattgcacttttatgcgcttctttactgtaatagcggttcttggatttgattgacttggtggtggagcttgtttgcagtgatactggtagaaaagtagacgatcctgagatacttgaggcgattcgtttgaccattataaacaatctaattcagtatcacccggtatttgtttttaactcttgatcctcagatcatatttaattgagaacctccaccaggaatattttttttttttgtaagctttctcattggattgagttggtgaaccaggaatcaagttcccagttagcaatgggaacggcatttggggttgagccacctaaagaacaggtttttggacttctaattttccatttaaaacctattatcatcttcgatagtggattatctcttttac

SEQ ID NO: 33067 - DNA, 2451 bp, Cannabis sativa
aaaaaataaaaaaaaaaaactatacacaaaaatagatacaatcacaatttcttaaaaattagtaatatatatatatatataaatgaatctggatctaaaaataaatgaaaaatattaaaatagtaacagaataagtataactcatataaaaaatgaaccaaaacatagcacaaaaccaataaaacaaaaaaaaaaaaatatttatacgaatggttataaaattaaaaaaaaaaacaacttcaaagaaaaaaaataacataatagatatataaaaacacacaataaacctatttaaaaaaaaaaacaaaataaatcaatacagaaagatcacaaattaaaaaattataaaaaaaaatcaacaaaatagaaaaataataaacgacatgaagaacaaatccaaaacatgcaacagataataaaaaaaaagtaactaaaaaataaaaatcaaaaagttaaaatgaaacaaaaataataaccttagctctattgaaaatatccatatctaactcatcctcagaatcagaatccagagcagcacatttactaactctattgacagcacgattatcttcaaaaatctttcctttctcgactatcttctccttatctattttttctttgtaactaaatctttactctttcctgaactcgaagccttagaaccaccgaggacacacattgataaatctttttcagttccaccacaatcagagagaggcaacgaagaaggagaattggacgattgaaggatcgccatttcagctaaaaagaaacaatatgatcaaaaaggaaaaaagaaaccctaaccctaatattcgcttaacatatttgaaaacttttgaaatgaaaagaaagaggaaatgaaaaattgaacaaaaaagaaagaaagagggatactagtaataccatcagtcctcctacgtgattgacgtgttgtagcttctcaggctcacgtcacacgctcacgcgaatagagaagagatttttaaacaaatgggccgaaaatgtagggaaaaaaagcccaattgaaaaaatgttaaaaaagaggaaacaaccataaaaaaagggcaacaatgtgtcaataaaacttacttacaaaaacaaggttatttttataaataatttccaaatttaggtgccccaagaaaatttcccttctttaattatgccataaaaaagtaaacatttaaaaatttcccatatgttgtgtaatgtctacttttgtaaattgcactataattttagggcattttgcaaagccccctaaaaatatcatatctgcatatgtacggataacttattctccactaattttttcttcttcttcttctttcttatttggtatgtgctacttattgtaaactctattattgtcaatttgtcattgtcatcctctaattaagatatggtaatatgtgacaaatttatcactaaactattaatttgtaattcaaaaaaataaaattagaaactatacaaggcaacatagataattttttacatttattggagattcatcttttctattcttttacgaaatataataaaataataaggtaataatttttagccaatttgtgaagtaaaatattaaaaatgtgacatggtaaaggcatataacttagtgatatttaacttccaattcctcctatattctaaagaggaagtactaaattcgaattcttctttcttcaatgtgtcaaaaagagaaataaaaataagagtccatttcaaaattaacaaccacaccaatattaattaatttataataataataataggaacgtcactaattaacttaacatttaccaaaataaataaataaataaataaaaggactctaaactatttttagaattggtaaacaaaatatacatcgctgctgcaaagagaagtctaaaatcccaggacgactctaagaatatcaagaagctcacggtgagcagtcaggtgagggaaatgaccgttggctgagctgataatctcgaccgttgaaggtgccttgatcatcttcttctgcatgtagaatccaacggagttggggacgactatatcgctgccggtttggatgatggtgcaggggatctcaaccttctccagtatgtctcgctcatcactatagaacaccgttttggccaattggagcgcgacatctggattcattctactcaaacatttcgcgaacttgtcagctgagggaggatcggatgcgtccaccaccagggaaacgaagtgtgtggcccagttgtagtagtttgattctatgtttgatatgatgtcttctatgtctgacttctcaaacccaccttcataatcttctgtgtttatatacctacatatacatataaataattaaatatatgccatacacattttggccaataataataataaaaaaaaggttaaaattatatgtagggttgtgtgaccaacgtgttacagatggcaagt

SEQ ID NO: 33068 - DNA, 1184 bp, Cannabis sativa
gttcttttcctcttaattatctgggtgtgcacttgagacctactcaatggagatcagctgattgtagggtgatcttagagaaaaattaagcgaaggcttaatagttgggctagtaggatcctgtcttttgtagggagggcgcaacttatccactcatgagtatatttattctccctcaaaaaattgttgttgcgattgataaatgttgtagagacttcctttgtggtgcaaatgggaatagaagtaaacttcatcttacttcttgagaaaaagtttgcttacccaagaagtatgatggggttattttgtatgaaggtcgaaaaaagaatattgcattgatggtgaaataaatttgggcggcctctgagaaacaagataatctttgggttagatggattgattccatttatcttaaaggtcaaaatttttggctagcgtttgtgaaaactgattcgcgttggtattttaagaagcttatgaaattgagaagctccattgatagagatgctatggtcaattctgttttgaaagggaagtttatagttaaaaagttctactcttctttgatttcaactagtaaagtggattattctgttgcgatttggcatagattgagcgtcccgaaacatcagtttattgcttggcaagcgttgaacaaccatctcttgactcgtgatcaacttggtaaatttttggcgcttacgtccagctcttgcccggtttgtgaagatgatgtggaatcacaccaacaccttctttgactgtatctttgctagaaaagttcgagaggaagttacttctggtttggtccatttaattggcccctgtctttggtcgagtggcattcttggtgtgcagatttcaagcctaatctcttgaactatgtttctaatgcactaatttcagctatgtttatttattttattttttttggtgcaatatagacaaatgtgtatttgaatttgtttgtaatttggccaagttattagcttagcaatcaggttagtcatcaaagttaaaattagatgcgtaaatgtcgctttactaaacaatagaaataggctaatctgtaataaagctgcttttatgtaacctgggtttggttttttgtgttcagggctgctctcattagcaactgcatttgctttgtattttgtttagtttgaatgaatttttctcttttt

SEQ ID NO: 33069 - DNA, 1763 bp, Cannabis sativa
tggattagacaggctaatttgtccaatccaatgtttgggctagggctgagcatgggttgggttggccgggttgagggtattttaatgacccaatccaatgacgtcgtcctagagatttctaacccattcacatcctaaattttttataacccaacccattttttactttgcgggttgggttggtttgggttgggttgggttataacccttattccataattaaaaaaaaaaaatcagattttaatattatcaatttcatacataaattaaaaaaaattaaaagttgtaacataaacatatccatccaaagttacaaatcattcaaaattaaatattatagtcatctaaagttttaaaaactattaagattgtccataacaaacttaaagaaaatcaaaatcagttttgatatcggccttactcaacaatctcaacaacaatctcaacgtcaattgtctttgcttttggtgatgattcattaaccttattttttgttctgcaattataaaaatatagttactagttagtcaaattattataaataaataaataaaaacataataaaaaaagaaacatatttaatattcatcaagaaaattatatttacctagaagaaaatcataagctccctcataagaaaaaaaaaatcaaattataataatagcaactaccaaaaattttgtttattatatactaaatatcatagtaaaaataacaatataaaaaataaccaaatccaataagatcacaaataaaaaaaaaataagtaaaaaataaaagattataatacctttattttatgctaattgctatatgctcaagagtcaagatcgtagcaaaaaaaataataatacaaaaaataaccaaataataaataaataaaaaaaatattagactgtagcaaattaaaataaaaagttcatttagattacctttttatcgaaaaaaaaaaaaacatcacatacctaatcaagattcaattcatattatattatttatcgaaaattaaaaataaggtcaagtgaaaaagatcaagacctgcatttatggtgacctgagaacaatgaactccaacacctgtccaaccgcgaagatacttacgaaatagaaaaaaaaaaaagagctcgagttccttgtaaaaatattagtttcatttccatctagcaaaacaatgagaaaaaaattatttccatttcagcatagcaatgagaaaaaaaaaagtcttacaagttgaaaataaaaacttagaaggtgcgactggcttgtggagagctcagttggacagtcggtggtggttcctggtgtggagtggatggctggcgcggctggagatttgaatggtgtgctggtgcgagatgagcgtgagaggagcaatggctggcgtgcgaaggtgcgtgagactgagagtagctgagtgagaaagaagagaactatggactatggtccaactccatggaggtctgagctttttcttcaaaataataataaaaaaaaagctgactaaagtgagatgatgagagtgacgactgctagggtttgttggagagagatgaatgggtttatgttatgttgtattaggtttagctttgcacatatgtatattatatatattttagttgggcttgggctggtcggcccagtttgggttgaaaaactatcagcccaaatatcaacccatttggtgcgggttgggcttttttcaacccatgtgatgttcggcccattaaatctgaccatgcttcggcccatttcgggttgggttg

SEQ ID NO: 33070 - DNA, 2824 bp, Cannabis sativa
tattgtagaaattataagaagaaattatgggcttactacactaaacactaatgttgggtcatgaactatttatttttcagctagaatacttagtaatttgctcttttaattttcgacaatactaattctgttccttaaaatatacgacttgttaaaaatccccttgaacttttatattaatagaaatttagttattttgttaggtttcgtctcattattctgtttcaatgctgatatatttttgtaaattagcaactttgttccctaaactttgaaaactatcaaatcgtactccctcaaaataaaaatgagaatgattcaatattttttttagtaaagcttaaaaaattaatttagatctttaaaaaaattattttgaataattaagaaaattaagaaaaaaattaaaattttaaactaaccgatttaaaaaattatttattttttttattagaaaatagattaagatataaaaaaaatatattaaaattttaatttttgtaaaaactaaattttaggggaacaagtttgagtatattttcttccccaaaaatttaattttttttaagtaaacataacttttttttagtttaatttctattttttttttcaaaataattttatatttttattgaaattttaattatatttctttattttttaatgattttataaatataatgaacttgattttttctttaaaaaatcttactttgtttaaattatttattgatattcaacaattttagtttgatttttaaaggtacgtgtttataaataaaatagagtgaaaaaaaaattttaggaataatttaaaattttcaagtaaactatatatctttgaattaattatatattttttatcaggtattttaataacttttattaattttttcagaattaatagaacagtgtaatttttaaaattaatttttttaataaaaagaggcagaattttgtattagtcaaaatttaggaggtaagaatactgatttttaatggtaaaaaaaacagaacctaacagaaggggcatacttatataacttttatgttttagggagaatttttaacaagtcatatatttagagagtagaatcaggtatcgtcaaaagtgcaggagcaaaaatgctaattattctttgagctattagaaatttattaaaagtgagaaaaaaactatttgtatatcttcatgatttacttggactaaccagcattatgaaaaacccaatatattaatatagaagaaatacgcttgaaaattaaaaaagttgcaatgaactccaacaagaaaaaggtggagatcttgtatattattattcgttctaagagtgtaatcacatgtcactttagaattgggatttaggcgattttaaaaaaaaaaaatctcttatttttttatgtattctgatcacttttttgtgttatttttttaagtttacaccttacatatataaattcatccatgctagttttaacgtttttaccgtttttgttagagaatatttataattagaaagtgatgtcacttacacagaatttcaaggaaaattatgaaagtgaagattcaattgacttgattgatggtagcaattttggcttttgcaacaaagtttcttctaaaggttggggctcgtgctttgttttgggtttttagtatttaattattactagttatcgctccacgtgctacacacgtaaaatacaaattttatagtatgagtagtaaaatgcgttcattaaatttaaaatactaaatattttccttgaattataaaatttgtagaattacattctattaactttttttgtacgacgaaaattcccttaaactatagcaactatagcaaatatgtcttttatattacattttgttcattttgaaaactatttattgatgtagtactgatgtgccgttaatatggtgtgattcaaaaatcttattagcaaaaaatacaagcataaattgtgctctaaagaaaaaatttaagaatattttaacagttaatttttctatgtttagcaccaataaattaaattttagataatgtcagttagataactaaattatcgtaatgtaaatataattgtgacacgtgactacatcaaaaaaattgatagaaggtaatagaaattacactaaattgtaattttttttctagtcgaaagaattttggcaatagaacaaaaattcaaacaatagaacaaaaatttagaggaccgaattttacaattgtaatagtatttgggacaaattcttatttatcctgtgaaattgtaatatatttgtatgttttggccaacaattttttatttatcactacttaattgaaactaattaaaattcactcaaaaaaaaatatattatctttattgtcaacatataattaaaacattaacctataattttaattattgaaatataaaatagattaaaccaaaatatttaataaagagaataaataaaataatataatcataattgaaaacttattactttttatcttaacaattagttttattataattatatttttaaataatatgaagttacttttataatattaatactatttttttaatagttttatttagttattattttttaatttatttatcatatcaaatatattggactttcctaattactaaaaaatattatctgaaactgctattaacgatttagttgttttgtcataaataataataaaaaaattaagtgtttatttaactgtttgaatattatttttgaaaatgtaaattattaagaaaattattaaatgtctactatatttacaaaatatatgaaatttaaaaattatgt

SEQ ID NO: 33071 - DNA, 1551 bp, Cannabis sativa
  modified_base (301)..(304): a, c, t, g, unknown or other
ttgttaccggagagcttgcttttagtgtggatcagtggggcacctcaagaaagattgtccccaactgaagaaagaggaacctaagcctgaagccaaacctgcacccgagtgtgtatttgctattactcagacagatgttgtcgacatcccttcagtagtcacaagtcaacttcttattagcagttttgcttttacagttttatttgatttgggttctacccgatcatatgtagcatcgagagttcttaattatcttggtaggcctagtgatgtatttgagatgggatttggaaccctattnnnnaatggggaattaattatttcaagaaagtgggttagattagtgttaattagaattagaggaagagaattgagcgttgatcttatggagttaccattggctgagtttgacattatactcgggatggacttcttgtccaagtactctgctattattgactgcaaacggaaaatggtaactttccaaccggagaatgaggaaccatttgtttttgttggttcagttcaaggttctcgtgttccaagaatctcagctttgaaagctagggatttactacacagtggatgtgtaggattcctagtggttgtaattgaatccagtaaatctgtgttacttggacctgaagatgttaatgtggttaaggaattcctggacgtctttctcgaggaattaccagagttaccacctcagcgggagatagattttattattgatctaatacctggagcagaacctgtttcaaaggcaccttaccgaatggcacctgcaaaattgaaagaattaaagatacaactccaagggatgctggatctaggatttacccgacctagtgtgtcaccttggggagctccagttctatttgtaaagaagaaagatgggacccttcgcatgtgtatcgactatcggaagctgaacaagttaactattaaaaacaaatatcctttgcctagaattgacgatctgtttgatcaacttcaaggcaagacggtattctctaagattgacttgagatctagatatcatcaattgagaatctaggaagaagatattccgaagacagcctttcgtactaggtacggtcattatgagttcctggttatgtcatttgggttgacaaatactttagcagcctttatggatctcatgaatagggtattcaaggattttcttgataatttttgtaattgtatttatcgatgatattcttgtgtactctcggccagaagcagaacatgaactgcatcttcgtatggttctacaacggattagagatcataaaccttatgcaaagttcaagaagtgtgagttttggctgtcacaagtgtcttttctgaggcatattgtcggaaaagatggaatcatggtagatccaggaaagcttgaagcaatgaaaaacttgcctagacccaaaacagtgttggaatcattttaccaggatctagatttgataccatgtatgttgtttaacatcctaatatgaatttctaaacaatgtaaataaacatatataaagttttagaaaccttaca

SEQ ID NO: 33072 - DNA, 2477 bp, Cannabis sativa
  modified_base (1495)..(1508): a, c, t, g, unknown or other
ttaaatagctataaataattccatgattaaacataaacaactgttaatttccaaattaactaagcgggctttacattaggggtgttgaggaagggctaaagtccaccctgaggtttaaaaatatattaatatacaattgttattttcatatatacatagtagttaaatagaaaaattggttaagatactttaaatttacatgggagaccattttttgaattttcttgcccatttttttctacgtgtatttacattttatttattaaaaaaaataaatgaagtataaagttcaaattaggatcaaacttatgaccactagaatagggagatgctgtcaaaccattattccacttaaatttagttagttatttattgttttggattatattaaatgtataactaagctcatcctaaaatttaaccctgggtccgccactgactacaagcagagaacgtttcaaacaagacaaatcaaaaaaataagttataaatcttggtaaaatttttctttggaaggttgtaaacaccatcagaggtcttatcacgcactagaaaatattacgatgacaaaattaataaaacaaacaaccgttaaaatacgattaatagttaaacaaaactataagtatatcaaacaacataaaaataacaatataacaactaaaaaataacgtaattgtaaaacttaataaatatgaaactagaataacttcaattataaaactcaaatacatctaataaatgtaagacataaccaaatgatataatttttttttaagaatcctatcataagaaccatataataactaaattaaaattgaataacaactacttataaacaaaaaaaaatgagagatataaaccatttaaggttgaacaattcttcttactaaatacatcaaaaaaaaaaaatatacacataacaaaataagtctttgaaactaaacaaagacaataaaaactatacattaatcttttgagttgcaacctcgatatcattatttcgtcttttgcccttaaaaactctttaatggatgacttggtgaaacaacaataacaaaataaattaaaagataaataattataaaacaattagggatttaaaataagctagatgtgatttgtattacgttgtgaaaaaatacttcaataaatattattaaaaaagtgtacttttaaatatagtataatttctttcattattattattttgaataaaaataataaaaaatgaatttttaaattgttcttttttgacaattaaataacaacaacaaattaaaaacaaaaaaaaattacttttaacattatttgaaagaaataatcaattgatcacattatttttattttttttttatttcttacgttatgaaaaataagtagttatttaattaatattacatttgtttttttaatttgaagagagagagagagagagaaaaatgaagagaaaaatgagaaaatggaaagaaaaaaataaaaagagagagagagnnnnnnnnnnnnnnagagagagagagagagagttaacatgtaaaaaagagaaatatgacataaacaataaaagtatttttgtaattaaaaaattttttgaaaaataaaattaaaaaacagattttataaaaatgtttaaaaaactaaacataaataaaaatgttaaaaaaaaatcaaatttgactaaaataaattattaataataataataataataaagactgccctataaggaagtataaatacatagtgccaaaattgtaacaaatatttttcttttagtaaacaatatttataaatttgtttccagcaaaaaaaatatttataaatttgtaaatatttgttaaaaaatataaatgtgcgatgtaatgtaagtttaacacaatctaaatatgacatggtgaagtatagtataattattaatttatactattttctcaaaaaaaaaaaattattaatttatactatacaattttctttcttaatttatttgtcggaaaatgtggtatgtagttggaagatatttgaatatcaaatcattataacttcatggaggtggatggagtgggtactcttttgtcttttgtctccatactttgtttcaaaataagtccacaaattactactattcatcataataaatgaagtacaatattatctactgtactggttaaagtactgtataattattatctatataaaagaaaaattaaatctcgacattattaatttgtaaacttgtattattgatcatatctatattttttttttaagtgtaatataatgatattttacaatcaatctagtttaaaagttttaggtgaaacataactttttctttatcactaaactaactttagtacctgaacttagcttgatcatatctatactctatactagcaaaaagttacgtgcaatgcacgtatattaaattttatgctagcttttttctatgttagttgaaagtaatacaattaaaaatt

SEQ ID NO: 33073 - DNA, 4724 bp, Cannabis sativa
gcaaaggatgatggggtagttaagttcttgtcgagtagcccgtaattcctccaaatttgttgaatggaaaagtcgtattttgtgaggacaagataaactatgacacatattggttcactaacatgttgaattctcttgtgaatcttaattgctcttggaatgttctaaacctacatgttccttcatatgaggttataagtttgttattattattttttaatttgattttgtggcatgatttcaagtttgtaattagtgtatattaattgatatgtttatatatttgcatgaaggcactcatattgccagaaaacttgaagaaaatatgtcgtttttcgttgcttaattggaagcatctcagagttatttctaagcatcacgagcctgaaagagtgttagatttgaaagagtccataatgttgatttcaccttttttggaaacattatcgattaagaaagaggacataatattgttagtttgtaactgctgaagtaattatgagtagggatgactgtcattgtatctattttctttgcctagtttagtcccttatgaggtttactttgttactttgttactattttttttttcataagagtgagatttttttttcttaatctctatcatggaaaattctatgatgagttactacatcagagatagctgcaattcagggcaatgtggcctgtatgggcaatgttatggtttcccggtagacttgctctatttcgggtgtccttgaaggtgagctgaatgccatcttctctggctgattgcttggctaagtggggcgaggttgtatggggtttgtttactttattcaaaagaaaaacactatgtgttgttcaacaaaacttgatctcctacttttgctgtatccattataatttttctgttttttcaatcacgtattgtggttactaagctttatagatctgttttgtgattataaatatgactttttcattaatcgataatgtttctaaaaaatttgagaaaaacatataagcattaatacaatattgtataacagattaagagtatgaacttgaataaacgccataaaatcaaattaaatgaagtaagaaatatataacaatacctcattttgtgtcatagcctgactgattctcctcatcattagttacaatttttccatttatcgaattagatgactccattgaaatgctgaaattgacacaaccttaaataaaagtactctaatcttggagctgattcaatttcaacatgggacagtttacaagaaaggaaaggttcctcaaaagtgagacttttcaattgttgactttaaattctccaaacgaggaatattaaaaataagagcttccaactatggctgatgatctttcgcgcaattacttaaagaaaggtttctaattttcttgcaagcttagaaattgagtttgtcaaagttaagctgacatagtttcaaagattcaaattttatggcttcaacttgtaatgtatacataatctttataagcttaaattccaagaacttgaggcttaaactttgtatttgaccggaacaatttctcaagagaaattgttgggttgcccttctcttgagaaattgcagttacaagatgctgaattctttactattgatgatcagttccgattacaaagttcaagccttaggttcatggaatttggatacttagacatttatatcatgggtcacatcttcaagttgaagccataaatctggagtctttggtacaagagaatgttactttgaacaaataaagagatcattctgatctaaaactatgcatgcagttgattgtgatgagcctaacttgatggaattttttagcatcttcagtctgaaacaacatctctttcaattcccgccaacttgatcatttgaaccccgcgaatcgcttcgtttatcataatttcaaaggaattcatgttaagaaaaatcaatgccattcaagtcttatatgtatgctgatttcatgtcagcatcagaatttcaattttgagacctttctctgtttgttttttttttttattattgaatgtttaattttgagacctttagaatatgggatatttgtttgtgatcatagttttacttttgtagcacaatcatatacaagtctttttacatgtaataatattgtcttttcacttcaaatcttcaagctaatgcttaactaaatataacaagcacccaaaatgtggattaaatagttatcctttttgttaggatggagcaagtaccaagctgaacaaaatggttgtcctcacaaaaaatgaacaagctttctcccaagcttttatcaaagcctgaagaaatcaaatatggaatgatcacatatcaaaggatagcacaatgcataataccagtgagccgattgcttcgtttatagagcgagccaataagaatatgacatgtaaattaactagctgcaacacatccaaactaacttaactaacttactcagacattatttaaatatagcacatcaccattcattggcactttttttttccttgtccaatattgtttgagccagtaagagtatttttacatgaatggaatatcaacagttgaaccacatttcagatcatcaagcacatgagtgaggtagccagctccttaatcattcgagtttttcgacaacagatagctctgctcaataatctccttttgaagtttttgaacacatgggcttcaaatgcctagaaaggaaaggtgttgcagattttcttcaagatcaaatttcataaaaaagaacaatactggtgaagaaagaatcaatcttacttcatatttatgcttggtttagttcaatgcttatctctataattatcctctgttgaactacctttgttcttccacaacacatcatttctaaccttctaaatggcccgtcccaccatcacagcctcctcggccaacataccagacccgttccagcaggctttggcaaatgaacaacccaccaaaacatggaatatagactccgactccctatgacagagaggacaatctctagagcaacactagctggatcatttaagaatgctagtccccaacgtcgagcttttactgcaactaaaccctgcggataatatctagccttataaatatggccaacaagtggatattcatatagcaacaacctccaaccttgcttccccagtagagataaattaaaacctctaatgcttctgaagccaaggccaccaacatgcttttgtctacacattcagtctcaccccatccaactaataccacgaagaatttcgattagaaaaagaccaacaatacacaaacaccattatttccaaacttacacaagtctccaaagggaagagaaaaacagacattgcataacttttggatgagttgagccactgctttagacaaaaaacgacctttcatactttgaattattttctacatgttatgctaccccatgatacaaggcatccccaaatacaaacttctttcattagcttcaacgaaccccatcaatagaatgactattggatcctaaaactcagcttgtttttcattatttcagaatcaccatccaacgagagcaattaagcaatttaaaaatcgttttccccaactaaatttgttcatgtattttttttagatacaaaagtcaataaatgagcggaaattcttttaagcctgattacaccatgttaagaaaatcaatgccagtcaagtcttatctgtatgctgatttcatgttagcatcagaatatgggatatttgtttgtgatcatagtctttttacatattgtcttttcactctattggctcatacccttatagtgagctttgaaagacagaaaaataaaaagaggcagcaagagaataggtaaatgctcagcttgaattttgcctgagactcattcattaatttatagacaatgtagaatacaaagggaatattctagagggtacacacgtagtgagtgccacctcatagtttgttacaaaggtacagaaaatagaggaagatatttatttcctaatcattagctgtcaacggatcttttccaatcatcttggactgcaggttggttttgtgttgggcctgagctatattcctaacattgaacaacaatggttgtcctcacagaaaatgaacaagctttctcccaagctttttatcaaaacctgaagaaatcaaatatggtatgatcacacatcaaaagatagaacaatgtttaacacaagtgaggttacattctatgatgagttaccaaaagagttctttataacttgacaaataacaaagcttttgatttatgatctttcattctcaatacatctcatcagatcagactcatcttctcacctcttttaatacatgtgattgtaaatgatcttttgctctaacacagatttgtaggaagaatatcattcctcctcgcaggatgacacttttcatcattacaattcatgttttttttattttggttcaaaaattgctataatgattggtattattatggatcaataaaactatatgtatacttagctgttgcttttgctctttcaagaaatgagagagagggattgtaagttaacatataatatatgtgttctatggtttacagcataagagttttgcctaaaatatgaagaataatttgcattttaaacttgtaattagcacttaacataaatagagatagcaagtaaaaacaacaccaaatatttatt

SEQ ID NO: 33074 - DNA, 4507 bp, Cannabis sativa
ctaattaataaatgatataaatgataattttatttgataattaattataattattaaataaagagttttgacatttataggattgaaattaaaaagtatggtattattgaaagaaggaaaaatggttgaaatgaagtggcaaaatgataactagtggagcccattagtgtgaccagccacttagtgaaattttcccatatttttttcttttttaatcaatatatataaatcctaaaccctagttgaaatactataagaggaacatgatgctcccattctcatctagcactttcaacctaccaaatctagttttctaactctatcagacaactagtagatgagagactcctttcttagtgatttcaaatccttattcattgtccttcatcaagtagagcattagtgatagagttccatgcccacatatagcaagtcaattactcaatcatagtgtacaagacggtggttaactaacccgaaggagagaaggagatccaggctcagatcttgttattactctacgacagattgtaacaaggttaaagatctgagcgaaaggagtcatattattctgctaccatcaatgtaaggttttctaaactcttatgtgttaaatttcattgttttaaagacttcatatttagggtgttaatgaaatatacatgttagtaagtctagatcctagtaaaataaattccaacacttcccctttttcccattgttcctcccagagttgttggtcccacgcttgtttctagtgtttttaccactagaagaatgggcagagttgctggtgtctgcctgtgcacctggttggtcatgaggctgctgggtgcctcgtgacttcctgtttttaacatgccctgcctaggcctgtcgtatggctccttcaagtttaataaagtcgtcagctctatcgaggaactccttcatgttattggtggatatcctcatgatatctttccagtagtcacttagtgggagtatgccccacaatatggttgtatattgacattctttagtaaggcctttgactttggtagccttggccataaatctctaaatgtaatcctttagaggttccccttgtcgctatttaacttttacaaggtcttccagctgcaagtgtacaagtctagaggatgagaattatgtgtagaattctcgcgagaacttagcccaagagttgaatctacctagggtgagtatgaagtaccattgttaagttgtctacgacaatgtgactgggaatatgcgacaacacacatcactagtaaccttctggagatcaagttgcatctcgaagtatttgatgtgggccagcaggtcttctcgtctggtataaatcttccatactagcatttgaacttgggcaagggaaaggcatttatgtatgccgagaatggtgatcctcttgaccaatcaagttcaaggtctaaaagcttcgagccagatataccctagatgatgtccctgagttggtccaactgtgcttgcacaaaaggatttgttaccgcggggacctggttgactggcactccttggggaggctacagattctgaagagagagaggatagttggccataccctacgagagtgtatggtgaaggtcagccataccctggccgaccattccaaagtacgggagttgccctaagcttgccaggctatacctggctactgtgctttgctaggcacacttgcattgggtaggctctgcccgcccagtactcctccttagctggaaaacctacaaagggtagggtctggcctctcatgatgcttccatggtcagccagacctgcattgggtagggtttggccgtccgtgactttacacttgactggtgttggctgtatctagacagtgggtagatcactccaaattctggagtttggtggatctagatgtctgaagtgattaatttcactccttgaatcatcgttttgggtgtttccatccactcttggtcctcatcaatcgaagatcgacctctaggcacctcgctccccttggggaggaaatggtgtactttggtaggccatgggtactcctattgatggatgtctgtccagcgactgcacaaggggggtgttactgagccagagatccctggctggtcccccatgctactagttgtaaggatctggatgttcccactatttaacctttaaggaaaggtttgtcctccctctagcaaggggagatctgctctagttcctgtggaacttggcagaagtcttccttagagtgtatccctaaggagatcctggcctcttctatcggttctttgatggaaccttcttattagatcgttctccttttggttgaggcgatataattctacttggtgagatcaaaggatgtactcctggtcatccatccatcttaggaatttacgtatctatagagcaaaactattgcaatcaggaatgcctagttccttagttaggcctggacgacctacaacctccctgagtctggcaacctgaaggtcttctcctaggtctaggtgaggctcgccaactcccggccctgcccctccatcataaaattggagttcaaatctagttgttattctaaagggctgtcgcctctgggttcttccttcagtgggaggtgccaatggtgggtctaatcctggaggcacaagcgtgccacttggatccactagggtgctcagatcagtttttccaactgtagtgtctaggttgatggtgcctgttatggtgacaggattcaccatatctgcagtgttcatggggagcagttgtgactggaacctgagtgcctagatctgcaatttctgggtcttgagggagacctgaagatgcagatgatgtgacaggagttcttcttgtgttcaccatggaatttaatcagattacgatattcacgctctcaaagaatgcacatgttgacctcaaaaagtaatcaatcggtagaagggttgtatagatctaattgccacatgtttacacaaataagaatgaaaagcaataaacaacaagattttaagattttatatggaggttcaaccgccttgtgatagcaggtaatgacctactccccttttagttgtacttatactgagggaaatactatccagataactatagatgggatctgctatagcacccttaggattacaaggtatgaatcagtaatggaaaaactcaattgttgagataatgctagggaatgcgtgtgagataggaagtgataaagagaaagagagtttatcagacacttagagcttggaggtagatttcagacttagaggcaatttaggtttctaggctaaggttaaggtctttatataggaggtctaaagccctaggtttacatttcaaataccttaatacttgcatagtttgttagatatttacaaaagaccaaagtgcccttgattcaaagatattattcagccattttgttaggcttttagggcccaatttgcaacccacagcctgttgtcctcgtgtagaagtgtctaggaaagcctgcagtgcacctcttagcctgctaggcctgtatggaggctaggctggctggccatggtgcagtcccaaggctggccaaccatagggtcgtctaggggtgcctggtcagctcttgagagggagctgctccgtcacttgatgtccatttgagtgtcagggtcttagtttttctagtgccgacttggccttcgtattggtgagttgtactgccatgtggcactaattttgtccacgtaagcatgccatatcttgaggaaaaaaaattgggataacagtataattttatccaataaaactatataattatacaattcataattatcataattaatcaaaacaataatattacaaattattatttttccttaagaatttatttcccataaaaattaactctcactcaaaatttattcatcaaataagactttcccctatatagtgttatatagaggtgacttagggactatgaacctatattttaaggctccactacaccaatgattattatcgatctcatcaatagaataatttagtttatttattctattattgctccactataaatataaaattgtattctttgacaatatagaattatatttacagaatacttacttgtaatccattgatataatcaatataagcagttcaccttccattattagttcataattagagttggtcaaaatactgttttacctttctaattatttctttatttcttatgtaccactatttcaatatgaatagctatctataatttattatagattcagatccaactattagcactcttaggattaacactataagagaactaatatttgatcagttaggaaagcttaattttcactattgcataatatgttcctagccactcatgtattaagctctgtaagaatcatcttctttgtgaaagtttaacgagtgaatcaaagaactcaatgaatacaaataggagctcatgtatactcaggattcaggttgatctactaatgatcat

SEQ ID NO: 33075 - DNA, 1606 bp, Cannabis sativa
gcaaccctgtgctcatgtgcgagaaagatattttcctgagttttattaagctcgatataaatagtgtaaattggcacgtacttatcgtgtttattttgttttttcttatccttggttgattccttggattcatcttttctcttcatgctggagcctcccgaattgtcagccttcgtcgagacgatgcttgcttggacagtgctgggtttatttccttagcaagactttatcaattttatctctttccttgcttcctcctttcgtacaaacacctgagctctttcattgaactcactgatgttttttatatggcaaccttgtaagtcatcccacagcttgcctccagatcgagagatagtcgtaatccccgcttgaagagcagtaagctatatactgtcgttcaagtttctaacccttgcagcagctgtcctgaaatgacttaactaggccttaagtgtctcacccagttgctgctttatgttagtaagggaagatgcttcaagtcgcctgtcttgttgcctagaattgtttcatgaagtctttagacagctgttcccaagaggtgatcgagtgatgggtgaatttattgaaccagctgcttgttgccccagtcagcgaggtgggaaacagaatgcaacgtaagttgtttgtaacattgctggctcacattattgtattaaatttgttgaggtgagcgaccggatccgtagtcccatcgtacaacgagacgtgagggtttttaaatccctatgggaattcagcgctcataatgtctagatggaaaggctcgagttcttcgtttgagtcataaccaggcagtttcccatattccccatcttggtatctccagaattgatcctccaactcaatgattcgcaattagattggatcctcttgcttttggttggaattgagttgtttacgtaaatcgggtttcttccgattcaactgatcacgaagatctggccatcctcgatcatcgttatttgtagatcttgtacctgagtgactctcagattggctactccttgtgtaactcatactttcttgatcgatactgcctcgaggtatatctcctcctcgcgcaaatcagctgtgatatcgagatctagtacgtcccaagctagaacttgcttcgtcacgtaccggccttctcctttgggaacgggttgatacatgccccctactggggtttatatgtgccccctccctatcagttcgagaaggaagttgacgatgtcttggtggaaacccgcttgccctaggttggtcctaggatttctctcgttatcacgaaggatttcctgttccctagtccgaggttgccttctgctctcatttctgcgagaagattccgataaatcatggtttccattcccctaggttgtgaatccctggggtctccgtggcacttcttgacgaggtgcctgatcattcggttgttcatccttaggaacatcccctgtttccccaggttactcctcctgagtgttctggaggttttcttaagccgtctcctgcctcctagttcgtgagccccgaggtcgcgcccttctcactcaggatcgggttagttttgtgtgttgttttcctgtgccgccctggc

SEQ ID NO: 33076 - DNA, 1151 bp, Cannabis sativa
agagagagagagagagttattagacttagagacttaggcttagagctttatcacttggaggctaaaatgaggcttaggttttttaggttagagttaaggcctttatataagaaaacctaaaccctaatttacaaccgaaacccttacatatttgtatattaaattagttaattacaaaacactaaaataccctcaaatatagatattttctaactgttttattgggctattagggcccaattcgcagtccacgtgtagaattgtacagaaaatcctacccggccttaccctggctagccagacacctgctggaagcacgctgaccgaccatgtgctgaccaggggtggttgaccaacttttatgaggaagctggtctgtcacatgatgtcccgtttgagtgacgagatccttgttggctgaggaactaattggtcttcttgttggtgagttgtactgccacgtggagctgattttgcccacgtaagcaaggccatgtgaggtgggcaaaaatcgggataacataagtgtataaaattgaaaatatatgatatttatggcgaaaaattcccaaaaaataaaaataaataaagaatcgtaaaattaaaaaaaaaaaaaaaaaagagagagagattttataaaaatgtaaaaatattatttaaccgtacaaatgttaaaatattatcaaaaatagtattttgtgtaaatttttcttaaattaatatacccaacctgaaaataacatgaataaatttagggcgcgtttagtaacatttttgttttttttttaatttttaattacaaaaataaaataaaatttatgtttgaaaattttgtttttaaaaaatataaatgtgttctataaccacttatgttttttaattttaaaaacagaaaataaaagtgtgttatataacttttatttttatttttgattttatttaagcgaggtctaagttctggtatggggtggaggtcatggtccgtgttcaggtttgggtcccaaggtccaggttggggtcgaagttcaaaatatttattaagaaaaaaaaattgtttaaaaaaattttgaaagtgattttttttttcactcaattaaaaacttgaaaaatgaaaacacatgtttttagaaaataattttacttttctaatt

SEQ ID NO: 33077 - DNA, 2112 bp, Cannabis sativa
  modified_base (2074)..(2079): a, c, t, g, unknown or other
aaagaagcaacataacaaatgcagcaaatatggggagctgaagcacaacacactataaaaaatcttttataggtcataactaatatgtgactaagggagatacccaatttacttttaggaaaagtgagagattgttagggtttatgtcttaaaaagcctgtaaagatatttctttttataaatataagttgaatattttcatatatacttaaatgttaaattattaatatttaatattgaataatttatacataaatattagaacatttctcattcatacatgaagctgtgacttgtattgtacgaagaattaagatcacttagcactgaataaaatagttaacaacatattaaagttatggaatccttaatcaataattgctggtacggttcaccgatgcccattattcagtgtaagaaatcttaattcagattgctgatgtagtatgaaatctaagtgaaggtgttgtatataatatatattatatatgacaaggaccaatatgtaattaagttaagttatctttatcaaacacgtcgtttactataaagacctaattcataccataatgatgatcaatagtatatgggcctgaatcttgagtaatcatgaacttgttcatgttaataatttcattgatttacccgttaaagtttctcaaagaagatgactcttacaacttctgttttggaaatctaataatatggatgactggaaatatgatcttgactttcctaacgaattgaatattatttctctttaagtgttaattctagaactgaaaaagttgtgcacaaatttagattggatctaaataatatttatattagtaaaaattaacgatactataaagaataaagaagtaattagaacggtaacactgtaatttgactaaaactaattacaaaacaatacaaggaggaccaattactggaattgatatatcaatggacactgtagaaaaactcagtatatgtaattctataattactaaaaatttaattccatatttatagtagagtaatcatgacattaataaacatgattatttggttcataagattcaataaataatctagtatattgaaccttataattataggtttatggtcctcgggtcgccactttgaaatattatcaagtgtagtgataaaagttgtatatgaaagttcgaaaaaatctattttgatttgttaaaatagtaattatttattttgtaataatgattattttttaaatttattaattaaataaattggaaaaaatacaaattttttttggacaaaagacaccactaatgtctctttaagacataggtagcgccactatcactgtcctaacacagtgatagacgcctataagatagggttgtgtccactagatttattttgggttaattagttaattcaaaagataaatatttatttaaatttttatttgaaatattttaattatttgagatattttttcaatgtagttgagagattccctcaagtggtcgagagattccatcaatcgattatatgaaataaatatctaatagaatttgattataatatttattcaaataattaaatataatttaataaataatttgaatttaaatcaataattaaataaaacttttattaatttttattttaatataccgtataaactaaaaataaatgtatatttttttggaaagcctaaaaaagattaatctaattaatcttttctctccatcatcactatagattaattctagctcatgtgttgagaattcaacaagaactttatatacactttattctactagcccacactagtccttgtgtgtggtggaagatctagaaaattacactgtgagtatttggagattaactaaggatacaacacacaaaaagactcaaggataccctgataggcttcgagaggtaattatcttttcgtttatttatttcagatatatatatacatatagtgatcataaggatgcggtacgatgataaagacactataaaaaatcttacttttagtcacaataaaacttgtgactaattataaatcattattcttatgttgtgactaaannnnnngtggctaaaagtattagtcgcaaaaattacaat

SEQ ID NO: 33078 - DNA, 2298 bp, Cannabis sativa
ccacgtgcattccacttagcatttttctgggcgggtgtgcatagcaacactcgcctgttccatattatcagcagcaggagaagagtcctcttctctatcaccagcacgagcacgcttcagttgggacctaacagaacttccaaccaccacatgatgtggttggaaagaaggcctcttaactccagaggcagaggctaaccctttcccacgaacagtaggatcaggaaggtccttagaagggctagcacctagagtaggatcaccaccagcaacaccaccagaaaaagaaacagaaacagcaggaccagcagaggaagcacacatttgatcaacaggcttatcagccacaatcatggaattagtggagtatgaagtaaaagtagatggcctcaaggaaatgtcaaagttgggacggatggatggtgaagttgtaacagagaagttgggattcaaagaagttggcatcataagaacctgagtagttaggggagaggaaaaaggaccagtaaaatgatcattaagactgagaaaggatgggaatgtaatagtctgattaggaaagggttggggtggcagattcaagtttacaggggggtagttaaccagagtaatagctggaggatgggggtattgaaaaggctgagacttatcagtgatcttttctttgcctctaagaagaatattataggggcacaaaggtttagtgaggagttcatcacatctttgtaagaaagccacacaaaatttctttgtatgatctagcttcccacaaaagaaatagaagtcaggcaatctttcatacttaaagtcaatccatttaagaaactcacgccccatcctaatgaatttaatattcatacccctcctaataggcaaattgacatccaaaagaactctcagacgcaaataaggaccagtgccttccttaatagtgtccttatcaacctcaataaggtccccaatctccatagctataaatctagcaaggtcataggacttacacataaatgggataccatacacttgaatccaaaaagggacataatgaaggttatcagaagtaagtgggaaggaactatcaggagcagcaaagatggtaatacactggccaaaatgccacggttgaccctctagaattctacccttatccccttcacagccaaatgatacaagaaacatgccatcggcatgcttaaaaacagtaacaagaaacctacactgtgatgaccagataccagatagggtcttcatcagggaaggccgattgaaaggacgaatagtgtgcaacttaagaaggagactaattggggcaggatcactggaagaaccagtatcataggtcaaaacagtggactcatcaggggtaagaaccagggtattagacacattacctaaaactcatccatttcaagaaagagagaaaacacaacagtatgaacagaaataagcaaggcaaagagaaggtgatgaggaacaaaatacctgaatttggaattatatatatagaaccaaaaagctcggatgatacacctgagaaccgccctagtcacgtccaaagtcgcttccattgaagctgtaataatgagaagagcctgaaagactctgggatactgatcgtccgcctccaaattgcaagaatcaagggggtttttctgaacagagatatggaaaatctagagtaaatggcgagaagacaaaatggaatgatggggaaaattaattagggagggcaaaaagaagggtttagagagcagaaagaaagatttagagaaattaatgctctgatcaaatttaatgagatgtgaaatggaaacataataacacctagagcatttattacatagggaggaaggagaagtaggcaaaaaaggatatttacacaaagtcaacccaccaccaccactataccagcagttagggtggaccaaatcctccataagaggaaccaaacatgaacatgaagaagacgagaagagggactgcatgcttactagaaggctccagagagagaaaacttaataaaatatgttacttagttttatctcaagactatttaaaatttgtattatggtgacttatgtattattgtgctttttgaattttattagtgttgtaaattcgtcagacaaattttattatacgtggtaaataaaagagtaatttacggcataaccttcttaagtggtcaggttttcttagcacttagctctttccatccattttcgggtgttaagtgccaacttggaatgtctacgtgtacacagtgtacacgtggcacaatttaattagtccacgtaa

SEQ ID NO: 33079 - DNA, 1509 bp, Cannabis sativa
  modified_base (73)..(75): a, c, t, g, unknown or other
agaatagaaaacagttatttatcattttaaaaatttaattatgtttgacataaattttttaaaactatttttnnnttttttcttactaaaaaaaattaatatttttacacataaatccatttgggttcgggtttataactaggtttagaattcgagtatgtgagaaaaaatataaaatataatatgttaaaagaataaaattattttataaaattgaaaataacattttgatgttttatgttttttagtttttcaaagttccatttttttaaaaaaaattaaacgacctatattagttttaaaaaataaaaaaaaaacattttttttcatatttatatatttttttattttccacttttttatttcttaccttttttgtttccacacctccaacgtcttagtaatattttctttttatataaaaaaaacatgataaaattgaaattaatacaagaaatattgaaaaaaaaaatgtttagaacaaattatttatttgtttttaatatagtgaaaaaaaaaaaaaaaccaaatttgtgaggtaaggaaagtattgacgaaaggtaggttgacaaggaaaagtattttattaactttgccccttcatatttatttatttatttaattatgccttaatctttttcttttttctgtcaaattcttaatttaagctttattaagaataataagatatttcccgacaaaaataaaatataatattgttaatcaatgttaaaaaatatggtaaaattaattaaaaaaaattattactctaataaattaaattatattagtatcttccaattacacctaaattcgataaaggaaaaagaaattctatcattactcaaatctttgaacatgagagatgtgagctataaggaaatccattattataagatagaataactataaccaaataatcgatacaataatacaaaataatagctcatgagggcatatagaatagatagataatagatatagtggtagatacaaggcaagtatatattgtttcattagtccatattgtatgctttaaatacatagatttttcttcatttatttatggttgaaaattggccttcaaattgagatatatatttgattagattgagtaatcaaattgtcatttgtccaatgggctacacaacttgcaatcatatctaacaaattaaaagaagaccaacaataagtttggccattgaaaaactcccaaccattttgagagagaaggataatatttttactttagtcgttcataaattacaatacattacttgagatttgaattcagaatttgtaatacatacacactctcttatggtcacttgagctagtcttaagtgattcattataattcgcttctgatatcatatctcaaaccctccaaactattcataattaacttcaactgaagtttgtgtgaaacctaaaagaaataccaagaatctcataattcgctctcctgcttgtctcgaaccacatttcccattttaacgaaactctaca

SEQ ID NO: 33080 - DNA, 1808 bp, Cannabis sativa
ttaatgggatgggcctggaagtagggtcttaatttcctttgaagccataaggaggcaaaaaaactagtttctcgattaagggataccacgtctgggctcctgtcatgcgcttactaacatagtacaccgaatgctggaccttgtcctcttcccggaccaaggccgcactgtaagcgttttcagagacggccaagtataataacaagtcttctttgtgaagcggttttgacagtacctgtggtttggccatgtgctcttttagttttttgaatgcctcctcgcattcttcagtccactcaaatttttgacatttcttcaaaatattaaagaataggatgcacttgtcggttgaccggaaaatgaatcggcttaggacggcaaccttcccagtcaaactgtgcacatctttgtgtttcttgggggaaggcatgctcagtaaggcctggatttttttgagttttgcctctatccttcgttggcttatgataaatcctaaaaaatttctcgatttgacgccaaaggtacacttcttaggattaagcttcatcccgtacattcagactacttcgaagcacttcgtgagatcattggcatggcccatgcatgtcttagatttaactagcatgtcgtctacgtatacctctatatttcttccccggaggcctttaaacattcggttaaggattctttgataagttacactggcgttttttaatccgaagggcatgaccaggtaacagtatacccccttgtcagtcttaaagctagtacattcttgatctgtgacatgcatcttcatcatctagttgtacccggagtaggagtccatgaaggatagtagcttgaatcctgaggtggcatccaccatttgatcaattcgaggtaaagggaagcaatcttttgggaaggccgtgttaagatgagtgaaatctatgcaaacacgccacgtcccatttggtttgggtaccaacacggattagccagccattttgggtagtacacgtccctgattaggccattggttaatagcttatccacctctttctctatggcgtctgcttttactagatcaagaggacgtctcttttgctgcaccggaggcatgtctgggttaacatttaggatatgggtgatcacatgggttcttatgccggtcatattcccttggcaccacgcaaaaacatctatgctgcctttaatgttcaatgatcttgcttctttcctctagctccaagttctttcctaggcggataactttagtggagtcgaggtcacacacgctcactacctcggtgtcttccataggttctacagctatttcagatcccacgcggggatctaactcgtcttgttccatcaatcttggctcttcacccctgtgcaccaccaatactgacaggtgcattgcaacgttgtagcattacctcgcctctccttcgtttcccctcaccgttcccactccggcttctcgggtagggaatttgaggcataggtgccggatggagatgatcgctccaaaatcaaccaaggccggtcggccaaggatggcattgtacgctgttgggtaatctactaccacaaaggtgcagtacttgaaagtgctctgtggggtgtctgggcatagggtgataggaagccttacctttcccattgggatgagcgttgttccgttaaatcctgtgagctgggagccgctgggcgacagatccctgtgcgtgagccctatggccatgaaggcttctttgaacaatagattcacagagctcccgttatccaccagtattcttgccacgaccttgttggtaatg

SEQ ID NO: 33081 - DNA, 2168 bp, Cannabis sativa
atctttgaagatctatagtggaaacgagcaatctgaggcgagctcgaagaggatgtacccaacaacaatttttggggaacctctataaattcagtgcactctttcctttgtttttattttctgcatttctatattgtgtttgctgtgattgtattttcttgggggggttattttcaatctggtctggaaagggatttactctagtttttctgggtaatcgctgctgccttcgtgttcttcagagaagaaccacgaagaagtagagttctctgtagggtttattttgtggttgtgccgtatatgtgtatgaatagaaaaagggattatatatggtctgattggaatctagggtttcttgtgtgtgtaaaacaatttgtagttcaacgggttaaacggacggtcattttttgaggcttaactttagggagtcaacgttggatttgactgggtaaaaggtctattttgaccttggtctttgattatttcatttttgtgtagggcaaaaatccttacactctccttgtaaaataaggatggaaaatccttcaatcccccattttatgttggctagggttctaaatgagtgttactttgttaattgcttattcttggaggcaaaaccaggtgggtatagctcgttcatgtgatgtagtatcctttggtggaggaaattgatcaaaaaaggggttcactgtcgaataaaatctggcaaccaacttaagattaatgaagataaatggtttcctcaccctatgactttcaccctccgctctcttggtacggtggcccccaaaacaactcttattactcttaagaatgcaaatggcaccttgaacaaagcgctaatacgcaataattttcatggtgatgatgtccctcttattatggggttggctctgtgtgtttcaagcattgaaatgatatagtctggcattacactcctcgtggccattatatggttagtagcaactataaagtggcagctcgcaatgagttcgctcctagtagctcctcacctgagatcttagaaaaatagtagagtaccatttggcatccagagcttcctcttaaagtgagtatgtttctatggagagtctataaaagctggcttccaacggggtctgtcttgacttctcgagggatgaaacttgacccattttgtagtggttgcggttatcgtgatgaaattgtccctcatgctctttggtgtttcctaggggtgatcccattttggaagagtttctctttgtggaagtgttttcccctcctcacttgaacctcatggacattttatttgacatctataaaaaaaactagccagagatgaatttcatacttgtgtgattctctcctggctagtttggaagcgtagaaacaggaaacaatttcatttatcggttcaacgtgatgatcgatggatcggttgggcgcaaatggaaatagttgagctactccacctggttcgatcaggtacttcttcttctcttcttactcctacttccgtttctcggtggctttccccttttcctggtattgcgtgcatcaattgcaatgcttctattcttaccaagggcgaggtctatgggctgggagctacaattcgagaccacctgggccatgttattgcagccgaaatccaaagtcgcaaaggtcatttctttgtggagctagctgagtgcattgctatccaaataggtattcaactagcttcccggttacatcttcaagctacaattcttcagtccgacaaccaacgagctattaactaattgcagcagctcgcttttatagccatttattggagtgcgttgcttgatgaagtgtcttgtctggctggttccttttatttcatttcctttattcatgttaaaaagttatgtaattctgttgctcattgtttgaccaatttagttgtggtcaatggctgtaaccaaatttggtatggggactttcctgattgtgcttcttccttaattagtgtagaattgtcttcccctcttttgttgttttcttagtaataaaattctatttcaataataataagaggttttttatttttattacatttcactttttttttttttgtatatttttacagaaatccacataacaacccacatagcaaccaatagagtaagctaaagcgtaacttaaatccacataacaac

SEQ ID NO: 33082 - DNA, 3910 bp, Cannabis sativa
  modified_base (63)..(65): a, c, t, g, unknown or other
  modified_base (2655)..(2667): a, c, t, g, unknown or other
tttaaaatatagtataattactacactgtgtaattaccaccttagtaattaccctacctagtnnntacacagttacttccaaacacacataagattacaattctatgataaataatacaaaggataaaattataaatatttaagaatattacaacactaaataaaatatacacataaaatagaaaatatagagaagaaaaaaaaataacaactcaacacaataaactacacacaaaacataatatataaaggataactcaaacaattgattttctatacaaatgtttgtaaactaaatcaacttgttcttgttaaatagtataaaaaaattatgttacaccatcagaattgtatttgaagactgatgtcaaacacaaaaaaaagtaaagcaacgagaaaatatagattaagagagagaggagtcaaaaaaatgttaattaatatttttacctcttgaattataacatatgcattattgttggctcctaaagttttcagcctgtcacatcattatatctctttgatttaaaaggaaaaaaaataagtatttttaataacattattatactaaaaattaattaatgattaaaaaattaagtaaaacttttaaataatttttttaaaattaattacacacgtaacacaattttattagaatatgttgtccaaattttttttcaaaatacgtagtagtttaggaggaagccaggtggcactgggacctacgttacaggacacgttgccctaattactcctagatccctttatttcaaaggacaatgacagattagtcatctccgcgagtattcggctagaccgcgagcgtccctcgtttgttcctctccatgagtaaagtatatccagagaacgatataggagaagtaatgaaagatgacgtgacattcaaggactaagacattgtacatgcatttaatgcagcatgagagagaacatcagacacattactctgacaagcgtattcgagggtttaggcctattattcctagatctcacgagcccccatccattaattgacgactgcataaatgagtcatcaaatcataaataagggataaattacatcccaccaaactatagacagcttaaaaacctatcataaaatagacaattatgccctaagtcaagtttgagaaattataccaagtatggtgtaattgaaaaggacaacagtgatattttaccactattacgagctcataaatactccaatgataaataaaaatggggggccaagaaaaagctctgtaacaaataccctcataaatacaataactcgtggactaaagctcattaatgtttcaaccacgtaaaaaatttctcttctaacttttcttaaacacttcatacaaccttaattattggttgccgaaaatcttagttaatagaatatatatgggtataaattatgagtttttatgtttttttttttatctaattaaaaaaaatctcttatttttacattgtatagttggctttgtttcattggtaaaaaaaattattcaacaaaaaaataagatacaaaaatattagtttaactttagtatttttataaaaatatatttgtgatatagtgtaaatataataatttttttttctcaaattaactggttaaaatctaaaaaattaagtagttttttttttttttttttaagaaattagaaattagaaatttttttttattattggatcaaaatttaatgatttaatatttttaaaattagtatttatagataattatttttagtaagggtaatttaaagtgttccatttatattatgtgtagatatttttatttaataattaggcataactactaagtgtagatatttataaattaataaaagaaaaaatgtagatatttataaaggcttagtttagatatttagtttaggttgaattttagaataaaaaaagaaagtgaaaattggagaatataaataaataaatagtattgaaccaattttttagtgtagatatttatacctgtatagaataaaagaataaaaaaatgtagatatttttaaatgcttagggttagatatttttgggttaaatttttagaataaaaaaaagagtaaattggagaaaataattaattaaatagtattaaaacaaattcaaaacatcatctcatattctaaaatctcagttttatatagatatataaataaatatagatagatattttatttaaattaaaagaaagtaatgaatttaaaataattaatcaaatttatattattacagaactattgtacagattaaattaaatctaaaataaaaaatttgcacggattgaacgcattataagtaaattgaaacgaatgaacactctaaaactgtctccacctctattaggagatttcccatcctattttcactctattaagagattcctcatatagaaaataaacgagaatgaaatttaaaattttgaataatttgcggcataaatatttaagtttaacttccagttacaaataaataattaagtttaacttttagcggtaataatacttaagttataattctggaacttttgtaagtacttaactgttaattgttaagtaaattgccacatggtaatttttttattggtctaagtcattaaatttttttatttttttaaaaaannnnnnnnnnnnnaccaataaaaaaatgacacgtggataatgacataatatttaacgtaagttttattaccgcaaaaacttaaacttaagtatttatttacaacatggagttaaacttaagtatttattccgcaaatcactctaaaattttatattagtgttctaagtaatataattatttaacttattataaaaaattattttaaaataattccaaaattaaataaaataaaataaataaaatatggggttgatcttcttcaacccatcatcatcatttcagtcacaggtaactaactaactaaccctagctttttttgaatttaaaaatttcaatatcatccattttcgaatcttattatttacagattttcatttctgtgtttgtcgatttatcagggccaaccttagcttcttcttcatgattttgattaatggttataattagccacaagtcttattaaacagttccaagctcagctatggctttctcctcagctcctcgctccaatattcctaccgcttcttcttcttgccaccactctaaggtctgtatatatatatatataaatatatttatatatttaataactttaataatagttgataattttgcatacaaggatcatatcactgagaatggagtcttatctagatagttgaaattttgagtctttttatgttttgagaaatgctaagttcgttatcggtacatttcaatatcgggtcttcgcatttttgtttaataaataacataaaaaacctctaaccaattgtgaggcgatatcgtgttgagtatcttaaggtgtcaaataacaatagtgacgattgataaaacatggcttttaaccatggttttccatttttatttaatatgtaatatgaaaaatcgctaatcaattctgaaactacatatcggtgtggtgtcgagcatcttaaggtatcaaataataatatttttatgttttattgggtgattgataaaacatagcttgtaaccacggttttcctcagccataagcgaggctcccgaataaagtttgggaggaggtgagtctaagacaagtgaacaacaacttaggctccttatagagaaaaggaaggaaaaaaatttggggtttggataacttttcctgggaactaattaagcttattcccttttgatttgattctttattagctatgactattgaagctatttgttaatttatttttgttaatctaagttctcttctggttatttgtcaagccaaaaa

SEQ ID NO: 33083 - DNA, 1947 bp, Cannabis sativa
acaatccactctgttttcccaactatgcgctttctgcaatcatctgctatatgccccagccccgaacaatgagtgcaaatggaaggtttccattcgtacttcactcctatagatgaattccacccatgttcatcttcaaattccagcatctcggggagcttttgattcttgttacctttcctagttatgtaaataaaataatatgattcttgttttctttccagatagtttagtaaatagcataataaaatattgtttctgattattttgtattttaaatgatacaattctctcattgattattcagattccaattacagtttagtaaacgcgccattagaggttcctattcttttttcttgatatagaccaaatcgttgggctcaattgttttgtgccttgatggaggagaatgggtcatagaattctgacttgagtgtctcctaggaattgctagatcccagggaaagcttgagataccattgttgtgctacttttgatagcgtggttgaaaaactcgacaacgagaataatttctaatgccttgcaggtcaatttgtacttcgaagttatgtatgtgagagagagagggtcttcttttccagtgtatggatgccacactagatttttaactttaaggggatctccaaagccttaattcgatctaagacaagagaacaccactctcgatataatctttactctattggctttggagtagtgatgcccttaaccagagcaacatgggtgttaaattcggccctacacactgtggtgatgtgtgtatcaactgaccacttcttgttgatgttgttatgcaggctcttttgtcttccaagttaatcaaaggtgtaacaccctaatctataaggacgccacgtgtgtaattttataaactagtttagtaataatatgttaattaattattgagatctgtgataatattaaaaatttcactataataaatccctagtaatgaacaacataatgacactaaaactttgtttcggggatctctgatataaaaattttacaaaaggactatataaagtaataagtcaaaatacacattagatacagcccaaaacaactcttggcaacttggcacacgtcataagggtctattatgtacattcgttggagaagatccgtcacctcatagatgctctaacttttccttgcccttacctgcaccatagagcacccgcgagtgacaaagactcaacaagaaaagtaataaagaaaatacatgtaataactaattatccattttaccatcataaaataatcaaacaataacattccgaagattatataatataatcaactatatatacagaaatgagaagtaaccatcttcattagatcacattgcctaatctagcaagtcaatgctttaatccagtaaccatatattgcattgcctaattaggcaagcccgtgccataacccagcacccatatatcgtatcacttaatcaggcgagcccgtgccataacctggcactcatatattgcatctcctaattaggcgagtccatgccatagcctggcacccatatatcgcatcacctaatcaggtgagcccgtgccataatctggcacccatatatcgcattgcctaatcaggcaagcccgtgccataacctgacacccatatattgcttcacctaatcaggtgagcccacaccataacatggcatccaagtatcgcattgcctaatcaaacaatcgacaatcgtgaaacctatcattccatgtggtacattatacttttcttaccttaagtttcagttcaagtatgttgcctaacctgcttagagaacgatcaacgatcttgggccccatgtcataataacaaaacaataattaaccaagtaatctaacctattccaagtccaaaaattcattcccaaggatcccttataggtcactagggtatccctac

SEQ ID NO: 33084 - DNA, 3213 bp, Cannabis sativa
  modified_base (2508)..(2512): a, c, t, g, unknown or other
tttttgtaatagtcactcttctttcttttcgagttgtattttttctcataatagcaggacttgtaattttgttgtccataatgtgactaagtgggcgtttacccgcaagttattaggtgatattccgctatctaccatttctttaaacatattatgtaatgaccataaggtctaacctattctattaatgaaatacgctttttttcaaaaaaaaaaaaattacttataaatttttaaaaaaatttgagtagtttacaatactaaaaataatgtataaataacaaaaataatatttaaacgacataaaaataatatataaattacatattaacaacaacaaaacaacaatcaaatagaatttaaattgtataacttatatttaaaatgaaaatgtctttacaaacttttaaaggcataaattctagcatttcataaaaatctgtttgcacaaaaatatgtattttttaatatatatttatatatatatattgtaggaaaaactaaaaaaaaaggttgaaaaatattgtcttcaacaaataatataaagtaattgataaccagaatgttaacttaaatagtttgtatataaatatatttttgatataaagtaaaaagagatattttttttttatattttcttaattaagtagttaaattaagcataaaaatttaaaattttgtttttattgtttatcatttgatcaaaatctaatgatttaatatttttaaaattaatattttataattaaatttattcagtaactatcaatggtatttccatatatatgtgtccaaatttgtgtaaaaattttatggtatgatattatttttatttatttgtgtaaatttttttggttgtgttttgttggtcatgtggaggcttcttttggtgagatgattggtattaagaaagttttaagttagatcaaaaagaagaattggcaagatattcagtttgaattggattgtttagttgcggttcagcgcttagttctatttttatcccttctcattatggacaattagctagtgattgtcatcttatgttaaaaattttaaattttgttaagatttgttttgttaaatattttgtaaataaaactgtttattatgttgctcgtggcctttattttattcagatcgtgtgtttttaataagaatattgctctattaaattttatctattataataattgaagcttgtttgattaataaaaaattattctatttcaaaaatatatagtgtgaataagagtatttctatccaccctttgaatagattctataatcataatttatatatttacttatgactttataaattaatacttacaatttactaactttatatatttagattatcttgtatagttgtttatattttaaattgaggatttacaataatgagagtgattattgtccgagatgggtctccaaatatgacatttataattcattttttatttttattttgtctacacttacaattaatatttaaattttaggtatgaatggaataaaatgtggtcgatataatcctcaaaaacacaacttatatttctagtttatgcatgagtgaatggaacaaagtgttagctattaaaaacacaactattttttgaatgaaatatgcttgaaagagaaacctagataagttaggtactacaaaagaaaattattaaaaatgtgtgtcaaaataaataaattatattataatattttttgtagcaattatattataatatttagattcataatattgattattttcaaaagtacaagcttcaaactataactcactttctatggtaagtgaatacatgcatttttttattgtaagtatgaagaattttattactaataaacaactttttataacttctaacaaattataactatggagttatactcaagctatctaactaaatgcgattttttatattagttttctgtcttttaaaatgagaaagcgtacgtaaaataaatttctcttctcattttatttacaaaaaaaaattacagtataaacttgtgcattccattgagcattatttatagtatccaaaatattaaggacaactacataaatttctcttttcctcataagcttttgcatcttttcacccacttcaagcaagatattaactcattttgttgaatattcagcacaactcgattgaaaattttctcttgaatttgtttacggtaattgcatttaaaaaaaaaaaacaaatgatataatgagtctctaaatctaaatcacaaaataaacaattcattttatcactacaatcaaaatggtacaaagtataataaattggtaattttcatttatatacaagtaaatgtacaatattacaaaaaacacatttataaattttatttatattttataaacaatgtatataaatatgtttatattaaacaataattagtattattaatgtttataatgttattattaatatagtatgtttattatgataataaatataatttgtttattannnnntcataataattttaaaaatgaaacatttaagtttatttatttatttaaataaacactttatataaatgatcttggaatatggaaacatctggtatcttctctgtaaaaagtgcatataaacatctacaatctgtccaagggaactagaccattatggatgatgtttctagttggaaaaagctgtgaaaattggaggttccccccaaggttctgcattttttgtggtgtgccatctcgggatgtttgccaactaaagtgcagttgcacactaagcatgtaaatgtggatctctattgtccttcctgccttaattcttatgagaccatttcacatgtgcttatggagtgtcactttgctttgtcttgctggaatttagccagcccgagtgtgttacatggtttcaatcatgattatagcagctggttttttaatattcttgatgctaattcagttgaggtttcggtggatgctgccatggtgagttggagtatatggaatgctcgaaatgatatttttttgaagaagaaaaagaaaactgctgctggtgtagttcactcggcctgatccactctgcaacaatggagtgttgcccgtgtggaaaagcttggcccgctgctggtgttcggtccacatacgggtttggagctttggaaaaaatgttaggttttatgtcctaaataaaactccatttcattgtaatc

SEQ ID NO: 33085 - DNA, 2635 bp, Cannabis sativa
  modified_base (287)..(290): a, c, t, g, unknown or other
  modified_base (1527)..(1531): a, c, t, g, unknown or other
tcaatagttcgaggggaatttttaacggccaaaaaagttcaggtggcacgatttagtacatgtcaaagtttggtagaaaaaattactaattagcattgttttaaatacacaaaaatatataggtcaaatgttacataattataaaatcatatatattttttttatcaaatccgtgaaatatattaatttaattaatatacatatatttttgtgcaattgaacattacatcattctatacacactacaaaaaattttactttaaatttagtcacaataaaatttgtgnnnnaaagtaaaaaaattgtgactaattgtaaatcattattcttatattgtgacttaaatgtctatggctaaatatattagtcacaaaaattacaatttgttattaaatatattttataatacttgttgtggctaaaactaaattagtttcaatttgtatctaaatattatattttagtcataagtaacatattgttgtgactaaaagtcacacttagaccaaaaaaaatttatattacgtttaaaaatttttcactaaatgtagcagttttttatagtgacaattaactatgctttatagattgatatattggttataccatatataactaactatatatatatgatttataggtctacaccatatgtatttagatgtaatattttatttcattccacattttttttaatattatgtgctattatattgattacatattaccacatcaaaacaataaataattaaagtggtttttggttaaaggtagtgaaatggaatggaaacaatttttattttatttttttgttttattatattttaaaatattagaatgtcactccaacacaataaatttttccattattttagtagaatgaatattctattttgatggatggaagaaaagatcatttcaatactaaatgagaaaaaatttaataatatcttttattaattttattatacattttaaatttaatttcctttctatttttatttcgattaatactcatttttattcaaatatttttattccttttaactaaacgacatcaaacatgatgtgagtactaggatgacaggagtagaaaaggttaaattaggagtatacacccttaccgccttgtgttgttgttcaattcaatactatgaatagcaataattacaaatacgtgtagtatagtttatatatattactatactaatggtaggcgcttttgtagcactaacaaatagttggaaggtctttcttatatagagaagaaattaaagaataaactcctcaaaatttattttacattatatatttataaattaattattattattagactaaactataatagttagagaggtatacatgtgtaaattgtaatgcaataataattattttctctcatatatatcgtaacaagtttgtagaaaataaacaacagtgataatctatataggtcaaaaatcaaaagaaagcctttattattaattttagtggaatccttttatatactattttttaattttnnnnntttaatttacggtttgagttactttggtggtttctttggtagtttttatgtagccacttgctatatatagattttatagtttacgattttagttactccgttagttgctttatcagtttttgtgtaaaattccgtataaattaaaaaaaaatctattttaaagtgtaaaaataataataataataataaaaaagtagagctaggttttttcttagacacgaattcaaaactgaccacatatatgtaaaaatgatatataatgtagtatatatgtactaattaatgaactcctaacatcataatttgatataattggttcatatatttttactgtttgatttattagttagttcatgggatcatcctcagccactagctatatatatatattttctacatatcacaaagcaaggtacatatgaataccataattattttgaagattgtattattttattcgaaattcactcaaatcctatcacatccggtcccccatcgttttctaaataaattatgatattggaagaaataagctacaaaaatatgtataaaaaaggttatggtaaataatgttcaattattcatttcatcatcgatgttgtattttatgaactacatactggtgatatatcctatcgcatagattttcataacaaattaattatgtggttttctatagtataattttcttcaaaatccaaacagaacaatatgctgtacaacaatgagaaaaaagtactcattattagaaaacatattcttgatcagtgtgtgattatgtgaaaagacgttatatgtaaatatgcatatatagtttatcccacttgtgctaccggggaatctaatggaaataataaatatagtttaaaagtactgtgaattcctattaattaatatacctaatttataagtttaaaaaagtatatatgaattggatttgatgtaggattcggcataaaactttgtaatgaaatttgaaagaacattgaattaactaaaagaaaaagaagccaaccaaagtaatcagaaaaagaagccaacaaacttagacaaaaatgactttgtacatatcatagggaaatatacaaatgagcaacttattta

SEQ ID NO: 33086 - DNA, 8979 bp, Cannabis sativa
ttaagcctcctttatataagaagaactgtgaaaatacttgactatacctataaccacaagtaagtactataattaattaaattagtttaaggtataagtacacaatatattattggttttttttttttattcagttttaactaaaaaaagtaataatgttacaaaaatacttttagctagctaaataaacaaatattcaacacaaataaaaaagattacacaaatacctcttacccacaccttcaacccaggatccatgcttcttgggcaaccttcggacaaccacgcaataacccaacgcaaccgaaatgaaaatctaaccagaaaaagaaccactaataatttcggtgacttcacctgagaagacaaccagaatcaatcaaaacaggggctatttcgaattcattgaaaaaaaagtacagaaaaactactacgaaactaaaattcaactagaaatctagcttaattcgcataaaactaatgtcccaacttcaattttcagatccataaagtgcagatctcaaaaagttgaactggagtttctaaacaatcaaactcaagtataatccaaaaaaattacattaatactatagtaaaatatttatcctggtgtattttcattgttttccaaatttttaatggtgatttattcatattaaatcacgaagagacatgtagatagaatcacgtacgtagaaacactgttctgatttttaatgtttcataacagttgcataaacattttgctaatagttatttctctacatattactattaaggtacaagtaattatctgacaaaaaaaaaatactgacaaatagtttattacatatatacattttttagttgcaattaagtttgcacgttagttggctcgcaacagatataactattgcattacagtttcaacagcaacccacatccatgctttttgagattgaaacctttgtctgatgtaacattcggtcaaccacccagcaaccttcatctgattgaaactttcggctgatgcaaccttcgaccaactacccaacaactttcgtctgattgtgtaagtgatagtgtaagaggtattttggtaattaaaagtacataaatagtataaatgttatccacaccttatagatgtgttttcataaataaagtgtcaatttgtatttttttaaataataattcctatattatttataattaaatttaaaaaattactctcaacatttatttaaaattttctttttttcattattttatgctagtttcaataattgccatgatttttgtatatcacttataatttttctaatttttatctaataaaaattttcaaaattattttttatttttttcttaatatttaaaatatattttattttttatgtatatttttttaacaatatgagaaagaacactttttttttcttaaaaaaatattttaaaataaatatatattttaaatgaaaaaaatgattaaaatatgtgtcttcataagattttgctatgtaaataaaactcttacatagatattttttttaattattttttactctttaaatttttttatttacaaaaatacctcttcaataaatataataaactgttttttggttgttttataatccatttatagttccattatagttgtcatgaggttattttttgattgttttacaatttatttataattgatttatacttgtcgtgaggttgacttctagttatttttaagttgttgtcttactttttgctgaataaagtatatttttataattttaaattttgaaagtacatttttgtaaataaaaactttaaatcgtaaaattgtaaataaaacataaaaaaaagaggtattttttttttttttgtattataataagttaagttgtatacatattaaaaggggcttttctcattaatacgatgataattaaaaatttaatcatttatacggaagaaattaggctgtatatctcttttaagttggtgtctttaaattttaccttatctttctatattttttatttttaccttttcttcaactgttctactaattttgttcctatcattacacgatatactgagtcaattatgatggatgaggtagaaattgcatgtgttggactgctatggcaaaattagggttctttgcatttcagactaattaattaaagtagcatatgtaagggtatattgggtaataaacttataaaagttggtagagttggtagatttgaattgattttaatgtgcaactattttttgtgaattgataaagaagtatttctcaacttatctctatttatagagctactcgtaaacccaatcatttcctcctccagaaattgtaatcacctgtaccatccaacttgtctatgtcaatctagacattactcataatgttaaaatcaaaatttaaataagatgaggttaaagaatttaagttctcttctggatcatttgaaagaatgtccacaaaaccttctttgttgaattcagcttttggtggattagcttcctccagatttttctttcaagtctagatcaattatcttgagtttgaattattcttgctgaaattcgcagctttcataccattattggtattttacccttaaatccctccaccgctcacaagagaattagccacatattaaggttaatcttaaccttttacacacacaaacgtatgaacaaagcatgccacacactgttttgaacaatattcttattttaccaaattttatgttttatctttattgtttttatcaaattaacaaatgcgtgttagagagtctcacattgctaatgtgtggaaagataatagaatatataagaggaatgagctactcctcccattgccaaataattttgagatagaacctcattcatcttattctcaaattctaacagtatgcaatggcgattccaactcacatgctttgactggtaatcccttctagctagctctttcttgctagtttctttctacatttcttctctgtatttctctctaactcacactaatcttccttctctctctttctctctcactaatcttgtgacgagagcttctctctctaacttagagttctttgagcaaggaatggcaagtgcggtacttatatatattgttctaattcttttaagctggtagttagtagttattccagctcagcttgaatctgttataactgaaacacctttaagttgtattgcttttgttataacattgatctgctgctgtagtaaggtccacggaccaagtgttataaagtgcacaacttatgatagactttaatttaacaataggtatgttcactaacaattaaaaaaatcagttttctagttaattaatcaaatactaagcacaaattacaaatttttgttaagctaagttataaaaatgaaaacaaaagggttgccgaagaagctaataataatttagacattttttccacaaatatcctaaatcaatgtgaacaaattttccttggttatatgaatttgaaattcaaattcaattacataaccaaagataattaaactatattgatgataaaatttatggactaaattgtaactcgagagggtatgaaagtatttaagatttcaccaaataattattattgaaatattacatataaagtaaaaattttgtatttagagaaataataacatacaatgcacaaataagtatttccccaaatatgaagaattaaccacgaaaaataatgattgaccacgtacttattaaaagaaactattgtttgagtagtttcaacaaaatttacaatgttacagcccaaatatgtcacatatcatcatcatcatattaattatttaaccaactttcagcttagaaaacttactgttgaatttgataaaatgttttcacttttaacacacaagaaaaataaaaggagaagtgaagtaagagagtaggaaagggacagagtaagtgaaggtgaataaataaaatccatctaattaaactgatcttggcttcaaaacaatggtggaatgcttcaatatgtgcaagctaaactgtccacctttctctgctgtatcgagcttggactgtcctggtggtggcaacagctcaaagttctgcaccaaacgcccaatagtgatggcaagaattggcaaagcaagaatgataccagggcatgcccttcttccaaccccgaatggaaggaacctaaagtcattgccattggcctcgaccttagactcttcctcgaaaaacctctcaggcctgaactcttctggcttcttccagtgggcggggtcattggctaaccaccatgcattcaccaggatcttgctctctgctgggatgtcgtagcccgcgagcttggcctggttgaggttcatgtggggcacaaggagtgggattgccatacgtagccgaagtgtctccttgatcacggcgttaaggtatggtagcttgtgcatgtctggctcggtcacctgtacacctggtcctagaacagtgtctagctctgtccttagcttgttctggatctctgggtggttcacaagctccgcaataccccattcgattgaccacaatgttgtttcgatagctgtttcatcaaatttcacaaccaaaaagttattattaacacatcattatggtctagttggcttgtccttttggacactcccaaaaggaaaatgttttaaaattgttgtgagccgaaagcataatggccaatatatttttgttgaaaagcacaaagagctagctagttttagtgagaaaattattaaattagttgtgcctatcctatccacctaaagttggtggggggcaatttctttttactcaattcatatgactttgtacctatggtaagacatttgtgccgtaatttataataagcatgaattttaagatgcattaatagccctttttttttaattggtccccctatgatttgtttgacccaaataaataaaaatattaggtatcattactaaaataatgaaacaaaagtacacacgttaactcttgtctatagtagaccaaatttcttcttacttaattattgagatgaattatttccattaaaaaaattattgagaggaatatttaattttttatttaacagaaaatgtgatggggtgttgcgtaaaaagtaagagtttataagttgaaaggatccttcaataaaaaataaaaataatcataataaaaaaaataaaggatatgaattcgaaataaataagtaatataacattgggatccaacaaggacaatgccatgccatccacatggatttcggtggatactacagccgcgttaaaagtttgccaaatcatgagtatattttaataatataataataaaaaataatatggtgttataaatattatattcaacaaaaattacaagttgatatttattaattttaataacctcctttataatgacaaagtttgcatgattatggtaatttaagtctatagcctgagtctgttcaaaaaaaaaaaaaaagtctatagcctgagcaccaccaaattaaattggtccattttaaaaaagaaaaaaaaaaaagagtagacaacgaccctagaaaaacagaagggcaagttgtgctgaatgttttgtaatttgtactacagagaaggccaatgcccgagaaatactaaaacgcagttagtaatttttatttgtcaatattaattattagtcaaatttgatataataatttaaaaaaagttaggtgaaggaatagaatttatttactttttaatacttattttacttgaagatatatgtaacacccatatgccagtgacggctaaattaaaataataaagataaacgacataaatacaatgtattgggatatgagttacatattattaattacagtgcattttactattggtgttttaaatgttgatattagtgtaattaattttttattttttttacttttaataaatttttagtattgaaaaacagtagaaagaaagaaattatagaacatcctttaaaaaaaattgtagaagagaaaattggagagaccacacaaaatgagatgttttattattattattattattattattattataattttctttcttaccaaacatatcattttcaaaaaaataatattattttttttgaaaatgatatgtttggtaagaaagaaaataataacaataataataataataggaaatttttttaagtggaacctaccaaatttcttcctctctaaaatgggaagaaaagagaaaggaaaagttttataattgtatttgtatacataggtatataggaatgtataactcatttgtatactgtcatttctatgacattttccaaaaaaatttcttctatttactttcctttcctcgataccacacatacagtagctgttagttttcaaatttttcgtttaataattactataaaaaaatggtttaataattatcatgttcacgtcattaaatttttaattgtaatttacgtttgaaattgttgtgtttaatgccataagagacacgtgtcgtatcgactcttggttggtaatcctaccaattctaatggtagaatattctagttaataataatttaaaaatgataaaaaaaataataataacaaaacgtacacgtaaaaaaatatttaacaccatacgttaaaaaatattaaaaaagcttaaaattatggtgatgatgatagagataaactacttaccagcaacattaatgttctcaacgatgtaaagaacgttatcttcattaatttcacccttttgttgagcttcaagaatatgatcaatggcgcatttcaatccttcgttgtctgtactctttgtgctagataatttcctgttaatttaaccatagaaaaatcaataattaaaacataaatgtaaattaatttattttttttttttcaaagaaaaaacttacttcctctcgtcaacgaaatagtccttgaaaagttgaagcctcttttgtttgacttccttacatatcttcaaataacctctcaaaaagggtctcaagacaggaataaagtcaccatagttgtactcgaagctctgggctagtctactcctctcaccattcaaagccttgagtttaacgaagagtgggtcatcttcgctatcgaatctcctgtcaaacatgatcctgtacatgttgttgtacatcataagctggagcctcttcctcaaaacgatgccgtttgtggcagattcaggattcttcttcacgtcatcaaccacgctacctgcctcggcttcccacccaaaccggtactgttgaacaaccttgttagtgaagaaaggaacggtcatgattctcctcatctttctccaatgctcaccgtacactgtaaacaccatatcctgacccttaccagtgaagatatcgaatacaacgtttcgggttctggatccgaattcaactccctgggtatggagcacctctttagctagctccggtgatgaaaccacaacgagatttctttgtcccattctaagcaagaaaatgtcgccgaatttcttggctaagtcggttaagttgcggtggttcaagtcatctccgacttggagccagtttccaaatacgggtacgggtatgggtccgggtgggagcttgaatttctttcctttgagctttgcgatgactattgcgaccaccacagctacaaagagagctatgagggtcttctccaagaggaggagatccatggcgttggataaggaaaagtgggcacacaataagaggaacagaattaaattagagagatggttgggtttaaattttgtttgggttttcggtgggtgttaagggattttatagtcgagagcagaaagaaggtgtggattgacggctcagcgttaggtgaatcgtgtggtcgtgtgtttgacgcggggagttggtggtgagggagagccgtcacgctggacttaacgccgttagagtttcaacatcttgtgggagtaggtgaagattaaacatggcattatactatataataataatctcctgagttcccaatcacgtaaatccatttccattggccaatagtattgtgccacctcatcgccgtaattgcccgttactactgtaacgcacgcacgcacgcacgcacgcacgcattgaacgttactactactctatctgtttaacctctttttataattattaaattcacatgtagacattggttctattttaattctaaatccagatttaaccatataatggaaaagagaaatggtaaggaaagcgcattaaattaaagtattatcacttcaaccacaatactaaaaattagactaataaaatattctttattattatattattttttttaataaaattaatatcatattaattaactaaaatcatcacaatacacttctttaagagacgcgtgtaacagacaatttaaattttattttcagcatgttaattttttttatttttttgaatttttgtaaaaggttttaaataactataatttacacaatcatgacaaaaaataaactaaaaaatctcttgcataccgaaataagtaaaagtacattgcactacttttaaaaagttacattgtttttcagggtgttatctttttgaatttcttaaattttacatgatatctaaaataattaaaatataactataaaaaaatgagactaaaaaagtttgtcaaataccaaaacagatagaaatacattagtatattacttttagaaaagtgcaatataaaatttcttaaaattaaattctttcataaataaatcaaataatataaatattaattaaatatatataaaaaataaaaaaaataaaaaaacatatatcgtatttatatttacagtgcacgaaatatgtcgtgcactgtaacttcaaaatgcagtcttcaatagtatcttcttaaaacaaaaggaacgatatatataaagggagctaatacaataggcattgtgatttttacctatcaatag

SEQ ID NO: 33087 - DNA, 1617 bp, Cannabis sativa
  modified_base (1427)..(1427): a, c, t, g, unknown or other
agctagaacgattaactaaagtttgtaagtttgatagctattctaaagtgattaggggtggatcatcctatggtcattaagataagaaagtgtttgtttcaacaaaaattacttttttaagaacatgactatatctgaaaaacaaactagcaaagtagaggagatactatttgattcaaacccaaaatgttccatcatcttatactatataagatggtctcattgcctctgttgtattgacacaaccgatgagatcaataccactaatgttcctacacagaaagtcatggtacctgatcttagtgggcgggtttaaaggaactcaccttgttatgaacacttgtgataaaaattatttagtacaagcaatggatagtcctaataaagaactaagaatcaaagcaaagagaactatggttaaaaccattcacatggagcaaccaaaagttttctattacaaggacaagaagggaaattttttataataagtctattcattggacttaacaaaacttctcgatcctagtatcataggtttgagatcatttaaacctatggcttgcgatatacttggtaatttacttactctggtacaagcaacttatttttagtaagatgctggagcatttttccaatagctaactctaaaggaagtcttttggctcctagacatagagtttatttatttaaggaacacttttaactattccagaaaagataaaggtcaagaaaaaaattctttaagaatcaacagtgacaggtctcatgtatgctttgacatgaattagaccagacaactactgttgagtgagagttatgagtagatatcattttagtttaggaaagggacattagaagacaatcaaataaatcttatgattaaggaggacatgtatgttagtctataagggtgatgtttatcgaaaccctttaggctacactgactcatatttctagatttgtgttaatgctagaaaatctaaatttgggatggtgattactctggggatggagcagtaattttaaaaaagtgttaaaacttatctaaagtctctaactctaccagtgagactgatgttaaagtggcccaaaaagctattagataattattaaacctatggaaagttctatacagtttttggcattattttagtcatgaattaactactagtgttaattcctgataacacaaatatagttaccaaactgtaaaaaattcaataccctaagaggagtaaacatatagaaaggaattttacaatattaaagattttatgaataaggagatgtaatggtggataatgttgaattgaatacaacctgtcagatactattataatgataatactacatactacacttgatttggacatcaagatgatgagattaattgaaatacacttttagttttatgttagtgcaagtgngagtttgttgggattttatgccgtaaataaaactcatttcaatatacaactttactaattaatatataaattatattaaatccagagcatgtagttattcacaattacagtgatgtcatcatggtggaaagtaattgtgattgtatgcttcaaattctttagatctatgatttatcaatgtactagattt

SEQ ID NO: 33088 - DNA, 1205 bp, Cannabis sativa
aaatgagtaatagtggaattaatttgtataaattagtggagggtatatattttgaaatggggtattttattagggtcaattaatgaaatttccctattataataaaatatccaacctatcattacattttgacaagaaataaaatatagcatgtaataaaaatttctttaaaaacttcttaattaaaatattcaccttagaattgaaattaatatatataatttgaattttggatatctcttctaagataaaaagtattaaacaataaaacacctacaaccataaaaatattaaagcagaatgacaataagcacactaaaattgataatgataaagttattttaaagatggaaacctaaaaaaggaaacctctcggcttgaatgaaaatgacagaaaatgcctattactgcattaggtttttacaaagaataaatgatgtatgtatacacaagtctaggcccaataaggaagtgggctgaaatgaaataagggccaaaaatactaagttctaatctcaagataaactgtataagtttctcagattcatcttgattataactatatggaaataagtaggaaatagaggcttgtaaaaatgtcagcaatattatttttgcaagtgaccaagagacttgtctgcatggtcacttggggggcacccgtactgtacaatgcatcgaactagcatatagaacttatgctgagaaattttaacgcttagtataagctactaaacctacctctaagtcgtgcaggcatacttcaacttgacaaagtaaatccggacccttacttgtcaaggccctaagaagatagtcaggattaaagaccgcctggtcggtcacaccatccataataaaaaagcaacatgatcaaatactagttgtgttcataaatagagggctcatggccaaagacacgaacatgaagatcctggggctgaaaataaagtgatgttctaaaaagacctcagtccacataggacatgaaaatagtattttaaaaaggctttaggccacataggacctacagtttcaaaaaggccataggacacatggaatgcaaagtgagtaatgttcctaagctaagatgccacaggccctagaaaagccacaggatatgcagaacatgaaaacatagtctatacaatacaaacataatgctgaatactgataaattgtctacatgtttataggggcagcaa

SEQ ID NO: 33089 - DNA, 3195 bp, Cannabis sativa
  modified_base (1143)..(1143): a, c, t, g, unknown or other
agtcctggtaaaatatttcaaacagacagtccctacaattgttggattaagttagaggaatatggcaacctattccaatttcctattttgtgtatcataattatgtaatgaatattctttcctattttatacattgtaagcgaaagggaaacattccctcatgcattaagtccctataaatagtgacttagcctcattgcgaaagggattgaagaattgcttcagagagaaatctaagagaattactcagagatttcattgtaagagctatgagagagaaaaataatttcttctttgtctcaagttaatacaatctaaaggggagtaggctattgccacactacgggaccgaacctctttaaaatctggtgttctttattacttattggtttttgctttatttgaattatattattaatcacttaataattgactcgctatcaggtcaacattttggtgccttcattgagaggaaaaacccaagtttgttgtttgtcataagtttaacaagcatgcaggatggtgatgcaaactcgcagaggtctggttgataaagcgacccaatggtgatagttcctaccatacaaacctctaggaatacgtgaggaccaccagggagaaaccacgaacaggccaatacatagcgacctactatgggccatggtgtgacttcccctctggctgggatcacttcagggtgtgcaagtgactgggaatacatgttctgtagctaaccaatccactcctaacactgaaatcctatcaattactaatgctcagaggacggtgggggatgatacagagatccaaaagcttcgtacagcccttggactaatgcaaggccattataacgctttgcatcatgatcagaaggatctccgtgatgctataaacctcacatttgacgtacagagatgatagtttatagagtggagaaagagggagatggaaactttgaaggctcaacaagcagccatcgatgatcgcacaaggtaggccatcatactaataaggagggcctattaagtcgcttgttgaccttggttttagccaacgatagtgagtctaatttattaagagacaagtagtttacaacgattgaaagataataaagcaatataaagacacatgaattttatagangttcagccccaagcagttcggtaatagcctaattctcgttattcgtattaacgcaagaataaggagaaaggttccttttcttatagatcttacaacaatatctctgaatatgaattcttagataatatctcttaagtaaaatcttttgaaaaatcttttgaccctttgcccaaatcttttgaccctttgcccagtgaacatgcatcactatttatagcgctatgagcttggagagaaagtatttcttttctcattacaatggatataagcagaaagattgcataataaatacagaatacactgatcgtgggatttagacagcttgccatatctctgcaatctgatccccaagttataatgatttccttgatgactcacggtgcgaaagctaaattcgctaagtgttggtcgctctgtgcggattgctgattaccctacctcaagcatgcatatgaggtatcctgttcggactatatcttgcgggcagatactcggagttgattccacatgtcaccatcatctgatgccacgtcagagtgccaaaaattgggataatatttccccccaagtctgtacgggacttctgaagttgtgtgtagacttcatccgagttgcttttgcatttggatgggtgacacgtgtcaagcgcgcctttcgcgactcgatgtgaggctgactgggcatcccttcggttttcggttaataaatgctccgacaattaatatttcgaaatttgattttctcttaacacggttgacggctacacttgattacttttgatttcccatattcgcttttagggggaaaccgaggcatctgaggttcttttgaaatgattacccctttttcgttatttgcctataaataccaatgtgaatttgtccagaaactcattttcaccgacctttgctaagtaagctcagagcaaaaacagaggtttttggcttcaagcttgctgaagtgctttcatcaaaactgctggtttggcttggcccaacttgaacccagacgcttgattccttgagtaagttctcgattttctttatgtttactttgcacatttattttctgaatgcactttcgattttgctgtagaagatatgtaggaaaccctaagtttagaaactctgtgattttcctttgtcacggttcatgcgatgtcatcgtccgtaatgcttatcttttaaactgcataatgcctatctttcatcttgcttattctaggcttcatgagatttttttgccttaactcctgaaaatttcaagcttcctgagttttgacttttcgttgaatattcttattcttcaatctgttgagtcctcctagtcagcatatttgcttgttttaacgttcgatattccgaacaaacactcatcttgtgtgttgtcttttgtagatgaacccatgtgacatttggggaagcgaacaccaaattgacaaggaattgcttcaactcttgcacgaggatcatccttgtctttgttctagtccaacttcttcgagtgacagaaattcttccttaaatcttttgcccagccatagaatgatggctcctaccgaaagacaatgcgtaaggtcaacgcattcgaccctgaagtggctcggcatgccaccctacccagcgccgaacaagatgcagccatccaagaagaggaggatcgtgaaggggacgccgaggtccaggagattgaagagcaggatgatgcccgtcctagcagtccttccaatgtagaggaagaggaggaggttgcaccccaaaactatgggggatacaatgaggtcggggagctagttgatgctgagggcgtggactacgccagtgaggaacttactaccgcaattcgtcatagaaggcaaggtaccttgggtgccaagtgggtgagccctccaaccaaggttactgaggcacgcctgcaggatctcgaccaggatggctacctgggcgaattagactgttacattcccgcccacaataggtgagccacaaaccctgaaaagggaatgtgcgcctggtcgggtgctcatgcccagcaaggggcattgttgccttt

SEQ ID NO: 33090 - DNA, 986 bp, Cannabis sativa
aggagtggttttttttttgggttaaatttagggtttttggtgtttagttgatctagttttggtggctaagtgagtggctgagcaagtttggctcaacaatggcattttttgattctatgtgttttgctagctagtgttgcttggattttgcttattgttgcctaaatcggtgttttggagcttggtttcaagtttggggttagtttgagctcgaattgagacttggtgattttctgcagtagaaaacggaagactattttttcagaaatattctaccattttaactggcaaattacccagaaaaatagtctgccatttttacaaaacaaactacccttttttctgacagtttttccaaagtcttattttttcgtgttttcttgatattgagggcattgccaagttatttattagtagggaaacttctaattttgtgtttaggttcacgtaaaaggctttagtagttatttacccgttttatgtgattgtgattgggcctccgttaaatgtgtgaattactattcaaattgaccgacacacttgaatctagaaacgaggtaagactagcataaaatatatatatatatgtatatcacatccaatgtttttaggcccatccagatccgatccaattatatattggatgctagattttaccatccgatccgatccaattgatttcagtcatccaaccgatccaacatccattggatgttggattggatcggttctatccattggatatatttcatatatatttattggttcaattttaatttatttaatattttagactagtatttttggatcggatcagatctatctaatattttaggtccaatatgtactggattagactagatccatgcaatccaagaaaaaaaagagtaaaattttaatgttcatttttatgtttacatatatattttacgtatagcattataaaatctaattattcatccaaactaaatgaaaatactaattag

SEQ ID NO: 33091 - DNA, 3596 bp, Cannabis sativa
tagaatataagattatttattttcatttatattgctatgtccgtgggaaggaggagaactacattggttgagaaaaattcctattggaaatggaaacttctcagttgtttggctccacagactgcttggatgctcaataagtcttgcttgttaagattaacttaacctcccaaacaaaagttaactcacaaaatgggcgctacataattagtacactatgaaaaataaaagaaaaagaacaagagtagtagcagaactcacattccaatcaagcgtcgtgacatctttacttttctcatttgttttacccttgacatgctttagcaccaaaacagatggcaaaccattcatgccagatccactgtttttatctgataggttccaaatacgagctgttgaatctccagatctaaaaatcatattcttcagtactactatagaaaaatgtaactaggataacatttaaattccacagaacataaaatcccactcatctcaagtaatacaagaaaacaaatgcacagaggagggtgaacagatttctaggaaagtgaatacattaaatatatgcataacaaagcaaaacaaaattaatacacaagaatagaagcataccctgatgcaagaagagaaccggtagggctccatgcacaagcacacacctaataaggaaatgaaaagagatgttaagaaattggaaagtggacagatagtgagaaatggatgtgaaaattagacattatcaaacctcagaagtatgtccttccaaaattgtaacatcggaactagggatttgaaataaatgagaagttaaatccgtcgagatatccattggatctacccctatcatacacaatgaaaaattagagaaatcactgacatgaaacttgacgcatattgccagctgactgtaaatcaattgattaatcctaccattgagaattaatttttgagaatagttatcaagttacctccatgtttaattccagatactccattgacattttctctatcttcttgatcagtatccatatccatatcatcttgctgtttttctggatgcttatactttactatttctctatccttttctcgttctttctccctatcatgtttttccttctctctaattcgcgtgtgttctccttcacgttccttgccattctctttattcttatctctatccctatgcaaatttctctttttttcttttactatttgtcgcaattgatatacatcttttgtaatgagatccaggggttgcaagaatgagaaatcttcatccaaatcttggtcactctggcaagcttgaaatagacattaattaacataaagcatagtcatgcatgccaattctaaaccaaaacacacacacatctgtaagtacacaaacacaagtatgaacacaaaaaggaactagtcatgctaacattactcaagtttgcttccatctccaagaattgaagccctttctgtacaaatgttatgagtgcaccaggtggaaccaaattgccatcaatggggcttttgttgatacccgcctcgtatcctaatgcaaaagctgaatgtgtgaaacctacaaaaatcaggataacaaagataaggacatccttttagtgcacatatattccaaaatggtgttctcctataaagaagatcatgttgtgtccatacacgaaaagaatggtgttctccaaacccagttatataaaatatttgaaccatatagtaatagtttcttttatttttagatgcctacagtgtttcaaattaaatatacatatatttctctcccgttcttagttgtggtaatcctttattatttccttttggtttattcttttgaaattgttttggtagttagtttttttagcaaattttcaagttaatttatcatgcttaaacattttctaaaaattaaatttcaagttatgtatttgttcggtttttttccggtatgttgttaagttttttgtgagtattttgtagccataatttttctgttcttggtattgtctttgtttggttttgttctttgttggaagattgttgactttcacatgcagtttgataaggtcttgactcttgagtgtctgaataagataagtttttcatattttttattctaaatgcaattaatttctggaatttgttagtttgcttagtttattgatttaaaaggtttctaattatatctttttaacatttttgtaggagctcttattgtcatttaaacaagctatgtggaaatgttgatagtgtcggagcaatttttaacttgtggattgcctattacattccctaagagataattttttttttgttatttggatttttctttgatgattttgttagttagttatacgattttcctgccacatctctgattcatattcgtttatacatagcagtctatgcactaagggtaaatgacgaactaatttgaataaatgatttgtcatcgttttccgatgaagatgtaaatccaaattattttcaagaaaaataaaaaagaacaccaaacacaatattacctaattaccagctgctaaatgtaatataaaccccacaaatcactcaaacatgaacaataataaaaccaaacacacacacacacacacacacacacaagcaaaaccccacaaatcactcacacatgagcaaaacacacacacacacgtctctttttctagatttaatcacaccaaacacataatttacccaatcaccaaaagaaaagaatattgttgtgtcttgctatggaaaggctttgaacaaaattaattgacctaaaagagaaaagataatcatttccctcacaatgccaataccatatggtcatttcactacaatctagtagtctacagagtagcttctcagctttcaaaaccttcaacacacttttgttctcttatattttcctctaaatcgaataataaacacctttgctttttttctcaacttcaaaatcactataccaaaaaattaggtttaatgaaaaaaacaaaatcaattctaacaaattgtgtacagaaccctatgcaaccattgattttccagagtgaacattgtcattctatttcgtaaattgtaaagattaaagattttctgagctacaaggcttcaacaacgtctgcaaaataagtggtgaagaattcaaacaattttcttcccaaattcaacttccaccaaaccctaattcggcgccaacaacataaccgaaaaaaaaaaaccaaatctaacaataacgtttcctccctaattcaaaagcattcatttgtctggttcaagtgagcaaaatcactacgaaaatcgaaaaaaaagagagagaaatgacatacctgattcttgaaggtaacgaaagacgagataattcaattcgacggaggtgatggatgtggccatggactcaaatttttcgtgttcagcggctatggagaaggctcaggcgagcatgtggccccaagagagaagacgagccgagccgagaagatgtacggaactccgttaccagagggagagaagggagaaaataccagaatcgagagagtgaacacttttttttattattatttaaatatttaattaattaatat

SEQ ID NO: 33092 - DNA, 1337 bp, Cannabis sativa
aggaaaaatgtttctcccaggtgcacgataaaaattgacattagcaaggcctatgatactgtgagttgggatttcatggaagacttgctcaatgcttttaacatacctttaaggtttgttaagtggattatggcttgtcttggagctacatcttattctctagtcatgaatggtagagtacaaggtggctttaaaggggaaaaagggttgaggcagggagacctgatttctcctctcctttttgttctcataatggagtatctaacgagaagtctccaactggcaacctctcactcaagcttcaggtatcatcctttatgcaaaggccttaagattataaatctctgttttgctgatgatttaattttgttcagcaaaggtttcaaaagctcggttttggtgcttaagcaggtccttgaggattttagcttgatttctggcctccatattaactcgagcaaatcccaaatttatttgggaggtgtgaaatctgaggagaagcaagctatcattgatgggttccacttaacagagggcactttccctctcaaatacttaggcgttcctttaagaccaacaaagtggaaagccgaggattgtgggatcatagtggataaaatcaaacagagattacatacttggtcgagcagacatctctcttttgctggtaaggctcaactaattcactctgttttacttggccttaggaattattggatgagtatatttgttcttcctcatagtgttactaaggaggttgaaaagctgtgtcggggctttctttgggatttgaatggtaatagaagcaagattcatgttgcttcttgggagaaagtctgtctgccaaaggcttatggtggccttggatttaaaaatggagtcaagtggaatcaatcaatcttggccaagtatgtttgggcgatatcaactaagcaggatctcttatgggttaaatggattgataatatctatctgaaatcagggaggttttgggattatgagctcaagtctgacactagctggtactggcgcaagttatgctatttgagggagaaatttaaggaagcagatatccttaaagcaggagctaaggatcgtttcaagactaactggttatacaataccagtctagttcgaaaacaggtcaattaccacaaagctatctggagctcaaccatagtgccaaaacacagatttatcctttggcaggtggttaactctcataagctcacaagggacaagttggttcgatttcagattgagctaagttctaccttgtgccccatgtgtgaagatgccttggaaacccatgagcatattttcttttcttgtgagtt

SEQ ID NO: 33093 - DNA, 2169 bp, Cannabis sativa
  modified_base (117)..(118): a, c, t, g, unknown or other
  modified_base (816)..(821): a, c, t, g, unknown or other
taatactatacaatacaatacgttctaatacgacgtaccaaacgagccctaagtgtgcaattggatatccaattaaaaaaccgatccaatattccaattagtaattggattggattnnattggattttgaggtctaattgaattggatcggatgagcaaaaatacattgaattagatcgattgcccacccctagtgtatatattatcttcatataaacaatacctacacatacacagctttaattgattcattcttaaaaacataatgaaccttattatttagtcatataagtaagaacaaaaataatacttccttgtaataattagcatggtaagccctccctagtacatgtataattaacaaatatatataaagagatatggttgttatatgcatgtggaatcaagaattattataccaatttattatttttaataataatgataatactggtagctgtcactgaatataatcacaaatgatataattaatggcaattatttttttataccgataattctgttagatatatattatatatatactataattatctcacaatattctaacacatatatatatagctgtcctatattatttgctagaattggattaacaatatatatatatatatataaaattaacaataactaaacaaaatgtgtgtgtatatacgccaaattatgaaattgtatgtacgaattttgtttatttatttatttaaaaagcaaagatcactctttttattttattaagaaataagatcacataaaagtttgttttagaattagaagtttatttcaaaaaaaaaaaannnnnnagaagaagaagaagaagaaataagatcaaattagaataaaaaaaagaaaagaaaagataacatatataaaattctacagtatgcataggtagcttttacgactttattctcttattgggtcccaaccaattaaatgattctcaataatataatataattaattataaattttctgtatttatttacataaatcttattatgtttgtcagctgccatatccaaatcacaataaagcacttatatataaatatataataattaataattaattagttgtagctagctagaccaccaaaaaaaattgtattttttctatatttatatcattattattttatttatattttcactctttttaaattacaaaatcacatgcaaagaagaaaattaataataataataataataagttaaaagttgaagatcaagaagacaaatgtttatgtttattgagcatagatttttacagtcacgagataagacaataatattttttctggtactactgatcacctatagcacccagtattaattgtcctaatatttttttataaaggactaattaaaaaagtcttaaataatatatatacacaatattcctatatatagtcaaagccatcacttgccaatgaatgagatatgatcagtagtactaaccaaaaaaaaaaaaaaaaactaagaaaaaacagatctttccaaaagatttgtataattactttcttggaaaggtatttaaccagacaaatcaaacagagacatatttgataattaatattaattcaaaataaaatatgtaactttttttttactattatatattcaccgtggattgaggggaccatcacaattcatatatggtggctttgaaataaagtaataatagagattattctgtagtccgtgacccacacattcacacactctcaatcaaatacatcatgcctaattaataattatttcacatggtaaaaaaaaaagaaattatctcataatatataaaaaattgatttgaaatgtaataaaaaaaaccaaaaaaaatatatcagtataatgtttaatactaaccaatatgttctattactattgataatatttttagattaatatgattaaccatttttacctaatagcaaactctgcagataaaaatatgtagctatgaaactcaaagctatgcgtattgattctcattctatttttcacatacaatatcatcttcttttttattggtttttattcttttgttgttgttaattttagcttcacagctttaacatcttattatatttttcttatatataataaatataatatatatcgacgtggaaatctaatcatttaaaaactg

SEQ ID NO: 33094 - DNA, 2488 bp, Cannabis sativa
  modified_base (2211)..(2211): a, c, t, g, unknown or other
tggtaaaatatttccaacatggattccatgaagaaaaacaaagtctgaaaatatgtagatgcacttgatgattaccatccaatcaaatgtaaatgggtctacaagaagaaaagaggtgctgatggataagtcgaaagttttaaagctagacttgtagcaaaggattatacccaaagagacggtgtagactatgagaatacttttagtccagttgtcatgctcaaatccatcagaatacttctctacatagcagccgctctcgattataagatttagaaaatggatgtcaagacacctttccttaacagaattcttgacgagacaatctatatggagcaaccaaaaggttacaaacttccaatacaagaagagaaagtttgcaagatgaataggtccatttatggacttaagaggcttctcactcttggaacaaaaagtttgatcaaataatcaaaacctacgactttcaccaaaataaagatggaccttgtgtttaccaactcaaggataatcaagtggtagtattccttgtcctttatgttgatggcatcttagtcattggtaacaatgttaagaagatgactagcgtaaaggattggcttagcacccagttcaaaatgaaagactcagatgaagctaattatgttctcgagaaccaaattattagagaccgtaagaatagatcacttgctctctcgcaagcagcttatatcgataaggtgttagagtatttctcaatgaccaatgccaaatggtcaattatgccttctagatatggtttgagactatctaaggaacagtcttcaactgactcccaagagatagaaaacatgagaaaaattcactatgcttcagcagttggaagtctaatgtatgctatgttatacactagaccagacatttactatgcagtgagaattgtgagcaggtattaatccaacctaggaaatgaacattggacgacagttaagcatattttgaaatacttaaagaggacaaggagctatgtgttagtctacaatggtggtgctttgaatcttttaggctgtacagactcaaatttccaagcttgtcttgatgacagaaagtctacatctgggatggttttcactcttagggtggggcagccatcaatgtaaggttttttttttttataactttatatgtgtttattttttgttttagaaaattcatacttaagatgatagattatagatttataatcaaatttgagtaaatctaaattctggtaaaatattttcaaatacttaattatctataattaatttataattaattgtcaaaatattttaacaattaatacaaaatattaaattggataacaatataaaagtgaccattaataaaaatatttttatcaattaattgatttaatttataaatcaaatactatcaacgtagtatattcaaattattaattttatatgtatatatatatagaaatattctagtacgttatatgcatgtcacatatttctcacttctttatattttttttttttcaagctatgtataattttaatttacttcaacacataattttacattatagctagttttacccttcaattaatagtaaaataaataaaaatgcatttctcatttttattttacatttattattttacttaatatttatacaaatatatattaaaaaaataaataaaataactgagggaatcacgcatctattaccaattatatatgacacaaaaatattgtatttttaattttattcatcaaaaaatctgtaagggatatcctttatctaatcatatatgtgatatcctctatctaaacatatatgcatgttatcaatatctattgtgtccccatgaatctcatcctcttgagttcaaatcctctagttaaaaaaaaaccaacttacaattatagttgtcataaataattgccaacattgtcaatgttacaataaactaaataatttaaaataaatatatttgcgaaaaaaatacttaaattgtacaaacaaaaatgtttgcttatttttttttaagggagaaaaaaatttaacatcaattttaattacacagcaagtaattgtcttaactttattgtaagacgctaatgtggcgctaatgtgacagataattaacttaaacaaatatttaagggaatgtactaatcaagtccaattaaaagttgtactttttttttttattattattnttattattattattatttatacttaagtagctaagtatagtttttctagaacaacctaagtatagtttgatgttgacaaaatatggacaactaagtgtaattttaagtagggaaatttacacgttatactgatattttccattttttttcttttttactgctatacggcaattattatatttttaatgtgtatattgctttttttttttttaattttgttcaaacctatttaatttattgatggataaattttatgtcactttcatgtcagattttt

SEQ ID NO: 33095 - DNA, 1660 bp, Cannabis sativa
  modified_base (488)..(492): a, c, t, g, unknown or other
ttttttttttttgaataaaagctaataactttatttaaaataattcttgtgtaattatatcactaatgttatttggaagtgtccaccgaataactacgctcagcatataaccatgagactcgagcaagaccatgagccacacgattacgtttaacaaaacgtaaacaaacatgatttaaacctgaaattattctcttgcattctgcaatgcaacaaccgaaaggagaattagtattcaccgagcttcggaaagcttgaactgctatgaggctatccgattccacagtgacatgagaaagctttgactcctttatccaacttagtacctctttcacaacaaaagcctcagcaagagccggattaacacaaccatttcaagaccccgttctagcttgcaagacgtggcccccagaatcacggagaacccaaccgtacccaaatttatttcggtccgcaaatttgtgattaaaaataaaaaaaaaattatnnnnnattataaattatcattcttattttatgactaaaatatttatgggtaaagctattagtcacaaaaattataatttgttgtaattaaatgtattttttagttataatacctgttgtgattaaaactaaattagtgataatttgtatttaaatactacatttttattataagtaacttttgttatgactaaaaattacgtttagtcacaaaaaatttatattgtactaaaaattatcactaaagataatttttcttgtagtacaagtccaaatgtaccacaccttaaaaagctcaataatttaataataacatttattataataaatatttatttatttgtcaaatatatatacattaaaatgagaatataacatattttatggggtttcaaaatatgggcttgaactacatggcatacatgtatttatagataactgtgacatcattaataaattatttttttttataaaaaataaaataaaatacaattaaaataacacatttgcaataatttttatatttcggaggatttttcacacacaaaaaagaacaaaaaaatagaaaataaaactttaaaacgatcataatctagtgaaaactaaatatatttattgaaaataaaataaaaactatagtagtatttattggtgtgtattaatagatttaatagaaactataaagggaatctttatataaattacgtgccagtaaaaatattatagttttacgttttttttttttatattttattttattctataaaaataatataaaaacaataaaaaaaatcacataaaataacaagaaaataacattcaaacaatataaaaataatatataagtaataacaaaattatagaagtacgatataaaaataatatggaaaatattaatagaccgtattttctgtaaataaaatcttaaacactaaaaaaaatatttaaaattttatgcaattgaattttttgtcttttttttttttgtgtgtattttaaaaataatcccaactatatatattgatggagctttccacaaaaatcatgaatttaagtagtgaattaccttatattcactactaaaatttttacttttaatcacaacaaaacttgtaactaaaagtaaaaaagttgtaactaattataaatgaacattcttatgttgtgactaaaa

SEQ ID NO: 33096 - DNA, 2098 bp, Cannabis sativa
  modified_base (559)..(570): a, c, t, g, unknown or other
aacttttactactataaaaatgttataaaaatgtatttttgcttcaatttttaagtagcatataaagaacttacattggtttgtataactaacgttagaattataggcgcaaataattttatttttaactcacttagtaacagatgctaaaagacttttgcttcagttcataaccgaagcaaatagtaaaacactgacgcaaattagttttttgcttcggttatgaactaaagcaaaagaatagaaaaaaaaaaacataaaccttcaaaccaccataacccttcgcaccaccacaaaaacccaacaacaacaacaataaatattgctacaacaacaatccattgtaccattaaaagcacattaaaccaccaccatcccaccagaccaccaccactgcctgcaaaaaaaaaaatcaaagagagagagagagagagagagagagaactcgtatgagaaagagggataccaaagctggagtagggcgtgcgagacggggaacagaaaaaaataatgaatctcgcctttgaaaaatccattttcgagagagagagagagagannnnnnnnnnnngagagagagagagagagattgtatttttagtttcagttttaaactgacacttatacttttagtgtcagttcataaaaccgacacctattctacagtgacaaaaaatcaaattttggtatcggtccttaaccgacactattaaattttggtgtcgttttataactgacacttaaagtatacatatatgttttttgttttagtttcaattaaaaactaacaccattgaattttagtgtccttttataaccgacacttaaggggattaaaaaattaaaaaaaaatactaaaatcaataaaaaaaattaaaaacataataaaaatattatttacaataaattaaataatttatttattacatataattaaaaaaaaactactatcattctacataaaattataaacttatttattcactactacaaaaatacataacaaacttaaacaatcaaattaaatatacaaattacaagaactaaatataataaataaaaatgtaattcattgcgtttttatataccaaaaaactagattgtctaatatagttgacctcgtaccacgaggttcctacgaactataaaaatagcaaaaataaaatagagttagtgtttcagagatttcaggttgggacatgtcaagagaaatgctttcaagttttacctcgtcccctgcattaactatccatttctctaatcctgctagacccgactttgcatattcgccattcaaaaatgtactgcattcccgtcacagcaacaaactatgaaaacagataattacatctgattctgacaaatagtgaattcgttcttgcctccgatagtatataaatttatatcccaccacattcacaatcaaacttaccataatttaactaggatgataagtcttccttactatgtacatcttaacactaaagtttaattcactcaattcaagacaaagacatttactaattaattgagacattgattttggagacatatcaagccacaatctttttcttttcttttttcttttttcctgagaaaaataatgcaaagcttagttaacaagtatgttgacatattgctggaatgctatagcagaaaatccagtacatataatataccccaacaagataattactttacaatcacaaatatagcaacattgaacaaatctgcatatttaccaacctaatatcatatgtaagcaaatcacaactaatccttaaatgccaacaaaataatacactaagaaatggtagaagttaaacttcctatcattcacattagaaaaacttagagaacatatttcattataaaatctaaatttatgtaaatcaaacagctgatactaattcctatcattcgcctagtgacatactcacaccaaaaacttttaattactatatataaataatcacatcatagtaatcaattcccacattacaatcatatttttagttattagcacaactcaacacactcactgtggttgacaccaaaactaacacattaacaaattcacctatggaaatcaaagcaaa

SEQ ID NO: 33097 - DNA, 967 bp, Cannabis sativa
agacagattctcttcaaatttagagaagaatgtgaatgagactgaagataagatttctagcgtgaagtctcatgattcccatgtattgttacaacgcttgatgccagtgggcattagaaagtttttcaaataagaagtctaggatacaataattgaactgtgtgtattttttccaaaaattttgctctaaaacattgaatgttcaagacttgcaaatcatgcaaaaaagtattttggacattctttgcaaattgaaaaccatttttccactagcatattctgacataatggttcacttggtcatgcatttacctaaaaaagagatacttggggactagcgcacatcaggtggatatatccaactgaacgagccatgtctgtgtataaaaatatgtgaaaaattgatctcgactagaaggatctatttgtaaagcttatgcagataatgaagccttaagcttttcttcaatgtacttccgggaagttgaaactcaatttaaccgacaaaattgaaagagtgatgtcctctgagataagcctgaaagggagttctctatatttaagcatgttggttgaccaatttgtaagaggaccatcgtttctttgccaatgcaagataaacttaaggcagagcggtacattctgaacaattataatgaagttgagaagtatatcacgtaagatactttttggattcttaatttagttgtttccagtaatgatattatctaataagataatatttatgtgtagtgagcatgagaacgagctacaacttaggggtgatcaaaatcttgacacaattcaagagaatgagtttcatagttggttcaagtcttgagtaagtattgctttcgactatttttttcattcaaatacagtttattgttctagtattgattacattttttactcagtgatagatcaatcaactttgagtagataatcaggctgaagtatcaaaaga

SEQ ID NO: 33098 - DNA, 1589 bp, Cannabis sativa
tttttacaattttataaccgactttttagaaattataaccgtataaaaccgaccgtacggtttttggcagtttttagtggtttttcggtttggcgattttggacacttttagcgatattgggcggtttattgcggttttcaaaaaaatcgaaaccgaaaccgatcgccaaattcggtgatgttgtggaaccaaaaatttggttacggtctggtcggtttgatgggatttcaatttatcagtttttatgaacacccctagtatttatagtagaatattcagataatattttcccttgttggttatttcatgtgtagataacctcatgggtggagaacattggttgcaagtctaattccttctatttatcgtactaagatttataagtatcactaagagtagtattcgagtcttttgttttaattaagtctgagtgtgagccttgtgcacaaacataaataattaatctaagtgtgcaatgagtaatgaatatttatgtcagcgatgatatgatttggtgcatgatgatgattcacttgtcgtgggatgagggagcagtggctctcaatcgtgaggaggtggcatcgttgttatttgagggtggcctcctttcttggagaagatgtaaggactcgtaactttaagacataaaataatgtaaaaatacaaaacttttcataaataaagtctccaaaaattcattttaaaaaaacttttaaaaagaagtgtgcctacactaaaaataactagatacaaccatttattgtttcaagatttattgaattgcttaaaagttattaatcaaaatatgaagttggcatcaatttctttctcctttttcaagtttttctggtcaaaagttgcatggttttttccaagttggtgaccttcttcataattttttttatttttctcctaatcggtaaatatctttaagatcttaagctcgaacgacaaaaagcacttgagactgccaaaacgttagttgcttcgatctaatcttagtagaggaagaaacatggtataggaaccataattgagagaaaaaatactagaggccattatgaacacattactctgataccaacttgactagaagataaagtgagtaataaaaaatgaaaaatgtgaagagaagtaattatgataattctcattacttttaacaaggaatacaatgaaagtatttataaacatgactaatctaatagaactaacaaagagtaacaactttaaattaatgatagctaagaaaagattaacaatcatatcaaaaatgaccactcaactaactaactagtagttagtcactaaatatccttagcaaccttgagctcattcttttggtaagtgagtagtactttgtaatcaaccgaatgatgttgagcatagcaaactattgcaaattcttgaaaattttaaagctttaataaagtggtaaattaaggtaaaaatcttttaagttgtgatatgtgtcttgtggttggctctgttcttgtaaggatatgtcttgattctaatttaaactcttgaatgttttttgtttttattttgtgatttagtaacttggccaattatgtaatccctcact

SEQ ID NO: 33099 - DNA, 1324 bp, Cannabis sativa
  modified_base (1001)..(1002): a, c, t, g, unknown or other
gtgtattaatattattagatagcacctgttgacaccatcaatggaggagtgggacgtaccaccgttactcccctcaacttatttcctgaaaccactggtcatgttggagaaacatcaacaccggcagccactgtgggacaattctcgcctatcacaccagctatagtttctgatggaatcattgaactgactatggaccaatgtacgactctacaagaacaaatgcaggctctgtaggctgaggtcaatggaagggcaggacccgatgtcctccccaggtaccaaacactcgttcggataacccttaggtaacaaacactaggtgacaaactaataattgctcttgaggagaacaacgaaacggacaggagggactcaatttgaaccaatctacgcaaaggaacaagtcgcacaaaactctaaccgtgaggtaccacaagaggaggatcccgagtgacgcaaccctcgaagcagagccgaaccacaaaatgaggtaaatgatgctgaatcttattcttcattttcacaaagtcgttctcctagtatatataccaggtctggcttcgtggagacacctcgaggagggagataccatgttcacaggggtaatcttcatgatcacctcaatgcagtctttagggcacggtctcaaatgcccaaaaaccgcgatgagccccgtgatccccaagtgggcgatcaaggcacaaacaatggcaataacccaggaaatgttgttaacccgcctaacgcaccagttgtgactactaaggtagtaatcccagctaacatagctgcgattgcgactgcaccagcgacaactcagaacaacatcgtcatgccaaagggtgttgattagagcatcctgctacgagcgttgaaaataatcgagtattcgagaaagcccatttacaagctccatgcaacttctcctttcactgaagaagtgcaacaggctcgacttcctaagggattcaggttatctgaatcgctaaaatataaanntaatactaatcccatagattatttagaaaaatttaatacaattatggaagtagactaggtacctcaattagcaaaatatcgcatcttggcagcgaccttagaggacaaagctcatgattggtttagccagttacctcaggcgaccatatcgacttgggagactttcgtagatctattgttgacacactttcaagccacgatgatgtacaaaatgccttatacaaccctggctaacatcaagcaggaagttggtgagtctttacaagattattttaagcattttaatgctgaagtaaccaaggttgagaaggcccttgagtct

SEQ ID NO: 33100 - DNA, 1241 bp, Cannabis sativa
tcctggtaaaataaatttcaacaggtttttgtctcccatgtcaggccatagtacaaggtatgcgcaccaccatacctggccatggtccagcatccatttataagggcgattcaaaaaagaaaggcgtttgagtgacacgtatagaatgttcggacagtactagtcatcatctctgcaaaccgtatgatgtagtacccacctacgaaatcaacaatcagatctcttatcataaggccgggcctaaaagcatgtggattaagaaatcacctataaacacccttatattttatgagcaaggggatgccttttttaacctagagaacctctgcaatattcccatatgcttcatatttttcaagaagaacatgaggaatgtaggggtcgagtctagaatgtaaacacttgtaatattcaatactcgcctagaaggccaataaaatcgactcataaaataaggataattaacacctaaaccacataaaaattgtatgcctattatttattaatttatatctttcttacgctttaattaagcagtttctaaaaatctcagtaagcactagctatgttgatagagatgatagtacatgataatttaatttatgacatctttagattgaaaaaatattttataaattgatttttaattttatttgagttatattttttatttctgtatgtttgtatttattttattaatttatataaggtatgaaaggtgactagcttttctatatttgaaaagtttttcataaagggtaacttttatgaataaaccagtttctatctttctaactgtgttaatctgatcctatatgagtttcctaagtggcttgatcagatttcttgtgaagaaaattgaattaagactttccttttctattaaaggaaagtcgcatttactgctcacgattctgtaggtacagaagtagaaattcttggactaattgaagatctttttaggaaagtttcttatgagttgtggtcttatttagaccgtgtatgaggtatcaataaggtgtatattgactataaatacacgttataatagctaggtttagtatctctttcagatctttgtatttaattcacatctagtaagaaataatgtctttattgtgtaagggagagagtgtttatctcttcctctgtatttatgtattttatattgtcttgagtctacaattaagtctacaaaagaagaagaacaatattgctaccttcagaagaagtaactacaa

SEQ ID NO: 33101 - DNA, 2400 bp, Cannabis sativa
tctataatgcaccttattatacctctttcttctttaagtctgccaagcatgactcgagtagccgatggtaattggtatatccacatattagagctgaacctcgggggcccattccatgttttagagctgcctgattaattatatattataaaatgattcttttagcttaagaaaacgcataactatgaagctttgcttccacaaatgataacaaaatcatcaaacctttgcagcagcttttccaattgtaggatgtgagctcaatcccaagtaatcatttccagaaaataaaagtagtttcttgaaaagccgaggacactcccctgtttcagaatcagctaaaacatgtccactactgtcagcctcatctcctgcataccccaaaagcataaagataaaaacattaaaatctcaaaattttcaagataacagagctagaaatgatgagttgaaagaaagtaccagaagaagaaatgtgatggacccaattctggaaggtggcatcggaaatctgaatctcaacggaggaacggtcccatggatgcatttcgtcgaacacctggaattcatcttcaaaggatgattttgaggaagtagtgttggtggggtgttgtggttcattgcggaggtaaatgggtctgagagaacggaggagttgcaaagagtggagctttgaaagagcttcctcaatccagtagtcccataagctcattgtggttgtggtggttttgcagagtagttgggaagtagatgaaatgaaacttatcaaaactcgtttttgtagtagtaccaagtagaagtagtagttgagcttcaaaccaaaggttttagcttttaagtgcaatttatgatttgattgtgcaattcaattccaccttacaacgtcaagttcgaggctacaactattttagttagagcactctaaagcttctccactttattctttaaaatatctccggtattaacttttatggacacctaaatatataacattttaatataaattaaagtttaacatagtattatataaaaatatgacatgtaatccaattcaatataatacaatacaatacaatacaacctaatacggcgttacaaacgagcccttacattacatcatacattattacatcatacatcagcttctccatatttcttcaacatcatttaaataatatattttgaaacatttttattaattaaaaaataaaaaaaaaataaaaaattaataacttttagaaataagaaaaaaaaagcaaataaataaatataaaaaaaaatagttaaatagtgtttagctcactctctctctcttcttagctagatgtagctacaatttttttaaccaagagcctagctattatagctaaattatacatcatctattggagtcccatttatacactttagctaatttttttttcattttttgagaggtacaaggtgtttacctcctttcttgtgagtgctcttagttttagacttattgaatatttgtttaaagagtaatttacgacataaatacttaaatttaattttcggttataaataaatacttaaattttattttttatggtaataatatttaagttatattattgtaatttctataggtacctgaaaatcaagtcaatagtcatatagcagtctttgattggtccatgttattaaatttttattttttatttaaaaattaatttaaatatactaataagaaaataacacgtagataatgacttcaaacttaataatcaggtacctacagaagttttagaaatattactaaagtattattactatcaaaaatgaaacttaggtatttatttataactaaaagtttttggagtgtaacgtattaatatttcacaattatatattagcttaaaggtcctgggttcaaacccatcacctctctatttttcccatccctccctcaccactaagctagccttagtgacttatttataagtaaaagttaaacttaagtatttacgctgcaaattactcttatttaaattaagggtaaatagttaacctcaaaataaataaataagtaaataaactaattaagggtaattgagaaaaaatgagtgttaaccataacctattagttaatttctacacttgaaattagggctgagcatgaaatccaaaaaatcgaaaaaaaatctttctaaccgacatatcaaacactgttggaactaaaactaacgaaaccaaaaatcgaaaaaacagctaacagttaaaactgccattgaatagtcaatttttttggataataaattgaccgaaaaaatcgaaccgaccgttatacatatatattaatttattaatttttttattttatgtattgtagttattcataatataaaacaataatatgttattattttattatta

SEQ ID NO: 33102 - DNA, 1409 bp, Cannabis sativa
gcactggaatgtcaacctgggcactggatgtcaacctaggcgttgggacttgaacttcctttagtaaaatggctataactcactcaattttaataatttaacttgcagattgaaactatttaaacaacctatcaagtaatatctcatgccccagatgtagttctaaagttatcgtcatccaaattcaccatcaaggaaattacaaaattaagctctaggtaattgggacttgtcgggcaccaaaaattggccatcgctaccagaagctaatttttaccattagatcatcatcaacgagtttttaatacttagtctattgctataattaccatctcgtaaaaaataaaaactcaaagtagacgtagcccgactatcgcgatataggagtaaactactataaactctgcgtgtctctctaaattatttacttaaacttattaattatctcgccaatctagcaagttgatgttggtcattttttagtgtcaatagagatatattatgaatattaagttgaagtttttatttttactaaatatttttttaagaaaataataactgagacttaatcagggccttacacgtatactcttttcccatttgttttcttaaaaaaaaaaaattattgaaaaaaaaatctatgtacgatagcaaaaaaactaagatagatttaacaaaaataaatgctgtggataaaaaaagatctgttatattatatggtataatattatatagattaaagtgtgacatatatgttaaagtatggttaatatatatatattggtgattagttccaataaacaaataccacatcatgacacttatcctagtcatcaagggagttagttttgttaattggtctcctccattctaggactacctaactaactaatacctataaaaataaatcactactcacccaatgagtagagtttcacttgagcctcacaactggaaatatatctctctcttcctaattcattcccagattttgtgtgtattgaagatttataaacatgtctcttgtaaaagcttatgaaagagtaaagaaggaattttcacttatcatttttatcttttttaaaaaaacaagaaagaagaagttatgtatttacaaaaagatatgaacagtaaaggtataattttttttcatgaattcataaaaattgcatctcattcatagttgtttaagagtttataaagttagtcgctctcttttgagtggggttgtcgctctcttttgagtgtgtaagattgtccttttgctattttctggtattgctttttcggtactgtttcattgctacttcatggcgtctagcagtaaaaatgatggtgatttacaaatgaaatgggctgatatgtgcctggaggacgaagaagatacagaggttattttcgaagacgat

SEQ ID NO: 33103 - DNA, 2201 bp, Cannabis sativa
  modified_base (1025)..(1025): a, c, t, g, unknown or other
cattattctcagcacgataaaaagaataaattcattgattacaacgattcactcaactcaattatgaaacctgtaacccaaccataaccccttttccaagaaaaatgttcacgaaatattttggtgtttgcttaaaacgcataaatacagcacagaaacccctgttcaaccctatcattatcatctaaccataaaaatataaaagctttagtgcaaaccaaaactgtaccccttagcataaaactttgaaacaccaaaactgaacaccgtttaaacatatatcctcagtcgtcacactgtagaatccactataaaaggcattcaattgtacaatttcataaacaatgcatttcgctaaattagaagacttaaactctccctaattatttgatggcattaaagagtgaaacaataaaacaagtaaagcatatcaagaaccatagtagtttccagccctgaacacccaaatagttcaaaacccacatgtaaaagctgaagagaaagcatgcggacatgttaattagttgactcaaacacaagaaacaatggaaaacccaatgagcccattataatagaaagcagaaatattaccttgtttaaacaaacaaaacagaaaagaggttttgaattgggatagataggtagttcagttcactgtagtctaactggtggtactggtagtctggtactttgataaaagattattaatgagcgctttgaggagagggaaatgaaaggtgaggctttatatatccttatctttgtggtactgttttcttgtttctggatggataggcagagctatggtgaaggtgaggttaggagaggaacagagaccagttcttccggcccattttaatgggccagctctaaccaattataattatgggcccataattgtgaattcaaggataaggcccaaataacaatggaggtgtagatgaccaatggttcaccgttttattttcacaaatacataaaaacaacaaaaaaattacaaaatacagtttcacaaaattttaaanatttttacgatttttttattttattgacgatacagtctttttatgttgtactcttattaattttttgttatttgtatgttatttttttattgttgttttgatgttatttctatgtagttttcttattgtttttataaaaaaccataaaaatataaaaaaaagaattcttttaaaaacgtaaaaatataatattttttacaaaaaataatattttatataattatccttttattaaattggtgttaaattttaaattatgtactaaaattagtatacactcaaattctacactattaatagtattagattttaattctacactaatttggtgaacatttgtttttgcattctaacttattttgtttcattttattttaaattatgatcttagtcattaaattaaaatttataacaaaaataatagttaatttaaaatactaacatatttgtaaatacaaaatgacaataaaaaaatactaatactaaaaaaattaaaacaacataatattaagttataaaactaaaaaaaaaaaatattaagtaaaaaaataatttaatagtcaaattgattacttgtgatattgaaatgcttgatattattgatgcgtttttttttttttgcataatttttttttgttcattttgaaaatggtcgcgtatattacaatcaactatagactttttaataagattttttttttttaaaaaaaaagagtagtgtttaattgataaaataaatattttattttactaaattattttaaaattttaaattcttactagctagtagccgtgatataattgttattaatattttataaatgagctattttgagttattaatataaataatataaaatgtgaaatcttttaagtaaaatatatttatttagtagaatatttagtgtgaattattagagttgtaaaaaagtaaatttttttaccctaaactgatgtaaattctacaccaaattgatataattattgaaaatgatctaaataaccaatttccgttttgtttacatttttttttccaggtcagtctatgaaactaaattagttaccatcacaatttttcttttttgttcagtgttgaattgtttgtaatgagatcattcaattactaccctattattattattgattaaccacatttgtataagtattatttagcat

SEQ ID NO: 33104 - DNA, 1103 bp, Cannabis sativa
gttgtcatcattatatctcacttgtagtagatattacatttaaaattattttattaccatatctcacttgtatagttgacactacattcaaaatcattgtcattagtatcatatttcacttatagaattgtatatctaatcaaatttaaattcaattttaggttttagatattaacttattcaatatttaattttttataatcatgtaattgaaggtatatctgaaacattattatttaaatgaaaatataaataatgatcttttgttatttctaaatcatccatttttttacaataatatatctagtggtaagtgaaatatttgatatgcaagaataatactcataattacaaaaactataatattcaccatcatatgctaaattattattattattatttggtaaattttattttcaacttgatttaatagttttttttttcaatttataattatgtaaatatcattttgaattcaatttttattttatatatatttatttaaagggtataactatgatatttttctgtaagatatttttatatattttgaattaaattttgaaattatatactaaatatttgttataaatattttttaagtacttactaatctaatgttacatattaattgagttatgcacaaatgtattatatattgattgatttttataatttaaattttattttgaatttaaaatattgtattagttgttcacgtgtacataatatttattttttaaaatttataaatattaaatgactctaaaatatatatttttcttttggcaaagattttctttttttttttttttcgttctaagtaaagaatatgttttaaattataaatgaaaaagtaaaaaaaaaaaaaaaattaatatataataataacaataatttcaattgaaaaaaatatataattaattaattctaaaattgataattaataaattaatttgaaattctaataattattaacatagtaatctctcttttcaaagcttttaagaattaaaataaatcatgtaaaaaaaaatatataatcatgcatgcaagtgcaaaatttaactatgataaattatttttttcaaatgtcattccaa

SEQ ID NO: 33105 - DNA, 1347 bp, Cannabis sativa
cacatgcaatagctgtatttgcaaaaagaggattaagagcttatgactatgtcaccgaatactacaaaacaacaacaatgaaggcaacatatgaaagaactatacatcctctaccaaatgaaagagaatggactataccttgagagcctggaacagatagtgtggccacaaaatcaagaaaaccagctgggaggcctagaaagaaaagaataagatcaaaatgagaaccaaaagttgtcttgaaatgcacaaggtgcggaaaagttgggcacaaccggagaacgtgcaataatccacagtttacatccaaaacagaataacaaaagcaaggagtcgaagaagaaggattgatcaactacaaaataaataaatagtgattgacagttttataaaaactggtttctcagcattgaataatgttgaacagactataactttttcaataagatactcactacaatatttttagacttattaattatcatctgtttaaataatcattgttttaaagattttttcttaatatcatatattttttcataaaggtacatgaaaaacattaaattttacataacaagaaattagttaccaataaataaaaacatatacaatgaccaatgaaaaatatcatcacaaactgccattgttattttattacctacaaaaaaaaaaaaacaaaaaaaattcaattaactgtacattcaaagaaaataaaaaaagaaaataatagaaataaagaaaccagtttcaaaaaaaaaaaaaaaaactcagtcatcaaataaaaacttataatacaaagtggcattcattcaaacatcaagtctttacaaaaagatacaaccacttaaactaaacaataagtcttaaaaaaaacactaaaaaactatataacatcgtctttaaataccaaatacaaaataaaaccaaaagaaactagtttcctgttaacataggaacataaatccaaaaaaaaggttattattataaacatctatctattcatctgaaatcatttgcctttgccctttccctttataatatcctttgctttaactttgccttatcattttcattatcctttgttttctttacatttttcaacacttcatcatcagttatataaccaccacactacaccaaaattcctaattagtgacacttctaaatgtcactattattaatatttagtgacactttatattttagtggcatttgttaaaaatgtaagctattctaatgtcactaaagatgaagtgtcactaaactaatttttattgacattttaaaatgacacctaaacataaattgtgacacttcaaaatatcactataatatttattatttttt

SEQ ID NO: 33106 - DNA, 1307 bp, Cannabis sativa
  modified_base (806)..(809): a, c, t, g, unknown or other
ggtgcattgtagaattttcctttacttatatatgactttcaattttaattattaatttaataatatattttaaaatatttattacttagctattatagtttggcccctaatttttatttctggctctgcccctgcgcgtgactattttattttatacgcgtgtaaaataaactgtttgaatatcgttttgtatattgtaaattatttcgaatttctcaaaattttgtagtatatcttaaatagttataacgtacatgaatataaaagaaaattaaactattttttttttcgaataccgaaacaagtgaagagtgtatcaatacatcccttttaagggaatgaattgtagaatcaccgatagtatatagaattttatgtggtacacaaaaaaaaatacacgtgaatgcatttatgtaatacatatataaaacctcaatgttaaaacgattccacttacaatgacatctacaatgtatttgattctagaaaagtatcaaaacccattttaccaacctgcagagaaaaaacttgaaggcatatattaatgaattaatggtatataggcatatattaatgaattaatggtatataagattgggaagattttataatatacccctttaaaaggaatccacagatatatttttatctgttttggtatagaaataattttttatttaaattttttctcatagtcatataaattataaatatttaagacatcttgcaaaattttaagaaattcaaaaaagttacaccctaaaaattacgttcaaacagcatattgcacgcgtgactattttatnnnntacgcgtgtaaaatagattgtttaaatattgtttttaatattgtaaattataccgaatttcttaaaattttgtaagatattttaaatagctataacttatataaatatgaaaaaaaaaatagactaaaaaattattctagatgctgaaataagttgaaagtgcatcaatacatagaccaaactaactaattatataaattaatatatataattgtatatttatataaatttacttttcaattgcatgattaatgtatgggtagattcaacactttgttgtgaaatcccttctattttttgagtttgaagttactaacagatcaacaattttgggtgtacttattaaaaaagaatgattttataaaaaattaattttaaaattatttaattttgtcatttccaaggataaaaatgaattaaaatttttggggtatatttaataatatgggagttctatttgtaccctataaaatgataaatacatccaattattaaaaa

SEQ ID NO: 33107 - DNA, 3542 bp, Cannabis sativa
  modified_base (27)..(33): a, c, t, g, unknown or other
tataacactgttatagaaccggttctnnnnnnnttataactgatttgagttattttttgttatttatttttattcattatgatacagaaccggttatatttcacttataacctgtttgaattatttattttaattcattatgttatagaaccagttctattttttgcttatatatgagacatttacttctggtgacttttccagtgatttttttcggcgaccgtgacttttttttggagatagtgacttttccgacgacactaactttttcggcaccaacaacttttcggcgacttttccggcaccggtgactttttcggcgaaccttattattacaagttttatcaaatttatttattgtttttcccatattttaaactttaattattttttaatcctattttttacattatttatttatgccataaaaaaataaactctactacattttcccatatttataaataaaaaaaccccaaatttaaaattaactattcaaatcttccaatctctcaagcttccaaaagaaaaaaaaaatcttccttctcttaacgttcataaataaattgaatgttaattgttgaaaaaaaaagtaaaactaatgaattaatatttggataaaattattttagactctatattttgtaaaaattatcaattagactttctgttttattaaataataaaatgaatcttatattttctaaaatgataaaaatatgattcttagcatgaacagatatagaaaatagaatcagttttgtcataacacttctagatctgattattattgattaattcaggatattttttgtactattttgaaaaatacaagattcactttgtcatttaataaaataaatagtcaaatcagtaacttttacaaaatacaaattccaaaatagtaatattatttcaacttttcagtttatcttgaagttttttcataatttcccccaaaataggaaaattataaggaagtttacaataatatacattatttgcatttaatttacaataataacgttactacgtttactgacatgccacgtcagctaaatttgatgtttatgatttttttttttattttttattttcttatagtatttaaagcaattttttggttagtgttgataagaaactaattaattacaacagtcaacaatattatttttgttgtttgcatgttatgaaaataatattttttacatttgctttcacatttgtactatattgttttttaagtgtttttccgtagaaattgtagttataaataaaatccataaaaaaataagttatagtacctaaaagtgtgaaaaaaaatatgttttcagtaaaaaaaaaatcattttagatactttgtaaataaatttttaataaagtgcctaaaatgattttttttattgttatattttgagaaatcatgttttgttatttttagaatgatattcttatggagcttaatgaaaacaatatgaaaattacatctaaatgtacagttgtaaactgacataaaaacaacatagtatattgatttggttttgtaaaaacaatagtttgtattagtataaataaaaaaaaaaaacaaattcataaaaacaatagtttaaaaaagatgtactgatgtatttttatttgttttgacgctggatagacttttttagtctttttttttttttatagtcatgtacgttatatttatttaaaacatcctgcaaaattttaaaaaatttaacacgccgaacataatgtaactgagtattgatgtactcctacctgtttcggcatttgagagatgtttttagtttgtttttttttataattgtgtacattatagttatttaagatatcttgtgaaatttcaaaaaattcaaaaaaatttaaaattcaaattgtacgcttgactttttttatttagaggggtgcattataaaatataatgataattttttatttaaacgggtacaaaaaatattgataattgtgttctttgtaaaaaaaaatataaagatatatatcattagaattttatttttttgtatgtatatctttatatttttctcaacattatttctctctaaattgataattctgttctttgtacatctgcaatgcctatataaacaaaggactctcttatgtaatattcattcaatttcatcaatagaataacagacattttctctctgtgtatattataataagaacataacacaactaataaatagaacaaaaacttgaagagaaatattttcatctcgtttggcagtgccagtggctggaaatgtaagtgccagagcttaaacaaagatgcgtagtagtagtagtagtgtaacagtgagtgagtcaagttccattaacaaaaattaatgatgagaagttttccagaaatgaaaaacattcgatctcagtcctatcacggaacatgtcgcatcaaaattatggtcacagattatttgtttgatgttggtaggggtaaaaccgtcagaacaccttaagaagaagggggtggaatgaaagaaaaagtacgagggtcattttgacacgtggcaccagcaagttgccaagtagctgaaagctcagactccatctatccctttccctatccctaaccctaacccaacgtgcatatctatcataattctacaccacgtgtcagtctcctggcggacggtacctttacttgcctgccataaagagaaaaataaaacaaataaagcaccaacttgcagctgagagtgaccttcactgggtcccactaccctcactcactgacactgtagctgtttcaggattgtgcatggcccacacgtcacaccaaagatctttacttttttttttattatttttatttttaataaattctcaagtaatctctttctcttctaaaagagattgtatacttgagaatttttctaattcaattattcatctattaggaaaacaactttaaatctcctgacgaaaattttggattcctattacggaaaataatttatttattgcaaaatgtatcgtcatccaactcataaatatattatgtgaaaatgtaatattgcatttaaaaataattgtaattttgatatgaaatattatatatgaatgtgtaaattattaaattaattattattatttaattgtatttctttttactatgttgatttagttttttattctttgagttatatatatattttttataaataaagttcacccaattaaaacaaataattctaaaaaattttatttactctctcatttatttgtctttttgtcttctcatttctcttattttataacacgttataataggaatctttgtctaagtgttaaggtaaatattttattaaagtttttgaattggtttgaggtcacaatgcactaaatatatatttagggacatgattttgttccgtgatgtattttcacggaatgtattccgtggtacattagattggtcttagagtacattaaatgagggtcagagtacgtttctactttttaaccctaattactcatagattaatctcagccgtcagatc

SEQ ID NO: 33108 - DNA, 5506 bp, Cannabis sativa
aggtagctttcgagcactaaaaattatttttatcgaaatagtgaaaatctcacatttctaaaagtacccctttgtgaaatgtggcccggacccatctcagaatattttctccgctaagtacaataaattcatactactaagacgtgaatatgaagacagattttgcattaaatcaatttaaaatggccccctaattcaaaaatttaaaatgtttttctttttaggataaattttagtaagtattttccttactctgacactcgttagtgttctcttaaaatctcaccctacacatcttgaaaaatcatgaaatttcataaagaggaagtcaagatcgttatccatcactattctattcgacacgtggagataaatatagtttttaagcactaataattatttttacggaaatagtgaaaatctcacttttctgatagtggtacccctttgtgaaatgtgactcggacccatctcggaatatttttctccgctaagcaaaataaattcttactactaagttgtgaatatgtagacatgtttcgcgttaaatttgtttaaaatgacccctaattcaaaaatttaaaaggttcttcatttaaggatatattttaataaattttttcctcactcttacactcgttagtgttctctaaaaatctcgctctatacatcttaaaaaattatgaaattgcatagagaggaagccaagaccgttgtgcatcccttttctattcaacacatggagagaaaatgtagttttcaaccactaataatcttatttatcgaaatagttaaaatctcacttctctaatagttgtactgctttgtgaaatgtggctcagacccatcttagattattattctccgctaggcacaataaatttgtactactaagacatgaatatgtagttatgttacgcattaaatttgtttaaagtgtcccctaatttaaaattttaaaatgttcttcttttcaaggtaaattttaacaagtttttttcttactcttgcactcgttagtattttcttaaaatctcaccctacacatctcgaaaaatcgttaaatttcacagggaggaagctaagaccattgtctataactttcctattggactcgtggagagaaaatgtagtttttgagcactaaaaatctcactgttctaatagtggtacctttttatgaaatgtggctcggacccatatcaaaatatttttctatgtcaggcacaatgaatttgcgctactaagaattgaatatgtagataggtttcacgtaaaatttttttaaaatggctccctaatttaaaaatttaaaatgttcttcttttcaggataaattttaataagtttttttcttaccctgacactagttagtgttcttttaaaatctcaccctacacatcttaagaaattatgaaatttgatagagaggaagccaagatcgttgtccatcacttttctattcaacacgtggagagaaaatatatgaacactaataatcatttttatgtaaatagtgaaaatctcatttctctgatagtggtaccgctttgtgaaatgtggcccggacccatcttgaaatattttttcccgtaaagaacaatgaatttgtattactaagacatgaatatgtagatatgttatgagttaaatttgtttgaaatggcccctaattcaaaatttaaaatgttcttattttcagggtaaattttaataattttttttttactcctacactctttagtattctgttaaatatcaccctacacatcttgaaaaatcgtcaaatttcatagagaggaagccaagatcgttgtccatcacttttctattcgacacgtggagataaaatatagttttcaagcactaataatcatttttatggaaatagtgaaaatcccatttctctaatagctagtggtaccgctttgtaaaatgtggcctgttctcatctcagaatattttttcctaataggcacaataaatttgtactactaagacatgaattttagttatgctactcgttaaatatgtttaaaatgaccccctaattcaaaacttaaaaatgttcttcttttcaagataaattttgataagttttttccttactcttacacatgttagtgttctttttaaaatctcgcaccacacatctcgaaaaatcgttaaatttcacaagaaagaaggcaagaccattgtctatcatttttctaaatgacttgtggaaaggaaggtagctttcgagcactaaaaatcattttttttttttatcgaaatagtaaaaatctcacttttttaatagtggtgcctctttgggaaatgtggcccaaactcatctcaaaatattttttcccgctaagcacaatgaattcatactattaagacgtgaatatgaagataggtttcacattaaattaatttaaaatagccccctaattcaaaaattgaaatgttcttctttttacagtaaattttaacaagttttttcctcactcttgcacttcttagtgttctcttaaaatctcaccctactcatctcaaaaattgtaaaattttacagggaagaagccaagactattgtctatcacttttctattggactcatggagagaaaatgtagtttttgagcactaataattatttttatcaatatagtaaaaatcttacttttctgatattggtaccccttgtgaaatgtaagttttgcaggtaatgactgtgtgctttgaataataatggagacttaatttgttgtattgttttatttagtttgtgtgtagatattctcttacttgagggcgagttagaagaaagcttggtggagtttgttagactagctttagcctatttttttaagtattttaatctctattttcttcttgtgaatacatgtttttggaacataattacgcttatttttctttttcaagtttaaatgatataattcatagtatgaatggattataagaaaaaaaattaataaatgagatgaatatgatgaatttactatggaattacgtgttctaagatataatgggtgaataattctaaattttgaatgtctaacacgttccgtttgtcgctgaaaatcagtctaaagattcaagccaatatttgactatgattctttcactttcaagaaaatagttgtgaataaaagttttagtttcttttagcttttcaatacatcttgaatcatccaattctgagcaatattaagaaagttatagccaaactaccatcagttgacgcagcaggatttcaagataaaaaatattgtacactattggaattagcaatgtagctcccaatattgcactgaggcaccctactacaaaggagattgatgttttccaatggtacctggcatcgcagcgggggtattgttgcctcggcgccacctatcgtagaaatcatgaacttttaactttttagaattttatgggaattacaataaaaatagtattaggtctttgttttaactgagaaaatcgcgaatttgagaagaagagactttttagaacttagaaaaatataaaaaaatgagattggagatcaaactttggagcaattatggcaaccccaaatctaatttcttctattgtcttttaaatttatatttttattatattttttatggatttgattatgaatatgttgatggagattgttagctaaactctaatttaggaattttaatggagattatttaaaactttctatggattaatgctattttaatttctttcttctattgatgtatgatttattcatacttgtgcttattacatgtgtctgactggccatcttatgcatgatctatgattttaatacaaaatctttaaagtgagtatttagaattctctaattaaataaacattaggtttcgacacaaaacaagagtatttgtgtggtttatgtagcttttagattattgcttaatgcaaattacatgtgtgttatgcctcaaaaatttaagatagtgccatataatttagattctatatgttctaatcagaatatagattattttataatccactatcatactagatagaagaaaaacattgttttgcattattgacatatgaagtggaatcaattgaaattaaattccttatattttatttcttgattaaatcttgtttattattttgttatttaatttttacttacattatttagtttcaaaatccattcttttattgccaaataaaaacaaaaattcaattattttgtatttagctacaattctcgtaggaacgatctcacttacctgagtattacttgtaaaaatattacgtgtacttgcgtgttagatttattacaacaaacattccttaaggttaaaattgcaacctcaacaatcaaggttggtcgatcgatcgaccaccataggcaaagctagtaccgatcaaatagcgagcaccagagagctaaaaacataattttttaaaacacacctgaatcaaccaaaaatagcttcagacatgttatcggtcatcttatcatgtttaaacacttaaaaattagacataaatatataacatcactcaaatgtatctaacacatcatcatcaaacaaacatgtttctaattaaaattaagagaaaattgggtctaaaaccctaatttgtttcgccaatcaaaaattggaaagaaaaggggtgcacactaaaaaattttaatcattgaacacttaaatattacctttcaataaagagaaccaactaatcgtgtatctaaactttctctctctctcaagggtgaaaattaggattttttgttctaaatctatagttatcggaggttttttttttctggccaggcctgtcggccttccttgggcttaggtgcggcttggtcaaggttgtattttgttactatatatgattggtcttgtctctgtgatatgattttgagtattttagtcttgtctcaataatatagttttgagtgtttttgtcttgtctctgtgttatatgatttgagtgttttagtcttgtctgtgtgacatggttttttttagttcttttttattcttcgattgctcgccatcaaatcgttgctagagattgggaataataaattctttgcgactgaaggggttgttagtagggaagtgtgtaccttacacaataattgagtgctcaagttacaaggttaaataaacctgttgcaacagtttttactgttgtgtcttctgagcgatggatgtaacaaaatatatgtgttcttaaggttaattgtgatgttgcaatatttttcttttaattttattttagtttttttttgtcaaacaatttgaaaattagactactgattatttagctcatttttctaattttaatatcggtcgtgattctaatgagatgatgtcctaattgaattgcatgctattattttagttgattgccattaacaaaattctattatttattcaaaatttatatatatatatataaaatttttggggcttttacatttttacacttcaaaacagttt

SEQ ID NO: 33109 - DNA, 2898 bp, Cannabis sativa
  modified_base (32)..(53): a, c, t, g, unknown or other
  modified_base (2849)..(2849): a, c, t, g, unknown or other
tctgatatttattaataagtaaatttgattannnnnnnnnnnnnnnnnnnnnnggcataaaacccaacagtgacaagaaccgaacccaaaccatagcccaaactcagaccaaaacctttacttagacctttattaggactgggacttgagacatgggacccggaccgggaccctaacctgacctggtaacccttgtgggacctgagacccgcgacccacaccaggatccagaccctaacaaggacctgaacctgaaccttgatcaagatgggaactagacttggacccgatcccagaccgagacatggacgaaaacattaacacgggacccgaacaaaaacctggacccagacaacgacctaggaaccggacttggatggggggccctagaccagagaactaggcccaggtaccaagacccagatccaaatccaggactcgaacacaaaccaagacctgagctggacctaagaatatgaagtcggacgcagaccctaaccagaaacatgctctagagcaaaactaagacaggaacctagacacgaacccataccaggaccaaacccgaacctaaaaacacacccaaacctggtacccaaactcggttcctaaaatcaaacccaaacctagaccagcacccggaaccgaactcgaacccagaccgggatcggaacccaggacttagacccaaaacttaacccaaactcagatcgagatcgaaacctgtgactcgaacccaatcctggaccaagacccaagaccctaacccacacccagagcccgatccggacctagaccgagatctggacccgaacccaacctcggacccgaacgcgaactcgaaactcgaactcggaatcgtaactggaactggaaccagactaggaccaggaccaagagcaagacccagacccgaaccctaacccaaataaaaacccagatcgaaacccaaactcgagccgcgactaggacccaaacctgaacctagatcaggacccaaacctagatcagaacctggacctggacctagaatcgagatagggacctgggcaacggaactaggaccgtgaccctagacacgaccctagacccgtacttgaacatatgaaacagctcatgacccaacacattaaatggaaatagattgggacctgagattgggattcggatctagactcggggtttggaccgaacccatagtcgattttagtatttgggacccatccatggaccaggacccagactccaacctagacttagacccgaactgggatccggacacggatcccaacccaaaccctgactcgggacctgaacatggacccaaacttagaccaaaactcagacttgggactcgagacctgaaccagaaccaaaccaggacacttgacaaggatctagatctgggactcagaccaggattcgaacccggcccaagtgccaaacccagaacctgacccagagtcgggacccgaaactagaacctgaacaagaaccacaagaccacgaccctcgaacaagactaggattgtgaccaggtgccagacccagacctagaatcgaactcgaacatagccccaaacccaaactgagactggaactcgggcccgaacacggttctgtacccagacggggactgagatccagacccagaccttaatcagggacccaatcccaaacacatactcaaacctagtaaaggatccagatatgaacctggactcaaacccagacccacatcaggatcgaaacacgggacataaatctggaccgagatcctgaatcagacccaaacatagacccacacccgagacctgaactcagacctgaacccgaacccagacctagatcgtgatccagacctgaacccaaacccggatccaaactcggacgaggactcagaccctgacccagacctagacccaaacccaaacccagaaacggaattcgagtgtgggtatgtgtccgagtctaggtcttggtccgataacaattttgggtctggatccaagtcgtggtcctgttccagggtccctatctgctctagattctgttcaagttttaagtcacggggcacgggttcagtccaagcatcaagtctcatatccaaagtcctgaggtgggtcctaggtctaggttttggtttgggatcaggttccgaatctcgatccaagttctgaggccaaagtctgttccctgtttaggggccaaatttccgagtctgggtcacatatctatttttgggttctaggaccaaatctgggtacaagtttgtgttctggttcgggttcgagtctcgggtcccggtctgagaataggtcccgatttgggttcaagtctgagttcgggttccagtgccagtcttggtccgagttttaagtcccaggtccgagtttggttcttgggtcctgagtccggcccaagtttttgggtctgagtctaggtccgggtcacgatctaggtccaagtcccggtctttgtttaggtcccaagtcataggtcccagtctgggtccaagtcccactatgggttttggtctgagtttgggtttaggtttaggtttgggtcctgttacagtcctagatttgggttctcatcccagtcttggtttgattccgattttgggtccaggatctggtcaggaaccgagttcgggtccgggtctgggtacggatctaggtacaggtcctgaattcaaacaatatctacaggttaggtcgaagcctcaggtctagattcggatctcgatcttcgatcccattcttgttccaattcggctgttgggtcccgggtcgagtaataagtttgggtttgagttcgagttaggggttgttggaaattattttacnaggatcttagatctactcacaagtctgtttattaacaccctaaatatga

SEQ ID NO: 33110 - DNA, 2212 bp, Cannabis sativa
  modified_base (35)..(53): a, c, t, g, unknown or other
cgctcttccgatcttaggatgttaatgaaacatannnnnnnnnnnnnnnnnnncctggtaaaatatatccaacacctcggccctggcttggacccagaccctgaaacctggacctggaccctgacctcgaccccaaacctggccctagacccgactcgaaacctggatcccaaacctgaaccccgaccccagcctaaacttggacccagaccccaaacttaaaccccggccccaacgtggaccccagacctgaaccttaaactcgaaccttgacccgaactcgaaggctaaccctggcctggaccctggacctgaacatcgaccccagacccagacccgaaatcgaactttaatcagaactgaaccatgacctcagacccaaaccctgacccagacctcatacctgaacaccgaccctagcctgaacctagaccctgtcccgacttaaataaaatcaaaaaatgaaaataaaatttatagaacacacttttatagaacacacttttatttcttttttaaaaaaaaaaattaaaaaacaaaagtggttctagaacacattttttatttttaaaaataattttttttaataaaattacttttatttttgtgattaaaatatttaaaaataaaagtgttaccaaacaccaccatattatttgaatctggtgttaactcaaaaatctaagctagatttctaagccacacccgctcgctagattgacgagaatgaaaagtagaaagtaattaataagagagacacaataacttatagtagtttaccccctgtgtcatgattgtaatagggctacatctacttcgagtttttatttctcacgagatggtagttacaacaactatttaagtatccgaagcttcagactctagagagagaaagtctagaaagaaaaactctgaccttgtgggtagttttttgaatgtaagaaatgaactaagggagctctcattttataggtgaaggaggcctacaaaaatatgagataaaatataaataaagtgtttttcaccgttgatgatgatgtaatagtaaaacttagcttctggtagtgatgactgattttttatgtctggcgggtcccgttgcgagttactcaaagcttattttcataactcccttgggggtgaattttggcgatgatagctttaaaatttagactaatgtgtaagacatgacttgatagagggcttaaagagcttcaaaatgttagttgaatcgtatcaatcgaatgaaacttgagtgagttataaccgttttaattaaggcagttcaagttccagtgcccaggttgacatctcacatcaacctggacgctgtaaaagtgtagaaacgtccaagggaagtccttgagatgcttaagtgatggtttgacatcccttagtcattttatatgtttttgtgaagctcgtcacacattctcagagatgttgctattttgtagaaacggaagactcgaaacttctaacttccgtatgagccaaaattaaagttgtgaatttggttgatttgacttcatggataatttttgttgacctcaaaaagtgatcaaccgatagcggagttgtatagatctgatgcttgccacgtgttgcacaaataagaatgaaaaataataaacacacagaattgttatagaggtttggcccccttgtgatagcaggtaataacctactcccctcttagctgtattaataccaggggaaatactatccagattgctatagatgggatctgatatagcaccctaaaggctacaaagtatgaatcgagattaggaagtctcaagtgtaaagaatgcttgtatgggcatgtgagagatgaagtagacaagagaagatttattcatacttaggctttctaagttagagttaaggactttatataggaggcctaaaccctagattacaacttaaaaccttagttatttgtatatttaataagttaattataaaagaccaaaatgcctttctatattcagctattctgttgggcttttagagcccaatgtgcagctcaagagttattgtccacgtgtagaagtgcacaaagaatcctacagaacccttcctggttagccaagcacctgtagggagtaggctgactggccatggcattgtctagaggctggccggccatggtactatttagaggctaatcggccatggtactatctagaggctggccggccctggtgct

SEQ ID NO: 33111 - DNA, 2355 bp, Cannabis sativa
  modified_base (1661)..(1672): a, c, t, g, unknown or other
ttaaatattaaattttatataaattaagaaaataaattttaataaatatgatgtgttgaaaccgttggtgccaatattatttaatttttccttaattagaatccataggcatcccataccatatcataccataccatatatgtatgtagacaaagtcaaagttgtcaacgttaattaatgtgtacatgcacatatatacatgtattatacatatacgcgttgaaataataattaggtatatatatagtagtaataataagcattgggaaccacagaaaattaacttcaaagttcgttcgactgtaaaaatatattattgccctaactacaattggagactttagtctatagaaattaaggtttagggttaatagttcttgttggaagttggagaagaaaactattagaatatccgccgttgtataattaataataattttttttttatatatatatatatcattggagttaattactatgttgtcagaaactatatatatacatatatatttttcttactagggttgacattttaagactctattcatttgctattggactttggaataatttctttctgtatttcagttgagtgttaattgataataatgaatacaggcttttaattgtttaatttgtaaaacattatttataatatatattttcaaataaattataaaaaaaaaagaaaaagaaaaacagattgaacgttttcttagtttgtcggctaaggtctttatcataatttaaagttattaaaaataaagatcaccaacttttgttgctcaactatataatcatatatgtatatgcactaactttctaaaatcatataattattataataataataatattatgtatgtggttttcagtgaactataatatatatatatatatataaatatattatataatatttattgaatgggtcacattgttatggtatgtttccttgacctctatatattataataaatattttttatatattgattttgaaatataagggttgttggtgttatttgtagttcgtaattaattagcactacaatatagttaagatcattttcaataattgattataattatcttatatattttgccattaaaaaattgctcattaattcattaattattcttttaaaaaatatatataagttattaaaatctaatgcatgtgaatatatatccatacttttaagtgtttttgttatatttaattaattataaacaaaatgattaataaaaaaaggtgttatttttattttttaaaataaagagtattctattacaataatattatattacatataaatacatgaaaatgaagtcaagtactattatatatatgaaattaataaaacacaatattatatcataagaaatgaatggtggtgatgacaggagacaactaattaattataattataattagaatatataataatgatgattttattacattaaaaatggttgtaattaatattaattattatatataataaaggtggcgaatattgatgggaaaagtagtggaattatctccatcgagtaattgattagcaatgataatatttgcagcctcagttggatgatatgcatcccaaaacacatacttacttcgatcatcacacattacattattattattattattnnnnnnnnnnnnattattattattattattactcatgaagcaaatcaaaggtggaatcgatcctccacaacatggatcatttctgttctcaaatcctacacaaaataacaatattaattaatatatattaataattacatagcactcttcaaaaatggggtatatcggtaatttcaataattataagtgtatcacattttaataatttttattttataaaaaaatatatatttaattatattagttttatttttatttttttattgctactcgtattattataatttaaatattataataaaaaaattatatgaaattttattagaaaaaaaattatacaaggtttaaaacaaaataatgaaaattaaattgaataagttttgaaattaacactaaataatgtgagaaaaaaatacttaaaaaaagtattgagagagatttttaaaaattattttaagcttaattttttttaaaaaaaatagtggtgtttttatcatttaatttgtggagtgcaatttttttttttcatttttatatatatatgatagtttcaaaatattttacaatactctttcacactatttaaataataatattttgggaacgttaaagtattttgaacttataaaaaatttataaaatgtcttcaataattactatatataaactagcacataaaaaatgaaaataaaaat

SEQ ID NO: 33112 - DNA, 1454 bp, Cannabis sativa
  modified_base (431)..(432): a, c, t, g, unknown or other
cgaagcctatcaaggtattcttgattcttttcataagttgcatccttagaacggtaatgataaaactcacacattgatcttccagaccttccatcatacacaaggactaatgtgggctagtaggacaatagtgtatatacagttcttgattaaatctcaacacataagcaagaactatttcttttatgatagagagaaaacaaaaatacattataggctgtcaaaaaggttacttgaaaaattctatatcaaaaactatataaaaatttattatatggtatatttaaataaacctaataaagattttatttaattaattatttaaatttaaattatttatcaaatcatattacattatttgaataaataatataattggattcggttataaatgtttatatcttataaccgattgagggaatctctcaacnncttgagagaatatctcaactacttttccaattcaaatatttatttattgaattaagtaacccaaagacaaaactaatagggacaactatatatgtggtgcatgcactgtatctggacacaatgcatgtggtgcctccctttgtctgagttaagacaagggatataatttgaaaaataaatacttattaaaacataaataattactattgtgataattcaaaatagatttttttaaacttccacatataatttttatcccaccacttaacaatattttaaggtggcaatatggggaccataaacctataattctaagctccaataaataagatttatttaccaattaaataatcttgtttattcattccatgattactccactataaatatagaattgaactcttagtaaatataaaactgtatttattgagttttactacagtgtctattgatataatcaattctagtgattagccctccttgggtcagcttgaaattaattttggtaaaattatcgttttacccttctaattacttttttattctttagtaccgttaattaactagtgaatgtataattgagatccaatctaaatttgtgtgtaactttttaatttcagaattaacacataaaaggaactaacatttgatccgttagaaaagtcaagattccataactttagatcatgttcctagccatccacatattacattccaaaacagaagttataagaattatcttctttaagaaactttaatgagtgaatcaaagaaactaataacatgaacatgaattcatgactacttaagatttaggtatatctactattgataatctttatgatatgaattatgactttacagtaaacggcatgtttgataaatacaacttaatacatattcaaccttatcatatataatctctattatatacaacagcttcacttaaatgtcatgttacatcagtaatccaaattgagattacttgcacataacaagcatcagtgaatcatactagcaac

SEQ ID NO: 33113 - DNA, 4110 bp, Cannabis sativa
cctactcctcgtgacccaaatgctcctcgtcttcccgattcaacctctgctctggttggccctcgccttaaccttcataacagagttcaatccctgattcgagctggagatctcgatgctgcctctgctgtagctcgtcactctgtgttctccaatactcgacctactgtattcacctgtaacgctattatcgccgccatgtaccgcggtaagcgatacactgaagctgtttcactttttcagttctttttcaaccaatcaaacatagttccgaatattgtttcgtataataatcttattaatactcattgtgatgagggtagagttgatgttggtattgagatttatcgttatattattgctaatgctccttttagtccttctccggtgacattccggcatttgactaaagggttaatcgattccggtaggattgaggaggctgtggatttattgagggaaatgttgagtaaagggcatggtgctgattctttggtttacaataatttgatttctgggtttcttaatttggggaatttggataaagctaatgagctttttgatgagcttaaggaaaggtgtttggtttatgatggggttgttaatgcaacttttatggaatggttttttaataatgggagagagaaggaagctatggagtcttataagtctttgctagatagacaattcaagatgattccagctacttgtaatgttctgttggaggttttgttgaaacatgggaaaaagattgaagctttggctttgtttgatcagatgttggataatcacactcctcccaattttcaggctgtgaattcggaaacttttaacattatggtgaatgagtgtttcaagcatggggagattgaagaggccattgctacttttagaaaagtggggagtaaggtaaattctaaaccttttgctatggatgttgctgggtataataatatgattactagatattgtgaaatcgggatgttatccgaggccgagatgttgttttcggagttgtgttcgaagtctttgtctcctgatgtgaatacttacaagactcttattgatgcttatctgaaagtagataggatagatgatggtttgaaaacattgtgtagaatggttgaagctggtttgagggttgttgccggtttttgtaatagggtgtttgaggaatttattaaaaatggtaaagcagttgactgtgctcagattttgaagaaaatgggagagaaagatccgaagcctgatgtcagctgctatgaggttgtgattaagggactttgtaatgaagaatcatttgattcgtgtcgggagttgcttgaggagatgataagatgtcgccttggggttaatcctactcttcaacaatttgtaaatgaggcttttggcaaagctgggcgtacggaggagatcgaaagagtgttaagtatgaatcgatggggacacacaccaccctctcgaatgacaggaccacgacagcagtcatttggaagagctcaagttagagtacctgagaattcaggatatcctccaaggaatggatttcatcagccacagccacagcaaccatcgcagcctgctcagatggttgggccttaccaaatggcatctgtggcacctcaaatgacagcgccacaaaacatttattcagcaccctctcaaacaagtccccaaaatcttccatcaggggctcaaatgtcatcagttgcgcctcaaatgacatccccacaaaacacgtattcagcatccgctcaaatgagtccccggcacgcccaaatgacatccccacaaaacacgtattcagcatccactcaaatgagtccccagcagtctcaaatgccacaatacccacaaccagcaggaccatattatcatcaaatgtctcaacaatattctcaaatggatggatggtcttcgagagcaccatcgcagcctcctccatcaggacattcacgaatgccaggacaatatggtcaacaatcagactcttaccgaatgtcaggacagcaacaattgcagtcagaaacaggacgaccatataatcataatcatcatcaaatgagtgaatggcgtatgggagcaccgcaacactctccaccaggaccctctcaattggcaggaccatatgttcagcaatcagagtcttacggacaacaacatttgcaatcagaatccaatcagcctcaagtgacagaccaggtagcggctgcttgattttgtgctttcatcattttattcttacttacaactatgccaatgctgaccattaattgtcttctgttttatgctctatacaacatctgcatgtacgagaacagcagattgattattgataaattattcttgtatttttgagctatcatcacagtattgtacgctccttcattataaataatcttggtatacccttgtttgtaaacttttgcctatatactatatttggagctgaattatgagcttatgaagttaactgtggcattgggtcaatttccctctttttttctgctaaattctgatactttgagtttgatcttaattgctatcagttcgaaggcacaccagaagcattaagaaattacagttaggcttccttttttcagacaaaagcctggaaccgacccctgttccaatatcatttctctgttttcccaagtgttgggagtaccatattttattggttaatttgattaatagttttgaaaatcaaataatctaatcgaccaaatgaaatttacaaaacattaccttttatagtttgtaactgtattttgggttctttattttattttatttttttataaagaaaacatgttgcttagtgttgttgttgtgtacttgaaagtatcataagtgttgttgcaaaatggtcgatagtgaaaaaaactttattgaatgaatctaaaccaaatcagtagcaaagatttcctcaaaaaaaaaaaaaaaaatcagtagcaaagatggttggttgagggtggaacaaaatattgatgaaagatgtacctgtggttgaagaaaggatttagatgctaatataaatttatcatttgatcttttgtaacattttggattggtattccttcttatgtgttggcttcaatatcaaccacacaacattatatttggttggttgaaatcttatttttatgagacatttttgaaatgtgatatgaaaaggaatccaattaatggtattatataatggttggtttgtaatgtctaatatggatattatatatttgatttgaagttgtagtctttgtcttgtaaagataaggaatgattgggacttttttcttttttaatgttaaatactcatccagactttatgaaccagagttgtaaatgtaaaagcatacaagaaacttgggattatgatattaacttttaagttaataagcttataataattaactacaaaatagtgttgtctttgacgattgcaaaatagggtaaatatgtaacactttgagatgcaaaactggattgaagactcggcatcagaaatctgtaagcactacctgtgatcatggtttaatgatcatatgattagtttaatgttagagaaaacaaatataatagttgtttgtttcaactcaagttttcataaaataaataaatataccattttatgttcattttgcagttgttttccaactttctccatttgaagatcaaaacccagcttctttgccctgtttaaagttatccacttcaaatcaaaatctgtcaaaagggaactcatttagttgcttgaaacaattagtattcaatactgttaactatatatataattatataagttaattacctcatgaatgtaagtaggtctttgtatcaatctgtcatttctttgtcttccattcaatgagttataaatacaatttgaatgtgaatctgatgattggattgatcatccatcattaatgtgataataaataaaactcaatttttttataacaaataaaacgagatctcaacacaataataataataatgaaaccttaattacctatctaaagacagagagatcgatgcagaaagaccatttaattgatacgttcccaatctacttccacatgtgttatgtgttgaatcttaggccaatct

SEQ ID NO: 33114 - DNA, 2726 bp, Cannabis sativa
  modified_base (48)..(53): a, c, t, g, unknown or other
tgacgaaattggaagaaaattatatttttacaaacattgagtacttannnnnntaaaaataaatattaagtttatgccgcttacaaacttaaaactttaatacttatggcactatttaactttttaaaaaatacaaaaaaaaatattaatcaaattaccacgacacatatacatttacacttatgttaaagtctttatatctttatatttaataataaatcactattccttaataataataataataaatgacaagttaaaaataagttaattcccactttaactttctacaataaataaaaattggaagaaagtgaggatgaaaacgataaggatgatgatgaagatgatgataagacttacatacaattttcacatatctttaacaaaattttgatatgatttatgtgtcatctcatcgccacatcaaccttacaagtggaatttaaataaaatttaataaaaaatattattgtcaaatatttaagtttggcaataacacatcaaaatcccatcaacattttgttagttataggataatatttaacaagtcttctattttaacaatgtatatgatttgagaatttttgtaactagcaaaaggcataatttaatagtggtaatatttcatgaatgaaattttaaatttaatggtgtgtttaaaaataattgtgtaattactaagtagaataattattaaaatgataattacactataaattattttgaaactttcactcctttttttattttttttattattttacacttaaatactaaaactacttattttatggcaaattctaaatgatgctttttcttttcttggtatttttggtattctaaatggcaaaaatgatattttagtattttttttttcacatacatttgaataaagcacaacaattagtctaatatttctctttagttttcttaagaaaatagaaagaaaaacaacacaatgttttttattttatttttatttgcttttctttagaagatgttaattggttgtttatattggatgcctcttgaaggtggtcttaagttgttttgtctaaatttttgaaataattgtcttatataagttgttttgcttgtagtgactcatattttgttttgtatatctttgattagacaattagcttgttgactgaaaattcttatatatcaataattgtcatagtgtgattcaaatcattctcttaaaaaaaacaagtcaacaaagtaaaatgtaaaaacaatatgttatgtcatttgatttgatccattttcttatatataaaaaaaaatggtaaaagacttttatcatatactttcaatgagttaaggacaaatatgcaccatcccaatgatgctgataaatttaagattaatatttgcgtcatcatcataatcatgtattcaaacagttaattcatgctctaatcaacataaacaaatcataatatattttatttaaggtatttgtatgtaatacaattcccgaaatacctttacaccaactaatcccaaacacgcaaaactaaggtcatttgagaccttttgaaaatttccttttcgaaccaaaattagcacccctaaaacgaaactatatacttttgatataaaatcaaagttgggaagaatcgagagcactatgattcaatcttgaagccctagtagatgagacttcgtctttttcctctcaagctcgatcttgagcttcaaaacctaaccccttgaacttgtgaaacccaaacacaaacaaaaacaacaataaagatctagaacgatctttgttggttatagataaatagaaaacacacaagaacacaaagcgatttgatctccgagttcactccaaattagggttacgtctccatcaagctcacatcagatgcttgatcgtgcactatcaatcatcaacatcgatatgagcaaagcatatgattgtgttgaatggagtttcctctcaaaaaatttaaagacgttgggttttcaagatagtttcataaatttgatcatgttaatggatcgactcttgagagattttggcctcaacgaggtctccgataaggagatcatttgtttccatttctttttctcatttgcagcgaggtgcttgctagattattaaggaaagcaaaataaaacaaccttactcatggaatccaaatattgagaagtaacatgggaatttctcacattatgtttgctaacaacaacaatatgttttgtagagccaacccagctgatgttgaagtaatgtatggttacattcagaaataccaactttggagtttggcctggccaggtggtgaatttacagaagtttggggtgttcttatctccaaacacattattgtatcatgaaagatgcattttaaagattctgaatacggaacaaattagtagcaaaaaatgctaattaattagttaattagtaatattattttaattcgcttgacttaatttgcttttcaaataatatttaaactaatgtcatttaagtcttttccaaactcaaattgacttcggtcaaaaccaaagataacaaatcaatactacattgttttgatttcccacaacaaaacctttcgaagattctcgagatcaattagatctctattcttcttcttcatcttgaaaaccctagcaaagctaaaccaactcgaaccttcagggtttcaacacaaagacacacaacagtttagatctagatctgtgacaatcagtagtcccgt

SEQ ID NO: 33115 - DNA, 885 bp, Cannabis sativa
tgtgtgtgtgttcaatcaactcaccaaactactaacattcaaattaattcatacatgccaacaatcaatgtttatctaaaaaaaatgtgtatttcaataaaaattcactccataagcttaactatcaaactcttctccactaatgtaattacacaaatctaaagatcaataggactttataggcttataatgtaaggctagggtaaaaggtagataaagaaggttaatttaggctcaaatcacaccatagcatacatatacaatattctctcaaataattcccatttgtattccccaatcacttccctcaacaatttaatattgtatcttttttttttttcagcataaaacttattatgtccccacacttaaattgtttcaagtattcttttatttttcattgatttttttttttttatgaaatacttacaacttataaacattcattctaagagaatgataatttttttctcatcatcatttatacataaccatcaatatttttccctcaacaaaattctcacacatttacaaatacataaaacatcaatatactatggtgtgaaaaatgatgaacaagggattttcttttaggctcaaaggttattgtatatggttaaaaaaacaaaatttcaacatttaggctcaacttgggtaaactagagaattcacaaatagggtaggcttgaaaagctcaatcgataaaagaaaagttgcctatatcatatctcaaaatcatgtgtaatttatcgatttcgcctcaaatgattatcaaacatgttatagagtggttgagacttaaaatcaaaagtcaaacatgcatttatctttccaaacattagcaaatatgataattcaattgatgtgcaaaaattaaaaaaaaaa

SEQ ID NO: 33116 - DNA, 1767 bp, Cannabis sativa
  modified_base (192)..(209): a, c, t, g, unknown or other
tcagtgtaaatccagtgccctgataaatcatggaacgaaatactttgaatcatataatcatgattatttttcattatgtagacaacattataatcatgaataactatatgttcaggatttaatagaatttatataataaatatatataatcatgaaactagtcatgtgaaccatgtaacataaaataatttnnnnnnnnnnnnnnnnnngtaaatctgattattttgaaataagttttatttagggtataaaatcccaacattagcaacaagctatccgggagagacattctatacacggtacaagcttatctagaagtaccttccggattctacaagaccttttgcacagggctttccggatccacactaagcttccaatatcactctctccggataatcagcttctactcctgaatgacaaaacttgtaaccataactaacaaatacttaacgggtcccctcggggcggggagtgtcatccgcatgcatgtcccatttaacatttggggacaaaaataatcctcgttaccaccctgttccccatttagatgaggaattctcaccctattagaagcgggttccaatagtcgacccgttcgcttaaaaaaaatgtgcatccctatatataatataataatataatatatattaaccaatattactaaatgacatttttttaatcagttggtacaaaatattagaaaccatgtatttttgttagtactataataattttataggatatgccgacatttgaaaaacagaaaaaaaaaaatggaaaattggctgatcataataggtaaggaatgggtaggaaacaatagagaacaatataaaatggaaagacttataattatcatgagttgtgtattggtcttccttgcataatcaaaaggccaacataataaattagtacttttgacgctgattataagaagtatttggtgtgagtaaaaataaagcatgtaaacaaaggtcaaaagttgtcggttaatttaatgatttatttaattaaaaggtgttaaaaatatactttccattaataaaaagttgactatatataatgtaagagggaaaacaatttgttgaaataccttttgtggatgtgcatatgagggatcaactaatatgcgtgggacgtaatatttgaaaaaatgaccatcatttttctcatcccaaaaatatgaaatagaaaagctatcttttgcaatatatacggtaaatttattgtaggatttagtattcttaccttatggtatagggaaacaaattaagccagtcagaatttaaaaaaaaaaaacagattgtatagaattttcgtttttgcatgtgttgaagattattacattatatttatataataatactaggcaactaagttgcgcttcgtgcgatgttgctaaatttttgtaaattatatatatatatattatatattgaatgagtgatataatctaaaaaataacattttgatgtgtatattataaacaaagtaataatattaaaactaaaaacataattttaaaatgcatagaaagataacgattttgtgacaaatattaaatggtaaaaattaacaaagaaattgcatgtgtttttataataaaataaagaaaaaagataacagtttttgaatttaataagctcagcatgtgactgatgatgttgttgtttttaaaatattgtttagacatttttgttaatagaaagaaataatttaaatacaatttatggaagtttttacattttattttgtggtataggt

SEQ ID NO: 33117 - DNA, 2614 bp, Cannabis sativa
aagaaaataaaatcaaaaacttgttaaaaaaagagagcaaaacagcataatattagtcatcacatgcgaaacaatgaatactaatatctcaaaatgtttagaccccgggattaaataaaagggtacttaagtcattgtggtagaggatagttttagagtgggaaaagaatagtataaataagtgagtatagggagtgagagagtttatgcaagaattaagaggttatttctctgcatcatcgagagtccaaggcctctcgaatgcctagggaaactgtctctgcaattctcttgctgccgtagcatacacaagttttacatattgtctacatttagtccttactattctctgtttcgctactgtcctattacatttattcatcggctagctcagttcatatcaaaacgttacaagtactatcaattcctctctttgtacacacacagatacatctttttcttcataataaattccactcgctcatcttgtgacactccatccagaaatagcagcagtaacacaactggataatgcataatttacttcattgcatagcttatttcaacagggtttgaaaagaacaaagccgccggtttgtatgcaccaacaaatgcgtccatttatacaatcgcatcattgatgaaatccattacctatttaatatttataaaaattaaaagactgaaagcactgcatttaaacagacatattaaactaagccaggtacagaaagcaactcacctcctgcatatcaacatgaagacgactagatccagggtctccatgactgcccgaagagaacaaaacctgtacattgtgtcatattattatattatttcaaatgaaaaagagtgaataggtactaaagagaagttaaggggatttgatatgtatataaagctatgtaccatataaaaaacaaccaaaccaaatgagcatgttctatcaaaacaagaatatgaaccttactctcaattataatacttgttatagaaacataaacatcactaaaatacctccagggatgtgctgcaacgttgatgcattgtgtgagtaatgctcagaaactgtgacactactgaagccaaattttcatgaataataggttgggcatttaaagcattcctcacctaaagaggaaggggattagtacaagaaagagtaagaatattagtttaaaacataaatgatcaattagccaaaacagcgagtaccacacaaaagcatgtaatgtattggtttgatgagtaagaaaaaaaaattgtaatatatgaatgtgcaaattacttaagtgtgtagatactatgttgcattttgaacaaatcttataaacataactatctattcaatagtgcagttaaatgaccaattagccaaaggtgcaagtatgactgctacttaactacataaaaagaaagatcaaacatttcaaaaaaaaaattctctctttatgttgactttcatcagaattctgtgtcacacactttactcttcataggtataggcaggtcctttctaatcctactctcaacccctcaacacagccaatctacaactcttccagccaaaaataataataaaaaaagggagggaaatggatcagcttatgaaactactaagacaaaaagcacgcaaccatctatgacatctacttaccaaaaccctggtcaactcttcattttcatgaccatatagtgcgcatatatctaacaacataggcaagtcaagcaacttcttttcctgcaaaagaactacaaacaaagttagtgaacaaatgagtaagaaaactagaatttcaaactatctgaaaagaaaataccagctaccatatctcctacttattattgatcatggatattgttcaaaataaagaagagtaattcaaagtatcagtggttaaaagaaataatttaaagtaaaattattgcttaatataatgtaactatttcgttaaaaataatctgcaatacatgtaggttggaatatcggttgatataaatttaattcttttactatacacatcaagagaacaagctcccaaaatcctggtgcttaaaaattggccctcaactctttcatactaattttgcttatgcccccttctatgtgcttagaatgatcaaatgcaacatccgttaaccctcaaaaatcccatccataagtagctatattgaaattgtgagaaaagaagatataggaccaacctcccgacataaactattatttcaaataaaagactgaaaacaaattacagggcgaaatagagcccacctccatggttatttacactgaggctgtcagcagcacgagctcctggatccctattggatgatctgcaaaagaaagaattcccatgattaagaaaaaagacactaatgaaataatgaaaattcacattatggaggagaaatttacatgcgatataacaccataaatacacggcggcttagatcatcctctccaacaatgacccctgcaacatttcccttgactccatgatgagggaaatcataccatctattcctaaactgtaaaaagctatccaagaaatcacgcaaagaagtgtccagagccactgaaaacaaggagaacaagaacgagtcatattaaagt

SEQ ID NO: 33118 - DNA, 2668 bp, Cannabis sativa
  modified_base (2600)..(2621): a, c, t, g, unknown or other
ttctaacgagaaagggatcaaacaagtgtaattttttatttataacctatctgacgaggaaggaaaatcaaaagttatgactagcacataaagctaaatactaacggcttgcgtacgggaaagtattaaacgagacatccaaatgtcttgaaaaaatacttaaacccaatacgtgggtagaaattttaactactcatgaaagaaatgaaaaaaatatataagatgacaagttcattaaaaatatatttgaatgtgcttaaaataagatcattttcgatgatcgcgagatggaattgatgatggcttacagattgaggaacgggcagataagatgctcgcacataaagtaggaaattaactacttaacgtcggaggaaaggacaatcaatggaaacccctaataaaatttatgcatgtgataatttatattgtaaataaaacgcaagcaaacatccacataataaagtttacacttaaaagtgcaaggcattaaaaagaaaagttggtcctccaaccttgcaaatttgtctttacaaaaaaaaagtgccactaggggccaaaccattatctcggccaaagggccatttcctaaaagaaaaataggagataaataaaccaagtatacatgttgggagacttggacagatcttcttcttcttcctcgacctcgccatcttcttcctccatcttggtcatcttgtgaagagctaaagtttcctcttccttctcctccaagaagctggtatccatgttagggttccaaagccaggcccgatatacagcacgaaaaccaactttattgcaccgttctacggtctcaatttctttatgagcaagtttttcagcaaacgtctcctcaaactcatcagcttggacttttatggtcttctcggtcatcttcttcgtcttcttggcttcctctttagccttctcggcttccttctttgctttctctgcttcctccttcgccttcttggcttcttgcttgaggcgggtaatctcatgttgggcgttgtctcgttgctcacacacaaccttgcattgggatactaaattgtgagtctcaccctccaaatactcgagtcgctcagagagtagtcgattggaaacaaaagaagcaaaagaagcctggagaattacaaacagatgaatataaaagaggtataaaaagattatataattataataaaaaagtcgacgtaccatgaagtgatagtccaagctccttcaatgcatctcttctggactcctaagattgagaaaatcccaatttgggggaaggagagtttgaagtttacgccgacatgcgaccccatatgccttggaaaattcagaactagcttccccagctgtgaccgacagggtctctatggcctgactgaaagaggcagtagtgggggttgcctcgggatgaggggcatcgacattgggaacagctggaggaggaacttgctcttggatctcattgtctaaaacctcaagatcaataggctcggccagtgattttttcttatgggcagtggctttcctttgcttcttgggaagaaccactacgacagtagtagggactctagggtttgatgtccttttcttccccttacggtccagaatgtcttcataacccatgtctgcaaaacaagacgaggcattacaatcattataaaagccaattaaaaaggggaggagtataattttccacctaagggatttaccaaaattactagaaggcgagctatcactagatgaaggggtaaaaggacaataacatgcgctaaaatccctacagcctgtaattttaaatatatcaaaaggctcgattggttctaaatcccagttcgcatctatgtgaccttccctatcttccatagtaacttattgctcggctataccataaaatgactcgtgatagttaatctggacgtgcaatctaggataccaattgtcaaacttatgagcaatgcggtccacgagaatagaattccacgtataaaaattaagacaggaggcttggaatgtaactaatgtattatgctcaagtacagtaggtgaccagccacattgattaccaagggatgctccatcaccggtttcccgaggggcagtgctttgaaggtattatgcttgggccaagcgattccaggcctgatcttcgggtgaaataattatttgctgccaagaagaatacttggcaaccttgtaatcacaagtgtattcgttatcagcaagaaggcctgccgatggcaagttaacttcattcaaaaagaatttgcatgatcggagaacgtaaggtagagtcatcaggcgcctgtgcctactaaccctctcgggggaaggagtaggtttcgtcagaagagctgtcagaacaaaccaaacattagtcaagtacttgaaaaaggaagactgatgtaaataagtaagaagagaacaactgttgggttttaggccctaaataaaactaatttcaatataatcagattcacttattaataaagatctgaaataacatttaatgctgcatggttcacatgatttatttcatgattgtttacaaaatgtgtgaattctatttaattcgagaacatatcaatttgttaatgatnnnnnnnnnnnnnnnnnnnnnnaatataatcttaattatatgttcgaaagtttattccccgatttgtca

SEQ ID NO: 33119 - DNA, 2042 bp, Cannabis sativa
tgggtccaaatccattggatgtgatccaatgaacacccctagcgatagggttatggttctgattataatctaggttattgttatgttattgattatgcttttcttactgagtatgttgactcacaaatattgtttgcatgtgtaattaagggcaaggcttaggttgagcagctgtgagagcgagcagatgaagattttacatgtcaggacagttaggcttggagcgtacgatcttcgggacagctgagcgtattttgtatagtcgctaggtgacaacttttgtattatgcactacgaaatttttgtaaatattttgtaaaagggatcccgacttatatatagaagtatattgttatgatatttataaatagttaaataaagttttaattattcacaattttcaataaactcgttgattagcaacgagatgtacaattaagttaaaatcacgttaacatgcctaaagtagtagagtgttacaaattgactcggcatcgttggttaaaagcgatgtcaatacctcttatttgagatttccattgaggaatgtcatttgacatccattttgtgaacatgtaggttgtgtatggatgagaaagaaaacaacaatctaattgaagttattcttgctattagagcataagtgtcaaagtaatccatttcttccttttgcctatatcctttggcccccaatctagctttatgggtttgaatggttccatcgacattgtatgtaattctaaatacccacttacatcctatatgtattgatctaatttgtagatcaactacttcctcatatatttgcctctttccaaaaaatagcatcccttgatgacattgcttctgagaaggttttaggatcaccattaattttaaatatcatgggatatgtcattttcattccttatggtcaccttcttctatatgtataagatttccatttgattgttactattaatatatcctaaccttcttagcctttgacttctccttggcaattgttgttgctctacaacctttgaagaagtcccctcttgagattattcattttagatgaatctttgattttgattatcatcatacaatttgttcttaaagaattctacgtctttagattcaactatcacattaaattccatattcaataatctataagctttattattgaaggcatagactacaaatacacttcttatagctctaggacccaacttggtcattttaagattggtactttcgtaataatctaaacaccacatcggtttgaattattcaatattgggcctcttgccttgtcatagttcatatggtgatattaaacctttccttcgaagaaattctactaagaatatgacatgtcgttagcaatgtttcacctcacaatacaaaactcaaatttgcatttaataacatagcattaactatctcaacataggttctattttttctttccgctacgcttttttgttggggattatatggagaagttttctcatgtgctataccatgttgctcacaataggatataaatttattgggaaagtattcttcactttaatcacacttaggattttaatcttttaatctgtttctcaagttgactttcatcttctaatttatatattttgaacacattaaacacatcatcattactattaagtaaactcattagtgaatgtagaacaatcatgaataaatatgacaaaatatttatgtccatttctagtaatcaattcattcaatacacataaatctttataaatcaacttgttgacactgaaaagtggccaacaccaacttactaaatttttaagatgaataatgagattaagtaaacaatttagagagacgaagaaaatttatagtagttagctacctcacgatggtaatggagctacgtctagtttaaaattttatttctcacgagaattacaagaaactaactaagtttgaaacctctaatttctagagtgagaaactacatctctctaaccttatgggtactgttgggttttatgccgtaaataaaactcatttca

SEQ ID NO: 33120 - DNA, 3826 bp, Cannabis sativa
  modified_base (979)..(983): a, c, t, g, unknown or other
  modified_base (3619)..(3619): a, c, t, g, unknown or other
agtaatcttttcatctttaatgtagaaatcagtctcatagtaatttatttttaattcaaaaatttcaatttgatgagacaattgttattcattttagacaagactctacatttagaagtaacttgtatccacttttcatacatgaccttgtatgattcagcgagagactcttcacagattttagaatcatctgactcagaatcttctttttcaatggtattattcaaacatacccatttctcttatacctatgaatcacacaacaaactaggaataattgaggttagagcaacattctcagaattttctttatcactctcagttttatcttattctttttcaaagtgtttgcacactcagattgaatgtgcccaaagccttcacattccctgcacttaatttcctttttattagccacagaaggtttaaaaggtgtatttccttttgaaaattttggagtattatttttattgcccatctttttcatatatttctaaaagttcttggttaataaagcaatttcatcttcgcattcattatcagaactttccttttcagtaactcttaaagcaatacttttacctttatcatcaatggacttgggtttgtccttttgtttcatttgttaattcaattcaaaagtacgcaaagaacccattagctcttccaccttcattgtgctaaaatctttagcttcctccatagccaaaaatttagtgtcgaacctgtgtggaagaactctaataatttttctgacaataatagattcatcaagcttttgaccaagagcaaaatattcaatagctaatcagacagtctttcataaaactaagttagggttctattttctgacatcctaagatcatcacatttgttctgaagcataataaacctagaacgattaacatcaaatgttccttcaaactgaggttgaaggatctgccaagcatcctcaggagattcacaagaagatataagnnnnntataaccttcacctactccattaaatatagcatgtaaagctttactattataagaagacaatttatcatcttcagtagactattcatgttcagattttaatttagatttaccttcagaatctaccacaacaggacgagaccatcctaaaagcctcattctaccacaaaagcctcattctaactttgcaataaggataactagaatcattgagcagcggtggacgagtaatggaacttccttctacaaaaaaagacataatgcacaaaaacacaaaaatattgaaggaccacactaagagtttactgttccgctttaatactaagtgaaaaattgtgtttttgaaaaaccaataaatttttacaaaaaaaatagtaaaaatacaattgtaacagtctgtaatagcagaatgtaattctatcactgcaaaacacacttttgcagaaacaaaccagaatcagaaataaaataacagcataaaataaaattacttgactcaagacaatgatacgtggtatcagtgttcttttgaacactcctagtccacgggaccacgcttaaagaaaaaaatcaattagtaaagtctcaaataattacaaagacaagtgacttaaacaggtttagactccgtctaaatttttgtcataatcctttgtaattcacttcacgaatctgattcctaaaccaccatcaaatagcaaactctcttcatctttgatgtgtgagtgcttacttcctcccaaagtaaggcttgaataagtcttctctcgaagacctttctcttatttaatcaagttgttcaaactgatcctaagaccagtatatggtataagaacaaatacacaagcactcaaacctagctgaacaacagtattctcacataaagaactctctcctcccatataaaaaaatatgcaaaaatgaaagctaaaagaggtaagtcgattgactgctctctaggttctatttatagaacatagcaaccctagtgacagtcccaaaattgaattcaaagctgtacaacactttcttaaaaaattcttaatgtgtagcatcacaatcggactctacagtagtagatcaggaccaaaaaagaaactttcaaaatggagcacaattatgaatatggacttcaaacctgccaaatacattgcgtttgatctgatcttatcaagacacactcaaaatcatcaatgagaaagaggaaagtcaaagattccaaataaagacaattttccataagagaaattattttctcacaagaagtttcctaaacaagaaaaggtcagctgaaaaagactctttccttagaagaaaataagtataaagacacgaaatcaagatgaataaattagtttaatttcacaaggaaatcacataatataaataaaaaatattttgacacctaaattgctaaaaaataactttatagtatataaaaaaaattcggtcaaatactttttggaaatatatatgtaaaattagaagcttcatttgtttggaaaaaaattatattcatcttttaggaaaaatctctagcttctaaaaatatggttttggtatacatactatatgtttcggcatctaacagaacttattggtctaattttttattataatcatgtacattgtagttatttaaagctacttgtaaatttttagaaaattttaaaaaatttacagtgacgaaaataaaattaaaacaattatttaccatgctaagaagcaaatcaagtatggaacaaaatatttgaaccttatattaagtatctgttgtagctatttaggaccatatgtaaatttttagaaattttcaaatagttacagtgactaaaataaagtttaaacatttacttaccacgcatatatataaaccagtcacgtatgtaacaaaatattactttattttcgacactattaattattcacaattttccaaaaatttataaatagtcctaatgtaacgccctaatgttaaggcacgttacagtgatttttcaattacaatgctatctttgctaatcaaagaatatacttgaaaatcgtgtcaaattaaaacttttatattaaatattaaactttataactttataaaatcatttacaagtaccgggatcccctttttgaacttctatacaaaatactcaaaatacataaccaggtcgcgcagcgactacaaaataataaccccagatgtcgcgagaccgaacactctaggttgcgccaccatgacatatacaaccccatcgcagcttagactctgtcttattcagctttcgccttttctttacctacacatggaagcaaaactgtaagtcgagagactcagtaagaaaagcatgtaacatatcatataatatcgacttgtatataagcgcccatactgctattcacaaggcttaacagatgagtagaacgttctaactaggatatgaccatgtaccatgtaccacatccactcagtataccttcgtactagtgtaggtagggtatggaccgtaccttgactactgttaagtgttgtactacagacaccatgtaccttcctgtacaagggctggtaacaccacgatgtactttcagacatcatacactttacctatccactctgtgctgcaaccgtacaagtgttggtagngtatgaatcacaacatataagcatgcatatacactaaacatatacatacattcgcatatccatatcacgcattatatacagttcttaccttctttccagattcagatgaattggtcgacgtaaatagaaagtcccgcgctgaatggataccctaatcacatattgaaaccgggtaaacaacatgttcaaaacccgaatctagaaaac

SEQ ID NO: 33121 - DNA, 1676 bp, Cannabis sativa
ggatgacaaagcaaccactttctgtaggttcgattttcagctaacacatcctccatagacagtaaatacataatcagttaaggaccttctggtgtcaatgttaactgcatattcagaatcaacatatccagttacatctccatgcaactggtctctacaatcaaataccagaccaatattcaatgtccctttaatgtatctcattgtccatttgagtacagaccaatatttttctctaggattggctagatatttgcttgtaacactcatggcatgagcaatatctggtctagtgcacaccattgagtacattaaacttcctacgcagctggcatagggtatgtgactcatgtgctttctttcagcgtctgttgttggagcttgtgtaatggacaatttgaaatgttgtgctaatggtgttgatacaactttagagttgatcattccaaacttgtcaagcaccttcttaagataatttctttgagacaaaatgatcttgtgagacctttctcttttgatgtcaatacctagtattctttttgttgtcccagatccttcatttcgaattcattccattggagttgcttgagcttgtcaatctcagttctttcctttccaacaaccaatgtcatcaacatacaatagtaggtatatcttatttgcaaagtatacacatgggtcatattttttcttgatgtggccaatcttgttcatgtattcatcaaattttaagttccattatcttggagcttgcttaagaccatagagagatttcttcaaaagacaaacctggtctttgtctttgttttcaaaaccttcaggtaatttcatgtagatctcttcttctagattaccatggaggaaggttgttctaacatgcatttgatccacctcaagatcaaatttggcagcctttcacaaaatcattcttattgaggcttgcttaaccactggtgagaaaatttcattaaaatctacaccctcttgctgagtgaaacccttagctaccagtcttgctttaaacctctttgtaccatccttggaatcacattccttttctctgaaaatccacttgcagccaacgactcatttgcctacatgcttcttaaccacaatccaagttctgttcttcttgagagagctcatctcttcctgaattgcttgtaaccaggctttaccattcttaccattgacagcctcaaaataacttgaaggtactgaactgtcaatctcatctgcaacagtgagtgcaaatgctataagctcagcataccctagtgtatcaggtggcctttttttctcttctgtctctatctcttgccagtgatagttgctgaggtcatcttgactatcatctgaattatcttggctttcttctatctgcatttcttgtgtctgatctgaatttttacttggctccacctcaagttgtaaaatgcctggggttagtgtcttttattgagactgtttcagtttgattatttgtcactttcatgaccatctcatctttcctgaacacaacatccctgcttatgccacacttcttaaaaccaggttcaagacaccacaatttgtaccccttgatcccatcaggataacctaggaatagacacttaatggctctaagttggagcttatcttgtctgatgtgggcataggctgtgcatccaaatacc

SEQ ID NO: 33122 - DNA, 2513 bp, Cannabis sativa
ccctctctttcaaatggataaattgttatgttggaatgtctgaggagccaatagtcaacataaacaacaattaataaagcaatttattaatgttcagaaggttgattttgttgggcttctcgagactagggtcaaggctccaaagcttggaaccttgaactccaatgtttttgagggttggtgtttctcttctaacatagcatggcatgcagggggaaagattgttatttcctagaacccttggaggtttactgtggatatcattagatgcactggccaattaatgcatttaaagatatcaacagtagatggtttcaacatttttctaaccatggtttatgcttctaataatcgagttgaaaggagacttttatggaaggatttgtgtgatttagctactgctgagaattggttacttatgggggactttaatgacattctagctaaagaatagaggatcggaaaaagggtaaaatcttatcctaactctgatttctggaactgtgtcaatttttgtcaattggaagatgtcaaagcaacctggagaagatagaatttgttccaagattgatagaattttagccaatcaatcttggattaataaatttcaatttgtcgaagcagtgttccttaataaaggcttatttgatcactctcctggtgttttaactttgtatcctggtttggtgagtgggtaaaaaccattcaaatactttagaatgtggaaatcacatcctaagtatgacagctgcctgaaggaagtttggaatctgacaataaagggcactaggatgtttcaggtcattactaaaatgaatcactttaagagcagacttaaggagataaatagggaagggttttttgatttacagatagctgttagcaggactaaattggaactggacattttgcagagccaaattcaacaacaaccactgaattccaatttacatctgtaagagaaggagacaagggagagattgactagagttcagaatgactattcttctttcttgcaacagaaagctaaagtagcttggattcaaaatggggactataattctgctcttttccatgcttgtattaagcataggatgagacgatatcaaatcctatcgattgagaagcaagatgggagtagggtgcatgatccaactctaattactgaagcttttttgaacttctatatagggctgttaggtaccaaaatggagaataaaagacatgttgaggacaaaatattggccagaggtcctgtgataacaccagaacatgctacattgcttttacaaggattttccagagatgaggtgaagaaggctgtgtatagtatacctgggaacaaatctcctagacctgatggattttccagtagctttttccaagataacttggatgttataggggatgacatatgtgaagttgtactatcatttttggagtcaggtaaaattcttaaagaaattaattctacaattattactctagttccaaagattaaaagccctaactttgttaaagattttaggtcgattacttgttgcaaggttatttataaggttgtaaccaagcttttgagttctagaattaaaaatatcctccctgaaatcatatctcactcctaagttggatttattaaagggaggtttatagggcataatataatgatatgtcaagatttggtgaggcattatagtaggaaagctaataagccaagttgcatgatcaaacttgatctccaaaaagcctatgataatattgagtgggatttttttggaggaactactagtagggttaatgttccctaggaagtttatgcagttagtaatgaattgtatcataacttctaaattctctcttatgtttaatggaacattacatggtttctttgaatctaagagaggacttaggcaaggggatcccatgtcccccctgttgtttgtattgggtatggaatatctgtctagactaatggggaagattggagagaaagaagactttcactcatgacaggttctctgagcttaaattgaaccatttaacatttgttgatgatgtgctattgttttgtcatggggataccaaaagtattgtatacatgatgcagactctaaagttgttttctctcacatcttggctgcaacctaatgcaagtaagaatgcaatttatttaagtaatatgcaccaagatagtgtttaatcagattctcggttgtttgatttctctaggcaggccttacgtttcacatatctggggatcccaatctgtgcaaagaaaatttctagaaaagagtgtgaattgttggctaaaagaacgaaatccaagatcaagagttggagctctaggaatctttcttttgcatgaagaataacactaattaactcagttctaattgctatccaggcttattggagtcagatgatgattatgccaaagaaagtacttaaatccatagaagcactctgtagagcttttctatggaaaggaaaggctttatttcatggtgctggag

SEQ ID NO: 33123 - DNA, 2810 bp, Cannabis sativa
  modified_base (467)..(472): a, c, t, g, unknown or other
  modified_base (2634)..(2638): a, c, t, g, unknown or other
taattattttaattttaatttttcaattatttataatttcatattatgttgacatgatttgttttttttttgtctatacaaatgcactataaataaataatatcttttatcattttatcacaatctatatatttatataaagaaaagaacaaaagtagtatgtagctttctatatattttctttctatttttcaaattttacgggaattaaatatttatgtcataaaaaacttaaaattatttactaagtttactttcgtaaaaatctcacattgcttagaaagtatagtgggtccttacatatacactataaataaatcttctaatttttcttttttatttgtcccaaaatttatattattctcatttttgggtaattgattaaatcagttttaccaaattaattatttataattttttaaattcaattaatctatagtttgtaatatattattattattattatnnnnnntattattattattattatctcaaagtttgtacatctgacgtggcacctacacatgatataatctagccgagactttcaagcaaaagtatgtttgacaggtcccatgtgaagttgatatctgtgaactccagattgacttctcaacttctaggaagcatcgggctgggctaccattatatcagccagagaaggaaagatttactcaccttgcaagaatattttacaagtaatcccacaagaaagaaaagtctcgaaaagggcctggctgggtagtcaacacgccggctagggtgaatgatacaaagaatgtcgggcaaggctacgcaagccttgatttcttcctcaaacaactcctataaatatctataattgtatcctacaaatgggaacccgacggatatacctgagatcgtaggaacttcaacagaacgtaactgcactcgagaatataaggatatttactttttggttactccttttacgaagctaattgtaacaacttttccctataaatactgaatgaattcacagggggaaatggtctgaaatcataatctcgcacttaagagcactttactaaatattctctgtaaacatctgagaggtgtagctagaatttactttatcttccttagtgatctctacgacattatctcataatcaatacaacaaaaaaggaagtaggtcattaccaaaatctaagggcgtcgaacctctataattttgtgtgttctttctatttatttattattcctaagtctttattggtgattactcaatatttattagactctgagtcagttggtaattttttcagccaatattttggtgctttcattgagagcttcaatattcctacaaagatctcttccctttttacctaataatcaccatgatcctgacaaggagaagcgtatcgactgaaccccaggatccgatggttgtggaccccaatgtctatgttccacccactggtgacaacctgaccaaccttacccagccacctcgagccaatccatctgcagggttccaaccagaaggcccaattaatactaggaaagatccaacaaatattgggtaagtcctgttcaatgttggacgacctacccaaagtaccacggggttcctttaacaagagctacccccaggtttacgctagagaaacagggcctggagttggccaacctagtgtcaacaagccccatgttgagttaggagatgattctgagctaaccaggctaagagaggtcatagggcaagtccaggatcatacaaatatcctccgtcatgaacaagaagaaacacgtgctgttgtaagcgatgctttcgcccaatagagatgcaaattccagaaatggatggatcggcaagccgcaattctacaagcccaccaggtggggttaaaccactagaatagggaggaaagtgaactaatcagatggttcaatgaaaggactattagaacttattttaccaggatctagatttactaatatgttgattataattctataatctaacatcctaaatatgaacttcctaaaataatgaaataaatacataagagattgaaaaatccttacattgatagtagcgaaatataatgactcattccattccaatctttagccctttattcctatctatagtagagcattatcaagatctgaacttggatcttctctccttcaatttggttatacacagtcttcctcactatgctaggtattactttgacatgagtgggcatactctcaattcaaggcttcaacttattcagtagagaagaaggagaattttgaattacaagaggctctctttgtttattctatttttgtttgacaaagtagtctgaagtcaattaatagtagagaaaataagagccatcttattctatttatagagagatactaggcttaggtttggaatttaaataaaattaaaaagaacaaaataatggctttattaatcatctatttaattctaaatctataaatgtcaattttatctgtttaataattttacttaattatcaaataaatttaattagactttacaaagtctcttaattaataaacaaactctaaaactttttttcttctcaaataagtcattgcttagtgaaaattcacaaacaagacatagtcttatttagaattctnnnnnattaattaaaactaattaattgatactacaaatcaatattatcttagttagtgcggatatcatggccctatataatcaagctcctaataagtagataaaaaatttactgttaaatgccaaaatattacatattttataatataaaaatataaaataaaattaattctttata

SEQ ID NO: 33124 - DNA, 1798 bp, Cannabis sativa
  modified_base (357)..(365): a, c, t, g, unknown or other
atttggacagcttgccatatcttgcaatctgatccccaagttatagggatttccttaatgactcacgatgcaaaagtggaatttgctaagtcttggtcactctttgcggattgctgactgcttggcttcgagcatgcatattaggtatcctgttcagactatatccttcgagtagatacttggagtcgactccacgtgtcaccatcatgtgacgccacgtcagagtgcaaaaattaggataacatttgcccctcaagtctgtacgagacttccgaagttgtgtgtagacttcatccgagctgtctttgcgtttgaatgggttacacatgtcatgcgcctgttcgcgactcgatgtgnnnnnnnnngggcgtcccttcggttttcggctaataaatgctctgacaattaatatttcaaaattcaattttctctcaccacggttgacggctacacttgattacttttgatttcccatattcgcttttagggggaaccaaggcgtctgacgttcttttgaaatgattacccctttttgttgtttgcttataaatactagtgagcatttgtccacaaactcattttcaccaaccttccttgctaagtaagttcagagcgaaaaaagacgtttttggcttcaagtttgttgatgtgctttcatcaaaattgctcgtttggcttgacgtaacctgaacccagacgtttgattccttgagtaagttctcgatttcctttatgtttactttgcacattgctttctgaatgcactttctattttgctgtagaagatatgtaggaaaccctaagtttagaaactctgaaattttcctttgttacggttcatgcgatttcatcatccataatgctgaactacataatgcctgtctttcatctttcttattctaagcttcatgaatttttttgccctaaatcgcaaaaatttcaaacttcaagagttttgacttttcgttgaatattcttattctttaatatgttgggtactcttggtcggcatatttgcccattttaatgttcgatatcctgaccaaacattcatcttgtgcgttgtcttttgtagatgaacccaggtgagttttggggaagcaaacaccaaatcgagtaggatctgcttcaactcttgcacgaggatcatcctcgtcttcgttctagtccaacttcttcgagtgacatgcattcttccttatatcttttgtcgagccataggatgatggctcgtaccaaaaagataatgcgtagggtcgacgcatccaaccttcaagtggcccagcacgccaccttacccagtgccgaacaagatccaaccgtctaggaggaggaggatcatgaaggggacgctgaggtccaggagattgaggagcaagacgatgtccgtcctagtagtccctccgaggcggaggaagaggaggaggttgcacccccaaaatatgggggatacaatgaggccagggagctagttaattctgatggcgacgtcctggttgagggcattgactacgccagtgaggaacttactactgcggttcctcatagaaggcaaggtactttgggtgccaggtgggtgagcccttcgtccagggttattaaggcacgcctgcgggatctcgaccaggatggctacttgggcgaattggactgttacattcccgcccacaataatcgggccacaaaccctgaaaggggaatgtgcgcctggtcgggtgctcatgcccagcaaggggcattgttgcctttgcatttgtactttaggaatgtggcagacttctgttggaaattattttac

SEQ ID NO: 33125 - DNA, 1656 bp, Cannabis sativa
gtgcaggcaaggccacttggccaaaatgcaccgtaagcttcttagtgatgctccgagttctcaacgccctcccccatctcctctgtgctctgagttctcaacgccctccccctttgataccgtcattatgagctcgtcgtcaacaaagatcgccccagcgagctttggtcgtcgtctccgaaaacagaaacctccacatgtcgagttctagctcgtcccaattgtcttagaagaagaagatggagatggcggctagggtagagagagaacgagaagaagagaaagagggaattatggtttttttaaaaattttatttttttaaaattggttttttaattttaaaatttttaatttttagtaaggaaagacttttttatttatttttttttaaatatttatttacatggaccaataaaattgtgtcacgtgtacactgtgtccacgtagacatttcaccatggcagttaacaactaaaaatagatggagatattaaactaacagaatacgagtttagggagttttaccactaaaatttttagaattgggagttagttgcgaaaaccttgtcacttaaggttatgtcgcaaattactatatttagaattttgtgctggttgattatataattaagtttagattaaatgacaatttttagaatacaaattatatcaaatgttgatcatttacttgtgttgtgtgaagtgaagcataagctagttctttatttcgtccttattaggtagattagatagaaacgatcagtactagctgatcagcttagggagtacaaaagactaaaccatgcatatatttttcttacaatttgaaaattgtaagcctagcagtaaagatttgttccggtatcaacaccgaattggcgacaatagtttcggtacaagtcaacccgagatttaacttgggcagattgtctaccaccacattcgggtccattaatttttttaatggtttctccaaagccttggtccataacaggactagcattctccatccaaaaccacaaggctgttttaaaggaaattacaggattattggccactatttcaggagaatttaacccatcgaagttgtgagctttcccggctcctccataattgtagttccatgatagttggagtggaccgcgaccattgtatctcttcctagggttgcatggatactcattataactcctatcgcaatacttgtcattttggtttccattctcttccttgtagcaaaaatctgcccacaaactcaaatttactcaatttttaagatgggacgtttaaaaaaatatagaggttaaaatattatataattttgattaggattgacttaaaaagaaaatataatttatgtaagaaaataaaaaaataatatttttagggtaaaaatgaaaatctaaaatattatgtgggcaaaaatcaaaatatttaaatatataaggttgggtctataatatctgacataacaatattaactcagcaacaaaattgtaaatgaacttagattctttattcctaaatagcagttgctatctttgatcggttcagttcgagcaatgaagtagagatatttattaacaagtttgatcttatagtgtaaataatccaagtcgattatttacaataaacagaaaagaaagatgaataag

SEQ ID NO: 33126 - DNA, 1616 bp, Cannabis sativa
gtggttaagtgagggttgttggaggacactgccaaagtccatgtggcattgtatgcgagcattgacactccaaaacaaaagtttttagtacttatcaccaatatcattcatttctaggcaagaggtgatatcccatcactccattttaaattggtgcatcctcaaccaaaataacaatttcctaatgtttgtgggatttttgcatagaaacaaggagatttttataaatatttatttttttgtaatattttattcattaaaatgagtggtatacatgatttgttagtgagatactcgacatgtgggggatcattaacaaaccctatagcctatatatagctcaagtaggaggctgggagagggacttttggaaccttacaggagacactacttcttctctctttttgtatccttttctgaaaccttttccttgtgactcacttgacggcagccaagaacatcacacttattccttcatcatctccattgagtccaccatactcaatcgacacaggacctcaaaacaccatcgatacacacctttctttacactttattggtttattattctcaagaaccttacaaccactaatttagatcatatttattagtatcaagtctcccaatagtcctatatttatgaatctcgattaagatttcacctcaaaatcctttgctatatatttatccacacactcttaagaacataactttggtgtgtcggatctaatcaataaaactaaaagtagacgtagccccattactatcgcgatattggggtgaactactataaatccctagtgtccattttaatttattgcggttttattagtcaaattcattcactgtggtcctcttttattttacaatcttctttgatcagttaacgaaaaaccacatcaatagtttggtactttcgttgagaacgctatggtgaaaatctgattgttttccccttggaaaactcatcaatttacttttttttttacaacaatggtgtttggtacgagaaggatcaattatgagaaggataatgaagtcgcaagagaaattaatcaatccaaagtgaaggaacctttgtccctccacaaccacatggagagggaacctctaggcgctaagagaagcgtcccatgcttcctatgccagaagatgaggggcatgtccaagattgtgagagttcctcatctccatctaaggagcgcccaccaatcaggtccatacctgtccatgaggtgttccaagaaaatgaaactctatgcgtctagttggcgaaaagcctgcgccacaatagaaagctccaagagcaaacccaaaggcatggggaccaaccccctgtaccaagaaatccttctccacctaggagaagaagggagcgcccaaggaaagaagatgcccctatgaataatccaacaaggagggggaccaccaacctttaccaaatgttggagcccatggaagacatccacaagaaacccatgtaccattacatggaggtggtcaaaaaattcatgtgacctaagttgttcctcctaatcgtgagaataataacatgggtggagaagaaaggagagaccaaccttctccaattcgagaaccaccgtcacctataaggt

SEQ ID NO: 33127 - DNA, 3866 bp, Cannabis sativa
attcaagaatctaatggcgagaattaaagaaactaatcaacacctgaaatctgtggctaacatcttcattggtactgagtggagtgagggagcgattatctctgtgtttggggtgatagagggtagaaaaatcatgtctattccttggttgccagcctcaagtggagatactctgatttggaagtaaaaaaaaaagcggagaattctctgtgaaagcagcgtatgtggaggaccaacaacataggttcggagacaaaactgacttatggaaatggatttggaattgtaaaatacatccaagaattgctctgatgttgtggagagtgcttaataacgcccttcctctcaaattcaatctccatttccttagttataaagcttgtcctttctgccatgattttgaggaaacaaacaaccacttgttcaaagactgcacttttgcccgtgggatttggtttgcgggtcctgagccttggatgatacactcaatcccgggagcgaacatggcccaggtattggaaaatctaatctcaattttagaaaatccaagaaatcatatgttggtctatgctggttgtgtattctctcttatttggcaacagagaaactttgttagaatacatgggaaatctgaaaacataaacgttttggtgcataagttatcttcaagttttaaggaattctgggatacagagactaagacagccttgacttacatcatgcaacgaggtattgttagcccatgccgttatgtgattatgacagatgcatcctggtgtggggaagaggctggtctaggtgctgttcttattgacactgagtcaggcaactagtttcagtcctcttgtcatagcaaggtgggttcggccatggaagcagaagcctctgccttattgatggccctgcaacatgcaacacagcgtggttgggaggaaattcatgtcctttcggatgctaaggtggtggtcgaggctttcgcagcaagaaaatgcccaccagattggagttttctgaatgtttctttagttattttagactcaattaagttatttaaaacatgtagtttcttttatattaggcgcacaagtaatggttttgttgatgagttagcaaagagagctagattgtctagtcaaaatgcttggtgcaaggggagggaatctccctgtgattctcgactatctttccgcgtttaatgaacttgtcgctttttttaaaaacaaaaattaactagaaagtgcaaagtagaatgtaaagagtctccataccatggattcaaaatcgatgaatagcatttgctcgaaaaaatcgataactaataaatatatattaataataatctgttttaaaagaaaaatgttaatggcttgacatttgtataatgaatgaattggattaaagatttagtttttaatccaatggtttcaaaaccatgtgaagcttcagatgtgattgtcttgcattgcaactccgtcataaacccctccaaaatctcgagtgaagctacctcactctgccttcgtccatggaggttctcaaaccttcacctcctaccaagcttacaacttcatttctaagttccactttcacttccaaatttccaactaaatttcgtggaaaacataaccaaattgtctacaacgtacccacctccgtattccacaagaactcatctttgtcaatatatcttctacccttaagtgatcgtagaagaaacttcccagttttctcccacttcggtcgaacgacgagccgccgcaactcgctgaggaagaagcttattgaggatcaacaggtacgtcatcgtgtgattcccggttctgatattcaaaatgaaaaatcatttcctaattttggggacacagagaagttaaatgaagaaataagaggtgacagtgttgaagagagcgtatctagtaattgggttatcgaaaacgaatcaaagtcgaaacttgttggtgaatctgctctgttggcgaaattggagaattgggctgagcagcataagaaagatagtgagtattggggcattgggtcagggccagtttttacagtctttcttaatcccgatgggaatgttgagcgggtttctgttcatgaggatgaaatattgaggagaagccggatagagaaagaggatttagaaaactcgacagagacgaaattgaaaattttgcaggcagagaatttagctagagagatggagagtgggggaaatgttatcccaaggaacagttcggtggctaagtttgttattgaaggtggtgagtctaatttctttaaggcaattcagagctttagtgttagtcctcagtttataaaagagctccctagagttggtaccatggtcttgtatggtttagttgctgtttgggcagtgaagcaattgtttagttttggggatgataaagaggtgaaactcacagaatttgaaaaggaaatgatgaggaggaagataaaagcaagaaaggagaaggaggtgttgaacataggtggtgtggaagttattcaacctttaaaggaaccaccaatgttttccattgacaagccaaagcttgataagcaagaactaatgaaaagtattgcaaaagcgaaatcacagagtgaaaatttgactgtacttgattcgaaatctgttacctcagctgctgctaaatctatggagtttgataacaaaattcaggaaatcagaaaaatggccaaacatgcccgggaaactgaagataaagagagacagttgattaaaaaggatagagtggaaactagggtgaagagtacagaaagttacaatggaaccaaggagggtgaagaatataaagagaaggagattagtttacttaaccaacatctgaatgaagatactcaacaaagttgtgatgatgacactaagctggtacttgatgaagcttttaccagggacaggaatgttgcatcgagtgcagaaagttcagatgtcaggaaaatgacaagcgagaatctaaaagacaatgagactcttgataatgctacctttgatgaaccacctggttctagagaaagttctgctctagtgaaaccacgaatcataaggtcagtgaaagaagccagggagtatctttctgaaaaaggtaacaagcaagagtcaaaacaagagtcagaggttaaggctgttcaagaaagtgctgctcttccaaagcatgataagcagttggaatgtaatagagtggaggattttggcacagaaaaattatttactacagtcatttcagatgtaaaatcagattcttctgctatgacaagtgcctctgaagattctggtgtagggaataataaggaatttggtgaaattaagcaaggagaaaatgatttttcagagcatcgaatttccttggatcatgaaggtgatgacaggaaatcagaaagagaacaatctgcaaatgtggaaaactggaatgagaagaattttaatgaacatattgcaaagaagattggtgttagctttagagataattacatggttgcaagggaaaagaaggatcagccatcaagtttgaatccttcctcagtgcttggttctattggagatgaaagtgaacttgaatggatggaagatgaaagtcttgcagaaattgtttttcgagttcgagacaatgagttatcagggaaagatccattttacaagatggacgcaaaagacaaggatgcatttttcaagggtcttgaaaagaaatttgacagagagaacgaaaagctgttgaaactgcatgaatatctccacgcaaacattgaaaatcttgattacggagcaggtagttggttgttttgtttctgtgatttctttctagtgatctaatcttttctcaatttcaacatataaattgtataaa

SEQ ID NO: 33128 - DNA, 1333 bp, Cannabis sativa
acgtaatacgcctatggtagttagggtgttacatatggacagtgtgagtatcttggctagagagcctcgatgcatgtatgcatacatggatgcttgcgagcatgactcggcaaagttgttcttgagacggaagtgtgcaccaggcacacgatcgtgcaaaaaatgagcctattgttactcggatggttggaaggttgaccttggcttagagaagtcaaagtgccgcacgggtgttccgctgcctgaaaaggtgagcccgtgatagcgcgcatagtgtgcgatcagatcctatcttggtcgcaccttctcgcaagttcatatcgtgcgaggtcaactttataggaaatttctattgaccgtcacctttttcaacctagaaccagccccgactaatagcctgtgcaacatgggcagttacacagggccccaaaataataggggcctattttttttttttagaatataaaaggatgttaattaatattgagaatgggaaaggttttcttttggtagttgcccataatgttaatgttatgtttaattattatataaatacacaattgacatgtccatttttatctcattcttccactttctctcattctttttttaaaaaatcagtaccattctctccctttcttatttttttttaaatcaattttagttttcgactgcatcaattctcataaataaagccagatatatctatataatttatatatatatttgtttttcagattggagctttcacttggtggttggtttattatctatttttcacttagtaattgtggtattgggcaattggcgacattaaatttgtgatagcaacaaataccaagttcttttgttcctttattcacttctaatttaattattactctcttgactgttctttgaaatattatattggttctttttttttactatgcctcctagtatcagaaaacatagtctggttatgaaaaatgtaataaaaagaaaaaaattgaggagttaactcaatctcaaaaaggagctcttgataaatttattataaaagatccattagtttctttagaaaattattattatgacattgttgatgttgaaattgctgaaaatatggttcctaatgaaaatattagtattgaaaattaaaatgaaagtgttgatttgaaaaatagaggtgatgtgcctatttaaaatgttaatgtgaaaaataataatgatgtgtcatttaaaaatgataatatggaaaatcaaaatcataatactacaaatagtgatgatgatcatttgaataattcacttaaaaatgaagatgttttagaggataatgatgataacaatg

SEQ ID NO: 33129 - DNA, 1356 bp, Cannabis sativa
  modified_base (734)..(744): a, c, t, g, unknown or other
aaacatgatgaatttttctctcatgcacttaaaataagccattctcatacacttactccattattatacacatgatcaactctcatgcactttctctactagtacttgctccacaataagctttaaaatactacaaatgaatacttcacattttccaagataattaatatcttgcatgttaaactagtttgtgatatatgttagactttgggattatattggactctttggtgtgtgatactaatgtggtagtttcttagttattttaatacatctaacactcatgtatttagatgctagtgtggtattattttttgttgttttgtaatttagtttttgaattaatatattgtagaattgatgttatgttgttttttcgttatttttttattgtttgtaatttattttaggttggtgcaaaatgagatttatgtcttgttgtttttgagttgtttgttggttgtttcacattagaattatataatgtggggtaaaaaaatttcaaaaaatactaagaaacctcgttcgaagttatctaaagttgatcctaaaatagattttgaaacgcattgcgaagaagggaatgggtgatgttgcaaagccatttggttttaaaaaaagacctcttccagataagattgagtctcgtaaggcgaagagaaccaaatcttcaaaatctctcaacgatgtaagttgggttctgttgtttttcgattttttttttagtttttttnnnnnnnnnnntgtttttcgtttgctgttttgtgtttcaaaaattttcccccttgtttttttaagttaacttcgattctgactttaaggatgaagttcttaatttggaagtgaagcctaaagttaaacccaaagtatgtttaccttgaattttttcattttttaagttgaaattttttgatcaactgttgtttttcattttgtttttgttttacctttttatattcacgattttatgttttgtctcatttttgtgtatatttctttatgtatttatcttgatgttgtttttgtgttattttttggttttgtttctgctattaaacagtttgtagcattattagtcttttagtgttgaattggctttttctaaacagttgttttaatgtttattttgagtaattttcgtgctgtttaatttaatttcacggttgacaattactatagtaatttcatgttttgcagattgttgttaatatgttgcttggaagttgtttatcttttaagttgtttatgtctgggtatttttaaaatgttgttgtttggtttttttctgatttttttctagatgcttagattatgtttgtctttttcatatttttgaaaattatttatttagttgtt

SEQ ID NO: 33130 - DNA, 5405 bp, Cannabis sativa
  modified_base (4230)..(4230): a, c, t, g, unknown or other
  modified_base (4812)..(4816): a, c, t, g, unknown or other
tcttcacttcgtagtcatgtatgctatgtacagcaaataaacaacacaattacaataatatacaacaaaaattataactttaagaaatacactacaagtacagcaatcttagtgagaaagtgaacctacaaattgagaagtaaagaatccactccccctcttctgtacttggttccaaagaaggaaaagaggaactaaaacactcctcatcggctatcatctaatgtccagcgttggctgcgccttgctctactgaaaatggtactagaaggactccttcgagttagattcggttcagcaccagaccgagtggatgaccttctgagcctctcaaaaaatgagaaaaaattgtgaaatgctcgtcccactcggcccctctcccttgaaatacttccactagactgaaatgcgatccttattggagcaccagtggtattaaaaccaccatccatttcagtgaaaacgataggaagctcacgctcagcgcctcgcctaccacctgtaaacctcccaacagcaaaaccaccacccggaagcctccatattgttaaacccattgtttcttcatccccaaccccatcagcagactctggggagtttctgcgacacccacgcacatcagtgggcagttgatggcgacaaacagggcaagagttacgaagtgaaagccacggaaggatacagtctgtatggtagatatgcttgcagggcatctctcgagcttctgaattgagctcaaattcctccttacaaacagcacagtgtaattccgtggatatatggtttgccacaatcttgataatgggcatggactcaatagccgctttggacgctggaggatgatccattctcccaaccccattaatttctaactgtgacaattgatccaaaaggcggtcaaatcctgaacccataaaaaaatcagaaatgctaggaggtatgggccgaagactagttccaacaccatcatcgtaatatagctcaaagttacttcgatcagtaccattcatttcttctccgttgttgctgccgccctcgctaccctcagcgacgccacgaaggacaataacagggttaaaaggcgagcggtcacgactacttcttgggctgcggcgcagcctttggccataactacgaatctctggattgggggtattgtcaaggtacatagcagcagctggaaaccgattatggattggggatctagttggggtcgagttctgcatttcttcaacaaatccgccaccacaatgcagacaaagtaaggtatcttggaccggaacttggattcctacgttaatgattcgactgcatctatagcaccaatatgatgttccagccaaatccatataccaaatattccaaccaaatcggattatatgaaaacctacataaaaagaaatgtatatatgtatcttcgttatattcataaaataagtttttacaaacatttaattattttaactctttgagacctgatgtatatcagcacgtcaaaatttataatcaaaccatacaaacaagcaaatcacaatttaggaatttaacaataaaaatacataactatattaaatccgacaatatttccccataaaagttacctaaccatcatctatcaacaacaagtcaaacaattgaaacaacacacaatgagcttcaaatcaaacaatataaacaacacacaaaaagcttcaagtcaaacaattcaaacaaaacacaacaagcttcagtcaaacaaaacaaacaacaaacaataagtttttttttttatatctccgcagcaaacaaacaattttcctagaacctaccttactaaaacacaagttctcgatcttccattatcacgacacagaattgtaatctcaaatcctacttcattgtggatgaatatttaaaatattcaaacttctcaaacatatatataattacattagaaataataaataaaggattatttacctcttcaattaacaagaataaggcaaattaattaactttgcaacaatccttgtcacagcctaaaaagtttttagttaaatttaatgcattaaagattactaaaaaaataaaaaactaaacaaacttcactttataaaccaagacttacatatgtgaagcatatttataactcatttcacataagaacgattggtcgtgcaacatagctcattgatatgacttagtatcggaatccattactaaattgtaccaaccaaaataagttggtatggttagtaccaacacctaagtctcaagtccttacaaaaaagagaagtagtcgatactaaattccataatttgtttccatacattgatattatacataatgtgtcatcgtttatatgtatatgtgggttcaaatatttgacaatgctagaaactcaagtcaaatatcaataagaatgtacactcacaatgataagaagaccgcagcccaccaaacttattcatatatattagatagataactgaaagggtcgttgaaaattttggaactaacagagagagattcagattatgcacatgataaataaataaactatatatctatgtttttaattctataatttttatgagataaatgaattacagtaaacaaacaaatatactcactacatagataagttagtgtatcatatgctactaatactattgtaggaattgacaatgagacgaaacacccataaaagacatctatgattgtatattatacggacaaatcatttgattccaatgcgtttatctacagattacagcatttccttaaaattcaatacaattatattatcacaacaattatttattttgattagaaataaagtgaagaatctttagaaacagaaattgaccctaaatttgatagtcaaaatagcataaaataaaacagattaatacataaggagtacatacctctgtcgccgatcaacagaagattactaagctaatcataatcagcccgagccctagctggtggagcagccattaatcaaatcgaaattttctcaaccagtttccctcaaataatagtatatatacctccctgcatatccatgaaaaaacatacataaatcaaatctaaaattcaaaaaacaataatcataaataaacaaataacagatcggtgagcaagaatggttactgggattggaggaaggctcggatggctgggcctgggaggctgaaagaagggaagagaagggagtttagggcgagacaatgtcttttttaattttttgtttttcttttgctaaaactttataagttattagttttttattttttatggtccatgataagtgggatcaattacaaccgaccaatggtagataatttcttacacggcttgttgtttaatttttgttttataaatatataaagaggtgttatttattctctccgttcataatgagggatccacaattttgaatgcgcgtatctcttatataattactagcaaacaaaagacaaagggcgcggtcttaaaaaatcctaacctacacattttctttttaaataattagtatttttattttttgaactttcggtactatttgattttgcttcttaaaatatacggtttgttaaaaattctccttcaaatatagcagttacataattatatttttctgttaaggtccgtttattttagtgttaaaaattagtatttttaccctctaaactttgactaatataaaattttacttattcttttttaaaaaaattataattttttattttttaaagcaattataatattctattagttctgaaaaaggagtagaaattattaataaactaaataaaaatattaaattaataaaaattattttttaaaaaaaaaattattccttaaaaaactatttttaaactttgttttatttataatcagctattctaaaaaatcaaaccaaaattattgagaatctaataaataatttaaataattgtcaaaaaaataatttaaataaattaagatttttttagaaacaaacaaacttatttatatttataaactcatatcttaataaataaagaaaaataattagaaaatcaataaaaatataaaattattttgaaaaaaggttttaaattaaactaaaaaaaattatgtttactttaataaatctacattttttgagaaaaacaaaatatactcaagtttgttcccgtataatttagtttttacaaaaataaaatttttaatatattatttttaatatctaaatgaantttttaataaaaaataaataactttttaaatcgcttaattagttttaaaattttaatttatttttttaattttttaaatcattcaaaataattttttcttaagatctatattaattttataagatttattaaagaaagtgttaaatctttcttatgtttattttaaagggatacgatttgatagttgtcaaaatttaaggggcaaagttgctaatttactaagacgcattatcatttaaatggaataatgggacagaacctaacacaaggactaaatttctgtagattgcaaagttcaggagaattctcagcaagtcgtatattttagggagcaaaaacaatattgtcgaaagttcaggggtaatatttgctaattattctttttttttaaaaaaaaaacactacttttttgtcaaaaaagcccaataaaattaggaaaattttatttatactccaaaaatttctaaagacaccctattttaataattgtcattttatataaaattatatctttaattatactatttttttttactttttttttcaattcatattcttaaaaatatacctatcaaataaaannnnnttatattttaaatattataataaaaaattatatgaattttttttaaaaaaaataaatatatatatatacatgagttataaaaaaattatgaaaatgaaatgaaaataactattgaaattaacataaaataatgtaaggaaaaaattttaaaaaatattaaaataatttttaaaaattatttaagtttatatttttttaataagtgtatttatcattttatgggatgcaaatagaactcccataaaattaacatagttataaaagtaacatttttaacgtaaaaaaatgaaaaaatatatgattatacttaatatgttttttaaaacgaaaatgaatatttaaattatatatattattgctatgttttttttttttttgaaaagaaaagagaaaaaaaatgacttgcatatatttttttaaaaaaaaatatatatacaataaataatataaaatgtaaaatattagtggtggagtttaaaattgaaaaatgataaattgagaatgtaaaaaaataaatattgttggaaggttttattattaatttatgataggctgattaagattttgtctcttaaattttgacatgtat

SEQ ID NO: 33131 - DNA, 2940 bp, Cannabis sativa
  modified_base (2877)..(2881): a, c, t, g, unknown or other
tttcaaaaaaaaaaaaaatactccttaagttaatataaattatgtgctagacttaaatgaaaagtgagagtatattaaactcactcacaaaagtgggtatattttaataaaatataatatgaaggtatttttttattaatggatacaaaaaagatgtatttttcaacttatcccatttttctttgacataagaaaggctcactaatgggggccttctaatggggtcctctcaatggggttctacactctcacctcttcatggcatttcaaaccaaggaggcgtctccttggtacctccacaccttggaccaaggaggagaatcctcacacctccatcaccttaggccaaatgggcatcctcaccttctcatgtcatctcggtccaaagggggtctcatgcctccatcatctccgcccaaaggggcctcacgcctccatcatcttggtccaaaggggtctcacgcctctatcactcggcccaaaggggctgcacgcctccatcatctcagtccaaaggggcctcacacctccatcgtctcgacccaaagggagcctgacgctcccatcacctcgacccaatagattggccttaccttagcggcacgtgcctctcattactcaccaacatgacttggaagactcattcaatttttatcactttttagatatttattttgaaatgtaatttttatattttaaacctaacccgaccatagttacgggatggtgctcctatggtcaagagatttttaatcctagatgaaaacctatataaggggagtgaagtcacttgtaaagggacccgattttgattctcataaaatcattctctttagctcctatctaattttaaaaattcacttgaggattgaactcttggagaacataacactggagaactctccataagcattgagatcaataacactctagtggactagcctataaccgacgaaagggggtgaaccactataaaatcctcatgttcatctttgtcaaattttctttcataaaatgatttactttgattaattagttcttgtgttcatcttgttcgtttgcaatcctcttagatccgttcacgaaaagccgcatcaacagtttggtactttaattgagagctatgaacacaagtgctaatcaccacttaccttcatggtaagtacgagacaaacgaattatgaggagaaagaccatggtgaccccatgaatgaagaaaattccatgaaacaccatgaagagtatcaaccgcagatgacgaaggtcaagtccgagatgctggaagttcatcatcactatcccatggtgtacgacaaataccaatctccatgaggtgttcatggaaaatgaggtactgcgccaacgcctagatgaaactctcagactcaatagagagcagcaagagatatggtacccaagaggctataagaccacaatgacaaggaacctgcgagcgtctggggataagaaggggacgaccccgtgggagtcgttcaacacgttaccatgtcgaaggccaagagaggtttaggtcacaaacaactcaaagtcgtgatactaaccgtaatgtcataccacaacgaccttcttgtgagaacgacactcatggtgggaggagtgagcgtgcctcatcacagcaatgagaacgggtcacaaaattaatactataagggaactaatatttgatcttcttagaaagcttgaattccaatattgtgtaacatgttcctagccactcattttattaaggtccaaaaatagatgttgtaataatcatcttttatgagaatctttaacgagtgaatcaaataacttaacgaacacaagaaaaagttcatgtatactccggattcagactgatatactaatgatcatcgttatgatatgaataactctttcattataaatgacatgttaatgaaagatgtttattcatatcggtccagccatgtataatcaaattatacacaaaatcttcactacatgtctatccgcatatgtgatggtaatcaaaatcacacacactagagtatagtgtatagtaaaacttggtaattctatattaaagatctcttactttaatacactaccgatttgttttaatcatattgtataatcttaattctcttgtacaaccttacaagattatacaatctccatatgaataaggatttttaagatatttattaattatacttctataattaaattattcatttatgctataattatattttatatattctataatatattacccattaaatacttacttaggcataaattctaacaacagttctcaaccaagaatctataactataaaaaaaatttgtaacattaactattttagccttaaaaaaaaaattaataattaagtgcttaaaatttaagtatttttgtagcaaatagatataattgtgtgtatatatgtatagagaaaaataggatcataatccccaatattttcattttgttagcaattaatctttaaaactcaaattttgatgcatggcaaaaccccaaaattaactttctgttagcatttagctatttttatctatttttgaccgttagttgtcatattggactatccacgaggacacagtttacacatgatacaatttaattagccaatataaaaatatttaaaaataaagtaaaatttaaactaaaaaatataatagcaaaaaaacaatttattttttccttttttttttctcagttctcctctctttgtctctctctctctctaatattctgatctcaccaggagacttctctctttttcttctcttctcatgcaagcaacctctctctcccgtctcttctcaagtcggattctgtttctctcaaacactaaggaggcgtttggttgnnnnnaatgaaaatataggaatagaaatgggaatgagaataggaataggaatggaataaaattt

SEQ ID NO: 33132 - DNA, 3170 bp, Cannabis sativa
  modified_base (33)..(38): a, c, t, g, unknown or other
agtcctcttcggtagagaatgttatccatcatnnnnnntcggtgcgcttggtactgtacccttttggacagcgccctttcttgaggcaacttgcctttggtatgtttagtcgatgatgggggtcatccagtttggctctggctcaactgctgcaacaatattcttggctttaatgcttggttccgtgaggcgttcaacgggcaccacccctagtttctcaatctcgctgtctgacgctatgttagggaaacagtctgtttgggcattcttttctctggggattctttctactttataatccgtgaactcatggagtagctcccggacaatcgctacatacgcaaccattttttctccacgcgtttgatattctcctaacacttggtttaccaccaactgtgaatcgccgaagacttctactctcatggctcccacaacttttgctaaccttagccatgcaatcaacgcttcgtactcagcttcattattggaagcagggaatttgaaacgtagggccgcctggagtcagagtctgcttggagatatcatcgctaccccagctccagatccgtttactttccatgctggggtttgtggcactggtgcgttagtgctagcttctacttcgttgcactctattatgaagtgagctagcgcttgtccttttatagaagtgtgcggtatgtagtgtatgtcgaactggcttaattccatagcccacttgaggagtctttcggacgcctccggcttctgtaggacttaccaaagcggatggtttgttaataccttgatagggtgagcctggaagtagggtcttaactttcttcaagccatcaggaggcaaaaaactagcttttcaatcactggatatcgtatctccgcccctatcacacgcttgctgacatagtacacggggtgttgagttttttcctcttcccggactaaggctgcactgaccgcattctcagagacggccaagtatagtaacaagtcctctcgagaactggctttgacaggatcagaggtttggtcatgtgttcttttaattttttgaatgcctcctcgcattcttctgtccattcaaatttttggcatttcttcagaatgttgaagaagggaatgcacttgtctgtggatcaggaaataaaccggctcagggcaacaactttttcgatcaagctttgcacatctttgtgcttcttgggagaaggaatgttcaacaaagcttcaattttttctgggtttgcctctattcccctttggctgacgataaatcctagaaactttcccgaattgaccctaaaagtgcacttcttcgggttaagtttcattccatacctccggaccacttccaagcattccgtaaggtcgtctgcatgacttccatatgcctttgatttgaccaacatgtcatccacgtaaacctccatgttccgtgccagaaggcctttaaacatccatttaaccattctctgatatgttgcaccagcattttttagtccgaagggcatgaccaggtagctatatatccccttatcagtccttaagctagtgcattcttgatctgcaatgtgcatcttgatctggttgtagccggcgtatgcatccatgaaggacaacagcttgaatccggaggtggtgtccaccatctggtcaatctagggtaaggggaagcagtcttttgggcaggctttgtttagatcggtaaagtctatacacaccccccatgtcccattcgatttaggcactagtaccggattggctagccattccgtataatatacatcccggatcaggctattagctagtagcttgtccacgtccttttctagagcctctgcctttattgaatcaagggggtgcgacttctgttgaacttgcggcatgtctggatcaacgttcaagacatgggtaattacatgcggacttatgccggtcatatctccttggcaccatgcaaaaaacatttgtggctactgtggctacccttagtactttaacaattttatctttctcctccggctctaggctctttcccaggcggaggatcatggtagggtcaaggtcacacactgatacctcctcgacgtcttccataggttctccaattttttcagatcccatacgaggatccaactcatcttcttctgccaattctggctcgatactctctcggaccatcaatattggtaaatgggccgcgacattataacattgcgtggcctcaccctgattgcccctaacggtccccactccagcctcctgggtggggaattttaggcataagtgtcagatgacgtaattgcgccaaaatccaccagggccgaccgaccaaggattgcgttgtatgcggttgggcagtctaccaccacgcatgtgcagtacttgaaagtactatggggtgtgtccgggcataaggtgacgggcacctcacttttcccatcgggataaacgtggttctattaaatcccgtgagctgggaactgcttggtgatagatccaggtccgtgaggcctattgctgtaaaggcttctttaaatagcaaattcacagaactctcattgtcgaccaatactctagccacgatcttattggcaatgggagtttctatgactaggggatcgtggtgagggaaacgcaccagccttgcgtcctcttccttgaaagtaattggctgatccatgagtcaggacctttgagcttgaagctgagtgacttcccataccttgtcatgtttaatggcctcagcatatcgctttaattcttttcgagtggtcccctcaatatggggcccaccagagatcatagccactcttccattggatcttggtggcaggctaggggtctgctgacggattggtcctcttgagggtacagttggtgccaacgctccgggcgcacttcctggtgtaccttggggcaatggaccccttgccggaaccgggttgagatggggcaaccggttccttatccactcatagaggtgacccaatcggatcaagttttcgatctcatctttctaatttttgcactcattggtactgtgtccaatgtcgttgtggtattcgcatcttttgttgggatcccttcgcgaactatctctctacagaggaggcggccttcggtagtgcatatttttcctcgtcgcaaaatacacacgctcttgtgtg

SEQ ID NO: 33133 - DNA, 1648 bp, Cannabis sativa
tcatgatctcataataaaactgctaaaaaatcaaatttatttcatacgcattgacaattttattagcgtttaggaatattagaaataatatttttgatctaaagttttttttctttaatcttatgtgttaaatgtatattaaatcgattaatatatttatttaaataaaatatattaaataaataaaattataaatatattttaaaatatataaatataattggatgaccatttgatgatagttggatcgattggttggtcatccattggatcggatgtccaatccaacaaccgatccaatctgattggattttcaaaacttgcatacaattcgatccaattatgattggatatctaattatattagatcagttgagattgaatcaatcggttgtagttggattggatgactttctccacacccctacttgtaacccagaagctaacatgggcccctagggtttcaccgggtgcctaagttgacatcctcaactaggtttcagtttttgggaccgtcttagtgcaaaatggtcagaatttacattgggacatcaactagacttaccatgaacatatttgaggcatcacaattagaatcagagcaagttgattttttagcacccagcgcataggttgacaatctatcaatctgggcaccttccaagtgtctgaacgaagatcctacttttgcattgaattcatctttatcaaaaatgggaaaatatgtccttctagagggaaacaaaaattcttggacataaataataaggcccatcacccaggttgacacctagggctggccttgcacccaattgataatttgccaacctggaccatagaaaatagaatttttaataattcttttgagcatcatctccatctttagtatatattgagatttaacgatttttagggaccaaacagaatttttgaacaggaaaaattcggtcctagcgccccaagttgacacctggggctgggcccagcacccaggttgatattttgccaacctgggctatatccaattcagttcaacaaaaagttctctgagaatttttaccatcatcatcaataataaagatttaagtaaaatcgaggagaaaactacaaacctgagtccctgtttaacaaggcataatgcccaacttgacctggtgcttacctagtagaattaataaacacgattatttgattgatgagattcaataaataaatctagtttatttgagcttaggattataggtccatggtccccggatcgccactatcaaacactatcaaatgaaggaaaataaatgtgtgagacagtttggaaaaatatatattgaattgtcaaaatagtgattatttttttttgtaataaataatttatttttcatattaattaaattaaataaattaggaaaacacaaaagttatcaggataaaagacacattcattatcttaatggagacaagggaagcgccacctacattgtgtttagacatagtgtaggcaccacctacatagggtgtctccactgattttgtgtttttaaattaattattatttaattaattttatagataaatatttatttaaatttgaattttaaaagtaattatagatgtttccttatagttgagggaacacttcttaatgggtaat

SEQ ID NO: 33134 - DNA, 2620 bp, Cannabis sativa
atgaccagaacacaggagaggttatccattaccactattaattattattattatttatggtatagtttctccaaataaaaatgtttccacaaatgtcattctcttggaaagttgttcactcgcgaaaaaagcttccttgtccttccgggaagggtctttagcgagtgccttctgtctgtgatcttggaacctcgtctatgtttctggatgtactaggactcacgctaacgtggagacttcgcgcaaagaggagttggttattaagttaattattttctaacttaacaaccttagtttttacagccaccaattttaggatcttgatcctaagcctatgaataccaccttgacttgtcattttggagacacagttcagattgacattgagactgagagtttgatagagaaaagattgagaggtagagagtgaaagaggtatagagaaaagagagagattgagtttgaaatttgtaagaataatcttttgtagataaagaagattcttaggtaagagtgtgtgagttgaaacaccttcagagaactaaaaagagactctttctcaactgtattgtacctgttcttgctcaatcaataaagaagatttggtagtgttctagaaatagaggacttgaaccagtatatatcttggtgttgatttctttattttctgcatttgttatttctggttttccatactgtgttcatccatatttttcctccgattactgtttgcatttgttagatcttgtcgttattaattgtttgattgtttagaatttaattggtttgattctgcactgtaagacataatttctcacaaatcagagcttggtaatcgattaagaacgcagaattaagattcttactgctgtaattcttgaagaaaactttgaatgtcatcaatggagagattcaaattagagaaattcgatcgaactggggagtttgcactatagagagaaagtctcaaaggaatcctaatgcacgagaaatctccaaggttcttggatacgagaagttattggcagaaaagaaaccaaaggaaaaagcagaaatggaggagatgcgtactacacgatcatcatgtttttgtcaaataatgttcgaaagaaactcatcgcagagaagacgatgaaaggagtttagaataaattggaagaattatacttgaaaccatcaattgctaacaagattaatttgctagaaaggttatacggctttagaataatttcttccctttctttagatgataatattgatagatttaatgagattattgtaggattggctaatataaaccacaaggttgatgaagtcgctcccaattgcatatcaagaagttaaggcaattgataaagtaatagaaaacctgtagtgattagcaagcacactttaaagaattaaacacaaagtttggctcaaagtgtgtgaaaagtgtttgatgaatttagaattaggagctcattaaactcacttgaatatattaggagtatgaaataaatgctcaacaaacttgaatttttgagtgaaaatcgagtttatatagtgtttaaataaaaactagctgtttatagtcgttagcatgttcttaaaaagttcctagaaaaaatggtctgccattttccaaataggctgctatttttgtgaaaaacgtcgtgctgtttagaaaacggtacactggaaatagggctgtggcaaaatcctatttttttggctctaaaacgcgcataactctttactcgattattcaatttcagaaattctaattttgttctcttagttaaatgatatgtgattaaaaattaactttaaaattttatatatcatttggtgaaataacttgtccaataagttagtgggtcaaaatttgtacttaaaacttttttaagtatggacttgaaaatcactgtacaagactaaaaaatgtaaataaacctttatgaagtattgtcttgagtttcttgagtcttggaatctattttgggtcattttcgagaattttaataaaattactattttgcccttggtgctaagtttaccttagaaaaatttattttatctttaattgtgctacaaaatcaacaaatcattagtaacaaataataatcaaatatttactaatcatcaaaacgagaagacctacgaatttaagttaacaatctctctctttttaatgatatcaaatatttgattattttgaaaaggaaaaaaaaataaaattgaataaatagattagatttctcttaatgtgtgcaagggttaaaataaaatttatcttttagtttcaccttgcataattttgtaaaatttccttcaatgttatacttatagaacacattgttttttttgtttttgaaactgaaaacaaagtggttatagaatacaattttgttttaaaacaaaattttttcttttatttttatgattaaaaaaataaaaaaaattactaaaggcaatctaaacttataaactacaatcaatgttttacctcaatataataccaatctaaaaaatattaacatcactctaagttacacacattattaaagggaaatttcaatttttggccttaataatacaagccatatcaaaatttatacccttccttaatttgtacaaa

SEQ ID NO: 33135 - DNA, 6050 bp, Cannabis sativa
aaaaatatagtttgtattatacctgaacaacaaacaatgcaacctcacccataccaaataatccaataaataggattctattggtggtgaaaaaggcacccaaacataaaaatgtgcctaagtaggttgagaaagattgaatctgcaagattttaaatattaatttagaataaaaataatagtaaataattgactaaaatttggaaaatagttattttattgaaattttctaataaaaaagaaagatgaaatagtaagtatatatgataccacataatgtaggatatatatattttattgaaattttcttttaaaaaaatgaaagttgtaatttatatatttataaagaatagtgtgtaatataccttgaaagcataattaatcgaatttcctgtataactcaaaatccaacctccaaataatgttcccactactccgcataggagagtcattcctccaaaaatattgtctgcattattctgcagtaaaaattaataaaatattatttgtatatctttcaaatttatgcattcataaaataaaataagaaaaaaaatagtttataccatttcataaagtacatatcctgctttaggtccccaaaatgaataggcacctaatacaaaagtataaaatataagtcctgcaaaaaaaaaaaaattaattatgttagattgagtaattaatttaataatttaataataaataattttaaaataaaatacttacccaaattatttaatagaaagttcttattaaatatcaatttcaaatcttgaaaaattctaacaactttcaatctgtcaaaaaaagaaaaatgataaagtcatattgcacaaattaatatatagttataataataataatatattgaatcaaagaatatatattagaaaataatcatacataatttgagcaatgaaatttttattttctttctttcgtgttgcatgtgtgtcgttgtcgtcatagcaaatatccatatctcttggacctaagtttataaacaaattaggttagtgaaaaaattaagtatcataatgttgtgtttaatttaataattattatatacattatggttaattatatgacactaaaaaaagtttataaacaaattattataataacacattaaaaattatataatgaaaatcataagaaccaaacatatatatatatatagtgaaacattaaagattacaagcataaattaataataagaaattaaaaaaataccttttatcagtagacttaaaatgaataggggaaacataaacagtgataatattcgaaatgcatatcgccagttcaaatactttccaatctaaatatgttacacacaaaatatagaatattaagaaaataaaataaatttttatataccaagaagaattaaattatccaaaataatagaaataatgttactcacaagtcctccataaatataaccaaatgcaaagcctggtgttgtaaagctataatatattgatatccacattgcttcctgatatatttaaacattaaaaattaatatctaaatatatatattaattaaaaatgagtaggtttaaaaaaaattgagataaaaaaccttcaaatgtggtgcgatatcgctaattatgggagctccaagaattatgagtggaccttgtccaaaaccagtcaatctatttcatagaaagttatttagtgaaacataattcataaaattaaatatgcatacaaaattattacaattacaaatatttatatttgtatgtataatagacaacttacgttctagaagaaaaaaaaagccttaattatttttagaaaattatgaataattagtgttattaataaaatttaaaatatatagtaaattgctcacatatataaaaatatatagaaaaaaagtataaatatttaaattttatttggaatttctatatgtttatcaaaaaatataataataaaccttaaataacttacatccgagaaatagtaagaatctgaaaatggtttgagaatccacacaaaacaatgccgcccatccaaaaaattatcccaatttggataagatttaatcgattttgactgaaattttttgatatcaattattataataaattagttttatttttgaaaaatattattattatttattaaaaataaataaatcttaccttgaggtaagaattgcaactacaaaagtagaaacaacaaaacctattagataacttgaaccgaggaatccatcttgtgaatttgtcaaattaaaatcacccctacaaatacattataataatcttaataataatacgaatacattataataatcttaataataataataatatttaaaataaaaattatatgaatagtatacaatataattaaaacttactgaattcctcttccattaatagtaccattgctagcaataccattaattccattacttgcaatggttccttgatccacataaactataaaaattatagtactcaaaatagcaagtaaactgtaaaaccaaaataaaaaattattagtataaaaagaaaaatatatatataaataaaattataatgaaaatataatttttactttatcgaatattacctaatattaatagaaaaaatttatagatataatataattacttaatagacaaaaaaacaaacattcatattatatagaagtcagtggatttaaaactaaaacaagaatatttttaatataataaatgttaaatatattttcttaatcaaaatatctgttaaaaaagatattttatcatgtgtttaaataataaaataaaatctactaacaatagcactttaaaaaatattatttataaaaaaaaatatatacagatggataatggtgtttaataatattaatgtacacttctagtttaagacgttatgagaggtgatttttctatatcataatataataaataaatatgtatacttatgtagaattatcaattaaatttattatattaataaatatgtatactatatatagaatcattaattattcttatataagagacttaatttaccgttattcttattgataaaggatttaattttttttataataaattagtattttcaaataatatatacaaatatctttaaaatctaaagatacatacatagaaaatttccttaatcaagaattccaaatttaataattgagatcagtatacttttatagaatatatttttttttattttctagaatatttgtataacaacaaaatttgaaatccaaatgataactcaacaattaaaataatcacaaattcatatgtaaacagagcttttcaatcacaaaaacccaaccaggtttatgtattaaagatttatgatttgtacatcaatataaattatggatgactaagcttgaaataaatataacataaagatggaatgaaataaaagtatcccaattatatatctaattagatataaattactaggttataatggaccatgacttggcaccatctttaactcgaaggtgccaaaaatcatatacatttattattcatgccaccagcgaagcttgcactgcttgcttaatatttgcctctatatattatataaatattaatctacagtatatatatatatatatgatgatgcaagtaccacttaatttagaaagaaaaaagaaatacattataataatcatcttttacgacttcaaatcttttgattcaaatatattctatatgagtttcaagtcacaggaaagaacaatatgaaaaataaagctacaacataattttcaaaatatttaaataagtaatctatatataattataacatatacaaatatattcacacaaaagaaaaaaaaaacaaacgattataatctataactaataatgttctaatttataagttattgattttttttaaaaaaattaaaaataataccttcttgatttaaaggttgagagtgaaagtggagatgctgtagacagcgatggagaagacgatggtgtaggtgtagccattattgacaaccaaaaaataattaagaatgtaaagaagagaatggagtaaacaagtttaactgaaaaagttttaagtgaagaagagaaccgaagttcaaatttaaatatttagaaaataatactatcaatcatcaatcaattttaatcattattcaaaaaaaaatcaatcaattttaatattttattctatttttttccaattttttttttctttttattctattttttaataataaaaaaattaaatatctaaattatgaatattaattaattaaaaaaacttagttgcataaaaaatctaaaacaacaaattcatacctttattttattcttttaatataaaatatacaataacccaaaaacctaaatctaacgcatctaatgtatactaactgactgttatacggaaataacaaagtctcgatttctcttggacgaaatcaaaatagggcaatggagattggagactcgcttttgaagatcactctaatggagctggtgtgctctagtagattgcattccgcttctcgcaacaacctccgtcgataccggatgaactgcagattgataaaaaatgaaagcgattcgaaattcgatgggtcagttgaagtgcgaatttcagctgcgtgcatatcaaagatctcctgaggtgattcaatttctatttctatctaaaatctctaaaaatgttttgtataatgtgtgcgatttttttctttggcgtgcatttttatttttactaacttaatcaggattgaagtcttggcttctcttgataatgatgtgtttgaatccataaagctggcaaaggtgcgtttagaagtaattttaatagagaatttcaatggttttgtaatctgttctagtttgtagataaggtgtttgttgttttgtcttggaaattgggtcctcactactgatgtcggagatggaaagcgaaggcagttcaatttcattattattcattttccttcttgaatttttatgcttgaatgctagcaataggatctgagaatgtagtatcattaataaaattcccttaccattatttatttttgtcaacagtttaatttctgaggatagagatagtggtgttgcttttgagatgcatttaaaggtaaacctgcacaacacattttttatctactttgtgtatccaagtcttaatttcactggcagtggtgaagttatttatgtaagcttttatgtctttgttgaattcataaaatgtgattgtaatgcagctcttgaaagagtttctcaaagatttggcctctttgaaaagagcaaatgatctttgttgaattcataaaaaaatttcaaattattcttgcttagtttttgattttcctagttgatgtttttggttgtataatgttacggtacatgtatgtataagattaataataatagtaagaacacttcacatctatctttctctctctctctcttgtaatttcttagtaacattattaggtgttctattattaacaacttcaagctcagatttggcagaagcttacatattcattatgaaggttagttagtactactaatatttcaagtttcaataaaattagtaatacttttttttaaaaaaaaaaataaataattagtttatgatttattctttcgccatcaaactaatatgggattgtttttacagcaagtggtgttgaaattggtttcatgatgatagaaccaagaagtagattacaaagacagtatctgtccattcaggtatataattgtaccaattgtaaagtttgaatttttctctttaatttttaacaaaataaagaaacccaattcaaaacataatgatgagatcaaatagaattcatttattttcagggattgattaaattccatagattccaaagacatgaaattgacaataacaggggacataaatctgtaagttagtaagcaagttgaggaagcaatttgtaatgtattttgatcagcaatcttttcttttgtcttcaatttcgattttgattttttggtatgattcttttggatctagtttcgc

SEQ ID NO: 33136 - DNA, 1214 bp, Cannabis sativa
tcttatgtctgttgccaatgggggctccatttcatattctgtctccccccaataaccctcaaccccaagctcgcgtagttcaacttccccctcctccagccagctaaatgctcccttgatgatttcttctcctaaccacatagctaaaaaccagccatccattcacactgctggacttcctagtccccccagctttgttgttggtagtaatgatggcccaccctgtcgtgccccaacaaagaaaaattaacatgttggctcattagggtttaagagacacttggctactgctggaaatgagcagagagaaatgttgaagagacataggcctcaaccacgtcaagacattgtggaagtggcctctggtgatgaggcaggctctgtggacacacatgcctgcaaagactcatgaatctcatcagttggaatgctcgagggcttgggagtgatcgagcattcctaaatctcttccttttggttcaaatttatatgtcgtcgcttctttttgttatggagtccagactttataagggttctgatgatcgtattaagactaagttgggctttgtttttggttttgaagtccctagagtaggattaggtgggggacttttgattttttggaactcagatttgaatatacttggcactaatttctctgttaatcatattcactattatgtctcgtgtgttgatcatgctggttttaattttactgctttttatggtgctcccaatcttgttaatcgcctccatacctgtaaaattcttaccaggattggacattcttgcattttgttaccctggttaattatgggggattttaacgatttcttaacttggaatgataaaaataatggtaatggcagaaatggtccatctttccatttttgacagtttattgagaacttctagttaaaagtccttaacccttctagacctcgaatgacttgggataacaatcattaaggaattagaaacatcaaagaaaggttagattgggcagtaaggaacactctttggtatctaaatcacactagtagcagtttacattttcttgacttttttggttaaaatcatagggctcttcggattctacttaaaccctaacaccaccattctaatcttgcagttaaaaacaaaagattcatgcttgaaaatgtttagctcactgagccaaactgggatgatgtgctctcaaaagcgtggatgtt

SEQ ID NO: 33137 - DNA, 1607 bp, Cannabis sativa
tatcgatattcatattgctattaatgggatcttccttaaaaaaatctgcaacatccaagggcgtaatatccaagggctctttgaaaagacaatcaacatgataggtaaaattttcttctattttctccttcccttttacaaatacctaataaagatcaacaatgtattttaccatatgatatgtacgtgcctagtgtcctttcaattccacatctgaaacaaaaattttcagaatttttatgattattattttgaggacctttttcattgttcttaggagttgtgcttttcattggagtgtacgaatttttattctggccattacgatgacaaacattatttcgactagaaccgcgaccgcgactttgattatggtcacgaccatgtctatcactttgattatgatcacgaccacgactatgattataattgtcagaaattatagaattcacttcagggagtggggcagacccagttgggtgagattcataatttttcatcaaaagttcattattctatttagctaccagaagacatgaaattaattctgaatatttttttaaaatcttgttctttatattgttggtgcaagagcacattagaggcattaaaagtagtatatgtttagaagtgatattaaacattacagagttataatcactttctgatttaaaatcttgcaacctcaagtgcaaccaatcattcttagcctttggcaatatgacagttttctgatggtcatatcattctttcaaatttttccaaagcacaagatgatcttttacggttaaatattcagattttaactcctcatggagatattggttaaggaaaattatagctttggccttattttgttttgtttcaatattttgatctttgatggtgtttttaagacccatagcagcatctaaatagatttcagcatcaagaatccatgaaaaataatttcatcttgaaatatcaagtgccacaaatttaagtttcgcaaggttttccatgaaaaaactatatcaataaaaagtaaattattagacatatacataagctatggaaagaaaataaaagtaaaacaaaatataacacatagacagtaaaatactaaaatatagaataagaaaacaaaattaaacagtatataatatgataaacaaatcaacacacatatataatatatataggcatctatatagatatatataagcatagacatgtattgtataaatattaattcataaaaaagaaacgaataaaaaaattggctagctcgaatgtgtttcagtcagatgggtaattatatacatatatatttagcatatcatgactttgaactaattcgatatcatataaaataaacattattataccttggttagatgctcagcctgatactgtattatgaaatattataatttagagaagaggtgagaattttcttagtattttattccaataggtaatctcccatttatatacatataagagtcaaatattagggaaaaaaagaaaaaaaaaaaaagaaaactaagaaaaaaagaatattgattacaattaatggtactaaaaaaaattagacattcacacaattattaatatatatatatata

SEQ ID NO: 33138 - DNA, 1099 bp, Cannabis sativa
ggagataacaagttcttaatacaattgactaagtcatctacaatattacaaccccggttactagaatacaatttatccacaatagacttgcaatctgtttttaaaatgtccaccagcaagataatagaggaggcccactgtagagcatggataattgctttagcctcagctaccatcggatcaacacaacctgtaaaaggtatggccaagccagccacaacttggttagagtgattcataaccacagccccaatactatactttttcctctgaacatcaatggctgcatctgtgaatatctgaaaagctccctgagacggggtaatttgcaaagctgcctgatcctgattagaagcagagggtggaacagggacctgctgagcatccaaaaacttgaagaaaaaagtaacagcccagtcataaacatcaaatggttgactaacttgtctatgatgaaaaatattattcctttggttcaacaaagcccaaagaaaacaacacaaaatacaaatataatccttgtctaactcctgagaaacactacaaaagaaatcaaaaatatttaaatgcttatatttatcatagagattaacaaaccttgaagatttccaagctttcctcgctttggaacaatctagcaaagcatgcttaaccgtttcaggatgtattttacacagagggcacaaaggagaatcaataacacatcttttatgtagagaaaaagaaacagggatagcattagaaagcattctccaaataaacaccttaactttttgagggatttttaaagtccacagcttagaccaaaatttcttagaatcagcaaaagaagaagaagaaggaagatcatgagaagagaaagcaagatgataagctgacttggcagtacactcccccgaatgatcttgcccccaaacaagttcatcctccccaaaaacacccataagagggacactaaggatatcatcaaccaaaggagcagaaaaacagtttgtaagtttagaaatatcccaatccccattctcagtaacaaaataggacaaaaaaggggacggaggcctatgatcagaagagaaaaacttaaccctgttattaggga

SEQ ID NO: 33139 - DNA, 3401 bp, Cannabis sativa
aatgaaaatcaagcgtaaaactgctccaaaagacaccaatagacgagataatgctaactttaaagacccgaaatataggctaattataacctaacacttggctctcttccaaaataataacagctttccctttattctttgtagtagtgctaatctcattaatgcacttagtagtagtgtcttttggtatggtaacaattggagaagtggataacatattgttatcactttttgagaaggtgactcaaggatgagaattgtttgaagcaagttccacgctagaattcggactcaaagagcaccaaatagatgaaaataagaaggaaaagacaagggaaattcaggacaagacaatttttcggaagtggcagttatatctggtgtggaggattctgctattgtgagaggttgtggctgtggtgtagttccaatagctaaatttggatgagtataaaggtcagggatggatgaagcaattgttttcctagccaatcaggttaagaaggggtaagcattagcctttgagaagtcattacggtatcgatcataacctgaattaggaagtttatccctaatcatttgtggaccataatgaagatcgagatccacaccattatccaccaattctagaaaagcatgacatttctcgaaaggatgatccaaaatgccacaatggaagcagaaaatagggagattctcataccgaaactcaagccaatgttcatcacgaacctttgggagagtgaccatcttgcctctcattaaaggttgagtgacatcaatccaaactcgagtacgcatgaaagatccccaaccttcatggagtgaatcctcatgaacttcgatgaattctccaacccattcacccactttccttgctaaagcccttgacttacttaaaaaaggaagtctatgagtttgagcctagaattgtgctctgaacaaatcctcctttgtgacattctaaaaagaagacggtgagtgaaggaggataatttgattgaaaaaaatgccatggttcaccgtttgtcacttgctcaggccatggtcaatataaaaaggtcaaaatgcatctcagaaacaactacttcaaaacgacacttgttgctctagaattctcccatttttttgataaaggttctgggattaatagaattggaaagacatcttgtcaccaagaatttttttgaagaatggtgaggatcatggaggtcagattccgagagagtatgcataagtctctccttctctgacagactaagagttgagttcatttcgtttataatagaatccatacaaaatgcgaagaacgaaaaagagaatagaaagcgcaagtataaatcatagaggctaagatggtgaatatatataggtttagaacaaaatagagacttcgtaggattgataatagcatgatactggggaagaggggaatgtgaaagtgggtagttaacagtgatcatggtagagacggggaagaagaagtggaagaaaatacacaaaaaaacccagaaaaacttaggaaaaactgcttcaaagaaccctactcaggcacttccttttagataacttgaatacaacattatccctttagaattacaaaagataacaagaatttttgttacactagatagacagatttaatctttatttaaaaattaattaaaattattttgttagataagggataaaaactaattaggaatattctgttatttcaaaaaaaaaaaaaatcttttaaataaagtatattatattaaagctaacaaagaaatttaaaattaatattaaaccaataaatactcttagattgtgtttagtaacacttttttaattagttttttgtttttaaaattagaaaagtaaaaatattttctaaaatcatattatataaaattgtttttactttttaatttttttaattaaaactctaaattttaaatacaaaaatcactttcaaaacatttttaaatagttttttaattaatattttagactccgaccctaacttagatcttggaaatcgaattcgaacccggccccagacttagacccaccccaatcccagtctccctagacccggcttagataaaattaacaaataaaaatgaaaattatatttacagaacacatttttattttttgtttttaaatattaaaaaataaaagtggttataaaacatatttttatttttcaaaaacaaaattttaaaaaataaaaatttcacttttatttttgtgattaaaaaatttaaaaataaaagtgttattaaacgccaccttaaataatcaattttcatatataaagatatatttaaaaggttgccgtttttttttttttttacaaatacttctagtaaaatgtttacaattaattgataagtttcagataatataaatgacatcattatcacaattaaacaaataattttatttatttgtaaaaaacaaataaaaataaataattatagaaaaaaaaaaaagagcatgcattaattatatagataatatctaatccaaatcacatggtgttatatgtacatatgcatataaggagccaaaagaagtaaaaaatgaagcagaggcacatgttagagagggaggttagggtacattgatgatgtacaatcatgtacaagtgtacacttagtccttagacaacttttccaaaccttgtctccaatggccaaattgggtccccatctaataattattattaactacttattattaaatatctatatatatatatatagtttgaagatgatggatgatgatataataaagccagctataaagcttatctcatctaagcatggcatatacatatatgtgtggcatgtctttgtgaaactaggggccggttcatatctatatctatatctatatatgtataactttgacaaaaggttttgcatggcattgggaataggtggttttagttagcttaatagctatattagttgtataattaggacacatgggtagttttgttttttagaaagggacatggggtagtgtttttttatttttatttatttcgataatataggtattggtagaagaattaatattaattagggagagctaggtccacttcgttggtgtaactttattatggataattgagggttgacacgagtatagcattttacactttcaattattttaggtatgccaaaaaaattgtaattatctatcccatgtacaaggtaattaattaaaagaaactcactttctagatatttttagggcattaatctcctattgtcctcccttgtacaataatagagtgactactcaatagtttaatcatgatcagtggtggattcaagatttaagttgaggaggcgatatttttttttttttttttaaatggggggggggcttttttttttttt

SEQ ID NO: 33140 - DNA, 1791 bp, Cannabis sativa
ttcaactaacatagaaaaaaactagcataaaatttagtatacgtgtctcccacgtagctttttactagtaaatatatatatgtataattttttagttttgtttctttgattattaataaataacagtttagacaactatatgagtgtagatatgatattaatttcttttgtattgttattttctttttttatatatcacactaaatttagcttcaagaagcgaatctatatcacactatgtcttagtttaaatatatataattgatgaatgtataacgagaaatgctaagggccggacaccttaagtgcgaagcactacaagatgtgacatatcgctattcgtgtattttaatatcaggtctcacaaattaaaatttaataagttatacgagaaatcactaactaattataagatatcacactggtgtggtgttaagtattttaaggtataagtaacaatgttcaaataagatatataattaaagcacgtcctcatgactactaatatatatatatatatggaatactttttaatgcatattactattgatggttactaaataatttaactataaatattgattttaaaaatattaaactattaaattttgatcgaataataaaaatagaaatttgaatttttatgtttaatttatctacttaatttaaaatatataaaaaaatattactttttacactatatcaaaaatatatttatatacaatatactcaaatttaatttttttttttttaccgaaaaactttttttttttcaactgatggaacaatctcaactcatataatgtaaaaattagagattcttataattagattggaaaactaaacataaaaattcaaatttttataatactagtcatgaatggtaatacccattaggagtacacccatatatatatatattaatgaagttaaactgaatataatatggttgttatgagttaatattttttttttcttttcaaattttccaactgagtaattttttattttttttgtaacaagtttttatacatatacatatatatatatacattttttatatggcatcattaataatccatcttatagcctttcccaaaagaggcacaatttatttgtttttctctttccctttttggcttccccatttcattaaagttaacaggactgcggtttctttttagtagagtagaatgtctattaattatttaatatctctataccttcaatatatatttataatggtggcgcgaatcatacttgattataagaattaataattggtacgtatatgaattaaaataagcaatattgtgatcatcagccggagcaatacaatatagtaacagaattcaagaaagtactgctatgcatttcttttttatgtatgaatataccattaccatactgtataataagctatagtataggtaggtaggtagctctcgtgagcgaattaaccatgcatgaactttctcagggatcgatcagtcattatggaaagggatctttatgaaattagctgagaaaactctagtactgctttatgctgacacaatcaacgtagtcctttttttaaaaatatttattcctaatatacgtatacagatcattcattttgggtttgaaattatatatatgaatatgatcctattgctattactacatctcgtgatttatattatgcatgtacatgtatctgactttcgcgtgcaatatataaggctgcaaacctagctattgaaactggaccatcatatcactatacactatttctttaatatatatata

SEQ ID NO: 33141 - DNA, 1363 bp, Cannabis sativa
  modified_base (32)..(45): a, c, t, g, unknown or other
  modified_base (903)..(932): a, c, t, g, unknown or other
  modified_base (1308)..(1313): a, c, t, g, unknown or other
catcaaacaatcatcaataaacacatagatcnnnnnnnnnnnnnnccaaatcacacatacatcgttttatgtccaaatttcttgaaagtaaatcaatttccatggctttggtaccagttattcgaatatattttactaggaccaagatttactaacaagtatatttttaacatcctaaatatgaaaatctaaaaacgatataaagtaaacacataaaaggtatgagaaaccttacattggttacaacagaagtatatgtgttatcccaatttttgcactttgacgtggcatcactcgatggtgacacgtggaatcgactccaggtatctgcttgcaaggcacgagccaaacaggagacttcgtgcatttgctcggacaaagtcctttaaaccgagcagtgggcaatccgcacagaatgccaacacttagcgaattcaacttttgcatcgtgagtcatcaaggaaattcctataactttgggatcaaattacagagatatggcaacctgtccaaatcccacgatccgtgtattttgtatttactatgcaatctttctgcttatatcaattgtaacgagaagggaaagactattactgatgcatattcactgggcaaagggtcaaaaacattttggtcaaaagattttgtctaagaattcatattcagagatactgttgtaagagctctaagaaaaggaaccattctccttgttcttaagtcaatacaaataacgaggattaggctattactgaactgctcagggctgaacctctataaaatttctgtgtctttaaattgctttactatatttgagtcgttataaactacttgtcgcttacaaaattagactcaccgtcgttggctaaaagtgaggtcaacaatatgactccttccgctcagatnnnnnnnnnnnnnnnnnnnnnnnnnnnnnngtatcaccaagatctgagcccgatactcctttagttatttggattctttatagtcttacacactatgattaaggagtaactggctatgggtgggcatgcactcaatcactaaggctcgaattttgatagtgaagaagactaagaattttgaaattagtagagagaaaagaagaagaataagtctcaaaatgctagttgtctgtcagaatgaaaactaggtttaaagctaaagaagcattagttggatagtgagaccttactcttctttttatactaattctcttatggttaggattgaattatttataataaaaatgataaaaatagaccaaaaatagggttaagtggccgaccccttatgtgggtccatcactannnnnntttttgccatttttctcaatcatttatctattttttacaaataccacttt

SEQ ID NO: 33142 - DNA, 1815 bp, Cannabis sativa
tctctctctctctctgtgtgtgtggaagtaatcagcggcggcgctttttccccaacgattaggaagagagtttagtttcggttgtcgtctcttctcttcaagcgcaccactgaatctgttttattagttttcagttcaatcaattgggctttggcccatctataattggattagcctagtcacattcacataccattttttattaggatttttacaaaaatactagattttgagtaaaagtttacaatgtttactgccacacagaaatttttacaaaaatatttttttaataaaataatcgtaaaacaacataacagaacaattacaaataatagtggaataactaaaaaataactgtggaacaacagtgaaaatttaatacacagtataaaacttacatagtatttttgaaaaaaattttgctaaaaagaaaaactgggaaattttagtatgtggtgtaaaacatcttttttattgggaaaattatataaactgctattttttttttttttgtaaaaaatttattattttacgtttaaagtttttttttttatatatatatatatttttatggtattctataaaaatacacacacaaaaaaagaataagttgaaaattactctttttttattacacattaatcaaatataactctaagattattttaattgataaataccctcttttataattaaagtatcaaatataacctcacataacttattgaaattaaagtttctaatgcacataatgtggatatgacttataaaatttggtataaattaaaaagtaacaaaataaaggtagaaattaaaatagaaaataaaaaataagtatataatgtaatttcctcaaaaaacaacaagaaaactataaaaaattaacaggaaaacaacatcaaaacaacaacaacaacataaaaaaatataaacaaataacaaaatatcagcaacaaaataacaagaatacaatataaaaatatatcaaaagaccgtattttatgcaaataaaatcttaaaaatcataaaaaaaatttaaaattctatactactgtatttttttaatttttttgttgttttgtatttttttttgaaattattccttttctattaggatattttgcaaaatctcaaaaaaaaaaaaaaataaaataaataaatataattgtatgaaattttaaatatttttatggtttataagtttctatttacaaaaattacacgatgttctcattttttttatgttataatgttattatttgtttggtatttatatgtttttttctaattatttttatgttttattaatataccgtaaaattgtaatcaagaaagattaaaaactaaaatttaaaaaaaaattgtaaaatgtaaaaaataattatttaactgtaaaaatattacatttttgtcaaaaataataccttcgtaaaatttccaataattatcgcattaatttttcttcggtgttttggatgaagtttatcaattcaatttaaattcaaatgccccaaattaagattttgattgagtagtaaggactaaggattactctaaggctatgtttggtgggagggagggagagtaggatggatggagaggttagagaggatgggaagtaagaaggatagagatgattgttaatctcctttgtattgtttggtattaggtgtgaggtgggaatgatggagaaacaattgattagtaaaattacaaaactatccttttaaaaataaattttattattttttaagggtagttattgtattttgtaaaatgtattttgtctttttttttacaatctttctaaatttg

SEQ ID NO: 33143 - DNA, 3043 bp, Cannabis sativa
  modified_base (505)..(508): a, c, t, g, unknown or other
cacgataagtacgtgccaatttatactatttataccgagctaaatgaaactcgagaaaacatttttctcgcaaatgagcacaaggttgcatttcgcaagcctgagccgatgaggcatgcgagacacaaaagggacgcaacaaaattctgtagatttcacaaggacatatggcatacaacggaagagtgtcgtcagttgaaaggcgagataaagagccttatcttgcgcgattattttcaacagtatgtaaggcggcaaggcaatggacaaaaccagccgaatctgcccaataatccaggcaaccaaagattacaacctcctcctgtagaaggagaggacatattggttatctcgggagggccacacctcgctggagaaagcagtaatgcccagaaaatatatgtcaaggaaataaaaaacgagcagtcagtttttgctctagaatcgtctaagaaagtcaagattgaagagcctccaattgtatttttggaggaagacacaaagnnnntgaggtatccacacgtcgaccctctcgtcattacaattcagctcgccaacaaaagaataaaaagggtgttggtggataatggaagcgcagtgaattactatacaagaatacactgaggcaaatgggattgcaaattggttaaaaccttgcatggtgaatttttgcggtgttaagaattcactcaaggtctctgcccttttacattggagatccccccatagtatagatccagttgttagtcctgatgttagagctaccatttttatatcatcagtgactttagtcttagtagccacgtccatcatttattgaatgaacttcttcaagttttatccttgttgttgcttgaaactggtcaaggagctagattccaaatcgtagtccttgtctgttataaaatgcttcctgaacattacctgtaggtctcttcagttttagatcgatctcggagataatctcttccaccagtcctacggacttacttaatgtcaatgaaaaacataaacattttgcatcaccattggccttggaaacttgcatgatgcggttgtatttggataaatggtccttgtggttcgttcgtccttcatacagttccatctggggcatcctaaaatgctttggcaatggtgcatcaacaattctcttcacacaaggcttcgtatcctcttcctcagaatcagatacgataccactttgtattttagaaatcttttagtgatcttcatccactcctcaactttacgttccaagcattgagtattatcacttgaggattctcttttgcgaatatgatcattgatgtggtttttttctttagagattgtttatggaaaggcttctgccactataatctgatacaaaatgcacttcttcaacatccttgtcatggttactggaatcattgggaggaggtgtttcttttcgagactctggcttttgtactccaacatatgtcttttttgtgtgtgactctgcctctagaattggtttggtcaccgtaccctgagacatggtttcctttcctcttttgttgaggttggtcaacaactttcgattttttgggatgtttcgtggaaggagtcttctttgattcttcaatagcgattcctttgcctttgtccttgcatacacctaaagttctcggatctttcaaatctattttctcaagcacatctattgttggaggagctagcacattatgagatagtttagtcagggcatcacaacctcaattctggtcaatttttcgagtagcaactcgttgaattaatcttactgagttaacatgcttttagccagttgtagttgcctcaccatgatgaccacggagtcagattcgttaggctggctcttctctccagcattatcattagtaactttgtcctaagggtcatcttcatgtatatcctctggtacgtcttcgacgttaactttagtgtcctcataactactttctccaaactttgcatcctaaatgataggatcgtatcgattttggtcttcatcttgacagcctttttgatgactactcacctcttgagggtcactagaatctccagctctgacactaggcacagtgaaacgaaaaccagacttagtttggatgagggccatgattacttgaacgtaatctgcaagtggtctcactacttttttcaactcttaatgaaagtaccaaaatatttaccgagattgttagaaatagaataaaaattaagaactgaagaataaataatcataagagaaattataaaatgagacaaacagttttattgtggttaaggcgttaactagccttagtgaacgagttagtattattcagtaagtcttttaaataccttaggaaatacacagaatgtatgttctcaagttttcctgagcaaagtttgcaagagagttcaacccttaatccataagattagtggggtatttatagtagtttgaaaattacattaggtttcccatttccctctactggggagtttacaataaataatactcgtgggatttctcatgaagtccagtccatggataagatgatttgcttactaggcgaatcagaattggactgatctggtcaacactgcgtacactaattgtagacaattaatctgaattaattgcacaatatttattataggaagtttcccctttaatcttgatatgatactctgttgtgatctaataattaaattttccttatttgtgtgcatgaatataaaggaaaaccggaagggtctttcgagaacgtctatcttgcctcttcgatctcgtggtaccggacatgtctttcgggcacaatttgcaaagggcagaaggttttgcaaatgcagaatcatggtgtgttcctagaaggtaacatcccaatggccttggcccactttaccttaactgaaggtcccactaatgggtcttgatgttgatctggagtccatgtgtccaatgctgaaaatgtggataacagttatcataaacaagatctcgttctagttatggttgctagaacgtggctgaattcattaaaaatatata

SEQ ID NO: 33144 - DNA, 2600 bp, Cannabis sativa
gacattagccatgagtacatgtacatgaagctgaagctgaacataaataactttatttcaaaaataaaataataataaaaaaagtaattagtaagcataccccttgtacaaatcaattatagaggtatccaactgaggcataggccttacttctgcaatttggaaagaaaaaaaaatgcaaatgagttaacataaatttctagaaaatgtagattaaggggaaaaaccatattaaatccattgagtttcttctttaaagttgagtagtgatggtccaacctgaagacacattagcatctttctctttaatctttgcaataataatgtcagcaagagtacgttgtggaactgcatcttttgacataaataactcgagtagtttctcatcctcttcatcaatttcctgcaacaatacatataattataataaacatacatatatataattttggaaacaaagaaaccctactcaaacatgggtctgaaagaggaaaaaaaaactcacctcgtaatcgccatagcggctctgagtttcatcgaacccagaaaaattatcaatatcatcttccacttcatcatcatcatccttggccggctcttcgacgacagtcagtagggaattgttagggttttgggcaaggacctcttcgtcctcaacctctctctgttgagccagagccgctttgagtatcttggagctcataccggaagagataagcttctcttccatctgatgctgcttccggctctcattagatttggaacgcttcttcgaaggcaatgactctttattgtcatcggcaaggaagggctgcggattctggatcctctctttcttctttccccccattgaagaaactgaaagaaaattcacacacactggtggaataccacttcaaaggcagcagagctctcaaatgctaaggccgcaacggtgacgtgagaaaaaagagagtgttgttgttagggttttgggtttaaaaataacaattgacaattacataaaactatattaaatttcagattttaatattttatataattattttaataataaaaataataaaaaaaaaagttctgacaataaatagagatctaaacaattgatccaaacttatgtatacatacacatttcatattccaaacctctaaggtgttgtttggttaggatgtacaaaaacataaaaataagaataataatggaaagaagaatatgaactgaaattaaatttaaaatgcataagtttacatcatttacattataattatacatacattatgtctatctaagagaatgtcttgtatcttaatagaaaattttgcaaaaattctgttagttttgacagaaaatactaacaattatgttcacaactttgtcctatttgagttctaacttatctaaacaggtcgtcgttaattgactattttgcttctcctattaaaatagataccaatcaacactgagaccataaacagtctatgttaccaaccaaaaacttatcaatacccaaatataaacaaagtttttatatatgtatatatatatgtaggtaggaacaaatacaacaaatggaattgaaagaaccaaaaccaaaatcagaatattatgaaagtctaacttcaaatcattccatccaaatcagaaaaaaaaaacctataattttagtttcagcacacattcatatattataagtttcaaatggtaataatatacaaaaattttggtttctaagaactacgaaacattaaaaaacctaactattattaataataaggaaaaaaaaaagaaaagaggattggaaagaacaactctatacaacaaaacagagaaagagagagaatcgaaaactcaaacaaccaagcatagtttaatctcattagcagattcaaaactcaaaaccataaatacggtacctgttttcaatgagtgaagtaaatgcttatcccgccaatgagtgaaacggtagtcctcctctccgatctcctttctccgatcaaatggtcgataatatttctagggtttagttttagtgagaaaaaagcaggaaagtcgaataatatttctagggttttaggtctcttttcataataggtttgggcttgtataatatcacttttgggtttttggatcttttatttgggctaggcttctacaaataattatataaaaaagtttggtaacacttttatttttaaattttttaattacaaaagtaaaataaatttttgtttttgaaaaataaaaatatgttgtataattacttttattttttaattttaaaaataaaataaaagtgtgttttataaattttatttttattttttatttgttaattttatttaagtcgagtaaaaagtcgggtctgaggtcgggaccgggggtgggtccaagtctgaggccgggttcgagttcggtttctaaaatctaagttaggatcggaatccaaaatattaattaaagaaaaactatttaaaaaaaagtttgaaagtgatttttttgattcttaattaaaaagtgaaaacagttttatagaacatgattttagaaaatattttcacttttctaattttaaaaacaaaaaactaattaaaaaagtgtt

SEQ ID NO: 33145 - DNA, 1973 bp, Cannabis sativa
tgaagtaattaaaggggtattttggacataatataaaagttgtcatatataggcaattttatagtatttaggtttacaaaaataattttaaagttaattaagtataaattgtcaaatatcccttgtagagtgtcataatgagagaattaaggggaaaacaaataaagctaattagagagattgtaaagtgccatgtcaccgcctcatatctctgctttatatatagatatatagatatgtagatttcaatatttattttaattttacttacataatttttttttaaattgtgtattaccttttttttttcataaaattttacataattttttttattatattatagtatttgaaatataatttatttttctttagtaagtatatttaaaaaaaaaaaaaaaaatcacagtcctacaaaatccaatatcaaaacaattatatactatgtacaattttacttttttacttttcattatccataaaatctcaacattgtaatattttagtaatgaaatttacctttacctttatcaattaaaatataatattttatccgaaaacttttcataatagaaaattaaataaacccaaagaaaaataaaaaaaaattcaagcaagaagctttataacaaagtgttgatgattgagttatctagctaaatttgttgatgattgggttagtgaaaagaactaggagaggccattcatttgatttgtccatggtgcaagtgctaataatgaagacatagtgatgatcaatgcttctaaacaagacaaagtaacaaacctcaatatttcaaaaaaaaaaaagtttcattaacacaaggtagacaaactcaatgagcaccttagatcggtgtttaagcaaatactacatccgaacgaaatacatacttaacacctttactaacatttcgagcttcatgcagcaaacatttgtccccatgaatgtgtagaagagccatcccttcaatcggagccacctacagatttcataaaggatcatgtaaaagagctatttcaaaagcttccaaagtaaacgtacaatgtaaaacatacaaattcaaagaatttaaaaatgagaaataggtataagagaaactgcaataaaagaaaagcagcaaacaaatataggcattcacctcggctacaacactattccttgacccataaaagactgtctctcctcctactagaggctctgattgagattcctttggattctttggattatttttccctttgagaacacctccacttaaatatatcaacaatgtataatgggtgcgctttccctctccaagatttgtactttcatcaatatgcctaccaaaacgttgacccactttgtacctgagaattcattatacatctttagtgatcaaaatgcctaaaaacagatgtttcctcaaagtataaagtaaaatcttgctcagctaatagagtacacttatttcaattttgaatgtgtatcattactttagagaaatattaaggcagggaaaaaaaattataccaacctgtagaacctgatattaggattcaacccaacagcaacttttcctcgaattctaatatcagagaacaattggttaagaccagaagcccatattgtatctgcaagcacaggatcattcactgatatccgatcattatctcggtacgcctctcccattgttggacctagactcccttggtgagtaaaaccaatagactcggcaactctaataaatgcatttgattcaatagaggtaaggaagttttgaacctaacacaaaaataccactacaaattaaacccagaaagaaatattgaattttagcatatactagaatcccaaattatatcttccgtttacagcaaaattgtttagcaagtctaatcagaaggaaaattaacaaaagactactaaattcccaagccaaatctttccatgctactaacaagatgactaacaattcttcaaatttgca

SEQ ID NO: 33146 - DNA, 1918 bp, Cannabis sativa
  modified_base (905)..(908): a, c, t, g, unknown or other
ataaaatccaccattggagaccaaacttcgagttttcaaaactgaaaacttggttccaacaacaacagctgctactacactcctatcacaataatattctcctttaaaaatagccaacaaacaattccaaacccagacaaactttacaaaacctatcaaactcaaaaaccatataaaaatcaacttttttcttccaattcaaagtggagagaatagcttagggcttaccttaaacttctttcaattccaccctgaattcctagctgagatgatgaatgttggtttgaataggtcttctgctttggtttaggttaggccaagagagagaaagttaggagagagaaagagtaagtttattttgagtttattttatttttctctcttagtccttctaataattcagcataaaaatcctttgtattatattaaaatccactaaactttaactaatacttaggtgaaaacttccaaaaatgcccttaatttagctttaaagttatctcttaaactaagggtaaaatgatcataaccaaacaccttgtataacattaatattctaattgtctataaatcttgccttgctaaatcttagatactaaaccgtatcaaagtgacactagtcgccaaatcgttgaatttctactattaacaggcatgaaacataaaaataccaaaattcgtatataacacgtatgacacacctagaactcaataaaatctctataattgataaattatatcactaatgcatatttctgacatcataagcagatgattaataaaccttcttgtccaatgatatatgttaaacaatttcttaatgaaaaagctatgagaaaaaactaaagagaataatttcaattaaaataagaatccaacgatgttccgtttaggcgagagtcaannnnattcttattttataaacttcttcattgtttatgtttgtctaatggtctaatgggtgacaatctgacaatcttttggggattgtcctttgtcctattaaaaatttaaaaataacaaaccaagttagaccaacaataaagatttgaaatttatactacatggttgataacagaaaacaatacatgttcaatataaattcatacacatattcagaaattattaaacatttggcaagtaataaagacatgtaaaaatacaaaacaaacatatcttaaatactttctaagatttctaactagatgatataagtatcccgtttaggcgagagtcaaatatacatcagttgaatagaggtgtcgactcatctaaaatggacactattttagcaaccttttattcaattgaaatgagaatccgacgttatcccgtttaggcgagagttaaggtcattctatttcatgagcttttaccattatttcatctttgtaagccctactcttaacgatcactattggggtgatcgtcactaataataaaaaatttacaataatacttatcttttgagattttacggtgttaaattgctaatgaatgaacatctattagggacgaatctcatttaaacaagaatcatgtagatacaacaatggagatcgaatacccttaaaattaaagctcattttttttaaagaattgtattttcatttgatatatattttaatctatttattttaatattcatatactcatttaattaaaattactaatttagataaatctaaatctaaatttaaatataaattttaatttaatatttataaaattatatacttaggtcgatttgaaaacaaatacaacttttccatccttagtattaatttacaataaatatgataaaaattacttaacttgagttggtccaaaaattaaataaactaattttcaattcaaatttaattttctataaatatttatctatataatcatgatttgaaatccaatgtatttaaaa

SEQ ID NO: 33147 - DNA, 2314 bp, Cannabis sativa
gaaaatatgaggtaaacaactaaacttatagatatatacagacagtacacattaaaaaaattgaatagctgtataaaataaccggttataaaataattttttttttgcttaaaataacaggttacaccagtcacaactatactccaccaagtgaatgtgctagagaaagggaaattcctagtcaatttactagacaaaacatgtgaatgtaaccggttctagcaagatgaaatctcatgtgctcatgcaatagctgtattctcaaaacgaggattgcgagtttacgactatgttgcggactactacaaaactgacgaaatgaaagcaacatatgacacaacagtaaacccattaccaaatgaaagtgagtggacactgcctgagagcttggaaatgatagtcctacccccaaacacaaaaaagagtgcagggagacctaggaggagaagaataagttcaaaaggagagccaaaagtacaactaaagtgtggacgttgcaagaagacaaagcacaacagaaaaacatgcactaatccagctctaccaccaaagcaacaagaaccaaaacaatcaaggcgcaagaaagtaaatacacaataagaataaccggttttattgaatacaaagatacatttacaataaaaaaaaacactatatttgaatttgtatgttccaataattgtttcaatatttgttgatcatgaaatatattttcaaacataattggttttgaaaaaaaaataaaaattttcataatatagaattgccttgtaaaaaaaacaacaaaaaaaccagttaattttaacatgccccaaaacaaaagaaaacaaagaaaatgaaaccggttacatttaaacatgaaccaaatatacatgttctataaaaaaaatggttttatataatatatacaacacaaacaacttaataaacaaaaaaatatataagataactaaaaaaataatcggttaaaaacaaatcaacattaaataatgacctcaaaaattggaaaagaaaccggttaaatatacaaataacattgggcaatctaagtaaacatgaaaaaaccggttaaaattaaacaaaaaactataaaaacaaaacacaatgtaacaacaacacttcacaagaaaaatgtaaaaaccataaaaatatgtattacaaaaagaaaaatcagaaaaacataatatatacaacacaaacaacttaataaacaagaaaaatatataagataactaaaaaataaccggttaaaaacaaatcaacattaaataataaccttaaaaacttgaaaagaaaccggttaaatatacaaataacattgtgcaatctaagtaaacatgaaaaaaccggttaaaattaaacaaaaaaatataaaaacaaaacacaatgtaacaacaacacttcacaaggaaaatataaaaaccataaaaatatgtattacaaaaagaaaaatcagaaaaaactaaaagaatacataaacatataaaaactgattccatatattgtcaacctaacatagaaaatattaacataacataatgtattgttcaaaaaaataaaaaaaaacattaaacaaaactacaaacattgaatctgtccagaacacactacaaatatttatcaaacttattcttcttggacttctttcccttcggcctatcttcagtcgaatatccttcataaatctttttctggccatagttatacaaagtcacagcgaggtcatccatattagaaggaacctcattaatcttgccccggatgaacagatcagcatacttaatcacaaatacaccacattcactgaaaaacaaaatcaaaataaataacaatacataaccagttattaagcagaaaaaataaacaaataaagaatcacagaaaacataggactaaaactaaccagttatttacctgttgctttgagtggggagcttgtccacaaactcatatgcaataggagtatcctttggcacaacataagggcctgactccaaactaatgtcgttcgtaccatcataaaaatttaagaaatcaaggaagtatggcagtaactcacagtacactaggagatcaggcaagatcttcttttgattcgtctttgtattcttcatggaattgaatacgaagatcttcctttttaaaatgttgaagtgaagaaatatccaatggcgttgaacaccgacatgacacggaccgacaacatcgtcaacactaatccaaggctggaagcaaaattatattgccccagaatgtaatcggtgaccatgttgtcgtacctgatgacactcggatcacgtttcgcctttataaa

SEQ ID NO: 33148 - DNA, 1641 bp, Cannabis sativa
gcaatgaacaattgtaatgttcactaattagacatccacaatgcattcctatatggagaccttgaagaagaagtttacatgaaaattcccccaggatatactgctcccctgactccgtttgcctcttaaaaaagagcatatatggcctaaagcaagcctctaggcaatggtactcaaaactgagcaaagatggcttctcacaatcatcatctaataattcattattcactaaaaaaaaaacaaaacatgttcattgatgtgttaatatatgtagatgacattgttgttgcaagcaacaatgaccatgctatattcacttttaagctttctcttaacagcaagttcaaattaagagacattggttctttaagattctttctagggcttgaaataggtcgcacagcaaaggaatatctgtttctcaacgccttttcactttacaatcgctaaaagacacgggtactctaagtgctaaaccaacatcctctcccatggaatgcaacctcaaactcagcaaggataaaggggcattactaactgatcctactgtctatcgaagcttgattggcaaattaatatatctcaccattacacaacctgaaatcacctatgttgtcaatcatttgagtcagtttctacaagaacctcgtgtccctcatcttcaagccactaatagaatattacagtacctcaaaagcaccccaagacaagggttgttcttccctgccaacacctccccaacagtctcagcctatgcagaaaccagcttatctcaagctaatgtacaggtttccttttcgttgatgctaactgggcggcatgtcaggatacaaagcgatccgtttcaggcttctgtgttttccttggccaatccctcgtctcctggaaatccaaaaagcaacaagtcatctctcgttcttctgctaaagtcgagtatcgtgcaatggcaaacgcaacatcagaagttacttggatccttgcccttctccaagactttggcatatctcccaaaatcccaacaatgctctattgtgaaaacacagctgccattcatatcagcgaaaatcctgtctatcatgaacgcgcgaaacatgtcgagatagattgccacttcattcgagaaaaaattcagcaaggctccctcaaacttctaaacgtatcttcacaacagaatttagcagacatatttaccaaagcactaatgccttctcctttttccaacattgtatccaagttgggtgtcataaatatttacactccaacttgagggggttattagaaaatcgaattagtgttgtataatttctattttattttttttgttatttctgttatgaagtcggttaaggctgagctgacaagagttagttgttccaactaacttgatcacctcctcaacctatataaaccaacttagccattgtactcaattcaattcaatggaaatatattcaagcttttctctctccctcaatttctcttagagatattgctaatagcaggatagagccaagattagatagttgggggctgttgaccgagtttttaggcaactaacttaataatatatatgagaaagctgtaggaagtttaatgcatgagatttttacgtggttggggcattaatgagccttagtcaac

SEQ ID NO: 33149 - DNA, 1319 bp, Cannabis sativa
  modified_base (162)..(179): a, c, t, g, unknown or other
aactttaattaaaatccacaaaaagacaaaactcacttaggcaaaatgactattttgcccttccaacacttaaagtcataaaaggtcacttaggggtattttgggaaattctaaaattccgacattcccaatgtttaaactattgtcccgctatactaaaannnnnnnnnnnnnnnnnnaatagccaaacaccgcgttccaacattgccagacacaaaacatgcaataattatgaaatttatatatgtgacataaaaatgcattctgaattcaaataaatcatcataaataattaattcaatattaataaatagttttcataataaagccctaattatcagctaattcccaaattaaggctaagcggtctttacatgataacatctatttttgattttatgcgggtcgaaagtaaagatagggtcaggtgtgccgtttatatgctaggagaggatgcccgcatctagtgggagctttcgtcacagggtcatgacctgaataacatgacatgggatgctttctgggctctgttctacgagaaatattacaatgaatctatcgaagcagcaaaagtagaagaattcatacggttgacccagggaagcatgacagtgacaaagtatgccatcaagtttgatcgactggcaaagtttgcctcagatgaagtggccactaaggccgctagaaaagctaaatttatttgggggttggatgaacacattgcatgagacgtgattgttctcgccaaacaacctaggtttgtttgaacttatgcacagatagttgagttggcccttactgctgagggtgcaaaagatcagatacgaaagaaaaatattacaagaagggattcatggaagcagacgtctagtgctagttctggtaagggtagtgaacttggtgatcacaagaaaaggtccaatgattaataaactacaggactaaacaatagatttcaaagtaaccaaggtttcatttgtggtggaaacaaaaactggcaaacttatccaaagtctccaaggtgcaaggggcgccatcagggtgagtgtcaagctagggcttgcttccagtgtggggtaggtggccacttgaaaagaaactatacacaactgttgtgaccaaaacagaagaaagatgacacccttgctcctgctcgggtatttgctcagacttaggtagaggctgatgttggcccttccactgtgataggtcagcttcctattgttagtaccttattgaccgttttgattgattctggtgcgacacattcctatatttcaagtagagtaattgataacttgaatagacctagtgatgtg

SEQ ID NO: 33150 - DNA, 1327 bp, Cannabis sativa
tcttgatttcgatcttcatcctggtgacctttctaatgagtagttgcctcatgtggatcattggagtcccctactttagtgccagaactagtaaaacaaagactaaacttggttcgagtgagggccgtgattacttgaacataatttgtaattgggctcatgcttccttcagctctcaatgaaagtacttaaatatttaccgagattttcgaaaattaattataatcaataagaactgaagaaataaataactaaaagagaaaaagtaaaaagagacaaataattttttacatggttggggcgttaattagccttactccacgagtcagtgttattcagtagttctttagcttgaaaaattacaaagaatacatattctctacctgagcaagtgttgcaagtgaattcaacccttaatctataagattcgatgggtatttatagtaatttgagaattatatttagtttctcttttctgtctattggggagcatacaatgaataacatacatgggttgcttcgctaagtctagcccacaaaggagacgatttgctgactaggtagattagatttggtttgatttggtcaacaccgtgtgccttgattgtggataattaactttgagttaattgcttgatgcctgttacacaaagtgtccccatctagcatgatatgatccttaatcgagatctgatagctattgttttcttatatttgtatgcagaaatataaagggaatttggatcagtcttttgggaacaagctatcttacccttctagcctcatgataccagacttgccaacgagaatgattcgtcaatggcggaaggctctgtgattgcagagttggggtacattccttgaagaacctatccaatcgggcttggcccaccttttttaggagacccaccgatgggccttggatactgacctaaattctacgtgtccaatgctagaaatgtggataacaataggtctacatcatacaatgtatggtttcttaacttgacacatctttttcttaactggtgttaatttacatttcaaatttaaaataaaaataaaataatatttcaaaaataaatatctttacaatttatcatttttcgaaaatatctccagcataacattggtagctcgtgtcctagcacgagagtgcatcttacttagaatccaggtccatgagtacctattgtcctaatggaccttaaaggtcggcccgagcaaatggaccttgagtgtaggccctccttgatggactttaaggatcaaccaaagcgcatagaccttgagggtcgaccctccctaatggactttctgttggaaa

SEQ ID NO: 33151 - DNA, 2411 bp, Cannabis sativa
cacatgctatcttttgtgtcaaatttgatacacattttagatcactgttagagttaactttttataaaatgttctaaaaaattgcaatacaccacatttatagctttccattggggatgctcttagctttttaatacactttatttttaggtaaatatcatgttggactccgtattttgtaaaagctactaattagacattttattttattaaatgataaattagacctcgtattttttaaaatgatacaaaatatatagcactatcagctgattttttattaaaataaaatttaataataacccgatctagatattttatgacaagacaattggctacaatttttgtattttttcgtgctaagaattatcttcaagttgattatatagaaaaaattattaaaaattgagtccagggtcccaatttatacaattttaaaaaatgcatgcttcattttgtcatttgaaaaaaataaaagattcaattaataacttttgtaaaatatatgatctaaaatgaaattagtcatttgttttttgatatatttttttataatataagtaaaattataagctttcaaaaataaaacaaaataaaataaagcaaaattatgacattaattatgaactatataaaaataaaatcacatttaaatatactacattataatatatgttgagaaatattgctattaggcacaacagatcctaacaccattacaagatgttgtataataaatatttaatatattatataatagtttttaaataaaatacataggaaattttgatagtatactctcctaaagaagttttatttcttatctttttagaatcgagaaactttttaaaaaatttttataattgtgtacattgtagctatttagaattatatatgaattttaaattttttttagataagttgtagtactgaagaaaataaatttcaaacaattacttaccacacgtaaagaaaaataattgcatgtacaacaaaatatttaaattttgttttctttaactttctaaaaatttacagtgtcctaaataattgtagaaatcttttactataggaccttcaaaaaagaccttataagtgaaggtaatccacaacgtataaaaaagtgacacgtggtagtttttttgtgtttgagaagtaagtgattattttttaattctaaaatacttttcgtttcttgcccttcactagaagattgggacgaagtcttgatacccacctcctttccgttgtgcctcatctccatgactgtatatgtatctttccacattctattccttatatttgattttaatctcttaatttgttagtgctacatatgacgatgattgtgtttatttactcatctttagtttatggagtttgatatcattggtgtaggatttttattccctgactgaccctacacatagcacaaaactaatcaaaagctaaggtcaattaagacctttctcacccagtcaaagcacctctgttgactccctgataaagaacctaaacgacagcctctagttatcaactacaggttgttttcaatttaaattagtaaccctaaaagcatcagacatatatatacatctttatcttcgcaaacatataaacaacaacccaaattcaatgtttaaaccctagctgtgagccctttcagcaacagtcttcttcttcgttgttcttctctgaagaacacgaagcacagctgcaacataaacccagaaacaacgcagcccagattaaagctaaaccccaaaatcgagacactcttctttgtggttcttctctgaagaacacgaagaacacaacaatgaaacccagaaaaacgagagatgaaaacaccttaaaccgattcaatacccaacccagaaatcacataaacataatatagaaattgcagaaaaataaaggaagagaatacaccagatttatagaggttccccaaaaaacaattgttgggtacatcctcttgagctcgcctcagatagctcgattccactataaagatcaaagagttacaattgttgattccaaattacaggtacaatctggtaatactttatgtttacaaattttgtttctctcttctctcactgtttttctcactatgtttaatctctaatcatctatctttctttgtttctccatgaatcaatctccctggtttggtgttgaacatccgagctctaaccctaaggctccaaaactcactcaaagtaagtctctttcaactctccacttttctggatctgatcatgtgattatcctggtcttgatctgatctgctctctctttttgttgctctgatctctccatactgatctgatgatatttatatgtgttatagtggaatgcagtaaaaacatgagagttagttacaaagtggttaaatactttgtaac

SEQ ID NO: 33152 - DNA, 1232 bp, Cannabis sativa
aggctattaccgcaagtttgttgctgggtatgctcacatcgcttggcctctgacagaacaactcaaaaaagataactttaggtggaatgaagaagctgaaaaggcctttcataaactaaaagaggctatgtgttcggttccagtgctggctatgcccgacttctctaaaccattcatagttgaaacggatgcttcaggatatggtcttggagttgttctcatgcaggaaaactaaccaatagcttatttcatccatacaatggggccaacaagtcgtctcaagtctatttacgaaaaggaattaatggccattgtttttgcagtaagtaagtggaggccatatttgttgggtcgaagattcattgttcgtattgaccaacaaagtctaaaatttctgcttgaacaacgaatcattggcagtgagtaccaacggtggatagcaaaactcatgacatacgagtttgatattttttacaaatcaggcgctagtaacaaagtggctgatgccttgtcccgaaaaccagcaacaacagaactcaacaacattaatcttccacaatggcaacattgggataaattacaggaagaggtccaacaagatcccttcctcaagggcatcaagcaagacattcagcaaggtaaaaccccatttggattcaccctccaacaagacacggtgctctataaagggcgaattgtgattcctaaggggtccactctaagacacaccattttaaaagaatttcacaactctccaataggaggccattcgggagaagagaaaacttatcaaaggttaaaagcaaaagtgtattggacaggcatgcgaaaaagatgtgttgaaatttgtaagtgaatgtccaacttgccaagagaacaaatatgcagccaccacacctgctggtttgcttcaacccatcgctttactggcccaagtttgggatgaaatatccatggatttcattgaggggttacctaagtctgatgggtgggataccattatggtggtggtggataaattgagcaaatatgctcattttatacaattgaaacatccttttacagcagccataatagctcaaacctttttgaaggaggtcgtgagacttcacgggctaccactgtccatcatctcagatcaggatcgaatttttaccagtcacttttggagtgagccatacaaatggcaaggtactcacttaaagcgaagcacggcctatcacccgcaaact

SEQ ID NO: 33153 - DNA, 1802 bp, Cannabis sativa
ttgtaactcatgaatcacagtagattaaattgtgtaaataagcgagttattagaaattcaaaaagttatgtttctagtcattaaaaacttatataggactcatttatatcattaaaatgaatattgagacattaggtgtgaattggttatgagaaaagttacaagactccatatttggatttgttgaaaatgttggcaacatgtcgcctgaaagtattttttgtgaaaaacttgtgaaacatttcccaatgcaatgagggtgtcaccaacaatcgataccaatgtttagaatcctatttattctcatattctgactagtaacatctatgggatgtaaacaagcttaaaattcaaatgtttaccaagatttttagaaaattaattatcagaaattaaaactcaagaaataaataattcaaagagagaacataacaacacttaaatttttttacgtggttggacgttaaagagccttagtatacaagtcgatattattatgtatttcagctagaaaagccttttgaaatacaatgagtatacattttctatttttgcctaagaaaatattgcaagagtgttcaacccttaatccgaaggattttgtgagtatttatagagtttatagaaattatacttattttctctttccctctaatggacagttttcataaaacatacacaagttcaaagttgtattcgtgaggcccaaccgatgggacgatgagtttcttaactagggagattaaacatggtcaagttgtcattaccgtgtcctttaattgtgggtaattaattgtaaattaattacttgatcttcattttaggtagtttccccttttaacttgatacgattttttggctgagatttaaggagagttaattccttattctgtccaattgataaaaagagaaattgttctaggcttctaggaacatgttgtctggccttctagaaatgcggtactgggactgcttccagatacaggttatccttggcagaagctttgtctgaacgagaaaggtagataccttctttgagggtcttgctggacttgggcttggccccagttaccttcattgggcccactggtgcgctttggatgctgacctagagaccatgtatcccttaccgaaaatgcaaataacatttacctccaagcttccaaaatgctatttattgtggaaacttgtcccaatccatatgagtggacatgtggaggttaagagtaatattcttattgctttccaggttctagttgatcgcagaaggtggacttctatcttcagcttgaggaggtaggcgtggcagtcatctagtggtggaggagtccgtttacctaagagttgctttccagaaaagtttttatttcaacggttgtttattattaacacatgaattaagaaaagtactttcataattggttgttggactttcaagccacaggatatgtttatgcttttggagatacgatctgtatcgttcatttttcttcatgcggataaccattttgagtataaatacccctaaaagctaccatttaccattttttcccatttcaaattttcattcgcccaagttcaagttttcttgagagcaaagtacggtgaaagattttagttgtgaatgaacccagatatctcctttgaattgctttttgctttagaaattatcttctaccaaaccatccacgcccattgatcaagtgttttcataggagtgacctggtgaatcttgattttaattctaaaatcaattcattgattgccttagccaaccatattcgtgaaaggtgtgctcgctt

SEQ ID NO: 33154 - DNA, 1231 bp, Cannabis sativa
  modified_base (43)..(51): a, c, t, g, unknown or other
  modified_base (762)..(768): a, c, t, g, unknown or other
aaaaagttcagggggcacgatttactatatgtcaaagttcagnnnnnnnnnttactaattagccttttattaataagaagaatcgtcctattacaatagaaaataattgagtgaaagtataattatttattcctcgtgtaataatttattactttattataattttttcttaaataaaagtaaactttattaataagaagaatcgtcccattgataattaattacaatagaaaataattcagcgggagcataattatttattcaatttgtaataatttttcttaatctattataattggtttttcatgactgcaaaaagatcaaatatagtactttaaggatattcaaaatactagtgaaaaatatgattagattaaaggaaaatttatttatttgtaccttataaagttataagtgtatacttttatattaaaaaataattaacttaatttaatttttaaaaataacttttaatattttttttttaaaaaaaatcactttatgttcttttaatattaatagttagttttattttatatttattttcataattttttttttaaaattatgtatgattttttttaataaaatttcatctaattttttatcttaatatatgtattttattttttattttatagatatattcttttaaaaaatatgagaaggaagaaaaaaattaatacaaattaaagatatatattttatacaaaataaaaattatttaggggaattatcttatatattatttttttaattttnnnnnnnaatttacggtttgagtttctaaagtagttacagcactagttgtaataggatttctgtacgattttttgttataatttaggttgcagcactaattgcaataggggtttctatgtagaatttcgtaaaaatacacaaaaaaaaactgtttgaagtgtaaaaataaaaaaatctcaattatttaaataaagtgtatttataactttatggactataaataagtttttttaattaaatgtaactttttttaaactactgttttgcactcatatataggcaactattattttttatttatacatgtatataacactcccatgtattatttagaaagaacctaaaaaaataaacaatgtaataccaaataacgtttggactttatattctcattattgagtgaaataatttgcataccaaataacccataaatcattattttcagaaaaaaaaaggagactgttctaac

SEQ ID NO: 33155 - DNA, 1619 bp, Cannabis sativa
tcacagtttggtgatgttccaatcgactttcgtgagacagaagtaaggcctggacttcctccatagtaagaacatcacttcttgatgttattccagacaccacataatcgaattctgggccaagaccattgagaagttgaagaacaagatcatggtcatgcaccggagaaccagcaacacttaaggcatctgctatggactgaactttgtcgacgtattcagaaatggagagattccctttctggatagtggaaaattggcccttgagctgaagccttcgagcccgtgtttggctagcaaatttctgttccagtgcgtgccatacaccagcagaggaattgtagtttgccacagaggcaagaatgctctctgtcatggaggatcgaagccatgacagtaagagttggtctcgtctgcgccatcgcagaaaatctgggtttgggtcccctgtaacaagatgttgaggaggagggacacccgtgaacaagatctcatcgagatcatggccaatcacggtgggaaccacttgagatttccaagaaaggaagttcagtcgatccaatttgagagtgagagaggaagtgagggaattagagaatggattccatgttgcagttgcagggacagtagcaggaggggcattcgccatagatgcacgagctgttgaagaagaggtattggccattgaagcagaagcaggatcgagagacgtgagtcaacagtgtctgataccatttaaaagaacagagagaaaagaatgctaattgagattagctttacaaaaactaatcaacaattagagaaagcttttatttatactacagaaagtctgttacaagaaagagaaaacaaacaagaatgtaactaacaactacctaactacacataacagaattaactaacataacggtcacacttatgtgttatcatatattgtattccaatttctattatatatcattgtatatcataaattttaattagaggagacatttaccaatttcaaaaaatatcaaataatcatttacaatattaaaaacagaactcaagttttacgcgtattaaaaaaatagtatgtgcaactaacttctaaaatttattttgagcagtgtaattttttttaaaatttgatgaaaattaataggagctctctacctaatattatagcatggtaagttgattgtgagagaaataacctagagctatcatgtcttctacaaatatggaataatcgttttcacatagaaccgatcttccatatctacaagagggaggttagttctcacataatcagcttcccatgctcacttttgaccaacatgataggcccattttgtataaaccaacttaccaacatgttgtggttcagtttaagcaaaaccgatctctcatgattgatggtagacgttcaaattaaagtaatagatatttgttatataactataatatgtatccttatatgagctataatttctacaagcaccaaaaaaaaaaatgattatcttaatttgtacccacaaaatgaataaattatcttaacttgtatacttgagttccaatttctgttaacttgtacaccttaaattatcttagatcataataattatataatattcatt

SEQ ID NO: 33156 - DNA, 9650 bp, Cannabis sativa
  modified_base (3239)..(3239): a, c, t, g, unknown or other
  modified_base (4033)..(4037): a, c, t, g, unknown or other
  modified_base (6916)..(6919): a, c, t, g, unknown or other
atattaaaataaagtcatacaaaacaaattaaaaatttattggtgataataaagtgtgatttatttttcttaattatatagtaaaaatctgtacattctggatgaagttatgagaataaaatttggaaatttctactagttctgtagaaatttataaatagtaatataatataattgcataattattaatatatagttttgaaatttaaatgaatcatatttttatcaatttataaacatgcttaaatatgaaatcttattaaacaaaagttgtctatggactaaatttttaatttaataagatcagatttagatttagattatggtagatttaaatcatttatgaaaaaacttagagttataattttctatctcaatgaaatgtgtgaaacatttaattatttaaaatattttaaaattttatactttataataaaactattgagttaaatctacataatttcctacgggataaattaagagaatttactttaacatatcaattttatgaacataataaaatttctgtggggtaaaattattttatccacataattaattattatacatgtccattatgtgatcctgatccacttaatatatataattttatataataaggatactgtggctactctttaattatttaaaattatttggttcattagactctaaagtataaattgaagacgaaaaattttactaaatctaaaattttatgtgggctaaattttaaataaaattagatgaactgtatgatagatataattaaacaattagtttaagaaaaatgaaggtttattatctatcttaattaaatttgtgataacactattaaattaaatccccataactccctgtgagtaaattaagagaatataatttaacatgtgatcctagttaattatataaatatcataaaattctcttggagtaaagttattacaactatataattaattacaaactatgtccattaaggggaattttatataattaaaaatgttgtgactactcctttattatataaaattatattttcacaatgacattaggtattgggctctacctaaaagcagtttcgttattaacacaatagacaatcactgagattagtgcttctagtgtggtcgtccgaagatcattaaaaactgttctagatatgagcatttatttgtgtttcatgctttcttatgtcaaaccacaaaaattgcttacgttttactcatatgttatttattttatgagtactttatgaatattttatgaaaattaatgtgctaaataaaatactgaacctatattaatgtttgaatattttcttaaaatatctagcactattatagaattaatatataacatttaaatcttaataaattgcactaataataaatttacaaaaataaatataaaatagtactattattataggataataaattaaatacaaattccataatatataataactgacaaatttttaaaaattcattaatttatacaataaatcacttaaatttagtaataaatatttaaatgcacaaatataataattaggataattattacatgcctaaataaatcatttaataaattaccaaataaaaaaaatccacttttattttatactaaataacatataaattttaaatatacgtatcaaataaaaatagaaaaattgaataaatgcaatttactaattaaattaacacaaataagaaaataaaataatattcaaaattattaaaactttataattttttgtttcgaaaatttgctgccttaaatgacatgttgttttttgttataggcaaaaatgacacgtcaattttttaacaaaaaaggttgtataaatttggaaaacaacgataattttccgggtagcaaataggaagaaatgacgctccatttgcgtcttcttcttcagtgaaccgagtcaattttgacctattttttatgtgtgggtcaagcggatccgacccaaatttggtcggaaaatacaattttgacgaccgaatcaatccacattaatttcaaatgagtctaaaaggaaaaaaactaagacacttatataaatttcatacatcaaaaatatgtcaaaatgaaactttaattttataaaagaatttcaggtcttagtgtatattaccagaaaaattttgtcaagtttcatagttttcaaatcgatttcatacataaaataaacttatagtattatatgaatgtattaataatgcaaagagattcgaaagccacacgaaaaatgaaaagtaaggtttttcgaacaaaatcgaccgtaaccaaaaatttcatgtgtatatatatacttacatataatcattatactgcttaaaatatggtatatataaaatagattataataatcaattatatgcaataaaattatgaaatcattgtaaaatatatacaaccatatatgtctgaaatatatataaatataaatatgtatatacaagaaaataattaattttgatgcatagtaaatattaatatagaaagaaattaacatgaattaaaaatattaaaatgaaaattttacgagtatctgccattaatgaacactcgaatcgatcgtgtatatatatacatatataaaaaaaaacttaatttaaatcaaggtagaaataatactgctctgatactaactgcttgacatttatatatatgatatgaagcagatataatcatgtataaaatgcagaattaattaaacatatatgtactatgaataaatgatcaaaatatctcaaggcattgattctttgagcttcaatctcacactaactttagatttgtaaaagaaaaggaaacttatcggtatgggtaatcaggtttctaagctctctctactctctttagatggatttactgtctttcacaaaatgagtagtgagttcggggatcgataccctatatttatataggtgggaccttccatcaagatctttgccacaattaattgtcagaatatttaaacaattaattctaaaaattaaatcgggtaactgaaatattttataattaaatctgaccatcactacaaataaatctttcttttagtcacaataaagcttgtgtctaaagataaaaaaagttgtgactaattataaattatcatcattatgttatgactaaaatgttcattgctaaaagtattagtcacaaaaatcacaatttgttatgactaaatctggttttagtcacaatatttattgtgnctaaaactaaattagtgacaactcgtatctaaatactaagttttaattacaagtaattttttattgtgattaaaagtcacatttaattacaaaaatttatgttgtgactgaaaaattatcactaaaggtaataattttttgtaatgcataattaaaatattttaattaattaataagtaaataattatattttataaataaatcaaataaaatatttaatttattactatataaaaattattctaataaaaaaaatatcatatcaattagactattgaagagtgaacaatgaccatgagtgaaacaagcatgtttaaacatagtttccatgtacgtcttattattataagagattgtagagtatatttatatatataaaaaatttcaaagtatgaaaaaaaaattatatttataaaagtaatttgtgccatatataaatatttgaattgaacttttagttgtaaataaatgtttaagtttaatttttgggataataatatataagttataattttaaaatttttgtattcacgtgacaatttttgattgatccaagtaaatttttattttttaaaaaaattaatttaaatataccatccagaaaatgatacgtgtataatgacttaatatttaatacataatttcaaaaatataattttgctattattaccgctaaaaattaaacttatgtatttatttataacttaaagttaaagttaagtatttataccacaaattattatatttataaaatttaaaacttttgttttgatgaataataataataataatannnnnaataataataataataatatacagtgatatgtggcattaatcgatcagatttagacccatatctcaaaaaacgagcagctcaatgacaatctatttgacataaagtagtgcaaattatcagtcactgctagtagtgcattagcacaaatccaattaagagtaaatatatatttcataaaagatgcacattttgtttgtacggcatggattaacccctaataatcaatcatcatgtatatttctttttgtaacaataatacatattagcttgacttttcattagaaagattaaattaagaaaaatttacataataactaaaaaatttaaaaaaaaaaaattgggaaaatacatcagtatagaaaaaaatatatatttttccttaaatttttttatttacaaaaatatcttttcagtaaaaataataaccattttcggttattttataatttatttatagttgtattatattaatcacgaagttatttttctgatttttttttagttgtcgtgagattgatttcttgttgttttttacttgtttttttagttttttctaaacaaaatatatttttataattttaaagcttcataagcatgcttttataaataaaaactttagactaaaaaattataaattaaatattttaaaaaaatacttgtgaaaatttctcttaaattaacaagattattgctatgattatatatatcatcataaatataacatataatcgatgatacgtatataatttgttttcacttaattaatacttgtttactgagtttttaataaactgattagaaaataaatagagcataagatataacaaaatgaagaaaaaaatatcaagatttttacgtgattgggacgttaatgagttttagtccataagaaaatttaattagcttgaaaagtttagatgtattacacacaagtataatgttcttgtctcagcttaagaaccttaatttcagtcttagcatctaaaaaatgatttttcaaccatttgcatgaagatatatgtaacaccctactaatttaagcgtgttatcatgatttctaatactgtatatttctttgctaatctaagactttatgaaaaaatatgaataaattaaattttcataattaaattttaaacatgatatataaatactttacataatttgggatcctgtatttttaaaattacaaccattttacaaaatacttaataacaaaagttgtcgcttagcgactatcataataagacctgctatcacgaagatcgagcactctaggtctaattgcttcgatatgtacattcttcatccgctcgtgctcactgttgttcagccttagctttgcttttacctacacatataaaaaatatatgtgagtcgataaactcagtaagaaaagcataatcataacataaacataatctggattatgactaggcgtctatacacccaattacaatcctatcccgtgtcccacgcatactgagtctagaatattcgtacaacatagcctagcatatatatgtcgatatctcagtgcatctctatgtacacttcactaatatcctaatatgctaatctaatggctactgatatgcctaacatatatctattggtatctcggtccaactctatgtacacctcactaatactctaatatgttattctaatggcaactcatatgcatgctaaacatgtattcatatatgtaattattatactagtcttacattgatttcgaattcaggtataccggtcaacctgagtagaaattgctgctccacgatttacatgtccctaagtcacaacatatgtcaaactaataagtgatacgttaaataatttttcagaaatttagactcaaaactaaaagttttcctatcggtagatagcatggcaatactctaaaaatctattaaacaccaaaactaaggctcctaaaattgctactactggtaaactggattcccgaaatggtaaactgttttttgagtcctacctgggaaactgattaatcgtttctctacaaaaattccaaataatttcaaatcttgctcaaaacatcattaactcacaccaaactctccaaaacacctaataatgacataataaacataacccaacaagtatttgtaagaaaaaccacctaaacttgatattaccattagtgacctaagtttgagcttaagagctcaaattttggtctttctccacaagagaaactaaaagtagcaataagcaacctaaatatcttttaaacaacctcagaaaataattcaaaacatcctcaaaccaaacaacaacccaaatccaataatattcataaagactagattttctactttaaatttcaaaggaagaaaggaagagaagcttagcttgagctaaccctcacttaatctaccaaaaccctagctgaatatctttgattttgatcttaaaataggaggaaaattctagtttttccttgggcttctacttggccgaacacaagagggaaagagaaagagttggtgaattgtgtttttcttgatttttcattaatctttagataattaaaacatgattatcaattcaccttatatttatcaataataagcttaaaaaaaagcaattaaattctacttgaactatatgaaataatttaacataaataacaatttcacctttgcttactcaataagtaactcaaatattctagggtaaaataatctaaaaccataatcttaaatattcccggctaatttagcctgctaatactaaagaaataaaccataaataaattattatataggccaaacatcgcattccactattaccgagcataaaatataaaaaaaacttaaaatttcacatatatcataattaatacacctannnntcaaatatatctccataattgtaaaaataataatttagagcctacttctaaaaataagccctaattatctactaatttttaaaataaaactaagtggtcattacaattaatagcccctgttaaaaggatttcatcctcaaaatctaacttgaacaactccagttattgagccctcatatcggactccaacttccaggtgggttcctccactttattatttcttcagagcacttttaccaaagctattgtcttatttcaaagaacattatcctttctgttaagaatcaacactcgttgctcctcatatgaaaaatctagttggagctctaagctttcataagtcaacacgtgtgggatttgagatgtattttcgtagcatagagacatgaaatacgttatgaactactggcaatgctagagacaaggctagacgatatgcaactaaccaaccttctcgagaatcttaaaaggccctatgaatctagatcataacttgccctttctctcgaagcgtttaatccctttcactagagatactcgttgaaatacaagatcccctacctaaaattctatatttatgcattttggatctgcataacttttcggcctactctgagaggcaatcattctggccttaagcttctctattgcctcattagtctgttgaactgattctggacctaagtatcttctttctctaattttatctcagtgaattggagatctacatttcctgccatacaacatcttatagggagccatccttattatactctagtagctattattgtatgaaaactctatcagtggcaaatactttctctaggagccttcaaaatccattacacaagctcgtaacatatcttccaatatctgaattattctcttggactgaccatctgtctggggttggaaagctaaactgaactttagctttgtacgcatggctcgttgtagactttcctcaaactttgaagtgaactttggattcctatccgacacagtggactttggagccccatgtaattgtactatttcctgtacataaagttttgcatactgatccactgtgtatgttatttttactggaagaaatgtgttgaccttgtaaatagatctacaattacccatatagaatcaaacatacccgtggttctaggtaatccaactacaaaatatatggtgacatcctcccattttcacttaagaagagtcaaaggctgtaataaccgtacaagtctctggtgttcagccttaatctattgacaagtcaagcactgagatacgtattctagctaccacatccttcttcttactacactgccagtaaaaaggtttcaaatctgtatacatcttggtggtgccgggatgcaataaatagggagtggtatgagcttcatcgagaatctctttcctaagttccaaactacccgggacataaacctgggttttaaaaagcaatatacttcttgctaataatgagaaatccttagctttcctagctaagtcttcttctcggatcttcattaattctggatctaccaactaagtatttcttactctgtctaataaatctaattacagtgtcaagttattaagtttacgcactacaaactcaatacttgatttaaccatgtcatttcccaaccatgaagaaatcataatcgtgttgaatatctgcgacagacctttcctactcaaggtatcctccactacctttgtaatatcccaataagcctaatggtaaataattagggtttatatttatattatagggtaattataagtgtgattatgatcctactaatatatttcaacataaattttaaatctattataagtggaaaaataagtataagttattaattacagagatttatatagcatgtgtgaatataatgtgagctatatgtggaataaaaatatttttaagtttggcgtccttggagactcgatcaagcgctaaaaatgtcatcacaagttcaatgaatagattggacggaaatattatgataagttgatagtttaattattgggttgattagaagtatatgagatttaacctagtgccattgaagtggagatttcttaatagctaagaaatgataagataactattatcaataaagtttttattaataatatattaacattattcttaatattattaatattctgatattttattaatatatatattaaatttaaaagaaaacaatacggacaaaatgaaatcttcttctgttctctgtgcgacaaaactctcatcctcctctgctcattttccttaactttcaacccataacctagagagtcaagctccgataatagcgagataataaatcattgaagagggaaagcttaaggcaaggattggttttgttttaaattgaaaacgattggttttatatagtgactttgaatttagagtaagattaatttactagagaggttatacagttttagaatgatttcttccctttctttagaagaatattgatttaatgagattattgtaggattaacaaatacatatcacaaagttgatcaagaaagtcaggccataattttgctgagatagcttccaatcccatatcaagaagtcaaggctgttatcaagtatggcagagacatgattgcattgaaggatgttgtaatatcccaataagtctaatagtaaataattagggtttatatttatattatgagttaatcaggtaataagtgggat

SEQ ID NO: 33157 - DNA, 1147 bp, Cannabis sativa
atttatgtcaatagttaaaaaaataaaaaaatttaaattatgtataaagtaggaactcttatcctacacttccagtttctacagttactacagatcaatctttttccactatgaatatagtgaagattacacttcgcaacaaaataaaagatatatttttaagtgattgtttgctagtgtatatatatataaaaaaaaaaaaaaattagcataaattcacttatatatgactttcatgatatctaagagagaggtattgtattttaattttaattataatattagtaatatattttaaattatctgtcatttaatttataatatagtttggccctcgttgaattttgactctggctccgcccctgccagtaataccttttacaatcagatcccatttaattttataataattttcagggactattactagtcaattataaaataatatatctaaaaatattaaatatcacttatacctaatagcaatgctctattattactctactatttttgcccataacactacatttactactacttaagcactccttaaagccttatatcaaatagttgttctcccttttcgtgtttttgtacagcatgtatttaccaccattactcatctctaaatcattattagggtgctataaaaatagtgtatttcttttttttaaaaaaaatattttgataaaagtaaactttaaagatggtgtaaaatgtgtggtaaatttaattgatgttaaaaattatattaaatttagcacaaaaaataaaataagtcatattttagtctacaatatgttagaaattttatatatatagataaaatatataaatgtgtatataaaatggagaattaaataaacatatacacaatataattgtaggatcgaaatacctctaattattgattctttgagcttcaattccacacgaactttggatctacaaaagaaaaggaaattaattagtgtgggtaatcggtcttccaaactctctatactctcttttgatggatttactgtgttttacataatgagtagttagctcgcagattgagaccctatatttattaaggtgagaccttccatcaaggtctctaccacaattaaatattttgacaattaattcaagaaattaaatcaag

SEQ ID NO: 33158 - DNA, 1277 bp, Cannabis sativa
aatcaaaggcatgtaccacatcactttttgggagataagttttctattatccttattcttgtttattttatggtgggataaaccacaagttgtgcaattgtccatgtcttcatattctttatgatataaaatgcaattgttcagacccgcatggatctttttatacttcaaccctatagaagttaaagttttcttcacttcagatgtagattcctggacgtaattgtcaaatgaaaagatatcttttaaaacagctaaaaattgagtaaatatttatcactcacttcattttctgctttgatattgtaatactttaccattgttggtaatcttagttttttacatcaatcgaacaaggttttatctgcatcacttagaaaattattgaatttttcaggatcattaagaaatttctcttttgcttcgtcaagcaagtctattgaatgatcatcgaaatcattaccccaaatatcatctacctctgcttccctaatggatatggatcatcagttaaaatattcatcattctaataccaagtagtataacttctattaaaatctctaaaatacacatgagccttaataattgtaatatttcattttaatctattatagtaatatatacacatggacaacgaatacgttcgagatttctagaattctttagggaaaactctataaattcattgaatgctacttgaaattgaagtgtctctctcctcacgtatccatgatttatccataatgaaaatcctaacaaaaaaatcagaatatttagtaactaattataactagttattagttatgtaatgtaactaactagtttctcacaactatttaatatttatatattactctaattcttattttaatttagatcatgttattatattactcattttaaatattaacatgataactagtaactaattgtaaatagttactagttatataagttgtaattaactaactactttcttacaactagtaactaattatttgtgttatgtgtaatactttttatttaatatttatgcatttttagtaaaatttattctaattttaccgaaaatttgacagcataacgactgtaattgaatattcccaaaaaatttaaacatgtcgaaaataagaaacaaaacatataaaacaatttaaagcaaacaaaataacattaaaaatacaaaaattatccactcatccgactgcggtacatgtattcgcagatgctactttattacggttgaatatttaagatattcaaactcaactaacat

SEQ ID NO: 33159 - DNA, 1197 bp, Cannabis sativa
tattttgaaaaatatcacttttagtagtattttgaaaaataacacttttcacttaccaaataaagatcaaggcagtcaatttggagatctcgaagggtgttgtttagtgctgctctaaccttatcaggggacaagtctgagcacctataatttaacatatttaaacatatataatatattatcttattatttcataattagtgatcattaatttggataataatatttcatattgattaattaatgttataattaccatatcttggacgtgacaaacatagcccttctttcaacccctgcttccatggctgattgcaaagcacgcccaacctgttcccaataaattaaattaaattaaattaattatcatattagaaataaataataacattatcttaacaatgtttatgtttatttattaaatatataaatgagatatttgtgggtaaaaaaataaggaaaatagcggcataagtaaccaaagtttcatatttatatgactttagtaaccaatttttttttttaatggcaaaaatacacaatgttcacttctgttagtatttgttagtacccaattcaattctgttaatttgtgtacacgcgtacaattcagattaattcactcatttactaagatgtaaaataatgagataaaaacaaaaattatattagtaaatgggtgaattaatatgagttgtacacgtgtacaaaaacggacagaattaaattaggtggtaacaaatactaatagaagtgaacattgtgcatttttgccaccaaaataaaattgagtacttaagtcatataaatatgaaactttgagtacttatgccgctactttcctaaaaaaaatctagaagaaaaggaatatgcctcttcttgaactccatattgtgcagctgtatctatgtgtctgtaaccaccctgcacccattaatcataatataattaattagtagtgataaataacataaatagatgagtgttataattacaatcacctattacattttattttatttttcttaattattgtctccaaaaatacaatggaatattttttaaatttttttatgataacgttcgtcataatattatataaatttttgaaatttttaaataatttactgtattaaaaataaatttcatgataaaacatgttaaaaaaagttcaaccctaattttctattcgaatct

SEQ ID NO: 33160 - DNA, 3113 bp, Cannabis sativa
ttgaagagcaagaaggggtcatctgtgcccaaagattgtaaggagaaggctgaatattcttgctctgataatattgatgttggtgggaatgaaaattagttttccgatccaccgtctccagaggtattttttctttttagtttgttgtttctgtttttttaaccagttattttttattttctttggtcttttatgtttactgttttttttttttgtgttttataaccggttattttattgcactttctgtttattctattcttttgctgtttagaaaccagctatgactttgttttttgttctatctttgtaggttgtgtcaaaatccaatcttcctgaatatgatgacgatgaaggggggctacaattgtcactcgttcgggaagataaggttgtatgtttgtttctttgttataaaggatgtgtttattataactagttttttttagattgtaagtttaattgtttcttgtttttattctaggttcactctggcttaggcgatgggagggaggagggcagtgttttttcgtatgaaatgattacagtcgaccaatccattttggatttggttgatagaatcactcaggcatattcttccccactctgtgcaaagaatgagaaatgggatttggtgtcaattcctgagtctgcatctcctgctgtggaagatgagactgaggttctagatgttgtgcctttgcattccagtgttgcttttttaagagacaagcaaaacctggagtgcactgtagatctccgttcgtgaacgagtttggttcttctgaaccaaaaattcagaataagaagaataaggaggcatctagtgaattatcttttgaccctaaggagttgtttccctttgttaaagatgattgcgggggatatgttaagtggattgaaggtgctaggttgatgaagaaaaagtatgttttttattgttgtgttattaattttgtttttaatagttgctgagatttgttttttaactggttttttttttcattttggttttttttttctttgtgattttaggaataatgagaaaactgctggcgacattaatcctccatttgatttcagcatagctcagattaatgacaagtcttggtttgtcattttacagacttgtggtgaagaattgactgatctggtacttaactggttattttttctgtctgtttttataattaataatttctttgctttttttaatttttaactggttattgtttttgtttattgtgtgcagcatctgaatgttgcactttactatcttaggaagagcatattatatgatgccagcgttaataagagagtgacaacgacatgctcgtattttgatgcaactcttaagggagtgtatgctgaatttataaaggcaaaacgtgatccaagtgtcatcaggtatgacaacaaggtcaccgattacattttggggcaatataacttttgcttccaaccttggatcggtgttgacgatgttgtcggatcgtgtcatgtcggtgttcaacgccattggatatttcttcactttagcattttaaggaggaagatcttcatattcaacttcatgaagaatacaaagaagaatcagaagaagatcttgcctgatctactagcgtactgtgagttattgccatacttccttgatttcttaaatttttatgatggtaggaacgacattagtttggagtcaggcccttatgttgtgccaaagaatactcctattgaatacgagtttgtggacaagctccccactcaaagtaacaggtaaataactggttgtttttagtcctatgacttatgtgattctttatttgtttattttttctttttaaattactagttatgtattgttatttattttgtttttgtttttcagtgactgtggtgtgtttgtgattaagtatgctgatatgttcatccggggcaagataaatgagattcctcctgatatggatgagatggttacgcattacagggatgacctcgctgtgactttgtataactatggccagaaaaagatttatgaaggatattcaactgaagataagccgaagggaaagaagtcgaagaagaagaagtttgattcttgttaaatatttgtagtgttttctggacagattagatgtttgtagttttgtttagtgtttatattttttttgaacaatacattatgatatgttaatattttctatgttaggttgacaatatatggaatctgtttttatattttcctttgtgaagtgttgttgttacattttgtgttttgttttctatagtattttgtttgattttaaccggttttttcatgtttccttttgggcaatccattgtgatttgtatatttaaccggtttctttccagtttttaaggtttttatttcttgttgatttgtttttaaccgattatttttttagttatcttaccatatattttttgtttattaagttgtttgtgttgtatatattaggtttttctgatttttccttttgtaatacatagttttatggtttttacaaattccttttgaagtgttgttgttacattgtgttttgtttttatagttttttgttacttttaaccggttttttcatgtttacttagattgtccaatgttatttatatatataaccggtttcttttctagtttttgaggtcattatttattgttgatttgtttttaaccggtttttttttagttatcttacatattttttttgtttattaagttgtttgtgttgtatatattatgtagaacatgttttttttatagaacatgtatttttgattcatgcttaaatataaccggtttcattttctttgttttctttttgttttgaggcctgtcgaatataactgatttttttggtgtttttttttacaaggcaattctatattatgaaaattttcatttttttttttcaaaaccaattatgtttgaagatatatttcatgatcaagaaatattgaaacaattattggaacatacaaaattaaatatagtgtttttttttattctaaaagtatatttgtattcaatgaaatcggttattcttgttgtgtctttgctttcttgtgccttggttgttttggttcttgttgctttg

SEQ ID NO: 33161 - DNA, 2273 bp, Cannabis sativa
  modified_base (48)..(69): a, c, t, g, unknown or other
  modified_base (588)..(597): a, c, t, g, unknown or other
gtaaaagctatcaaaataaagagtatgaacacagggttttttacgtgnnnnnnnnnnnnnnnnnnnnnntagtccacgagtcaatcttattcatatttctaagtacttttcacggcctctttcatatgagttttttcgtccccctttcttgatcttgtctgttactatttataattacagagtgggcactaaattacaaaagttgactgtaatcgttatagaaattattccctcaaataatgggatttgattacaaatcatgctaagtaaatgaggtttttatttataattcacacagttgtgagtatcccgcttttattgggccgagatgaacgcacatttaaggatatacaataagccttatctaatggggatgccttgttaggaatggagccgagttaactttgatggtgagctgtgactcgtcatatgatttcccgaaattaatattgttttaacttcgataactatattttctggtgtcgagattatcttcctcgcatgcatgccatcttacaacaagatagaagcctcactatctattatcttgattcactatacttttcatacttagtttgtataccatgnnnnnnnnnntaagtgtttttatcgttatcgtttctctttcacacggcgagattgaggcctcgtcatggacacttgcactcacatgctttcttgtcgatacataagttagtagttcgtacgtttctatctcgcagaaggctattcagtcatctgagttataaacatactctgtaaattatgtttctaacgagttgttccatgttaagtgtactttcgtttgcgtgtttgagttcttcattcttcctaggtcgacatgtgtcttcctcttatgtgctcacaaaaatttgggtataacaaatgtcgtgacatttctgaccactccatccagtttccacggtcgtcgggcccaaaaatattttatttctaaaatggtatccacgatatccacatattctaatattatctccgtaattaataaattaagctttatttaatcatttgataaattcacactaattaatctaagtaaaattataatcttacttcattaccaaaataattacatatttaagaaaatatgtccaattaaatattatattattttctagtatattacatgaccggtggcactatctttcataaggattggggtaaaactcaccactgcgacacctaatcttgtcctacactggcaagacatcttcccttctcccatcatctatgggcaagccatgtcgtatgcccattcgagcaaaatttaatcatcaatgggatgatacggtggccttgttttagacatagttggtccccctggtcgtgaggtttgcctatgatccataggacgctgatttccctgtgggaaatagggactttcttccctcgaaggggatcccttatgaggggtggcttttccacttgagatttaacccactcgttgaacagtctgatcaggttgttagcctccttattctagcagttttagctatgcttgatgggcttgaggatcccagcttgttgatccatctactcttggaatttgtgtctttgctgggcaaaaacattaccgaaagcagtgtgtgtttcttgttggtcacgatgaaggaaattcatctgaccatgtacttaccctacgacctctctcagcctgacaagttcagagtcatcccccaggtcaacatggggttcatcactactacagttgctaacccccaaatcaaatctcaccagcataaataggaggtccagcccttgtgtcaggagcttcaatagtcggctggatagtgggtcttgtaggaggttggtctcttggatggacctttatggtagtggtgtcgattggctagctagaacatggtggtcgcgaatcacgtttgagtaggtcacagcaggtggcacatagacattaggatccgtggccatagggtcacctggtttagtgtaattttaacatctcgtgacacccatgcataatggaaattatgaaaaaaaatgagaggtttttgaataagtattttaagctctcaatgaaagcaccaaaatgttgactttgaatttagccaactgacgcggagtctaactaggatctaatttattttatgactatcacatgcagaatgataataaatataaaagacacaagaatttatagaggtacgatgcctttgctcaggtaatgacctacttattttttgttgtatttactcctgaaataataccatgccgattacaggctaaaaccttgtaat

SEQ ID NO: 33162 - DNA, 1709 bp, Cannabis sativa
  modified_base (1646)..(1662): a, c, t, g, unknown or other
ccatatgcttttacaatctggttcggctctgttctggacatgttactgttgtagatagctgatttggagggatttggttgtaggcctaaagttattgagaatagattgaggccatgtagcatgtatagaacacttttgagatctccattgcagaagagaaacacatcatctgcaaaagaaagatgattcaatttaattccagcacacatgtgatggaatttaaagtcttgtttctctcccactttccccataattcttgagagatattccatgcctagaacaaaaagtaaaggagacatgggatctccttgtcttagccctctccttgcttcaaagaacccatgtaatgtcccattaaacatgagggagaatttaggagttcgtacacaattcatcaccagggagatgaaagattgaggaaactagaattcttgaagcatttcttctataaaatcccactcaacggtgtcgtaggccttctgtagatccaacttgacaatacagctagccttgtttgttttcctactataatgcctaactagatcttggcatatcataatgttatgctcaattaatcttcctttaataaagcctcctggttttgggaaactaaatcagggagaatcactttaggcctagagcacaatagcttggttgcaattttgtacacaacattgcaacaagctattggtctaaagtctttaatagtgtttggacatttcattttaggcactatagtaagaatagtagaatttatctctttaagtattctacctgtttccaagaaggatgtaacagcttgaaaaacttcctctcccaccacctcccaattatcttggaagaaaaagcttgaatatcaatcagggccaggtgatttgtctccagggattccaaacacagcttctttcacctcctccctaatgtacttctttctgagcatttctacttggctttgagagagtagggcctctgcctacaattcttcttgatactttgctcctcccttctagtttagttcctagcaaagctttatagtaagatacaaaagcatctataatttgttgaggctcatgaactcttgctccatcctgttattctatttaaaaaatcagattctgtcggattctttgcttgatacttgcatggaataaggctgtatttgagtctccattctgaatccaagcacacttcgatttctgctgcagaaatagggagtaatttctctacacttggacataccgatccctcacttcctgttctatacttatcagaccattatttagaggatccttcagtagttgctcttgaatactttccaattctagctttgtttttagcgtagcagcctatagatcagaataacccttctgatttatatctttaaacacctgcttcaaagctttaagtctactgaccagtgtgtacattttggagccatgctttgtttgtgtccagatttcttgaagtttagagtcaaactcaggatgatttttccacattctgaaatatttaaatggcttcttaccaccttttcattggggatacaaagttaggacagccggtgtatgatcaaagaggccttcatttaggaaactagcttcaacagtaggtgttgggttttatgccgtaaataaaactcatttcannnnnnnnnnnnnnnnntattaataaagattagaaataacaatttatattgcatggttcacatg

SEQ ID NO: 33163 - DNA, 2525 bp, Cannabis sativa
  modified_base (987)..(1000): a, c, t, g, unknown or other
acagctctatgcgataacaatagcaagctagcatctagtcttcacgctctgttctttcctcccaagagcgatttgtcatatttccctcatcagggtacgtaagagtcctcgctctatgggtttgggaatgatgctggtgattcctagtaggtggtcttcgttctcccagttgagttccaagatcctcctcattttcatgagggatttctcgttcatcagtttccggttatctcctttctggctgttcgtcttgattctcaagaggtgtctcattttcctcgggttgttcttcccgggccttttcctttctcctggttcgtgagccacgaggtctgcctcgtggtcttctcattcaaggttcaggttcattttgagcgttcctaccctacgtcgccctgggtgaggcagcctctgattctaactcagtgtttcgacgctatgcgtcatccaaatggcgtctataacggtggctctccatttcataagttctttctcccacaaattgggcacctccttggttgagcacttcatccctcgcctcaggattctagccattcccacgctgagttctcctcgagcgtgttgtccgcgtactaggaccaatgtcaggttgagttcttcagggacgtgtggtccgaccactaggaccatcatcaggttgggctctcttagaacgggtgctccttttggacggcagattagttgatcatctagagcccataggctcttttcaaagacgacggttagttttctcatgtggggtgtaagtattcttgggattttcagccagaaaggagaagatttttctctataagaagggaaggctttttctgtgttttttatactgtggctctcaaaagcaccaaactgttaacatagattttcgttaacataattttagcctcacgattatgattcaatacagaaataataaaaccatagaaaaatagaatatgaacaccaggattttacgtggttttgcagttnnnnnnnnnnnnnntccacgagtcaatcttattcagaattttgagtctttttcttttagggcctcttgtataagagttttttcatcccccttttgatattgtttgccaccatttatatttgcatagtgacagttaattagaaggctgaccaaaaagtaattacaataatgatcccttaaatcgtgggatctagttatatattataaaatgtaaacgcggtgcatgattttgaaaatcatacagctgggattttcccgcttttactgggtcagaaataacgtgtattcaacacgtctttaattgctgattctgagatgtctcgacaaaaacttgattgtagtgatcccaatggtgagctgaaaccattcttctatccgagatcgacaacatacgacgatcgcgaatataaggaaatctactgacttcccagggttgcgagtctcgcttttgctagttggatgaaactataggaagtttccttgtagcgagaaggtcgtctcgcattcttatacttccaagtcggttcgacttttatactttgtctgcttatttgtgagttgaggtatgtgttattcttctatggtgcctcgctcttttttagccacatatggttttttgttaatactctaaatactagttcgtacattgattcctcacctaagactttacagttagcgggttgcaaatatactctagtagttacataattaatgagttattccataaaagatacggcaccgattcacattccctttatcttgacacgtgtcctttagtcgaatttcgggtttaacgataattatagattaatttataaaagcacagacacgtggcgtccctggggttgagggtattacaacatcgtatcagagcgaccgaggtttaaagattttgaagactggtttgataagtacattggcagtgaagactcgtttgactcatggtatagtaagtgttaattattagttgattgttagaatatttttttaatcgcttgaattacctatttatttgaaatgtttaagctgttagaaaagcacgatatgttataaataatagttgttatgtataagtatgtatggaaatgcttattagcattgattatggtttaggagatactaaactatggaaagttatggattaaggtgtattagatctggcccccgagggaatctagtaggggtaatcgcgagcttttctagctcggggctagcggtgagggtgcagatccttcattgccataaatctagaaagacatatatgctcgatgcaagagaccatccgacagcaaggtgtatagattagagaactaaaggagctacgagctcagcctgctccaaatcccaatcctaatcctctagcatcgttagtagggccacaggatgcgagaaatcatttagagccgttgtacgagcagttcaggaagcagaatctgtaagtgtttgagggtggtactaatccactaaaggcagagcaatatatgagtatgataacatgcatttctaattttatgcaggttaagagtaatgatcgggttag

SEQ ID NO: 33164 - DNA, 1910 bp, Cannabis sativa
  modified_base (1019)..(1027): a, c, t, g, unknown or other
  modified_base (1371)..(1374): a, c, t, g, unknown or other
  modified_base (1679)..(1683): a, c, t, g, unknown or other
cagttaaaattctacatagtccccaagtcaatcttattcagatttctgagtatttttttcagggcctcttgcataagagtttttttttttttttttctgtcccccccttttatcttgtctgccaccattttataattgcatagtggcagctaattacaaagttgaccaaaatatgtttacaactattacccctaaaattgcgggatctgattacaaagcaagccaaataaatgaggcttttacacagttgtgaatatcccgcttttattgggccgagatgaacgtgtaattaaagatatacggtaagtcttatctcatagggatgtctcactgagaagggagcgaagatcactttgatagcgagcagctgcttgtcattttggcttctcaaaattaatattatcttaactctgatagctatactctctcgggtcgagaggatcttcctcgcatgtgtgccatcttttagtgagataaacgcctcgctgtctgttatcttggctcgtcatactatctatactcagtttgtatatcgtataatatacgctaagtatttttagtgttgtcgctttctctttcatgcagcgaggttgaggcctcatcatgaacgtgtgcatccatatggtttctcgtcgatacataagttaacaattcgtacgtttcagtctcgcagaaggctattcagccagccaagttataaacataccctgcaaattatatttccaacgagttgttccatgctaagcatacttgtcagttgcgtgtttgagttcttcccagctcgatacgtgtgctcctctgatgtgcttaccgaacttcgggtataacatttttcttagaacttaaaaatagaattaataaataaatttattttattcaagatacttaagtttttgtctctatttcatgaaatttcattaaattagaatatatatttaagttgaaaattaatttgataattaattttggaccaatttaaattagaatatttttttaaaatattaaattagaattaatannnnnnnnnattttattttatatacttaattatttctattttaatgaattttattaaatagaaaattatatttaagttggaaaattttcaatttcaggtcaatttaaattagaataattttcaaaatatattttattttattttaatactcatttccccacctgatttcgaattgcatttatttatttaaatgttgatattttaaaattttcaatttagaaacttagattaaagttaaaaattaatttttaattaattttagataaacttaaatcaagtaattttcattaatgatttatttaaaataaatagactaaaatatattattgaattagaaaattagtaattagttnnnnaattatctagatagatattttttaggtagactttttggtatttttctagatttatttaattaaattagaaaattaatatttaagttgatttgttctagacactttaatatttgatatttttcttaagagatttaattaaatagaaaaattatatttgtattaaaaattaatttatttaattttagactaatataaattagaataatttgtccatttttattttattttaatgtggaatttcgaaaagtgtattatttctaaatacattggatttcaaattcaattatatatttatagaaaattannnnngagttaaaaattaattatttaatgtatttttgaccaacttgaattaagtaattttcataatatttattggaaaattaatacttaggatggaaaatcaatttttatttttcagatcttcctaatgtataattttataaatattcaattaaaatttatatttagagttatctaaattagtaattttaatcaaataaatatataataataaatatcaaatgaaaatacaa

SEQ ID NO: 33165 - DNA, 1263 bp, Cannabis sativa
ttaaatttgcaaaaataaaatataaaaagcgcaaaattgctccaaacaagagtagaactaaatgaaaaatatattaaacctaatctaaaattaatactaaaaataacctaacaaatacatagatcaaacaacggagcaacttaaatcgcaacttaaattcacatcgcaacccatgcagcaaccaccggagcaacccaaatcgtaaaaataaaaaaaaaataatgtggaccagtgaaaatatgccacatgtatgttagtgtacatgtagacaatccatattagcatttaaaagtaaaattttaatggaagtgtaaataacaaaacaaaagtggagtttggagggttttatcactaaaaaattaatttgtgtgtgattaagtgtcacaactcgtatatatagttcatgtagttttaacactaatattcttacaaatgatgataaaaactaaaatatcaataatgatcatcaataaattaaatattaaaaaaaataataataacaatattgtaattaaaaaatgtacattaaagcttattattaatgattaataacaaaattataattaaaaaaattatatttattgtgtgttaaatttggcataatattatatcttatactaaatttaatacacatttctcatgataaataatatttgagagctaattttttgttaaaatactaaaatatatcactacactattttagtatatgttctaatattaacaaattaataagttgattaagtaggtgtgtaagtgtgacgtgacaaaggaattatagagccgaaagaaacgtttgaagatatactctctcttattttattatgacttggatgagaattgagacgtgacaccatgaaatcatgtatatcttaatactcagaatatcaccaaaaaccacagcacaattttccaactacacatatttccgttttagttaatcagtccatagtcccttgtgatgtttgtattaccttatattattatcatatacaactatacaagaaatgaagaaagaataacacagaaagagattcaaaacattatatgaatgtgtgaaaaactgtgtttttccatttaacttgcgattgtagaatgcagaattacagtaataagacagttgtagaaataaatagtacatataatttaaaacttgatacaaaaaagtatacatgatatcagtattttttcaaaaactatttaacaaatatataatgaagattaaaattatatgagattaatatatattatgtgttggaggtt

SEQ ID NO: 33166 - DNA, 2884 bp, Cannabis sativa
  modified_base (32)..(33): a, c, t, g, unknown or other
  modified_base (498)..(499): a, c, t, g, unknown or other
  modified_base (2827)..(2846): a, c, t, g, unknown or other
gtaaatttgattatattgaaatgtgttttatnnagggcacaaaacccaacaactaaggcataccacacagacagatgtagaacaggccaaaagtaaaaagaagatcaaacagaatatatatcaaagtgaacatatatatttaaaatatcctgacccaaagggcatgtccaaaaaatataacatactaagggcctggggacgggccataataattgtctccccttaaaagataataatttaaattttctaaaacgaaagaaaagggactgtaaataaaaaagaaaaatatggttgtaatgaggaaaatggttggactctgcggcctattcaatagggggaggaagacgagggccccggcgctcttcgagtaaagcatcaagcctttttttcttttcccagaattttgcaagagcctcctcaggtttgggatagaactcaagtttgatactctcgccgttcgactgctaggccatatagacgccatcatcgaagcgcttnncgcaatgcttgcagacgactggggtcaggagctcatctcttttagcctttttcaaggcctgatctctgaaatcccttagcttcttcacctccaccgtcaggttggccgtcgactgcaagtacgcctgatgcaactcctctaaggactttaacttggtagccatctcgtccatagcctccctagcttcccgaagctcgcgtttggccctagctgcaacctcaccctccaccttcaatgcctcctggtgcctcgcctccacctcaacctccctctgcttggcttcttcccggaacttcgcctccgcaagggcctccctctgttgagcctcctcctagaacgctcgcctttcggcagataaatcccgaaggatcctcatggcctcgtcaatgcccaccaattcggacatgacggaaccatgatcgatgagggtcttggaaaggcggccggtcttggcagtaatctgaaaaaagaaacagaatgagatcagatgccttagacaaaatatcaaaggagggaataaactacagatactcaccgcggtcatagcagaggtattgtcttggacatggtgaacggagttcaaggaagcacaagtcgcgtatctcttgggcggaaactgagtcaggtgggagacaaactggttgttcatctccgaggcgaagggagctaaggtgggcccaacaaagtggttgaacaaatccgtcagagggtccatgttcaggtcccacagatttcggaaggcgtcctcgtgaagagtgttctgctgctcctcccgtagaatcttcttttattcctcaacctcaacatgcccccgactgtactcgtcaagggcgtagttgtactttgccactcggagattttgcctctcctcatccatgggaaccggggtcagcacaatgacgtgctgcaccgtgtactcctccgcctcggaaggaatcttggagtcgttgctcaccgccggagtgtcccccctccgagtccgcttagaagactcagccacaaccatctatccctgttgcttgcgctcaagggcggccgcatcctctacctcaccttcctcaacctccccctcctcgtctatcaagacgatcgtgcctaaaggggcactggatgaggaccccccgggagtcaccaaccaggatggagccagaggcagagaggcgtcggggctgtacgcctcggcaagagtggctaggagatcttccataggcttggctacggcgacaaagaaataagccaagtgttaaaataatcacgaaaaaggcgtgcgcccaacaagaaagcaataaaactaatcttaccctgattccctaattcagccctagcgaagtctaggactacaatgctggcttcatcatccccaagaaagctgtccgaggggaggaataagctggaagataaattggctaaatggtccaggggaataggcgccggaggtccagagcccatccgggaccgacccaagaaatgacacaagtgggaaaaataatattccttggcatgattcccccaccgggtggaaggcattctaaacctataaaggcgctcatcaaaccctataggcctacgttgggtatactctcggacaggaggaacatacttaattattaaaggaggcttacccgaacctgaactgctggcgtcgggagcaccagagttgggaactgggacaacaggcttgggtttgaggggccttcactccggaggagcttccagacgaagggtcctcccggtagccgtctgggccttaatgtaagccagcttcttttcccacttaaagaggtacttctggtaccggtcctccgccaaggcaataatgtctacccggagcgccctttctgcagccggagtcctcacgttcgggcagatgaccttagaaagattgaagtcatccactgactgattcttagaaatcagcttggccttttgacagttctccgtcgtaaccaagtccccaacattgagggccttcttatcatacgtgcagaaagtcttggcccgctggaggaatacttgggtaggcgcggtccgcatgtaaggagggatcctaacgccctccgtgagaagctccgggcggtccatggcctggaaaccggaggaaaagaagactgggccctcgttcaaaggatgggcccggaggccataaaatccgtctttaaatttgtcacccttcttggtgatagaaacaagttcgtaaaaatacaaaatttcagccgggctgggcgaaccccaactccgggcggcatacaaaataaaaaggcctgaaagcaggcggtaagcttgacgaattagttggtacggcgcaagtgttggaaatttattttaccnnnnnnnnnnnnnnnnnnnnaagtatgttgtttaaacaccataaatatgaactttcta

SEQ ID NO: 33167 - DNA, 1613 bp, Cannabis sativa
gaatttataaatcaaatagacaacaattgatagagtgaacgaaaacatacacaaatgaatgaaaaatactattgttactttatgtatattgaataatctggattacattgaaatatagttttatttagggaataaatcccaacgcggaccacttcgaagcattccacgagatcctctgcatgactctcatatgcctttgatttgaccaacatgtcgtccatgtaaacctccctgttccatccctaaaggcctttaaacatccggttaaccattctctgatacgttgcaccagcattttttagcctgaagggcatgtccaagtagtagtatatccccttatcggtcctgaagctagtgcattcttgatccgcaatgtgcatcttgatctggttatagtcggcgtaggtatccatcaaggatagtagcttgaatctagaggtggcgtccaccatctggtcgatccagggtaaagggaagcagtctttaaggcaggctttgtttagatcggtaaagtctatgcacactcaccacgtcccgttcggcttgggtactagtaccggattggctagccactacggataatacacatcccagatcaagccattagctagtaggttgtccacttctttttccagagcttcttcctttactggatcaagggggcgccgcttctgtagaactggcagcatgttcggattaacgttcaagacatgagtaattacatgcagacttatgccggttatatctccttggcaccacgtaaaaacatctgtggccgcccttagtgctttaacttttttatctttttcctccaattctaggctcgttcctagtcgaaggatcttggtggggtcgaggtcgcacactggcacttcctcgacatcttccataggctctacaatttttttggatcccacacagggatccaactcatcttcctctaccaattctggctcgataccttcacggaccatcaacactggtaagtgggccgcgacattataacattgcctggcctcaccctgattgcccgtcatcatccccactccagcctcctaggtgaggaatttcagggataagtgccggattgacgtaattgcaccaaaatccaccaggaccggtcggccaaggattgcgttgcatgcatttgggcagtctaccaccacaaatttgcagtacttgaaaatactctgggttgtatccgggcacaaggtgactggaaacctcacttttcccatcgggataagtgtggttccattgaatccagtgagttgggaaccgcttggtgatagatcccggtctgtgaggcctattgctgcgaaggcttctttaaataacaaattaacagaactcccattatcaatcaatactctagccacgatcttattggcaatgggagtttctatgaccaggggatcatggtgagggaaccgcaccaaccttgtgtcttcttccgtgaaagtaattggctgatccatgagtcggggcctttgcgctggaagctgagtgacttcctaaacctcatcatgtttaatggccccagcatagtgttggaaattattttaccaggatctatctactcacaagtatgttgattaaagatcggaagagcg

SEQ ID NO: 33168 - DNA, 1818 bp, Cannabis sativa
taccttttttatcacccttaggttgccaccaaaatctattcataagcttctcaatgtcccgagtgatgtcaagaggtagaaggaacacactcatggcataactcggcaatgattgaaccaccgacttcacaagcacttcttttccagcacgagatagaaatcttccctcctagctctgaagccgcttccttacttttgtttttaagtatcccaataccgctattttgttacggctcatagtgcttggcaatcccaaataaaagttgtcttcagttgctgcattcatacccaaaaaagagcacaattgattgcgaacattagtctccatattggtgctaaagaatatcgaggactttgaaaaattaacttgttgacccgaagctctttcaaacttttgaagcaactcatggattctccttgcctcttccattgtagccttacaatacaaataactgtcatcagcaaacaacatatgtgaaacccgaggagcaccatttgcaactttacaaccatgtatccaaccattattctcatacttacgtagcatagcagaaagaccctctgcgcacataataaataagtatggggataacgaatcaccttgtcaaattcctctagtaggagtgataggcccaatttcatgtttgccgtggatgacggtatacgtagctgaagcaacacaactcataactaatttaacccatttatccagaaatcccatccttctaagcatagcctccagaaacgaccattcaatttggtcataagccttactcatgtaaatttttaaggccatgaaacccgtcttccctaaccttttcctttttaagtagtggaggacttcaaatgaaatgagcacattgtcagaaattaaccgaccgggaataaatgcactttgggattcagcaatgatagtatccataaaaggtttcatgcgatcagccattactttcgtgatcaccttataaataacgttgcacaaggcaataggccttaggtttttcatagagtcaggacacttcttttttgggattgacacaacattggcagccgcacaagtttcctccaatacaccatgttcgaaaaaatgttggacataggctaccacatctgtcttcacaataggccaacatttctggaaaaaagcaggtgtcataccatccggtcccgggcttttatccgggtgcatatcaaacacggctttacggacttcttcctcagtcactggtctatctaggtccaggttcatcatctcaggaacaacctgattaatactttccaccacttcaacacaattggcatcaggcgaagaaaataactccgaaaaataatcataaataaccccagccaaaccattttaccaatcagtccatatgccatgagagtttttcaacttagtgatgttattattccttttacgagaacttgcggctgaatgaaaaaacttactattttggtccccttctctaagccacagttgctttgatctttgcttccagaatacttcacactgatcaagaatgtcaaatcactttttcttcatgtccatataagcctgaaccgaagaggagtcacgcttatccttcaactggttgagctctgttttacacctcttgatacgctgacaaaaatttcctgtgatttctttaccccattgagataattgagacgcacaaaggttaatcttctcctttaccagcatactttggtccgagagccaacaatcatcaactattttatagcagatagtaggggtgttcgcggtgcgggtggtgcggttttagactatttttccaaaccaacccgcacatacggttt

SEQ ID NO: 33169 - DNA, 1210 bp, Cannabis sativa
aacacccatagttgtcaaaatacatacataatgcttaaatactttttctttttattttctctcatccatataaaatttgtcattttctcttaaaaaaataccccaatggttgacaactataaaagttgtctaccttaatcccacatcacattgaattaataactttttaggtaaaaaaaaaatttttctaataaaaaaaatcatgtgatcattgtctctattatgcaacaatttacataaaagtactattgaaaattggattaaattgcatacgtggcaagaccactttaatagttcaatgagcaatattggagatgctctattattggacactaataatgcaacccggtggtactttacaattagttagtaatatttttgaaaattattttatttttatatggcaccttatatttaattatcatattcacagtataacacataaagaaatgatgttagacactagggttgtacaaaaaatttcgtaaactgccgaaaccaaataatccgcccaaaccaaactgacaaaatcgataaaaaattacaaactgaaaaaactcgaaaaaattataaaccgcccaatctgttaattgggtgggttgaaaataggtccaactcgcccaattaaacctagcaacccgatcagacccgaattaattcttttaatataattatatacggacatataataaaaaacttaaaaataaatttaaaaacccctaaaatcctaaatcgaaccccagacccttctttcttcgtatctctttgtaaacctaaaaaaattgagttctcttctctcctatcgcgcctccctcttctcagatcaactcaacccttccctctccgtcagacaacttaacccttcccctctcgtcatttgactcaaccattccccctacaacgcagttctcttcctctaaaatatatagcagcgtcgatttcttctcagcagtgattgcatggactagatcacgatagctctaatcaatgattcctctctttgctcgactctgaacctcatcgttgacgtcgatctccaccaccccttgtctctatttctctcgtctctgtttcagtgtttgagtaagtagcaagtgaaaagtaaaaggtgtttctcctctcatgaatgtccactgtattgaacatataatctcacttagattaaattttgccaaattcatcaaatgaaatagttgaagtcaattatttc

SEQ ID NO: 33170 - DNA, 956 bp, Cannabis sativa
gtactcgtttatattattaataaaattattaaatacaataagtaattattattttaaaaaaatataaaataaattggtaacttgtttttttttttttagataaaatggtgacattttattagcaaattgcatcaaccaatacaatgttcaaaagatcctccggagcattactctcggtgaacatacgaactgagtgaaaacaagaactacgatccatataatggacagccttgttagcagaacgtttaacaaattgaatctgaatagattttaaagaagcaagcaactccttacactcttgaatcaccacgccaaagggagaacgcaatagaaccgaagaatgcaaagcttggacaaccagaagacaatcggtttccagttgcacatcattccactgcttgtctttgatcccactaagagcctccttaatgcctatcgcctccaccatagcagcctctaaaaagcccggtttgctacaagaaagagcttcgacaagatggccatgacagttgcgagccaccaaaccagtcttataccacccttctgaatcgaaaatagctccatctacattgaccttaatcttattattaaccggtttagaccaatgctctcttatttcattctcacccgaagccaaaaacaaaggacccttctttttcaattgagcatttttccattgattaaggttgactctagcagataaaattacatccgaagccgaagtgctcttacctttccatgtgaacacattacgggcattccaaatggcccaacaaatcatgactgcttcctctcttacattggcactagaaggtaagacaaacaactcaaaccaatttgagaacttaccccccaataaaacagccgcacttaaggatgatctattccaacaactttgagcaaaagagcattctatcaacaagtgcacaatcgattcctcctcaaaattgcacatg

SEQ ID NO: 33171 - DNA, 2104 bp, Cannabis sativa
aaatttgagtataacacttcattgagttaggaactaccatgtaaatagaatattgtacctttttaatgattacaggagaatttccaatagaatcaacattgttcaatggaccattatcctctggatagaattttctaattattttttttattttcagccggcttaatatagaaaaatggatatgctactggatgatttccttttgctaagttgggtaaaggatttgcaaatatatgatcacgttccgccattaaaatatacctgtagttgtcacatgaaagatctgtaactatttttttcttattttaaaatataaaagatcccaaatgagctttaaaagaaattatatattatacgaacataattttaatttatttccaatagtgaaataaagatctgtaacttacagtagtggatttatagtagtgaagatttttcacaaaatggttgtgttgacagattgatcgaatatatatacttaattgagattacatgttctttgactacattgaaaactgtcccattataaagtttataactttcaccactctaaataaataagaggattttatttatctatcgtaagtattctttttacctgaaaatagaaatattaggaatgaaaaaaagaaaaagttttccattcacttagatacagattggtttgtgattagaaaatcctaattttaacaactgtgatttgaaatggggtttgaaaacttaaaataacagaaacagaattaaaatcatagtacttgaattcaattttgattttttagtatttaatagaatacaaataaacataaagtataaccgagcatattagattataacaaaacaacaaaacatttatgacatctacagtaattaataatacaatacacatgattcatcaatgactgaggtgattatcaccactcaacacctgcttccctgtaaaaaaaataaacaaagcaccatagcaaacacaaattaagcacacaccaatcgtttatagtttatatattaccattactgcttaccaaattgtaaatctcttcaaaaataatttatattcgatgcaacactgtctaccaatcgtttataatttatatttgaatttgattgtaggaattaaaaaagatataaaataataaataatgtttaatgaatgaggtaagtgagcaccaataccaacaatattagaatgtaatgtgccccttgatctatcgcaatgcttgcattcatattcacaattagttattctcatgaagcatcatcatctatacatatattttcttctaattaaaagttaaaagttacaggttcatgcctttttcaaatttattatatcctcatctttacaggcaaaaagaaacaactaaatcctcgaacaattcatacgcatcgatcatatattctttgaacaagcttcgttacactgctattgctggcgaatagagctattggaggagactctgattggaaacggttgaatcgccatcaaggtgtgagagatctaggaaggagagaggaggcgttgagatatgattagagtttcgatcttatatcgttttattttcaaacagagtttcgatagaatagaaaactttaaaaaaaaaaaaaaatcacccaataatttctcataaattaagaactgtgttatatggcacattttatatagaataaacatattccaaacctagaaatgaaagaggttactacgttagtaattgaaattcctacaaaagaagatatatacattccccaaaaatatttaacaaataaataattaattaaaattaacaaatctgcatctcccaattcgaatcaacaatcgactccaaccctcatgctttacacaattccaattccatttctcagtacacacttccaaccctccatcaatagactccaacactcacttgtaaaccttacacactttttaacatactaaaaatcatatccttatctaaaataaagcctcataacattacacacattttcttaatcttctagtagaaattagaatctctttgtattttttttttcttcacacattttttcttttcctctttctttctctgtaatattctacttccttcatactctctctctctctctc

SEQ ID NO: 33172 - DNA, 2259 bp, Cannabis sativa
attaaaaatgaaatttccctttaacaaaataaatggtccaattggtaacttttacaaaatagaaggtctaatatggtatgtactcttaaaaaaagagcttgtgtatgtttgtcccacattgttcgtgtgtgagtaatttgtggtgtttatattacactcaataattaccaaacattaatctcatgataaagttttatcaaaaagaagaaaaaaaattgatttaatgtcacactatttttttaagaaaaaattaccgcataaatattaaatattatatatttttaattttatacacttaaatattatattttttttacatattaaatactaaacgttgtgtttaaggcctctctgttacttctggtagttgtgacaatgtacacacatgtaatgcctaaattaaatccccatatttttttaaatgtttaataaaaataaaaacttaaaacacattaattttaaaggaaacttacaaaaatactaaaaaatagggaaaattttacaaatactaagacatggagattttgacatttttatagtatcaagtttaagtttacaaaatttacaaaaatacaaaatactgtgttaaagtttcaaaattacaaaaatattgagtttcaataaaataaaaaaataactactcaaaaacaaccctagaacaacttaaaaaacaaatgaaaacaactatgaaacaacaaaaagataactacaaatcaacagaaaaataacaaaatattgacctaattgcaataaaaaaataatatcaactcctctttaagtttttgtattacgaatttttttttacttagttttgacaacttgatttatcttttcgtactattacattatttttcatggaatttgttgttacaactttattctttcaacttttttttttaattagtggtaattaaaatgataatttattttttaaaagttaaataaatagttacattgataatagaaataataaaatcttatgattttaaaatgaggtatataatataatgtgtaatatataattaacatgtcattatctactactgtacatcgtgtcaattaaaaaaaacaaaaaaaaatcttatcgatgtattttaaaataaacatatccaaaaataaactaaatatatgtatctacatctacaaagcaacacacaacaactaaaaattatcagaataaacttcaaatatatactataaaaatatacatgaataaaaaaaataactgttaaacaaaaaaaaatatggaaactacttacaaataactaaaaaataacataaaaatagcaaaacaaaatgcacatgcatacaacaaaaatattatctagaacaaaatatacatgataaaaatatgcatataaattaaacaactgtacaaaaaaacacacaatatttttaccctgagtataatatttttaccctaacattaaaattttctctttctaaccctcaataaagattgtgatctaattacaatgaaccgatctaattacaacgaacaaatcaaatccaatctaattacaaaaaattagacatctggttacaattagagtattcgcggtgcgagtgttgtagtttttgtctagtttttcaaaccaaactgtacatgtagtttttataatttttcaaaccgcaactgtactgtaagatctcaaaaccataaaaaccacacaagattagattggatatgtaatatcctaaagtttaataaccggattagcaatcctaactaagttaattaagtgttaataagaaattacattattatatgatttaatatgtagaattattgtgatttattgcattttaagaccatgttggtgtgacatgggtatttttgtaattttgacctgagaaaggtaaaaatcgtaattttatggtatattatgtttatggactatattattatatagtatgtatattttgtctttttgtaggtgatttctgataagtcggcacggtatagtcacaattgggtattttcggctgaaccgagtttggggtccaaaatatatttttgggatttagttatgccttttatgtgttaaatgagaaaatatgaattatgtgatatatatgtgtgagtggaaatgacaaatttgccatttcatgtgtttatgctcatgtgtgtgccttaggagcaaaatggtcttttggcctaaaattttctattttccaacaaaaccaatttcacccaaaaagaagaacattttctaggttgtgagatcccaaaccgcccaaacacacacacacacacac

SEQ ID NO: 33173 - DNA, 1798 bp, Cannabis sativa
gctgtaatgactgccctaactaaactatctcttgaagtacaagctcctcccataactgacgcacctgagaaagcagattcaaaagatcctagagctttaggcattcacaaagacaaaggcaaaggaattgtcgttgaagaaccaaagaagacttcttccacaaaatagcctaaaaagtctaaaactactgaccaacctcaacagaagaggaaaggaaaccaagccttaaggtacggtgattagaccaattctagaggtagagtcaagaagaaaaacaagacagatgctagagtttgaaagccagagtctcgaaggaaaaagcctcctcccaatgattctagtaaccacaatgaggatgttgacgaagtacatccggtattagatgtcagtggcataagcctttccatgaacaatctctgaagaagattcaacaccaagaaggaaagagccaaggctacaaaagaaagaccctggggaacaatataagaaaccacattaacgatcgcgttcatgtaagagaatcctcaagtgataagactcagtgcctggaacttaaggttgaggagttgatgaagatcatggaaaagatttctggaaaacaaagtgttgttgtatctaactttgaggaagaagatacagagccttgtgtgaagagaatcattgatgcaccattgttggagaatttcagaatgccccagatagagttgtatgaaggccgaacggaccctagggaccatttgtccaaatacaaccgcatcatgcaagtcgcccaggccagtgacaatgcaaaaagtctatgttttttaatgatgttaagcaagtctacggaggactggtggaagaggttatctccgggatcaatccacaattggagagacttgcaagtaatgtttagaaagaagtttatagcagcaaaggactatgatttggaagctagatccttgaccagcgtcaagcaaaaaaaaggagaaatcttgaagaagtttattctacgcatgatggatgtgactgctaaaacaaagtcactgacgacatgaaaatggtggctctaacattaggacttacaactggatctttactgtgtggagatcttcagcgcaaaagggtacatacattgagtgagttcttaataagagctcaaggattcataaatctagaagatgcttacgctcaagcatatggagtactcccagcgccttccactaaagtaataaaggtccaacctatgatcactccatccatttaccctctgccaactgcttttactactcctacggtatatggacaaactactttcgttgcctagctgcacaggctagtttttcttgattcggaaccccgcacaaatcggatacagtgctgctcctagaaaaacaaaccaaaaagttgaagttccagagtccaatataacccactcacggagtaaaaggaggacgaatggtccaaatcggagtgagtctacgaagaaaggaaaaacccaagagtcaagatacactgagaacacaagtctcatagatactcaacaaaatgtatacaaggcaacctgtttcatggtacactataggaaacctctgccaatgtataaaggtagaaaacaaagaagagatctgaagaaaaagtacaaatatcatggtgatattggtcacgccatcaatgaacgtgactacttaaaagatgaaattgaggggttagtacgaaacagacacttaaccaattgggtaagaatcccagtcttctatctaggacaggctgttgcacacggacagcttttcattctaggacagtagggagccataaa

SEQ ID NO: 33174 - DNA, 2576 bp, Cannabis sativa
tctcatgtctgtctgagatcaagcactgttcttctctgaccccatatgcttccctcaattttgtaaaaaaaaactattcccatgagttgttattttctgaattcacaagaaagaatgctatgggaaaaatgtgtccatttgcatcttgtgtacaggttgaaagtaatgtccctccatatgttgattttaagaaagttccatcaaccacgattatggatttacacttgttctatcattttattgaagcatctagtgctacaaacaagtacatgaagttgttatctcctttaatttgcatgtgtactatggttcctggattatttttatgccacatgtgcaaaaaacttggtagtaggtgatatgattcttttgcttttccacgtaattcttgatgtgcgtgctctttacttctccatgctatcatgtagtttatttttacgccatacttatcattcaattctcctctgatgtcttgtggcttttgagttatttttatgttggtgaaccttggcttgatgtagtttccaatcaatttgtaggatgtcgcttgtctgcaaattttatgttgagatcacaagtgtgtatcacttttttgtcatattcttggattataaaacttggttggtccgtttcttaatgccattagtgcccacttgattttatccaagcaacaaattttgtatatttttgcgcaagactttttgaccttttattagagttgtttctaattgcatataaactaagcacactttgtagtgtttctttctccttgtaaatttgtgcttcttctatttcaggatgttgaggatttgtgattagtagttcatcataattagtgatttcagccctctgtatgggttattttcttgttgctcaactatttcctcagccattagttttgcatagtccatgaagtcgaatattgtttcaccatcttctacattgtaccttgcattgtttgttgttgagttgttgattcttctgttagtggtgcattgtctaccattgttgttattacatttgtttgtgtaactaatgagttgctcatttccaagaatgatggattgttagttgttgtgttgctgaccacattcatacacacacacaatggatacgttgtgaagtcaagttcctttagttttagttgtatgtagaagtataggttttgatcgtcatttatcctcaatggttaatatccttctttcacttggtatttcagttgcaggttagtattttcttggttgcattctagcaattcttttagcttgtgtatgagttcatcatatttacaatcaattgatatgaattgtccactagcttcgtaattttcataatccattccattatcaaactgttcgtcgcaaaagatgaggaatagaattttgtctttttcctgagagtataaaagtttaattattgtaagttaacttgtggaaaactgtaataaagctgtaatgcaactgttgtatatgctaccagccacttatcataaaaactcaaaaaaaaaaattgtatgcaatagaaaagaaacttactattgctgtctttcctttgttcaagtcattattgtatttattatacgttgttatttttgttgctcaactattatgtaactagtttataaaaaaaaaaaaaaaaaaaaaactaatatgcaactgaaatgcaactaaggatttgtaaatgggaatcttgaagaaacttttttctatttttattctatttaccaacaatcaattgtacagtaatagcaatatatggagaaacaactctaagatatctataaaccaacttaaatatcaaccaatttaatattttcatataactaaccatgttatagaagtttctcaaaagagatttgtcttgtactgacaatattaaacacctacaaatttgataaacaccattattatgttatcagtttgtaataattgatatgtcaagtttcagagcattagcgaaacccttattcaactgtgatgcaaattttctaaaacataaaaaattagaatagtattttcaagtacgtgactctatctatatgtgaattcacaattctattcgtgatttaatatgaacaaatttaccattggaaatctacaaaacaacgtcaatgcaatgggataaacattagctatagtattgatgtatttttttttatgtttttttggattatacctgatttggattgattgagagctccaaatctatttgttagagatttacattttatgaatctcaaaattaattgatattaggaggatcagctctttgcaaattaaattgaaattcaaggttgaattttagtttcgaaacagttttttctgctctttctttcatcaatacgaaactatatttttttggattaattccagtcttcttctcaggtgaattagccggaattaatggtggcatttcgcatggtttagtttcgtttaggttgtcttgctgaattgatcgatcgaagcttgtgttggtgaggtttttggtttgtgcggctgaagatttagaaaaaaaaaaatgtaattataatatttgattgggaaacttacaaaaatactgaaatttgggttaatttt

SEQ ID NO: 33175 - DNA, 3301 bp, Cannabis sativa
agctttatggaggcagaccaggttgctacctattaaagaggggtcatcatcagggactcatgacgaggggcttgctgacccacctatggaggaggtggctggccaggacactaaccaccaggatagctacaatgctaatgatggggccgccctagactctatcaatctcgatctcgcagatccagattcaactcattctgcccctgcacatatttagacagttttttcattattagttttcattattatgtttgcataacatatatagtattttcatgttctgcatagcctatggctttttatagccggtggcctatcatctttagaacatcacttacttttatgatctatgtggcatgtggcatttttagaaaattatttcattttcatgttccatgtggcctgagacctttttagaacactactttattcttcagccctagggccttcaagtttgtatctttggccataagccctccatttttgaacaatactattgtttggccctatttcttttttatcatggattgtatgactgatcatgtggtttttaatcctagatatcttcttatggccttgataagtaagggtctagatttactttgcgaagccaaagtatgctgacaggacttagagggtggtttaataggttatactaagcaataaaatttctctacataagttctttatgctagtttgatgtgttgtacaggtgcccccaagtgaccatggagacaagtctcttggtcacttaatattcaccaagcttcacagactttacttgggttctatcttatgagggtaccatactacgcatgtggaactaacagagtaactttaagaagttagtctttcagcaagtggtttagacacaatgaacagaatatatgcattgttatttattcattaattggtctttgttgttgtgcaacttacataatttaatctacaatttgacattacacatatttagcttctagatgtcaagtggctacccctgtgtgcctactaaagcagaggccaccattgaagaacgatgggagaccacgctaaaaaggtcatcggtgctagcaatttttgtactctaatgttgagtaggtagaattgctactgtggagtaaagttctaaaagcttgttactaatagtatttacgaaggtgctctccattctagtatcctggtaagaaatcaagctacatgttctcgttgtaccttcctagcttttaggctcccctactagttatctctgtaacttgataagggccttcccaattaggtccaaacactgctgatactaagtctttggtgttcaagaacaatctttggagcactaggtctcctccaaataatttcctactcttgacttgttgttgaagtaccttgctaccttttgctggtaggcttacagctttaggttggcttgttctgttctttcttctactttgttgagagactctttcagtagggtgttgtttattatttggtcataagttgttctcctctgagacggtggcactaactctacaggcgacatcgcctcgtagccataagctagagcaaatggtgttttcccaatgatcatcttcttggtagtcctatgcgaccataggaccttagggagcaattcatgtgagtttccttttgctttctcaaggtgtttattcagagtgtcctttaggattttgttgacagcttccacctgcccattttcttaaggatgggccacggcagaaaagctcttgatgatgccatgtctattgcagaaatcagtgaacatgtcaaattcaaactacttgccattgtttgacacaatcttctggggaaggtcgaaccagcatatgatcttcttgacaacaaagtcaaggaccttcttaaaggtgatggtcgccagaggttcagcttctatccatttggtgaagtagtctactgcaacgacagcaaactgtacccctccttttccctttgggagttgaccaattcggtctatcccccacactgctaagggccaaggagactgcatcattgtgagctgattgggtggagctcttggggattttttaaaaactctagcacttgtcacattttctaacatagtccatcaagtctctgatcattgttggccaaaagtacccctattggagtatctttttggataggctttgcccccaacatgattgctgcaaaagccttcatgaacttctatgattagccatttagcatcgaccttattgacacacctcaagagaagcatggagaagctccatctgtacattatcccatctaggatcaagtacctggcaacttttcttctcaatttgattgattcacttttgtcttctggcaaggctcaagtttggaggtaagctggaataggtgtcatccaacaagtctacttcttctaggataacaataatgggttcctctaggaactgtaagggaaccaagttttctttgtcaacaatggtggtgcttgccagatgggcaagtgcacttgctgcagcattctgctctctgtggatctacctaatgtgtagcctttgagctgacttagcaaatctttgattttgctcaagtaggccaccatttcttcaccttgagttgtgtattcacccaggacttgattcacaaacagttgagaatcgttgaatgtgtccaagtgcttagcttgtacttcatgcggcagcttgaggccaactatcaaggctttgtattcaacgtcattgttcgaggctttaaagtcaaatttgattgttccgtgcagtcaatggcccccaggtgttgtaagggcaatgcctgcaccagaccattggttagtatagcttccgtgaacatggagtatccatgttagttctttaatattttgttactcttgcttcttctctggctcttacttttctcctaagtcttgaggaatctcaactgttgaattggtgcactcagccttgaagtctgcaagggcttgaccctttatggttgatcttggttagtatgtgatctcgaactggccgtgctcaatggccattttgagtagttggcctgatgctttaggtttttggaaaacctatcacagtggttgattgatgtacaactttatgaggtgtgcctgaaagtagggcctgagctttctagaagtcaagagcaagcttttggttagtttctctatgagtgtgtaccgactttctacgtttattagccttttactgatgtggtatacagggtaatgtacactgtcttcttctcttatgaggacaacactcatagcatgttctgtgaagctaggtacacacctagctcttcattg

SEQ ID NO: 33176 - DNA, 4321 bp, Cannabis sativa
  modified_base (1081)..(1106): a, c, t, g, unknown or other
  modified_base (2205)..(2205): a, c, t, g, unknown or other
  modified_base (3343)..(3347): a, c, t, g, unknown or other
aggaagtgtagacctccaattcactgggatgaaattggagaaaagaaatatttaggtcctaactctgtacaacggaccaatgaggctatggaaaagatcaaggccataatgtttgcctctcagagtaggcaaaagacttatgctgatccaaaatgcagaaatgtagaattttaggtaagagatcatgtattcctacgagtgtctccgatgaaagggattaaatgttttgggaaaaggggaaagttatgccctaggattacaaagcctttcgaaatcctcaaaaaggttggattgggagcttaccatcttgccttgccaccaacactttcagcagtcaataacgtatttcatgtttccatgttacgaaaatacactttggatcccactcatgtgctaagttacgaaaacctagagctccaggtgaatttatcatacgaagagcaactagttcaagttctggagagaaaagatagccattcgaaacaagaccatgggagttggagtccgacatgagggctcaatatctagagttattcaggttagattttgaggacgaaatccttttaatgaagggataattgtaaagatagcttaattttatgtatgagagttagcagataattaaagtttaattatgaattagacttttatttttgatttatgaatttatggatatttatttgaattctaggtgtgttatttatgttatataagaaatttcatatttttcttattttatgcctggaatagtggaatgcgacgtttggtcgatagagtaacattttcgtatggtttagtattttaaaaatagcggggaaatttagatagatattgggaatgtttagaatattggtacttttaaatttgaccaaaatgccttaggtggcaagattgattcttagtgaaacaaggagcaaaatagtcttttgccttgggttaacctttgtcttttagtgacatagaagtttattattaagttttataattttattttattaggtttgatattagataataccttagcaatattcctttattcaaaaaatagaaaattagacgcaaaacacacacacacacacannnnnnnnnnnnnnnnnnnnnnnnnnctctctctctctctctctcgacccttcttgaaacccaacagaaaatcaaagctaattgattactcaattcttggtgttctagcagaatttgtaggattcaatcaaaggtaaactcccaatctcagctctctttgttttcaaaagttccaagttaggttctctgctttatttttggagttagagttatgtagttttaaaagatgtttgatttttctttcagaggttattttgatgtcatttgagttggtttaaaacttatttgagtgttgttgttgtgtttgaacaaactttgaactttaaagctcaaactttgctctctcacgatgacttttgtttatgagggttttattcagttcttttccatggtttatgttcattatggcttgaataggtgatctagaaagttaggtttgatttgggatcaaattgaggtatttttgtagtttttggggattcctgtactaaaacggtcgaccggttcagtatggacctgtaggagccagaattctggttcatccccaaatagacccctgggaaccggtctactggttggggcagtttagattttctcgttttatggtatattgggtattttcatgtggtccatcgataggaaaactttagttttgattttaagtccccaaaaagtaatttagcgcgtcactcgccaattttatgaatattgtgatttaggggcctataaatcatcgagagcagcagtttcacacaagtagatcggcacacctgaatttgaaaacgaggtcagattagaatgatgatatgcctatgtgattatatatttagtgtgcatgtttatgatgcctattagattacattaaaatagcagtgtcaatatacgtagagatgtattggataccgataaatatatgtttggcttaagtaatgattggcactatcacagtaatacaactagagtaccgagtatatactgatattatagtcaatagtactgtcgtacgaacgttctagactcagtatcgcgtaggatgtgaaaatagggttatggttgggtgtatgggcacctaattgtaatccaaggttatatttatgatgatgattatacttttcttactgagtntgtcgactcacagttattgtttgcatgtgtaggtaagggtaaagctaaggctgagaagtagtgagctcaagcggatgaagattgtacttgctagggcggttaggcctggagctacgatctttaggacaacaatctatattttgtatagttgctaggcgaaaacttttgtatcaaatattttgtaactcaattgtaaatattttaaatacgggattcctattatatatgttatttactttgaaatttaagagtaatccagtaaagttttaattaatcacgtttttcaataaatctgttggttagcaacgaattaacaattaatgtaaaattacgataacacacctaatctagtaaggtgttacagtttaagcttgtgattcccttagtaatataactaccttcaaggagtgtgatgttgatagcttaaaaaatagtgggattaaattatttcctttcattatattaatttgaataacatttttgaattaaaaaataaatttaaataccattaatattttgatattataaataaaattttacaatatatatttagtctatgagatcaattttttttaactaagctatttttatgttattagcaataacatatatatgcattatacataaattttatgcggatggtatacataaatgacatagcaaacacaaataaaaaacatagtgataaaatatatagaaatgttcattttaattattaaaaaatataataaaatttaatatttactaattaataaatatatttctttaatgaataatttttttatttttatgtataataagcattaaacaggtataataaaaagttttcttatttaaattttttaaaataatatagaagattcctgtactaaactaaacagtataattcaatgaactcgaatatgattacatattgccctatgcagctaaacacaatttacacatttctatacaattatattctctttcataatattccctataatcaaattatttttaaaacttcactccaaacgctccctaagaatataaaaatattttgttaaatttaacgttgttagtagagttagttttttaaatatatataatattgatattattcattttagattaatttaagtatatataaatattaatnnnnnatttgtaatattattattttttacttttatttttaatattagagtatgttcaattttaatattcttaaactttatatttattttctttaagtgtttaaaactttaaatattatttattttttaaaaaataaaatattgataagtggattctattttatttataaaattttaaaaatgcacatgataaaaataaaaactaaaaatataagtaagtatacgtggaatattgcacgtaacaatagcttattatatatataaatctctttaaaaaaatatctatatctgtaacttaattaaaagtcacaatattttggactttttgctgttgaattacatctatactcttctagaagatttatatatacattcaaaaaaaacttagcaacataaatatataatttacaaagaaaaaaaagaataaaattttatttttaatattaaaaaaatactattacaaacaataataaaaaagaaaagaatataccatatcacaaatttactaataatattttaatttttactttcaaaagaaatatatttaaatatttcacaaaataatatattgtattacataaaaaattttacagaaaaaataaaaataaacttaagaaactaataaattaagtttaagagagaattttgtttattctacgtaaaaatgtaaatacatacattatacttttaaaataaaaatgatttatttatgttttcaattttgttaagagaccttatcatataatcactaaaatagtaaaatagtgtttagttatcagaaataaaaacataaatataagaataagaataaaaataataattgaatattttaaaatacaactaaataaaaaaaatagtataaaaataatttctattctattctattttattacctacaactaaacattatcataaatataataatgcaatatataagcacatgttactttactctcataataaaaaaatttaaatttcgg

SEQ ID NO: 33177 - DNA, 2317 bp, Cannabis sativa
  modified_base (2225)..(2229): a, c, t, g, unknown or other
tctacttagttcattaccaaagatgtatgaatactttgtagataccatcttcaatggagaggacaccttgacaatgacagaagtcaaggctgcattgtgttcaaaagaaattcagaagaaggatgatcgagcagataatagtggggatggattattcattgcaaaaggaaaatttaagaagaaagattacaagggatacaagaactcttacaataataacaaagataaaaatgataggtttaaatctaaagctgcagcaggaaaacaatgctattactataaggaagaagggcctggatcttgtattcaggatgcttttcacatgacacccaacaaagaactattgagttcttttttagaagaacatagaggtactgtgttacttggtaataacagagcatgtgaagttaagggaattggctcagtagaaatgcaaatgcatgatggtgtttccataattgtacaacatgtaagatatgtgcgagatttgaagagaaatctattatccattggaatgtttgacaagaatggatatgcagtcaagattgaagatggaatactcagagttttcagaggttcaaagattgtaatcaaaggtcttttgaacaatggactctattaacttgatggtaaatcagttgttggcaatgctacaccagcagtgagtcacaattctgagatgagtacaaagttgtggcacttaaggttaggacatgttagtcaaaggggcatggatgaactcaacagacaaggtgtattcaagggtggcttgaagagcaaacttgaattttgtgaagaatgtgttcttggtaagagttgcaaggttaagtttggaaaaggagaacatcacacaactgagaaactagcctatgttcattaagatttatgggggccttctaaggtggagacaattggtggggctagttacttcataagcatcatagatgattatagtagaaaggtgttggtctatctactcaaaagcaaggattaagcatttgaaacctttgtcaattggaggacattgcttgagaatcaaactggcaagaaattaaaggtactaagaacagataatggcctggagtattgctcaaatatgttcaaagatttctgtgtcagagaaggaataatgagacacaaaacagtgatcaaaaccccacaataaaatggtttggctgagagaatgaataggacactacttgaaagagtgagatgccaactacttggtgctggtttagaaaggaatttttggggtgaggcactcaaaactgtttgctatctggtaaatagatgtccatctgttgcaaacaaattcaaaactccacaagaaatgtggacagggcatgttcccaaacttgatcaccttagagtatttgggtgcactgcctatgcacacataaaataggataagttacaaccaagagcactgaagtgcatgtttcttggttatcctgatggactcaaaggttacaaactttggtgtatggaaactggtttcaagaagtgcatcataagtagagatgttgtcttcaaagaggatgaaatggcaatgaaaaccaaaactcctaatgaaatacaacctgctataccagtgcaaggtctgcaacttgaggtggaccaatctaacactcaaaatccagaagagtattctgaaataaatgcagaaactgacacaaatgaaggtgttattgacttaagcacctatcaactagctagagacagggtgagaagagaaaccagaccaccaagcaagtttggatatgctgatttcatagcatatgcattactcactgtagaagagttagaatcttcagaacctactacctatcttgaagctactacaggcagaaacaaggtaaaatggctaaaagctattgatgaagagatgacttcactcaagaagaacaagacatggatagtagttaagaaaccagagggaaagaaattggtaggctgcaaatggatttttaaggagaaagaaggtattcctggtgttgaaccagtcaagttcaaagcaaaactagttgcaaaaggattcactcagcaagaaggagtggacttcaatgaaattttttctccagttgttaagaaaacttctataagggtcatgatggctaaagctgctagagaagaactacacattgagcgaacggatgtaagaactaccttcttacatggaaaccttgatgaagagatatacatgcaatgtaaagaccgcttagttnnnnnttggaaattagcagataattaggatttaattattaaaattatttatggatatttaaataattatttaagttgatttatttgaattcag

SEQ ID NO: 33178 - DNA, 5046 bp, Cannabis sativa
  modified_base (286)..(292): a, c, t, g, unknown or other
tttttctcatatagtagtattaatagtgatattttggtttaccacactcacgcgtttttaaaaagttttatataaaaacttatagaaatgatgttgtaactataacaaatactgatataaaaaaaattgtaaaaatatattccaacatgtattttcaagcatggaagttgacagtaatatttttttttatttattgaagttgatcaaataattaatcaaacatatttcctttcacaagttaagataacgattataataataatagtaattattattattattattnnnnnnnttattattattattataaaagtttctcaccttcttcgggtggaagaggacgccctagagcttcgcatagaaatggtgccaagaagaagaagaagaagaagaaaaagaatttgaggtgataacaaagaacagcttgtgaaaattgttgtgatgaagccataatataatataatataataattatgttagcttttgatagatgtacttatagaaatcatgcattcaatgattcaaaggaaggtgtttcgattcatagtcaagtagacatacacttatgctatgagtgaataattattgagttgagttctgatcatttaataagtcaatagagtatccatatccacatgcatgtcaaccccacattttccctatagctttcaaagataagataaatatatataaccgacacttaacatatagaatgaaaagcttatgtgtaacattgtgtatatattttagagaatggttaagggcactttatggtaagtagtactcttgaaaagtgtaatatttttttattcttttagcagaaagatattattgcaccaataagaacaattacaaccaaacaagagttcaattaagttattgaactcaactccccgaaccaattactatccattttacttgttttctctttattaaaaagagaaaaccttataataatgtcttttctaatgctttttacaattttttgtccaatataataatgtaatattttcgcttcgagtatttactgggtcttcctctacaatttttttagatcaagcacgcttaattgtagagttttttcataatgggctaccagaaaacaagatgcgcgcattttgttgatataagtaataccaatcaatctatttaagtcctcttcaactatatagtctcatagtatcagaatcatcacacttgacatttcccaggcaatgtgagattgcacaacttactcagtatttttccttacggatcacgagactactgactgtcacaatcacctcccttacggggtctgacgtcagatttatggctcatatacacgagtacatcactctggctacttcctggactaaagactggtcctacaaaccaacacgagtatttccagcatactttgtcctcactcgcacgcttcttgagaaaacttctcaggaggtcacccatcctgaaattatttccaagtcaaacatgcttaaatgtggacttgttgatatataagtagtatcaattaatccatctaagccctcttcaactatatagtcccatatctatacagtgtcagaatcatcacaacgttttccaagtgatgtgaaattgcacaacttacccaatatttctttttacatatcacgagactactgactgtcactataaaattaagagttccctaataaattattcttggactcacaaatgtaattgaccaaagcatttacaatagttttgtaccacttacgcctaaacttagagtgaggacacctctaaggatagcccgagctatctcacttttgtacctacaaagaaagaacaaatgtatatgtgttttttcatgtattccacaaaaaagacattcagtgtacaccaaataaaagaatactaaactctgtctacaccagatgtttatgtgaggtgtaatattgccaaccataaaattacattgggttatgcaggggtcatggcctcctacaattttttttattttaatatatacttataccattcaaaatatctatatacctatatatttgatgctacacaaaagttgaagtctttggggttttttcactaaatatttataattatgaaagcttatgaattggccataaattaatgggcatttaaattttcgttgtctagttctaggacgatttacttaattttggtttaaaaagatctcattttgtgtttgtgtttgtattttttttttttagaaaaatatctctctcaaaaaatttaagaattaaaaatttattattgtataatcatagaaaaattatatggtaagggcattatttatctttattggtagggacatttttatatacgataatttaattttttttttttctatgacgatgtatatttgtttatttgaaaatttaacttgatgacatgaaaattacttttgacatgtgaaagaaaaataatcttggccctacctcctaagattagggtggtgaactcgtgcactaagaactgtgccagtgccctagttgacattagggccaccgagtcacaattaccccaaaaacaataaatcatgaggttgaagatgtcataattgatgagctaaatataaaatatgtgtattttataattttaattacttttatatcttttttcaataatagttatatacaattatataaaaaatatttataattattatcattttaattaataaataaatatttattattgtattattatcaaattattggaagaagctatgtgtcatgctttcgagctaatttattcgtgcttacatgtcgtgttcttggatttgtcatgccctgtcgtgtctaagctcatatttttcgtaccatgtcatgtctaagttcttattttttcgtgtaatgccatgtcgtgtttacgtacatattttttttgtacgggattgtcatgccaattcgtgttgtgtcaagaagcctacgcatatttacagataaacacttggaagaaactaaggagatttctcttcctaatttcttttccaggactcaagaatgcattctcacccaaaaaaacatatttttttcttaaactttgcccaaaaaaaaaaccacaaatatgaaaagtccccattattattaaaactagctaggccagcaaaatgagaagattgagttcattgtttctaaataattctttcaacataatgcaaattaataagagaatttatacggtgacagattttttaacttttgttactcatagaatagatttttaaatatttttacggattatattaattttttacaaattaatatgaaagtaatgtacaaacaacatatatatatatatataaatctgtaaaaaataatgtgaaaaaatagtacatcgttatttttgtaatattgttatattcacaattaattatgaaaaaaattctccattaataatagttgtgattcattcttctttctttagtaatctagaatggaactttcctcactagtttcataccaagagagtggaatttgtctaagttagaaaagatgtaagtttcttcggaaaaataatacagggagggaccacttttgttcccatcggtaaggatatatagttttattttgggaggaagtaagcacttttcaagcatattaaaaggagtttgagttctttgagtttcagtaaggtttattcgtcaagttagaattaatacatcaatcttgtggcatacaattggaaggagtctatttatgtatatataagtcaaaaactttgtatttgtggtaactttactaatgaatcgatcagtgtgtttggttcgttcataaaagattgagttgtgaaaagttatttgagaaactctactttggcccatgtttttatgttcagttaaagatgttgtaagatattttaagtatgcttataatcatatttaattacaattataaaatgtaattattagtttaaagtaaggtaatgtttattagaaataaagtactcacatgaatatagttacagtaaaatttttatttaagaatatacttgtggcaccaaattataaattctattatagttaagaggttataactagatgcacattagaaaagaaaattttaaaacaccaaaaagtataaaatgttataataataacaataaataacctttaatactatgtcacaataaaattatttttgagtaaatataatatatatatatatatccatgtgttacaatttaaaataaaattattaattctacataaataaattcataaactgtatatattatatttagatataattattcttacataagtatgttttttgtataattaattgcaatttaaagattattgttatttataattggctcaaattataacttaatttttttataataaattagaggttattctttaataaagtattcttagatacatgttttaatgtaattggatacagcaattgttataacatatatttaatagtaaagtgaatattcaattttattaataataaataataattatggagaatatgtgttttagtataatttttagtgttttgattcgaattggaggaaaatttagtcctaaaattttacccatttagtatcagagttagagttaatttaacactaaatttaacatttatactattaaagttatcctaagtgagatagtaatgagtgtttaaagtctacatacaaaaactttgcattaattgtattattggagtgatgcatgagagtatattttgttcacattccattgaataagtcaatttgaatgaattattggttgttgagtgactattctactctttaaacacttcaacagtgtgtctattcctagatatatctctttatttatacatctagtctttttttcttaatgtatatggtggtaaaaatttaaaatatagtgttttaaaaataaaattagatctttattcttaataaaatatcaaacgtagtattttaaaaattaaattaagtatgtcagttgtcggcccgaaattgcagaaattctaagtgtcaaagaggcacttagttggataaagaagaataacaagtcgaatgtcattttag

SEQ ID NO: 33179 - DNA, 2471 bp, Cannabis sativa
  modified_base (276)..(282): a, c, t, g, unknown or other
ttagatcaaaaggacttgaataggcttgaaatgtgaggcttaggctcgggtttggtaaatgatgacatttttaggctcatgacctaactacctcactttatcaaggactttttttctcaagcgctcacccaagatttaatgttcaacccaaaatgttcactccatttagttcccactctcttgctatatgtatgtactatatatatatgtattttttttttcaactcaactagataaagagagaaaaaaaaaacaacctttttctttgattaggannnnnnnaccccaaacttagccttaaacttgtcccttttttctctctctctctctctcttattttatttaatattatgattatacatatatgtatatatatatatatattttttcctttcttttctgttttttttttctcatatatcaatatatagcaagagaaggaatctagtgttatgtgaattacaaatctcaccaccccgcctcacatcccatcatgtctctatgagcttgtttttccacatcttgcaaagatctatcctcacttccctatcccaaataatgtttggtttgtccttgataaatttcagcaattaggttcgggttgtgaagaataacattttgtgtgaatgtgtggatatagtaactttgatgggtgtcaagaaaaacaaagtaggcttttggctcaatttggggtaactattgacaattaaatactctcgggttggctagaaaggctcaatcgtccaagaatcgcctaaatcatttccaagttataaagctcactaggatttcgcttcaaggattacactaaccaattctagatgcttaaactttctcaaagtgttagctattctagaaactcaaagtatggtgggataacacaagcacacaattgttgaaagcattcctcataggctatcatttagacaaaattaacacttaaaattagcattttcaacacacaaaccaaggcactccacaaatggaggaaaatgaatattttttatcatcgagcgctaccctaaaccaagctgaaaatacaagcactaattttctcaatcacaagctaaaacggaacatcacaaacatgacaaaacaacatgattaatacatataatgcttactacacacaatactaaagtcaatcaacaaaagtagactcacaaaggaagccaaaacaccaaacagtagcaacacttaaactagcacacctatttcaacaacacaacacaataacagttaaactaatttaattaaataaggagaaaagaaatactccctcaacaatcagactctccaccaccggagtccttttcttcattatcaacatggcaccaaggttcaaggatttcctccgggaaagcgggaaatgcagcggctgttttaggctggttgcgacgaagagtttgcatcatccacgcatctcgctccctttcatagttccagtgagaatgcagccgctcacaaatctgttgttgtaaagcctcatgcttggacagctgctcgtccattggatcctttgaagtggaagctgcagcagtggatgcagtggtacgttttggggcacgagcaggcccgaagctaactactcccttttttggaaccggatcctcgtcagtcaacatcggtacattagcgcatctacacatctcagtaatgaggcatgggaaaaacaatttccctttgacccggtgtgcgcattcaaagatctctttagctatcaccttgctgacattaatcttcttgcctttcacgatgcaatatgacatccacatcctttcccgactcactgtggagtcatgtgacgtaggcagcagagtggattgaacgaaattacatagacacttgatatcatgtttcagatcagtccgtttgaaacggaacacaccatgcccatctatttcccactctgcttctggagttgccaatttgggcacaattttgtgcattagctcatcagtgagcttaccactatctttagagaactcgcaagtcacatttttgagtcggtagtaatgattgatgtctctgtcggaaaattttactttaacctctcgcaccgtaatctcagctggcaattcatgtgtcagaaaatttgcgtaaaattcctttaccacttgacaaactgctgaggccggatcttcgcacaattgtaaccaattcctcttttttatgttctctattagccatggcggcatgctgccgaattcctaatctcctactatcattcctcgctcgacataaaattccttgtggcgaaccgaatcaagatatttttttttcagcagcgctcaaaacaaatttttcagcttctcgagcatttttctgtggaggcttatgagcacacctcttgatttttggcattttgtctctgcttaataaaactcagccacaccaattcttttttaacaatcccaatccgcaccagtgtactcataactgaaaattaaatttcaatactatccaccact

SEQ ID NO: 33180 - DNA, 1641 bp, Cannabis sativa
  modified_base (34)..(44): a, c, t, g, unknown or other
aaacccttatgggtttattttcattgttttagannnnnnnnnnntaggatgttaattaacatacttgctagtaaatctagatcctattaaaatattcccaacaatatgtgagccccactaattatattttttccatttttaaactatttctctattatagttttgtaggagttctaacttgattggctttgaactttctccatacatccttggcagagttttggtaatcaatttcttcaacctcagttgcccttgatttacgccctgttccaaattttaaatagtcgaaggcacctcaactttaagttctcattgtgaatcgtgaaaatcttcatctagactcattttttctacattactctggtttgaagggagttcgaagggagctatgtaaggagtttttgcatcaatatgtgttattcacagctactttcattcatggtttgatatatcacacataccccattccaaaactatttctcacttcatattggaagttgatcactatgagctaccctatgactttatcactgctataataactccaaagtcccctccattattcatggaatctgacggttcaagcaggaaaaaatagttacctacctattagaaattggaaaaaaaaatgtatgctcttttttctcaatttcctaatatctttcttcaagctgacattattggctccattgagaggtattcgtctttgcaacttaacaaaggtattcattttgaatctggctaggtatcttgatatcattgacgaccaaactttttttatatataaataatgaaaaaaaaataaaggaagaaagtaagcaccataggattgaaaaaacataaataaattgttataatattttatgtggactgacataattaagtgccactcactcagtgtcagtattagcatataatgataactatatataatcggtaatgcatggtattatcatcgggccataatgggatggacataacgtactaacacgctcggggcccatggacacactcttaaacttctttggtcagcccattaggccaagacaactagttctctctaaattgggcatgtaggcccaaatagcccataattccttataaaagggatgtgctcttgattggtgaaaatagagagaggtgatatgagtgtggctagtgtattgagagaatgtaagaatagtgtaactattcatcgaacccttgcacactttgtctttctttgatgtgaacattaaagaaatgggaagagcacaagtgaacgtaagaatttatggccattactacaaggtaagagtgccttttattatatatctttgatgccttaaataagacaattttgtattattttagattgagcataattgttaatgtcaatcttttcttttgttttgatgctcattatttattaacgattggtatcatgagcttggtcatctaattttaaggctcaaattaatattattattttgtttaatatcatttcttcccatttttttctacacccacgatttctataaactcataattttttttagggttatttgcggcataaccttcttaagtagttaggtttttacaactaacccccaattcaaaaaaatttagcggtaaaaccccttaaactcgtgttctgttagc

SEQ ID NO: 33181 - DNA, 1158 bp, Cannabis sativa
atgttttatttataattttacgacgtaaaagttttatttataaaaatatttctaaagttttaaaattacaagaatataatattctcaacaaaaagtaaaaaaataacttaaaaataacaaaaaatcaacctcacgatagttatcaataaactacaaaataacctcatgacaattataaaaccaaatgtaaaacaattaaaaaaaaaattattatttttactgaagaatatttttgtaaataataaagttcaaaatgtaaaaatgatattttttctgtattaatgtattgtaattttttctttaattttttgatctattatgtaattttttttttatttaaaattttatggaacactcttatgtatactttggcatttaagtgaattttttagtttaatttttttcttagtcatgtatattgtagtttttaaagacatcttgcaaaatttttgaaaaattcgaaaaaaatttaacacgcaaaaaataaagttcaaacagtctgttgcacatgcgactctttaattttatacgtgtgtaaaataaactatttaaaaattgctttttatgttgtaaattatttcaaaattttcaaaattttacattctatattaaataactataaagtacacaactataaaaaaaattacttaaaacgtttctcttaatgtcgaaatagtaaaatatatgttagttgacttttttagggtgcagtgtagaagagcattgctataaactactgcctagtactatttataagtagcgttttttgattggttcagagaaattatttcgttaaattatatcaaacaagtgttttaggcattagtgtattataacattcttcattgtagaagcactctttattattttgtataaaaatattattattggacactatcagtagtacctaacaccttttagaagtgatgttcaacgattagttagtgatattctaaaattattatattattacgatgaaaatatttaacaccactagttccttttaatattttacttcgtatattaaaaaatactattggttcaaataaaaattgggtctcatattacattcaaattgcaagatgacatttctaggagtgttagtcactaataatagcccataacaatactcttgtatattttattacaatttaatcc

SEQ ID NO: 33182 - DNA, 2497 bp, Cannabis sativa
gttgtatctgaatagttgggcataatgcctcataaacttcttcgatccaatagctctgtttttttatatatatacttaaacattaaaaatttattaaaaaatgagagaattaaagaaagaataattaaaagtgttttgagtggttttaaagtatcatgtcaccgctttatatgtctatagattgttttttttaaaaaaaaaaaaaaaacttctaaaactagcaatttgtttccaattaattttttaaaaatatttatattatagaatatttgtacacgtacaaacaaaaaaaaatgaaattaacgtgaaaaccacatgaatttcttcaaagaaagaagcacgaattgggcacagcttatcacctgtggagattcaataacataacatgggagaggaactgactgtgttttggaaagaggctgaagagaagaagtttaagaatacagtgaggtaaaatcctccctctcttcagaagtgcttctggaatgaaatttgtaagaactttccaagtatgagaaagacagatttagaattaacagtcaaggaaagccgagaaagccagagacagtcgttggacagaccatcagctttgtcaatgacgaagccacaaattcgctccaccctcaccatgatgccttagtcatttcattatatattgcaaactgatttattaaacatgtattgatcgataatgagagttcagctaacattttatttctcaatgctctcagggatatgaaagttgacgagtcaacaatcacccgcaaatccacagtcttaatcgggttcagtggtgagtagaagcactcgattagagaggtcaacttgcatgtttgggcagaatgggtaaacctccaaaccaagttcatcgttgttgactgtccttcttcatacaatgccatccttggccgaccatggatccatgagatgaaagctgtgccatcctataccaccaggttatcaaatttcctacaccatgggaaatatatcaggggcacaaagagcagcgcgagagtgttatcagagcaccctaaaagaaaaacaatcaaccttatagcaactacaacaatcaaatgcaatgattgatccagatgagcctaacatggaggaactagacgaagtgagcattagtaaggaattccgggagcacaaagtacaaattggggccaagctcacaccagaactttgagcaaagttgatcgaatttctcattaggcatcatgacagctttgcttggtctcacaaagatatgacaggcatagaccctaacactattatgcataagttgcaggtagaccccaatttccctccagtgaagcagaaaagaagaaagtttgcgcccgaaagcaacaaagtgatcaatgaagaaattcaaaagctcatcgacattggatcagtcagaaatgtcaactatccagaatggctggccaatgtagttgttgtccgaaaaaataattgaaagtggaggatttgtatcgatttcacagacctcaacaaggcgtgccccaaagattcattcccgctcccttacatcgacatgcttgttgatgctacggctgggaaggagctccttagcttcatggatgcattttctgggtacaaccagatccttatgcacccagatgatcaagagaagacatcattcatcaaagaacgagggaccttctgtaacaaggtcatgttgtttggactaaagaacgccggtgcaacatataagagattggtaaatcaaatgttcgcagacatgctagggaagtcaatggaagtatatatcgatgacatgctcatcaaatcgctaggagcagcagaccacctcaatcatctcgaatagtcattctaggtacttgaaaaatataatatgaaactcaaccctgccaagtgttcttttgttgtttcctcaggtaaatttcaaggatacctggtgacaaagcgaggagttgaagcaaacctagatcaaatacgctccatacaaaacattcaatcaccaaaatcaatcaaggacgtccaacgccttattgagaggatagcagcactcaaccgttttatttcaaaatcttctaaacgttgtcacttgttcttctcaacaatgagaaaaatgaaggtctttgagtggacaaaggaatgtgaagatgcacttagacaacttaaagaatatcttgcatcaccaccactcttagcgaaacctaaagatggagaagcactctacatatacctagcagtctctgaaacaatagtcggggatgtgctaatcagaaaagaggaaggaaggcaacaacctgtctattatgtctcaaagactcttctagatgcagaaacaagatacagccaacttgagaaactgacactagcacttatcacagtaggacgcaaactcagaccatattttcaatgccaccctattattgtgttgacacaatatccacttcgtagcatcctacacaagccagagcttttaggaagactcaccaagtgagtaatagaactcagtgaatatgac

SEQ ID NO: 33183 - DNA, 1222 bp, Cannabis sativa
gtaatcctagtcacacaaatctgggagttcacaaatagggttaacccctgatttcacattcataaattattcaaaagacatttaaaatttatatatttagatagagctcgaaaagagctttccgactgtatatagaactcccaaatcgaagttcggatcataaagttatggctatttaaagtttgcaaatggatctgcctagaaagaaatgagcgtgtcatggcatgctaaataacaagccgcgacatgataaataccatgtcgcggcatctgggttcaaaacacagaaaaatagcagcaagaacacgaaaatcagctccaaaactcaaacaaatcaccccaattcacaaccaaaactcccaaaccataaaataggtttttaatcatcatatagggagtttaaaacacatactccatgcataaaattcacaattttggattgtataaaacacataattcttgcttcaaactagcaatactcaagctcaagagcttgagctaagaaatccatcaaactcaactattttctagcagccacatatcaaaataacatggattgaagctacaaaaataccctatgatcacaatccaagctcaacaaacatgaatcccaaccaaatcatgcaattactcactcaatttactaagattaaaatcaaaatcaagcacatgcaacaacttaaaatatgcttttaccccaataatttcagcaagaattacaacactaaatctcaaatatactcagcaagaaattacctcaatcccaagcttaaaattcttccaaatcaagtaacaccaagcaattcacaccaaaaagttagaattttcaagagacggttaggatgagagagaggggtcgggggaaagagagaaaagcagccaaaaattcattaactttcctcaaaaaaatcaattttgtcaaacatagtaattaaaggtcaaatgaacaaagtgcccttacgacaaaaaattcatctcacatacagataagggtaaacatgtcatttcatacccaaatattttcaaataacaattcagattattccatatcaaataaaatgccaaataaataaatccaatttgcatttcgcgccagaacccggttcaggtcgaaatacccggtttagactataccgcgccaaccagtcagaacacacctaaaaagacaacacaggatactatataataatatagttccatttagcacgtaattaaattaatt

SEQ ID NO: 33184 - DNA, 924 bp, Cannabis sativa
gagctgatgcccttactttacaagaggttcaatacatgttgcagaatcaagaaatgaggatcgaacaaacaactatgcccaatctctcacagtatgacataaaaagaatagtatttataacctacatagataatgcctatataatttataaacaatgtaggacatttagtttcatgtatttttgtagttgtattctaaacaaaataaaaaaaaaaaatcacaaaattttaaaaatagaataaaaaaaaatttaagatgccatctaaacttattttgtgctttcctttatattatatatagatagattttttcaaaaaaaaaaaaaatatatagatagattagaagggatgaatgtggtgtttgtgttttggtagtagatgactttttttttctttttgaatgaaagggataaaaccttaaaagaaaatcaactagaagagaatacggtaaattaaatcctaaaataaaaccattaaaattaattaatgaatttcaataatagtattatagtttatattatactatagaagtggaattaaaatttaaataaattagaaaattaggagatgagagattagaaaataatgacaattaggctgccacatcaactcttaaaaacactcttttatatatatattgatattgattatattgattctattgaaacattatcataataaatatatgaaatcaataataacaatataaatattaataataattaaatatttattaaacatgtatatacgttaataaaatataaataaaattcgtaaatatatttgtatatatatttaatttgtattaataattttagtaaatatattattttagtaattgtatatcaaaatataaatattgacttatctatttttatatttaacttcatgcgtttttttaaaaaaattaattgaaaataatcaa

SEQ ID NO: 33185 - DNA, 1340 bp, Cannabis sativa
  modified_base (1284)..(1296): a, c, t, g, unknown or other
gaattggtcaaagattgcgactgctagattttatatcacctcgggaaaaaccaatgttgtggcagatgcattaagtagaagaggtcccgggcaggttttaccactatgattatagctccttaactggccccaaaaatggttaatgctgaaattgagtttgtagctggaaagttacacaatctgacacttcaatcagatttgttagaaagaatcaaaagggggcagttggaagatcttgagctagtcaaattcgagatgaggtatcggtcggtcggcctaaggactttttaatctcgaataacgaaatgttacgatataaagctcgagtttgtgttcctataaatgatgagcttaagaaggatatcgttgatgaagcccacactacaccttattcattgcatctgggaaccaccaaaatgtatcaagatttgaaaccttatttttggtggtatgggatgaaaagagatgtggtagagtatgtatctaagtgtttaacctgccaacaaattaaagctgaacattaaaggccagcagggttattgcaaccattagccctttcttaatggaagttggaggatattacgatggacgtcgtggttggtttgcctagaaccacaggaatgtatgattcagtatgggtcatagtggaccgtttcatgaagtcatctcatttcatgccagtaaaggttacctatatagtggatcagtatgctaaactatatgtgaaggagatagctcttctccatggagctcctaaatccattgtttcagatagagatccaaagtttacatcgaaattctggataattcttcaaagacttatggggacaaagttgaagtttagtatagattttcaccctcagactgatgggcaatcagaaagaataatttagatattaaaagatttgctacgagcctgtgtcatggactttgggggttcatagtgtaagtacttgcctttgattaaattctcctacaacaacatctactaaagtacaatagggatggctccatatgagatgatgtatggtaggaaatgtcgctcctcaatccactaggacgaactggagaaagaaagtacttgggtcaaaaattagttcaaaagaccaatgaacctatagacaagatcaaggcgcggatgctcgcttcgcaaagcaggtagaaatgttatgctaatccaaagcacacagatattacatctcaggtaggggaacacgttttcctgtgggtttttgtaggaatatattttaccaggatcgagatttactaccatgtatgttattnnnnnnnnnnnnnatgaatttctaaaacaatataaataaacacatttaaagtttagg

SEQ ID NO: 33186 - DNA, 1168 bp, Cannabis sativa
agagagagagagagaattgagagaaaatgtgattttttgataattttggtattttgttaaaaatgatttcaataaactatttccatataataatcagcataatacttctactaatgtccactagaggacaaaatcaaaacttaagcaaaatgaccattttgcgcttgcccacacttaaaacataaaaaatcacttaggggtattttggtcacttccagaattctgactatttctgatattcccaatatctaactatactgccccgctatactaaaaatactatgatgtgattttaatagccaaacaccgcgttctaatattgttgggcacaaaacatgaaaaattatgaaattccatatatgacatataaaatgcattgtgaattcaaataaatcatcataaattactaattcaaagctaataaataagttacatatataaaccctaattatctgctaatttccaaattaaagctaagtagtctttatagaagccttcataccttgaacttgatcggttgaggggatcaccattctcgacatatataaatgccctacctataccaaagttcaagatgccagtgtggaagatgtaactcgacctctagaaggtcactagtgatgtgcgttgttgcatattcccagttactctgtcaaagacagcccaacaatggtacttcaagctcatcccggggagattcaactcctgggttgagttctcacgagaattctacacacaattcttttcctcgagactcataccatcgcagttggaagaccttgttgaagtcaaacaacgacaaggggaacttctaaaagactacattaaagatttatggccaaggctaccaaagtcaaaggccttactgaagaaggtcgatatacagccatactgggggcatactcccactaagcaacttctagaaggataccaggaggatatcgaccaacaacatgaaagagcttctcgatagggcaaacgactttatcaaattagaagaagccatacgataggtctaggcaaggcttgtcaatagcaggcagtcacggggcacccagcagcctcttgacccacagtgcgcgcaggcggcaacaacaatactgcccaaacctctagtggtaaaaacacaagaatcaagcgcatcaccaactgttgggttttgtgccct

SEQ ID NO: 33187 - DNA, 1260 bp, Cannabis sativa
gatttggacactggcttatattatagttgtctgtttgaaaccaaatgcaatactcattatgattaaaaaaaattgcagtctcgatttgacatcttgaaaattcattcgaggagaatgaatttaatgcgtggtattgatttgaagaagattgcagagaagatgaacggtgcatctggtgcagagctgaaggtaggttctctctttctggacatagtgtcccaaattctctttcgatggaactggtagattgaaaagttagttgagttttatttataataaacacattggtttatctgttctgtgttgcaggctgtgtgcacagaggcaggaatgtttgcattgagggagagaagggttcatgtaacacaggaggactttgagatggcagtggccaaggtaatgaagaaggacactgacaaaaacatgtcgttgcgcaagctatggaagtagttcttttcggatgtgctatgcaagttctagcttacattatacacagttggatgttttgaaatttacctagattcacgctgtattttttatttattgcatacccccaaaaaaatcacttttacactaagctgaaaaggaatttggtataaaaaaaaatggaaaaattgagattttattatgtttcagaacacgagtatataatttcaaataaaaactaaatcaattggtatgtgtgaaaaatctcaagcatcagcttataacaaaatgttcttttaagctttggatgaaatatttatgaaatctcaagttgctgcaattttttaaaaacaaagttgagagggaatgactgcaataatgattttgtttttgaataatggactgcaataatgaattgaatcaccgagttaaagtaagaatgagggaaacaataatattctcagaacagtctcctcaacaaaatgcatattaaaaaatatggataaatttatcctaatttttttctcttttatatataaaagcgtttctgacattcctcactcacaatattagatttttttcaatgccataaactttgctactatctttgcataatatttttttaatatatacttataatgtgtaagctgctatcaaaatggggatgtagctcaaatggtagagcgctcgctttgcatgcgagaggcacggggttcgatcccccgcatctccaatttcaacttatttttctccaatatttggatgaatacttttttttttttttttgctgaaactcgacaatgatgaacaatcaaacagttttcattccctatt

SEQ ID NO: 33188 - DNA, 4020 bp, Cannabis sativa
cacgtgacaattcacttaacacttaacatcgagctacttacaaaagttccaaaaatacaacttaggtattattaccgccaaaaatcaaacttaggtatatttatttaataattgagagttaaacttaagtatttatgtcgcaaattactcttagtaacatgtgtcacacatgctgacatgcccttatctaataaattatatcaaattaacaataatacaatattatatcataggctaattatgatttttgccctctaaactttgacatataccaaatcatgcttcttgaacttttcaggtcgttaaaagtttccctttaactattgagattattgaatttaaagacttttgttcaattttactaaagaaagtctgatgtggataaaaattttgaaggcataatttagtacatgctaaagtttatatacgatgcatgattttatagatatcaaagtttacgggcacaatttagtatatgaacaattgccacattaacaaaattgaaagaaattagacaaaagtccttaaatcgaacaatttcaatagttgaggagaaatttttaatgacttgaaaagtttaaggagcataatttggtatatattaaaatttagggagcaaaaatcataattagtctatatcataaaatgattgaaggacaataaatgatatacactgattcttaaaagctataacacttgagagaagagaaatgctagtatttttttatgtgtcaatatcgctattggtctaactaagtattgaatcctatatagtttattaatgcaataatttttaagaaatatcgctaaccaattataaggttatatatctaaaaagcactaaatactactggtgcctaataataataatactgagagaaacatgaaatattggacaataataattatatagtaagtcaagaaaaagttgttgaaaatatcaatttaattcaaataaccattattatttgaaggaaggggcattcaagcaatttatagaccaaacaaaaagaaaaatgaacccttatatgacttttaagatggagagagattaatgatggaccaagtggtcaattgatgatcatagttgatgctgcaaacccaagaatatacaggataagcttcaacacaggtaagtactgcccattaaggttttttccttatgtttctattgtctttatcaaataatcgtagaagcgggaacattttcatgtaccgttgctgctatctccattttcattccgcacttatcgtgggagttagaacttttattgcaaaattttttcttgacttcttgaactttgttcacaacatcaaaactactagctctataaatgttgatgcaaatcatgacggacatggttccttaggcaataaataacatgcttgtcttgtaatgttaatcttgaggattatgtcaaatagatggattcatgtaaatttatttcactattaatgtatatcattgcagaggagggacaataatttatcaagtaacaggctgtagaaacagcttcagcccaaaagttctttggcaatccagagtgaattagtagacacctaactttttctaaaatagttctattcattctttttaccaaaccattttgttgtggtgttcttggtactgttttatgtctactaattccaacttttttgcaataattagtaaaagtatctgaacaatactctaagctattgccagttctaagatttttttattttcttaccagtttgattttcaatcatggttttccattcagtgaaaattttcaaggccaaatctttggttttcaatatatgtacccaaacaaaccttgagaattcatctataagggtaagaaagtacctgacaccacctctagatactttctggtcccataggtctgaatgaatgtagttgagaatgtctttggaaacatgcttaccagttccaaactttatccttgtggcctttccaagcacacattgctcacataagtctagatccatgatcttgtcttttccaaacactctttttgctgagaatcttgagtccaccattgctgatgtgccctagccttttgtgccaaatttctgtcttctttttctcttcatcttctgctacatttgtctgaaccatcatagtgtttccaggtacgatgtaaattttattctctttggaacctttcattatcaacattgaccctttgacaattttcatcatgccattttcaatttcacagaatagccctcctgatccaacatagccacagagatcaaattcctttttatttctagatcatgcatgacatgcttcaattatgcagttcctccaccctttaattgtaacttgatagtgcctatgccagttatggggcatgacctgttgtcatcaagcctgacagtgcctccattaatcttcttataattactgaattaggactgttctgggcagatgtgaaaagaacacccagaatcgagtgcccaaccagttcttaagctttctttagacactaccaatacctctgcacttccatgtccatcactatcacagttagaaactagatcaacatcacctaatatttgtttctggttataattcttgaggatatgacagtctttcctaagatgagtggttttgttgctgacaaaacactttctcttgaactttgagtctgactttccttgattcttgcttttccctgtgtgttctttgtttcccttcttggaattcttccctcgaacaaatagtccaccatcattcttgtcatccttttgctctgattttttctttaattcttttgacattagagcattttgaacctcttcaagagtcaatgatttaccatacatcatggtatccacgaaatgctcatagttttctatgggaagagaatttaaaatgatgatagcttggtcttcatcctctatcttaattccaatgttttctagatcaaggacgatcttgttgaaatcatcgaggtgatcttcaatacttttccgtactaacatcttgaatgagtactcaagaacagtcgatttgttaaagactttatcatgtaaaggctttccaactttgaccacacaccagaagttgtcttctcttttgacacctcacgcagaaccttgtcctccaagcccaggattatagcactgcgagctttgtcgagcatctcaaccttttctttctctgtcaaagtttctggtaagttctcctctcctagcagagctacttgaatcccttgctgaaccagtattgcactcatctttatcctccatagaccaaaatatttctttccagtgaatttttcaagatcattctttgcattgcccattttcttggatgttcaccagattcttgagctaagatcaagatgatcttcttcgaacttcttctccgagctctgataccaattgttggatttgcaatcttacgcttatgatcaaactctttcttgttggcaatcgaaaacgacttacgacaacaatgccatatacacagatgcataaaaccagagcacttgctcttaaccaaggaaatgaataatgaatgctttcttattattgatgagaaagtgtattacaagattgattacattgtacaagagttaacctatataaagacataggttgaattgggtagctaagctaagacagttaaaaaccagaacagtagtacaaaaagcaatctatacaatgtgaaggcaataactaataataaaattttctgaagtaatgacaacatttatattttgtttatttttgcaattaaacaatttcctgaagtaaaattgatttagggcaaaaaattattagtactctaatgataaaatttgggattgcatatctataattttagagttaatgtttaaatttttaagattattatttttaattttagttaatttaagttagttaaatatatccctccagtagtttgtgaccacataaaaaaaattatttgagaaaaatgatccatctagaagaactccttttatatttagttttcatgtcggaatgtctttttttttttttttt

SEQ ID NO: 33189 - DNA, 1690 bp, Cannabis sativa
  modified_base (625)..(630): a, c, t, g, unknown or other
acccatatatatatatatgtataaaattagttatatatattataattgtatctgattaatacatattaaaacaaaaaaaatatgatatttatttctaatgtcagatctaaatgataatagattttatcaaattgatataaaatagtagaaaccctcttcgatctttgctaaatatatatatatatagatataagattaattatatatattataattgtctccaactaatatatttatatatatgtgtgtgtgcatattacataatgtatataatagtatatgatctacaatttataacaaaaatttaaagaaaaataatataaaacataatttacaacaaaaatgtaatgaaaaatagtataaaaatatgatgcttacctcctatacctaaagctagaagaatgaatatattatcaaatattacataacaatagaatctctttaattttatagaagcatataaggtatatataataggtatgagattagttattaagcaaatatgatataataataataataataataatagtgggatttataaaaaataaaaagccacaattgataatgaataattattaattaaaaaaatgaaaagtcactaataattaataataataataannnnnntaataataaaaataataataatagactaaatttataattaaatatttaaaaataggaataaatttagaaaattgagagaagagagattgaaaagaaatgatatataaagtgtcacgtcaactccactaaaactctcctttatattatatatatatattgataagtggttgttgatcgtagatcactaaagagtattttttttttaaatgttaccacatagtattttaaatcagctacgctttttgtgtagaacaattttgatagatttctagataaaaaaatataagacataaatcttatctcaaacatcataatatgagttacatttgaaaaataaaagagaaaattacgcattccaacttaaatatcaaattattttcaaaaatatgccagcttattttattgtatgaaataacaatacaaaattaatactttttgtatatatacagttagagatttctctctcctctaagtcccaatcactttgctggtatactttaatgtgattttattttttcactttgcatacatcaagtcactctttctctcctttcacacattcatcatttttttatattaaaatatttatctttcctttcttttttatattaaaatattttttgattactttttaggatatttattttaacatatagaaagcatataatttttatcattgctaaataacataaccaaaatcaaatataacattatagtttcttttatatgttgttagttaataagtaattactttttaaacttaaataaaatttaatatatcaatgattaaacaaatttataggtttttttttagagaattgaaagtttacaactttataggttattaaaaagtattttaattttttattttatcttagatgtaataagattatattctaaataaatttattttttataaaataattttgataggtttataaaatgcttaaggaaacaaaataatatcttaaacattatatgttacattttcaagaagtcaaactttaggtgtaaacaaaattagatatatcaaccaatttcataagttattaattttttt

SEQ ID NO: 33190 - DNA, 1816 bp, Cannabis sativa
agaggaatgcgaggaagccttttaaagcattaaaaggcatttggcgacacctccggttttggcaaaaccagtaactggagaaacattactcctctatttagctgtcttggaagacacgattagtgcagcgatagtgcgagaagagggaaagcaccagcaacctgtttattatgtcagtaaaaggttactgggggcggaatcgaagtatccccctcttgaaaaacttgccttatgcctaatccacacatctcgcaagttacaaccttacttccaggaacacccaattaaagtgttaattgattaatccttgagacaagttttatcaaaactagacgcttctggaagattgataaaattgtcaattgagttggggcagtttgacataacttatcaccctcgaacatctatcaagggccaagctttggcagatttcttaatagaaagaataacttctagaagaaaatctacttgttcaacgagacacggacacttggaagttattcctggatggtgcatccaacgagcaacgctcgggtgcagggctgatattaatttcgccaaaaggctttaagtttcattatgctttgcgattttaatttgatgcatcaaacaacgaggctagatatgaagccttcattactggtttgaggatagcagaagcgttgaaggtcaagaatctcatatgtcatagtgattcgcaactgattgtatataaggtcctcagggaataccaggctaaaggcttaaaaatggctaaatatctagagagggttcggaagaacttggaaagatttgattattttaaaattgagcaaatcccaagaaaacaaaattctaacactgatgccttagcaaaattggcctcgaagaacgacttggatgaactaaacttgcttctagtggagacgttaaacgagccaagtatatgtgaaaaggaagacatcaagatgatagatagctcgcctacatagatgactcctataatcaactatctactcgacggacaacttctaactgacaaaaacgaggcacaaaaacttttgtattcagtgcctcgctacacaatagttgaaggaaaattgtatagaagaggttattcaatgcctctacttcgatgtgttgtccctatagaaggaaacgagatcattagagaaattcacgaaggcttttgtggggatcgtgcaggttagcaaagtctatcaaaaaagattattagataaggattttattggccaacaatcaacaaggacacccacgagtttgtcaaaaaatgtgataagtgtcaaagattttcacatatacctcgcataccaccaacgaaaatgaggatgatgacctcgccttacccatttgctatatgggggattgatctgattggggcacgtcccacatggcaagggggagccaagtacgcagtggtagctgttgatttcttcactaaatggaccgcggctgaacctcttgtctccataacctgcaagtcctagactttgttgtcaaaaataatgtctgcagatttggaattccaatgaagatagtgtccgataacggaactcgtttcgatggtgacttattcactgagttgtcggaaaggaacaaaataattaagagcttctcgtctgtatccaggcctcaggtgaatagacaagtgaaaaatgttaacaaaaccttgaaggatactatcaagaagaaattagacgctgccgaaggtagatgggttgacgaactacctcaagtactttgggctcatagaactactgagaagacaacaacgggacatactccattctcacttacatttggctcggaagtaatg

SEQ ID NO: 33191 - DNA, 1289 bp, Cannabis sativa
attgttcatggctgctagtgctagaaagattttgagggtgttgaacttagctacgggagcataagtttgggaatagtcaatgccatgtcattgagtgtagcctttggccactagacgagctttaaatctttcaacagccccactttcgttgtatttaactttgtatacccatttgcaaccaacggctttatgtccaggtggtagcttggtaatgacccaagtatttttttttcaagagcggttatttctttatatccatggcaagcaaccccaatatgtcgaaattgagctgcttcagcatagctttttggttcaatttcagagtatgctgcaagaacaactgctcaaaattaaggatgtaacttgatatatgaaaggaagtgctcaattgggtgtgctatatatgaagcatgacaaatgtaatctttgagatgcttaggtttgtgcaaagtgctaccagttttggtagtttttaatggtgttggggctgctgttatggcggcctgttgttgacaacttgctatagtagcttcggatgtggaagctgtagttggtggttgagaagaaatgtgagttactggtgctggtgtgctgccagtgttgaagagatttttggaaatggctacaggagtagaagctgcatttttagattgagaattgggtgtaggtactggtgctgatatgctaccagtatctgaaaattgatttgggttgatttctggtgtggaaatcagtatgtcagagccactttggagtggttgaagttgtgtatgatgagtagatgaatctggtgtgaaaccagataaattggaggagtcagttgctggtgtgaaaccagataagttggatgactcatttacaggtttaattgtatgaacctgttgatgtatgggtttgaatgtaagaaggacaatgtcatcaaacaggtttttcacttcagatggagatgttggtgaaaataaaggaaaactattttcatggaagacaacatctcttgaaatataaacttgtttggtttcaatgtcaagaagtatataggttttcatgtcgtgagggtaaccaataaaaatagaggccctactcctaggtgtgaatttgtgtcttttggaaataagggtggggccataggctaaacacccaaaacttcttaggtgatcatatttgggagctgtaccatgtagaatttgatatgaggttaaacctttgaaaattttggaaggtgttctattcattagatatgtagctgtttgaactagataagaccaataaaccaagggtaagttggattg

SEQ ID NO: 33192 - DNA, 2698 bp, Cannabis sativa
cgatcgaccttctcaagatgatcgttatcacttgggaactggagatcaaccaaatatcatttcctcgttccttttgactagtcaagataattttcagtcttagaaacgagtggcttcgattaatatcactgtcaaaaataaaactcctttcattgatggcactttaccccgtgcaccattcaatgatccttctctatctgcttgggatcgatgcaacaacaccgtaatgtcatggatccttcaatccgtgtctcgagaaattggtgcaagcatcatgttcaaaactacttctcgcgaaatgtggacaaacctccatgatcgtttcaatcagagtaatcgcccgtgcattctccaacttaagacttctgttaacaatgttaaacaaggcgataactcagtcaccacatacttcactcaattacaagccctatgggatgaactcaacgagtatcaaccaaatactccttgcacttgtggctgtacttgcagtgccatgaaaaaaattcaagattactatgctcgagactagatccttcagttcttgatcggtcttaatgaatcttattggagaatacgagctcagatcatcctctttgatccccttctgccactgtccaaggttttctccatagttgttcaccaagagtgccaacgttgtcttggcaacactggcattgttgctgctgcccctgccaaaccgaaaccaaatcagccttctcagaacaagaagcctcaccctacatgttccaattgccttaaactaggtcacttggttgagaagtgttattttctccatggttttccacctggatatggtgacaaaacgaaaaacacacctactactcgggcaaaccaagttttggccaatcctgaggcccctgttactggctcttctcaactacaactccaccagcaattgatctcttcactcagtcagcaaatccaaagcgctccatccaccagcgacaatcaacctgtggtctctaacgtcttcgataatgataaactttttcctctttttttatggattgtagatagtggagccactcatcatatatgtcattctcttcattgttttacatctctaaacactaatcatgttgctaatattattactttacctaatggtcatcagattcacattaacgaatttggcaccgtaaaaatatttgataaactaacattgaccgatgtgttatatattccagaattcaagttcaatttattttctattaatgcttatcttgaacattgtcataataaactctcatttacttttaatcaatgtttgattcaggatccctccctgacttctacgattgggatagctaagaaagttggccaactatttttctttgagcaagagcggcattttctcacttccaatatttccatctttgcaaacactacttgtcccttgaaggacccttggcatctttgccttggtcatccttctatgaacattactactatactaaataaaagtttgcaattctgtgaaaaacctttggattatatgtgctctatatgtcacttttctaaacaaaagtggcctccttttatttctaataataattttgctaatgctgctttcaatttaatacacattgatgtatggtgaccatttcatatcattagcattgaaggttatcgaaattttttgactattgttgatgatttttctcgttacacttgggtttacatgctaaactctaaatctgatgtctcttttattattccaaaaaaaatttcgcttattgcaacacaattttcagttcccatcaaagcagtgcgttgtgacgatgctaaacaactgaatatgacaaccttttacaatagcaaaggcaccgtgaagtacaactcttgcattggtcgccctcaataaaattctgttgattagcgcaaacatcaacacatattaaatgttggtagagctttactgtttcagtctcatttatccttaccttattggagttatgtcataaatattgttgtttatctcataaatcgaactccatctatattacttaacaaaaagacttcatttgaagttctctttaagaaagctcctgtctatcaacaatttaaagttttttgggtgtcttgcttttgcctccaccttggaaaccaaacgacataaacttgatgcaagatctcgtccttatgtctttattggttatccgcctggtatgaaagcttacactctcttaaacattaacactcaagagatcatttactctagagatgtttattttcatgaagatatttttccactatctgacactaactctccaaattcaatagatcaattattctcacattctttaccgccctctacaggatcatctcaacacccttctgaggagcataaatctgttcccaaccatgatgccacttcatctcataaaatagacattcctccaagtgtgaaagacatcaacacacatgtcccacctcctgaggaagtaccatccacacccaaggagtcaataattcattcccctatcacttcaaaaataggaagaactttatccaaacctaaatgtctttcagattacatttgcaataccactactactttgtccactgcttacactattaacaaatatttttcttataataggttaacacaacactttcatatagcaatcctcgctgccccctccattgctgaacccaccagctacaaaatggcagc

SEQ ID NO: 33193 - DNA, 1293 bp, Cannabis sativa
  modified_base (80)..(80): a, c, t, g, unknown or other
  modified_base (770)..(773): a, c, t, g, unknown or other
  modified_base (821)..(821): a, c, t, g, unknown or other
  modified_base (1056)..(1060): a, c, t, g, unknown or other
tagtagctgaaaatattattttgctactaaatacaattggtagctaaaaatacaaagatcttttgctactaagaaatatngtagtaaattggtagctaaacacaaaaattttactaccaaaaattattggtagctaaaatgaacatttgcctactaaataatttggcagtagaaatatttggtcttatttgtttggtattgactactaagaactttttctactaaaatttggtagcaataaactattttttgctaacaataaaatttggtagctaaaagatatttttcttgtagtatatttaggcatttttcctctaccgagataagtaaaaaaacacaatttatatagtactacattaaaaaaattgtttcaaaatttttaaatattttttaccaaaattattttaaaaaataaaattctatataaaaaataattaaatacttttcaaaaaaaaaaaggaaataattaaaataaataaatatagtgatgcgtggagtgtgtggcttttatttttagagtctaacatggtgagactctaaaagtctatagtgacgcttggggagtgagtctaaaaggttttagtgacacagactatagtgtcactaaatattacctttccagttacccacattagtgactcgcattgaaatttcactaacaccttttagagtctctcaaaatgggtcactgaagctaatttttgtagtattgatatgttctgacttaatagaatttatacattaaaaataatcatgaaataaattatgtnnnncatgcaacataaaagcgatttctgttcttatattaattagtaaatctnattatattgaaatgggttttatgtaaggcacaaaacccaacatactcccactcccactaatataaaataaaaagtgcatttcaaataatctcaacaacttgatatccagatcaagtttagtatgtagtattctcttcgtaataggatctgacaagttgtattcaatacaaactttcctccactattacatatccttaatcaaaaaatccttaaaattgtgaaattcctctctatnnnnntactcctctagggatactagattctttactttttagaaactacttttgtgtttgtcaggaagtaacactagtagttaataaattgttagtacgatgccaaaaactgtatagaacttttcacaggctgaataagtatcttttcgacaactttaacattcagtctcactggtagagttagagactcagataagtttttacacttctccaaaattactactccaccccaagagtaa

SEQ ID NO: 33194 - DNA, 1767 bp, Cannabis sativa
gccaaatctgatgcctcggatttttccctctctctcctccgcttggattagacatgaaaggccttccgaacaaataaggaaaaggtatggggataatgaatcttcttgtcgcaaaccccgagttggataaaaattccctatcctttccccattcactagaaccgagaaggatacacttgtaacacatcacatgaccttatcaatccattcctccgcatagccaagccctttcatcatagtgacaaggaaactccattcaacccggtcatacgcctttgacatgtctagctttaaggccattttcttaccattaccgaatcttctagttttcatgcaatgaagactttcaaacccaataatggcattatcttgaattagtctccccccaataaaagcgctttgttcttccgaaatagcttggtgaagactatctttcattctccccgctagacatttagccacaatcttatagattacattgcataaactaatcggcagaaattcggacatttgggtgggcttctcgctttttggaattaagcatataagggtgtcattaatttcatctacctgatgcccttcatttaaaatccccaaacacaccttggacacctcttcccctattgttggccaataatccctataaaaaagaccagacatgccatcatttcccggggcctttagaggatgaatagcccgcatagcctcataaatgtcatctgaagtaaacggttccagcagcatctcatttgttgaagtagaaatcttgttgggaataagcctttgaaactcatctaactcctctcgggttgctgggttggtttggaagagatgctggaagtacttacaagccacttgtcccaccttcttattaccactaacccaatttgcattgctgtccaacagcccttctattgtatttttcctcttttgggtacttgcctttctatgaaaaaattttgtgtttcggtccccctctttcaaccaaattgcacggctccgctgcttccaaaaagcttcttctttatctaataaagcattctgtttccgctctatgtcctttaagtgactccaatcttgtggatccgttctccgtgaaagagtattaattttatcttcatactctttcagcttcatgtgacgctccttcttcttcattttattccaatgttgcagggcatttccacacatagctagcttcagccgtagttctctagcagtaccagtaccactttcggccccccaagagtcatgaataatctccgcacagtcttcatctttagcccacgcactttcgaagtggaaccgagaatgccatttggttctaggaatttctccttgattacttttgagattttgcaagagaagaggacagtgatccgaattaatacgatccaggtgggtaactttagttgctggaaaaagatcaaaccactcttcattcccacaagctctatccaatctctcaaaaatgaggttgtttttccttccattgcaccaagtgtacttactaccttcgaaatcaatttctctgagacaacaagcatctaaagctctgcgaaaattgttcattaagtatcccggttttggttggcctcccaacttctcttttttccgcaaaatttcattaaaatctcctccaatcacccatggacccgaatacatctttccaactctagtaagaagtttccaagaatcagttcttctattagggtccgggtctccatagaatcccgtaaaatgcacccttggtcatcatcttcctta

SEQ ID NO: 33195 - DNA, 1080 bp, Cannabis sativa
acaatatatctttgtttaattattttttccaattcgagataatattaaatattgtaatgttactatcttaaaaaaatttgttacattatttttttaaaaaaaacaatcaatataataaaattgattaattaactaaaaagtattttttattaatcattttctcaaaatcaccagagtttacaaatcaacaatttttttacaaatactaatcttttttcatacagaaaatttaaatgtacattacgaactcaaccaaaataacacttgatatcaacacttcaaacttagaacataagaaataaaataagttacagctcaaacctagttacaaaatacatttttttaaaaaaattgctcattttctgaacatgagaattctagatcgaccacgagcctagctctagatccccatgaattgcaaagccttgttgaaagtctacatcatgacaaacttttttcgtccacctacatacacacaaacacacataaacatacaacagaggacaatcaacgaggagacttgtggtagtatctgtttgtgttcatgacagtggaggtagcatgtcaaactgagcgaaaatgagagagagagagagagagaaaaaaatgagcgagagagaaggtcgacgcattgtgtgttgggtattttgggttcttagactggaggcaaatggatctgtggctctagcgcaaaaatagagagagagtgagaggtcaagcgagagagaaggctagggttgtggccccattgcaaaaacaaagagagggggagaggtcgaggtcgtagctccagtatgaaaatagagagaggctgagatgagaggcctcatgcaggtgagtgttgggtgtttagaaactttagggttttttttggtatttaagagagacgaggaagagataagggctagtatttatgtatttgtttatttaaaaggaaatataggttggaacaattacgatatacaacattaatttagatattttcttttttcttccttgtgcattattttttaacttttttttttgtagaaccagcaagcattattttttcaaagtgtatattgttagaaattattttac

SEQ ID NO: 33196 - DNA, 1480 bp, Cannabis sativa
acctgatgattaccatctaatttctaaagaagaaaagaggtgttgatggacaagtcgaaacatttaaagttagacttgtagcaaagggttatatatacccaaagagaaggtgtggagtactataaggatacttttagtccaattgccatactcaaatccatcagaatacttctctccatagcagccaatctcggttatcaaatttgacaaatgaatgtcaagacagctttccttaacgaaattcttgatgagacaatctatatgaagaaactagaaggttacaaacttctaggacaattgaagagaaagtttgcaagttgtataagtccatttataaacttaagcaggcttctcactcttagaataaaaagtttgatcaaataatcaaaacttacaactttcactaaaatgaagatgaaccttgtgtttaccgactcaaggataatcaagtggtagtatattcctggtcctttatgttgatgacatcttattggtaacaatgtcaagaagatgactgacgtaaaggaatggcttagcacccagtttaaaatgaaagacttgggtgaagctaattaattatgttcttggaatccaaattattagagatcgcaagaacagagcacttgttctctcacaagcaacttacattgataagatgttagagtgtttctcaaggaccaatgccaaatgggatagtcttctactgatccccaagagatagaagccatgagaaaaatttcttatgtttcagcagttggaagtttgatgtatgctatattatgcattagaccagacatttttatgcagtgagaattgtgagcaggtatatattagtctaacccatgaaaagaatattagacaatagttaagcatattctaaaatacttaaagaggataaagaaccatgtgttagtctacaagggtggttctttgaatcccttaggttatactgactcagattttcaagcttttcttgaaataggaagtctacatctaggatagttttcactcttataggggtggagtagttgtttagagaagtgtcaagcaatctgcaatttctgattatacaatatggaggctgaatacatagttgccgttgaggctactaaggaactggtctggctaagaaaattcttcacaaagcttggtgttattccaaatatagaaaaaccattgagttactttgtcacaacaccagtgcaattgccaacagtaaagagcctcgaagccacaagaggagtaaatacattgagaggaaataccacatcagcagagaatatgtggcaggaggagacatgctggtagaaaaggttgatactgaagacaatatagctaacctattcaccaagacattgacacggactacatttcaaaagtatagagaaaatcttaaaattagttgaaatgtagtgattattttatgttagtacaagtaggattttattgggttttgtgccctaactaaaatcctatttta

SEQ ID NO: 33197 - DNA, 2659 bp, Cannabis sativa
tccgaacccttgggcgggatccgcccaaaaggccatttacttaaaagtaaatgttctttgattttgcacttaaagtggtcatctgacctggtatttttactgatagtactttcttagatgttccccattccaataccttgtgactagaacgagttccatgtttttgtaatactgcccaagtttgcacgctcctaattctagaactttgaccacctgatatggtcctttccagtttggttcgacgacaccagccgtgctatcttttgtgttcaaaaatactcttctgaggaccatatctcccaaaaaaatttctgtgcccttacttacttattgaagtaccgagctaccttttattgatgggctactaactttaggtttgccgaggctcgtttttcttcaatttcgtcaagtgattctgctaggagggcatgattagcctcttgatcataggtcaatcttctgtgggatggaggttctagttctacgggtaacatagcttcataaccataagccatagcgaatggagtctgtccagttgctgttttttcagttgtgcggtatgaccatagtacttctggcaattcctccggccagttccccttagcttcttcaagtcatttttgcaaagcatctttaagtgtcttatttactgctttgacttgaccatttgcttgagggtgtggcactgtggagaaactttttatgattccatgatttgtgcagaaatgtgtataattggctgtcaaagtgcgtgccattgtctgagtattttgtatgagagtctgaactgacatattatatttttcaccacgaagtccaatgctttcttaaatgtaattgttgccaatggctcggcttctatgcactctgtaaaataatccactacaaccactgcatattgtattccccctttatctttaggcaattgttcgaattaggttaattccccaaatagcaaaaggccaaggactttgcaactgagttagctcattaggccgtgcacgggctatctttgaaaatctttggcatttatcacatttctttacataggcctttgaatcttccatcatggtcgaccaaaaatatccttgccttagtattttctttgataaactttgcccagctgcgtggttgccacagaatccatcatgtacttcggacagaggtcgtacaacttattcttgtgtaacacatctaagtagtggcatggagaatcctcttctatacatgactcattctacattgatataccggaaaaccttacttctcatcttcgagcttcatttctatcatatggaagttctccaatgttgaggtaggctactattggtgtcatctagttcggcgctgtgtcaatcatttcaatttcttccgcacaggtgatgctgggttcttcaaggaattgaattgggactaaattagccttatcagctatattgttgctcgcaagtcaggctaaggcatcagtagttgtgttttcttctcttggaatttgcttgagagcgtaactcttgaattgtgcgagcagatcttgtatttttcttaaataggctatcattttctcccccgagcctcgtactctcttgacacatgattcactaccaattgtgagtcactatagatctcgatgtgttcagcgtgcagctcctgagcgagtttcaagccaataatgagggcttcgtactctgcttcattgttggaatccttgaacccaaatttgactaccccatgcagatgttgcccccaggtgtgacaagggcaatccctgcaccaaacaattgatctgtagctgacccgaccacgtgtaatttccaagtaggtatgtcttcattgttgttcagctgggattcttgtactggctctgggttacctttgaactgctttcttctttgccagtgtactcaactaaaaagtttggtaaggcctgtcctttggctgctgtttggggttgaaagattatttcgtactgacctaactctactgcccatttaagtaaccatccagaagcgtcgggcttttgtaataattggagtaatagttggtcaatgtacacccgaacaggatgagcctggaagtagggccttaacttccttgttgctaagattaggcagtaagtaagcttttctatcaaggggtaccgtccttcaatttcaatgagtcttttgctgatataattgactggatgctagacattattttcttctctgatcaacacgacactcacagcatattctgtaacagttaagtatattcctaattcttctccgtctagaggttttgagagtatgggtggttttgcaagttgtctttttaattcttgaaaggcattcttgcattcctccatcgatttaaatttcttattacctcgaaggatgttgaagaaaggaacacacttgtctgttgactttgaaacaaatctactgagtgcagctatccgaccagttaagctttggacttctttagtttttgttggcgatttcatatctaggagggcttgaattttctctgtattagcttcgatacctttggcattaacaataaaaccaataaatttatgcaagctgactctaaaggaacactttaagggattgagtttcatgttgcattttctgaggattttgaagcattcgtccaggtcatctatatgcccccccagcct

SEQ ID NO: 33198 - DNA, 1141 bp, Cannabis sativa
  modified_base (756)..(757): a, c, t, g, unknown or other
tttttttttttttttgataacacactggaaagtttgtgtctgattaaaattcttcccatggaataatatcagcgaagaatatcggctcattcaaataaataagactcggaaaattgagtggcaaaagttctaatataagaaaactaaagttatttatttatttatttattgtgtgtcatgtggcggtggataggttaatattccacacatttattaattagggattaatgcattttaaaaaaataccattgctattggagactagacaaattagaggatgctaagtaacactcatttcttgtaaaaaaattagcaaagatgaagaaaatgtaatttcaacatagtttctagatggaaagattgagtattattattggataatttaaagtgtttaacactatattaaagtgacacattgtaaataattaatatttttaaaattaaatattaaattataccaatatcaatatgttattgctattactacttgacaatttaacttgcccttagcatttttgaggagttattgatcatggcatgatagatacactatatatagtttacattcaaacaaatattatatagtgtagcagtccaaataataaatattatttcaacacttgcttacatgttgaggggcacatttatgtattcagagtaagagaaagagtattgttattgggtaccagtagtgcttagcacctttaaagcgtgtcgctttacgattggctaacaatactctttaaaagttattannttaaattatatgggactcgatactaaattagaccaatagcgatattgacacgtaaaatggtgcttgacaccactggtgccttttagcatttctctaagaaaaaccatcacatttactaccaaatgataccgcacaaagaggctaagtcctaggccaagggagcttaaggtggaccgtacgtggagtgagagttctggattctaaacccaaacaaatgtagttacaaaaagaaaaagaaaggagtattaggctccagtacaccatcactaagtgatgctttagggatattttataatagtttttacattaaatcatgtacacaatacttaataatttcacaaagatatgatacattatgtagtactaaacactactaattggctt

SEQ ID NO: 33199 - DNA, 1267 bp, Cannabis sativa
tttatcattaaaataaatgagtgactgacttttggtcaacattctcccctttttgatgatatcaaaatatttaattatttaaaggaaaagaaaaggaaattggaacatgtagagtttagctcccccttaatatatgcatatattgatttactcagtttacctttgaatatttattgttaccttttcttgacatgacaaagctccaccttaatcatatattcaataaattggttaatacttgaaagcataatatgatcattaatgccaaaataatcaatttcaatatcccccccgttttgattttatcaaaaaggatggcataggaagcaaggtcaaactaaatatatttctcccccttaatcatacaagatatgacttgtatcaatgaagcacaataggtaaagagaaatttgaaaatgcatataaagatgaaaattcatatagtcaaaacaagttaaatattcaatctaccaaaaaacatgtcaaaatcctcaaaagtaagagatacatgtaaataatgacatagttatgatttcaaaccaattcttatatatcaagtataaaaaacaaatgtgttcatgaacttaaatcaattagatgacaagaattgagacattttggtaagtttttcaaaaaatttaagcaagaataacatatgtaccaaaaattagttttatgcatcctttttaaaaaaattctttttgcatcagttaaaacatgattaatatgaagcgtacaagctagaaaaataaaaaaatcttaaaaaatgagagattttggcaagttttactcgttttggccataaaagatcattttaaacaatttactcactaaaaatcgattttatgcaaaattttcatgcgaaatcttttcaaacaactgatatatgataaaacaaacatgctcaaacaagaaaattagaaaaaatgtcaaaaatcttaacttttcggtaagcctttcaatttgcttgaaaactagaaatctaccgaaaatgagttctatgtaaccaaattgaaaaattctttttccagtagtttaataatgtcaaatgtgaggtgacaaacttacgggattgaaaaatgttaaaaattgagtaaatttggtgaaaagcactcttttaggtcttaaaaagtcaaaattatgcaagatagtacaaaaattaagatttgagtattatttttgaaaaaaatctttttgagacagtttatatatgagtatttaaacattaaataatatcctaatctaatttttttattattcttttttt

SEQ ID NO: 33200 - DNA, 1721 bp, Cannabis sativa
ttaataataactaagtattttccctcaaaaaaaaaaaaaagaattttgtatttaattaaaagaataacaaaaaaaaaaaagtttcagctatttaaacgaaaaaaaaaccataaatagaactttataaaatattattgtagaattatgttgagtttagttataaaaaattgtatttaataaatttttctgtttttaatttatgcttaataaaagaaatatatatttaattaaagaaaataacaaaagaaaaaatgtttcggccataaaaaaaaagaagagtataaaatacctctaaaataattaattgggagtaaaattaaatagggtataactaataaataatcagattttcttttttttttttttaaaaaaaaataaataattatttttttttataagataaataatcagatttaatttaaatattttagtaaatatatttaagggtataaaaagaataatatgaaaaccctaacccccaaaccctatttcctcttcttcttcctcctgcctcttcttcttcctgtccctcttcttttatcctctctctctctggcctatttttcgagcagctctgctcactggacggaagtactccggtcaccccaggtctcaatcgccacgaagatccccaccccagaaacccccaaacccgacccctgtcctcccactcgatcccacctttctccctctcaccatccttctggtcttatttgagcacctcacaagtcttaatgagccaaacagatagcagtaacaaccacagtgagatcccattatagttatattttgtctaattattttaaaatttcagttcaaattctggtaacaaccacgatgacccatcttagttatatatataaataatcttgctttttaattaattgtgatgatgatgatgatgatcgagtaaacaaatttttttaattaattgttatatgtgatttgttagattatatatataattatttttgttgtttggataggtttcgtttttggataagtaaaacatttataatgaaggtatatatatatatatcttaggaaattattctgtaataataaataataatatataatatataataatatattaatatgtaggtgtgtggggttatcctccttaagggcttcaaggatctgtgactcaatccttcgtgcatccacattgaccaagaaccatcgccacaagtggaggagctctggtgagcatttcagccagtcgttgttcttagtgttctgggcttctcttcaagtttcaaaactcaattgagactcataattaatgtttgtgaatgtatatttgaatttatttatttgggtataaattatttactattcagtgtaattgtttgagtttgataatcgtgtgtaattatttgaataatgttgtaaacataataatttaaatgtatgttttatgattgtaatttttttttttatttttgttatattattatttttaaaaaaacttatgtatattattattgtaattatataataaattaatttaaatttatttttttaatatacataatacttttaccaacagttataaacactcatttaaaatgattttttccaacagttgtaaaccgtcatttaaagtaacttttcccaacagttataaaccgtcttttaaagttccgtatttttatgacacccacatagccaactttaggaaccgttgagaaattgtataaaagacagttataaactgt

SEQ ID NO: 33201 - DNA, 5628 bp, Cannabis sativa
ttggaacagactccaaactgaacgtacaatcaggatataatctagcagctttggcaaaagtatgagccactacattagctgatcgcttaacaaaagacacgacaacattatgacaagaggcaagcaaatctttacattcttgaatgacactaccaaacaaagatatcatatgaattgaactatgaagagcttgcaccacacacagggaatcagtttcgatggaaacttggagccagtgtctatcctttaaccaactcagcacttcacggatgcctattgcctctgcaacagccacatccacttgagccggggtgaacttcagccgtccttcaaccaagagaccagcagagtttcgggcaaccatgcccaaaccaaagctcctaccattttcaaaaatagccgcatctacgttaaccttgatgctattatcaaccggtggagtccactgctcacacacatcagcagccataaggattggccaagatgaatccgaggatttttgagcagatttccattgatcaaggtagcgaaacgcaaaggcaacaacatcttcaaaaacgaaaggtttattattccaaaccaggttgtttctggctccccacacggcccaacagatggccacaattctgcaattcacttcagccgtgttgttgcagaaagtagcagcacaccagtcaagaaagcttgcaccagcgtttactatggtgccgattcccacacggttccagcacttctgaacctcccgacaagtaagcaaggcatggactatggtttcttcttcattttgacataaagggcacatggggctgactccaacgtgctttgtacgtaactgaactaccgttggcaagcaattattacaagctcgccaaaccaaattctgcatttttgaaggtaacttcagctgccacaatcttcgccaaaaggagctatcagaatcattacaccattggcctttcagtttttgcaaaagagcataagcactcttgacagagtacatgcccgaattctccttggtccaaacaagatgatcaaaggtcctagtgacattaagagggattgtttgaatgagctctcggtctctatcttccaaaatgtcagttaagatttcatcatcccaaaccaattcccctatcttcattaaagcgttcaccgtggcattttccaaagctgggtgagatgacattactttgggattttcttcatgggggagccaaggctcatccaagatcggtatccgactcccatcacccacacaccatctagtaagtaccttgccgaattagtgactgactgagattccaagatgcttctccatacaaagcttggattcgaacccagttgtgcattaaggaaagtaccattcggataataccttgctttgaacaatcgggctgctaatgattgaggacgagtcagcagacgccatccttgctttcctaaaagagagagattgaaatctcgtaaattacgaaagcccattccaccacctcgtttatgagcacaaagtttgtcccaagccatccagtgaatacctttattatcatctttggaagtattccaccagaatttgcacatggctctttcaatgtcgttactgatctcaagaggaagcaagaacacgttcatagcatagctggggagagcttgaacgactgattttatgagaacttctttaccccctttcgataacaactttccttcccaactttgcaacctcttcctcaccttttcacgcagaaagcccaacacagcagttttatttctactcattgtacttggtaagcccaagtaaaaactgccatcatcagcaacatccatattcaagtaattacatatctgagtttgaacattagaatcggtgttgttgctgaaaaaaattgaggacttagcaaagttcacttgctggcccgaagcattttcgaatttgagtaataattcttgtattcgttgtgcttcttgaagcgtggccttacaatagaggtagctgtcatccgcaaacagcatgtgagttattcttggggcgccatttgcaactttgcagccatgtaaccacccatttctctcatacttacacaataaagatgacaatccttccgcacagataatgaacaaataaggagataaaggatccccttgccttatgcctctcgtaggatgaatcggaccaacctcataagcgtcatgaattactgtatacttggctgtggagacacaactcatcactaaacgtatccaactttccaagaaacccattttcctcaacattgcttctaggaatggccattcaattctatcgtacgctttgctcatatcaagtttgagtgccatgaaaccagttttccccttccttttccgctttaagtagtggagaacctcgaaagacacaagcacattgtctgagataagtctacccggcacaaacgcactttgtgagtccgcaatgataccgtccatgaaaggcttcatacggttggtcataactttagtgatcactttgtataggacattgcaaagagctatagggcgtaactccttcatatgttgcggatttttcttctttggaattaaaacgatattagcatccccacaaccatcctccaagagaccatttcggaaaaaacattgcaccatttgagtgacatcctttttgacaatatcccaacatctttgataaaatgcaggagtcatgccatccggacccgggcttttatccgggtgcatttgaaacacggcctttcttacttcttcttccgtgactaaccttgacaattcttcattagcaaaatctgggaccatagccgagacactatctattacctcaggacaataagtattagcagtagtaaacagagaggcaaaatacgatttcataacagtgggtagaccattgttccaatcaacccaattcccatgatcatccttaagcttagaaattgtattatggtgtttacgactactagcagttttgtggaaatacttactgtttttgtctcctcccttcaaccaaaattgtttggctctttgtttccagaatgtctcgcgttgctctaaaacttcaaacagccgatttctagcttctgcatactgctggacagatgcagcatccatcttcggtttcaaaattgccatggtagttttacactgatgaatacgagctttaaaatcccctgtgatgtctttcccccaccgagccaatacctctgcacacgagctaatcttcccagaaatacccgtttgaagttgagactcccaacaatccttcactagttgaaaacacataggttccgagagccaagcattttcaaatcgaaagcgacggggagtatgaaagcttgccttgagaaccggttctaagaacaagggacaatgatccgatgatgacacctccaaattagttagcttagcatcaggaaataaagaactccaagattgtgtgatcaaagctctatctaatctcacctccacccactcaccagtacctctccctctttcccaagtaaaaggataacccaacaaatccatatcttccaaaccgcaagcattcaaacattgttggaagccatggatcaaacttgaagggtacggccggccccccttcttatcctcctgactaagaacattattgagatcccctattacacaccatggaagagttgatctccctgccaggttcttcaaaagagtccaagttcgatctctacaatttctatttggttctccatacaccccagttattctccacttattcccatctggtgaaacaagttgcatatcaatatgagtttgagaaaaacccaacaaagccccatcatccttgtttttccaaagaaaagctaacccaccactaaacccattagcctcaaccacaaaaataccttcaaaacccaaagcacggcccaaccaatcaactctatcttttttacattttgtttcacataaaaagacataattaggtttcttatgagaaataatctcctttaggaattgaaaagtccgttggttcccaagcccccggcaattccagctcaacacattcataatgcttggcgggcctggaaaccagaacccgccccactcatgttttttgggctatcacttcccactgtggacatgcaaacgtcttgatcacccttttcaaaaatgccattatttgtcacattttccacaatctcactaacagcaggattcggcccactattatggtccataatactaacttctaaattctcattgccacctgtccttcttcttttattttccaaaatcagtagagccttatttttggaaatatcctcatttgtcacctcatttgcttcctgtgttgactttccattaacaatagaattatctactaataaatgagaggggttagcagatatgcatggctgtgttctgtcgccagcatgtacaggatcaattagctcctgatttttctcttcagaattattgtaccttgaaccgccagcctgtgaactctctcctccgccattcatggagcctctaaacatggcgcttgatcggagccaaggcgaaccgatcgtatgttgtctccgacgtggtgccgctttgagagaaaggtcgaacattttgtgaattaagtcagccggagtatcaaacaatctgtcacaaaatcgttcggagtgccccaattttccacagataaaacagaatgttggtaaatcttcatatttgaattggactgtacacgtctgtccattcttcttttccagcgtcatcttctttttgagtggtttttccacatcaatagtagtacggactctcaaataatctctccacacacctgtgaagttgttgggatccgatttgacaaaaacgccaatgtagttagccatatgtcgtagggtacttttggacataaaacccgtcttcatatcatgacactgaatccatacgtccagcctattcagattgatttgtcgaggattttcccctggtttaactctctcaaaaatcaagggagtacgatcaaacgtccacggactgccatccacaactctagtaatatctatttcatgatagaactgaaaaagaaaatgatttgggttgagttctttgacatacaaacctctattaggctgccacagagaagccatcttatgttgcatagcttgacaatctatactacgtttagtgaggaagcgacccactaagcaccagcgatcatcaatctccgataagtcaccatcttcatcatcaaggatcagtctgtcatcctcctcgtcaactgttgtattgatctgattattcattctttcttgcctcattccactattaacaccagtatccatataactcatttgtaccaacaaatacaaacaaaatacaataagactcaaaataatactcaaaccatgtcaatatagacaagactcctgttataagaaagagtttcttaagaagctaaaaacagagtgtgtgttataattaaatattttataaattttagaaaatttaaaataatttaacatgctaaaaataatatttaataatttgttgcactcatatctcttttattttgtaagagtataattgtttaaacattgttttatttttatgtgttataaattattggggaattattccatatattatttttttaacttt

SEQ ID NO: 33202 - DNA, 2520 bp, Cannabis sativa
  modified_base (123)..(129): a, c, t, g, unknown or other
  modified_base (263)..(284): a, c, t, g, unknown or other
gtgtaagtaaactttatcgctgactatcacattagtgtaaatctagtgtactgatgaatcatgggatataagctttgaaacatatgatcacaattaccttccattgtgttgacatcactgtannnnnnnataactatatgttctggatttagtagatattttatatcaaaccataagcatgaaaaatacatgtaaacataaacgacttctaatcttttattgataacaaataagattatacattgaaatgagttttatttagnnnnnnnnnnnnnnnnnnnnnnccacttgcactaacataaaattagaagtacatttcaatcaatctattgtcttgatatccatataagtgtagtgtgtttgactaaacccaaatgaacagaactgtaagactgtgttaagaaactgttttctccaccattacttcctttgtgttcataaaacattatgaaacatcgactttttatatgcatcatactgctctagtgatattgaattgtttactgcttattaagtgcatctgaatgtacagaggacgtgtctctaattctatccaaaaaggaatagagatgtaaccgttaagaactttctctaatttaaataactttctaatgccttgaaaaacaactaagttatttagcttcgctagtggagctttaattattatagacaagtttttacatccttctagaataattcctccacccctagagtaaccaccatctttgatattaagttttgagtgagtgtagatataagaattctaatatacacccctatcatctaacatataggttacttttagagtttatttcttgattgtgtccctaatgttccttgtctgattacatctttgatggctcccactcaacaataggagtctagtttaatgcatacacaagtgtgcatttaacctcttaccattggtgcttagggacttcttgttgtgacattttatcttagtctgaaacattaagttccttctagactaagtcatcaacatagcattctagtattaacattaatgtaaaatacttgctcaagactaagtaatcattatagataccataaaacatttcataaggactaggaattgtgcttgagtctttcgaatagacattgcaaaacttcctatcttcataatactgataagttattactatccatatgaatggttagattaacttttcttagttttattttaaagttcctatcttgaacataacatagtaggctaccactagtgtcatcaaaataataatgggatggacttgtaaaatcctcccactaagataagctattgtgattctatatccaaggatttttacaggtatcaagttactattgtaggaaatgctggaacatgtacaagatcaaagaataagttctactggtttgttagtttatatattatattatgtccatgtctaatcaaaccatgtgtgtcatagagattctgtggtgtattgagtataatttagaattcaaagagtttgaactacatatacctataacttcttctacccctaagtgttatagagattttgtagagtttcgaatatagtctagagttcaatagacataaaagatctttaaactacatatattaaataacttcttccatcactatcagatcataagattatacaaaatcttaataattacttaagaattggtaattattcataaacattgaatttaaattctaagtatttatgtggtattatctcttcgcagagattattataccataatttttatatcattaataaatacaaaacacataaaacatgataaacatataaatataattcagtattggcatataagttaaagaatatgaagctcaattttataatagcaattcataataaaatctcttaaagagaaaaatttatatattaatactctcaaaaatgtcacaataaattatttgcaataatataaaattagggaataaaatttttaaactaataattgaaactaaatagttcgataactaaagcaattaatttaaaaaaattaaagaagataatgagcttcatcttcaacttggacaatctccacccttctgtccaaccatttgtctgaattcgcttggatagcaatccaagtttaagcagctggagctgaaataagattaaaataaacacggttagtagatctagaattaataacccaaagagataataattttctaaaatacatgaattcataacaaagttagaaatactttatttctttgccaaaacttaggacactggggtttccagtggctctttttgttaccataggagcattttcatttttcttttgcttttgattaggagccttcttacccttattggctgtgttaacagctttaagaggcttcttgttattcttctttttattcttctttctgggttttgaagtagaagcaatgtttgcctcaggatttgccttaccaactgtagcattattagaacttggagctttgtttcctcctttttgcagtcgtccaatcaaatttttaaatgt

SEQ ID NO: 33203 - DNA, 1705 bp, Cannabis sativa
tgcctctctctcatagtttccctcatgacatggctatcaatcgcaaaattaggggcaggtgttatattgcaaatttttcacctagaaactcgagatcaagctcctgtaagaatgacacgtggactcacgcatccctcgaggattgctgagctgtcagaagaggacctctcgagaataaacctcgcatgaactgaactcagcaagatgatataatcttgacagattctagtcgcattattatgcctcgcatgacgtaggaccaacaaggaaatattcaagtctcgcatgtaccgagatatatgcgatgtctatgaagacttctcctacgacttagtaaagatggtttctttacatagcgagctagtacaaaagacttaatatgctcgatgatttgataaggacttgcacgtcctagatcatcgacacttacaaggtatccacatatgcaactcgattaggacgcaaatacctaagtacaagactcattagtctcgttttaacaagaatgcaccctaagcctacgagcttgtgcgagcatatgaacagacaacttgcactatgaaagtcgcatacattgttgtatttagtgaaacggatttaaactgttcttcatttattccatttacgtttttcttaatttaatgctaatattcaatgtaaaacagtttaatgatcaattaagttctatgtaaccaaaggacacttgctttgtatataaaggagtgatccaacatgaataagacaagacaaaaattcttgtaacaatggactaagcagagcgtgatctgactgaactactatattttcttatgtttgttacttttctatttgtctgtgtagcttcatttgaatactcgcccttctaggttgagtactcgcactttttttgttaaaaaaatagaattttattttattcgatgttgtctaaattcttccgacaacatatataaaaaaaaagataaattttgccgctaatgtattatagtattattataaaatttaatatttaatcattttttaagtcacattttattagaattatacacaatgggggagatgatcgtatagatacaattaatcgttgaattgtttgaaagttgtaataataataacaactacaacaacaaaaacatcatagaaaaatatataaattattaaaaagatattgagcacaaaatttacatttttaataatagaaagctgggtttgataagtagaaaagatgacattctttacgaacattctgattattgtacgaacgtccctgacatgtgccaatccacattcattttattctaaataataataataatataaatgtagaataaaaaaaaatagaattgagaatgtgtccatcccttatgtcacgggctcacctttttaggtagcagaacaaccgtgcgacaccttgacttctctaagccaaaataagccttccaactatccgagtaacaatgggctcattttttgcacgactgtatacctcgtgcacacttccatctctcgaaaaactcccactgagtcatgcacacaagcatccatgcattgaggctctttagcaaagatactcgtactatcaataggtttccacgaggataaggaaattcccaacaccatcacttaccttgtcttaaggtcacgatcaggacatctgttaggctatttttagcctatattttggatcgattttatgtgcgcttttcac

SEQ ID NO: 33204 - DNA, 1393 bp, Cannabis sativa
ttgatttatctcctcttccattgaaaatgaattataagcttttaattgttagagattttatatatcaatgaaagataaatcaagataaattacaactcaactgtaaaaacaatacaagaactaaaataatagattcatatcataaatgttataatacatatattatatataagaaaggtagaagagatgattacaacacatgtaatatacaacatatataatataatatgaagaagaagatatatacatacatacacactcacagccttgagtgtagattagtggggatcaccatgacttgaacaatgtattatcacatttgtccaaaagcttactacctctatctctaagcactaggaaactttctaggaaatagctttgagaattattaaaccttttagggtttctaacaaagtactttgttgatagaaacttgtctactcaatattagcaccttagacctctttatatagtatttagagaatcactatttgaaagtctaactcataacctcaatatattatggactcaataaaaagatgtaactcatacacacacactataatttctatatcaataagaatttcaaattaaaatgtataacattttttttacacaatattggtgataattgtagaggttactcatagtaacaagtaactcccccatatatatgttacaaaatgataataactaatataaactttcatacatacgcttattagtttgtcacacatatttaatctatatttaaaatatagaataaattatttttaaacagaaaactttaaaaaaaaaaaaagtgtcacccaataatttctcataaaccaaaaattatgttatatagcgtacattttatatagaactagatgaaagttacgtagcgagccacgtaaatattagttttatttaaattttagtgaattttttttttaagaaatcaataactaattgtaaattatttttttaaagatttgttttgtaaaagtaaacttgttaagaatgccataattgtatatataagcttatgatgtacacattgttattaataatactaaaaaattagtaatattaaaaattaaaataaataacctatataaaattggaaaattgtaagaaaaaagaatgactaacatgttaaattagaagaaaaattcttttaaagaagaagaataaaatttgtataaaataataaataaaacatattttgaaaaagaaattttacaaaaataataaataaatacagtaggaatgaaaagtaaaattaatatataaaacatgagaaataattaataaacataaattaaaaagttgaattataagaataaataattgactaataataataataataataataacaataataaatgagagctggcttttgtgggta

SEQ ID NO: 33205 - DNA, 1599 bp, Cannabis sativa
tggagttcgtggaagcacaggctgcgtatctttaggccgggagttgggttaggttggagacaaaatggctcatcaactcggagacgaagggagcaagagtgggcccgacaaagcgattaaaccagtccctcagggcatttatattcaggtcccaggcattcctaaaggcctcctcgcgcaaggaattttgctgggcttcccgcaagacctttttcaaagcctctacctcggcgttccctcttgtatactcggccatagcataattgtgcttggctatccagagctgttgtctctcctcatccgcaggaataggggtaagaatgatgttgggaggcacagtatactcctctgcttctggcagaatccccgagtcagagctgacggccagagtgttcaccctcttagtctttttagaagactctgccttcaccattttgcccttgcattttcggtccaggggggctaggatatcaccctcttcctcctcctcctcgacctttccgtcctcgtcgatcaagatgatttggcctagaggggcgctagaagaagaccttcctggggtcaccaactggtcagacgccggaggaagagcagagtcaggctgtaggtctgggcaagagtcgccaaaagatcctccaatggcttggctacttcaaaaagacaaacaaactaagtgtcagaatggccatgagaaaatatgcacatgaaaacaaagcggtaaaactagtcctaccttgactatgtaactcagccctagcaaagtcttgcaatacaatattggcttcatcatccccaagaaagatgtccaagggaagaaaccagctggaagacagataagctgaatgatccaggagaataggtgcaggaggtccggaccccatccgggatcggcctagaaaatgacctaagttggaaaaatagaaggccttggcatgatcaacccaccgggtgggggcatcctaaatctaaggagacgctcgtcaaattctataggcctacaccaggaataatcttgggcagaagggacgtgatagaccgttaagggagacttaccagatccggatttgctggcatcaagagccctagtattggtaactgggaccagcaactaagcccgagaaggcgtccattcttttcccgcctccagtcgaagggtccttccggcaacggactgagccatgatataggctaactcctgttctctcatgaagagatacttatgataccgatcctccgccgaggctataatgtccgcccagagcacctttttagcgtccggggtacgaatgtttgggtagaggaccttggagaggttgaagtcgtccagtgattgactccctgagatgagcttggccttccgtcagttctccgttgtgaccaagtcccccacgttaagaccatttctgtcataagaggagaaaactttggcatgctggaggaaaagctgggtaggagcagtacgaagcagaggggggatcctgacccacttcctgagaagctccgggcgatccatggcttgaagccggaagagaagaagaagcggtggcgatactccttaacattcttttgaaaataaaaagggatcgggccctcgttagt

SEQ ID NO: 33206 - DNA, 10481 bp, Cannabis sativa
gaaccctttatcatattttagaccgagtaaaaagagaaataaaggaaccgactacagcaagaagagattattaaaaagaagcatatagaaataattccttcctggacattgaattgcaaaagggtaagtgctcataataacttggttcaataggccagtaatttgttatgcctagagttatttagcttgttcttctgaattttttatgtttgtaattttttttacgattaatgttgtcacgatgttaaataaaaaaaatagctaaggattgaattgaaaagctttccagagattccaacccaaaagttgatagcaatcattgttcaaccaaacatacagaagaagcaacgggagaaacgcctagtaaaactggtggttattctgagagagagagagtcaaaaatagtaatttttaaaaattttccaaatacaaatgtatatgatatatgcatatttgtgatttgcaatttacttaaaatagcaaaaaacagttggggtttaacttgaaactattttcaccccttgaaagggtcagaactccacaccttcttttactccaattcaatcggataacatccacaaatttcgtgcacccatttcccatatttacttcacatattggcatcttctttcacttgtcctttatttactccttttcctgaaatttgttataatccaacatataaaattggctctgttttagacagagcaaaaatttgtttcaatctttttgtctcaagtacttgctcttataagaaacctgtcattttttcttattattcttagtcacctgaaatataatcaaaagaacatatacacatttatatcttgccttattacccttttgattttttctgaagaagggggaaagcagaaaagaaaaaatggcatttacaggaactttggataaatgcaaggcttgtgataggactgtttatgtggtggacagcatgactcttgaaggagtgttttaccataaagcatgcttcaaatgtagccactgcaaaggaactctttcggtaattatccattttctttgtctatatatatttacatgaatagtatatattttaggatcaataacatgatttcaaatcattacattttagatctagtgacatataataagtttatgtatgtggcatgctcttactaggtagttaaaatgtcagtttttggtatcaaaagtacaaaaatttacacaatagacattaccaaagttgttgtacatgagattgattatgtaacgctgaaatccaacgatgtgatctgatctctaaaaatttcaatctaatatgcttctacagatgagcagctactcctccatggatggagttctctattgcaagcctcattttgagcagcttttcaaggaatctggaaattttagcaagaatttccagtcaggtaactatcttatatccaatgaagatttcttttccttattattttttaaataataataaaaaaaagaaaatgttttagctgacaatatgtttttttttttggtgaaaatttgtctcagcgaagtcttctgacaggcaacatgatctggtattttactttcctacatcttgctcatatgtttctcatttagtatatttatatttgtatgtctcatatataaaatcatttcattcaaatggatggaaaacaataggaataaattatttattgattactgatacatgcatcaaaaatatccaccaaaataaaatattacaaatcagatcttaaacaaataatataaatatgcatatgattgtataataatatatgatatatctactccactccataatgttaaatttacacaatttaatttatgatgtaatcttgtacagtcaagggcccctagcaagctctcatccatgttctctggaacccaagacaaatgtgccacttgctcaaaaacggtctatccactggagaaggtgcgtcattatttgatttatacttaacaattaataattaattaggatattgttatgctattaattaagtaagatgatgatgatgatgatgataattgataggtatcactcgagggagagtgttaccacaagacatgttttaggtgtgctcatggagggtgcccactgacacattcttcctatgctgctcttgatggagtgctctactgcaagcaccactttcagcagctcttcatggagaaaggcaactacagccacgtcctccaagcggctgctcaccggaaaaatgccactccaccgcccgaacccaccgaagaggtgtcggagccccctgttgccgacgactagactttcagagaaaagttctatttaataccatacacaagaagaaaatggaagtttttattgggtgccaccgcacgtgtcagtgtctctcccatatttcctctccaaattcatgtctaacttgttcagcaaaatggatttttgagcttgttaagctagttttgagagattttcctttttaattatgttgtttaagaaaattatatatgaattgagatatatttatttattgattcttttttattgtttttgtatgtttttggtcaagaaatgtatgattttttttcgttttagacacggatttccactgatttttatgatattttgtactttctttttagttcccatgagatactctaatcatcgtagactcctcgttggatggaggaatctcaactatcaagtgtcttattttttttttaaaaaaatgagattcttctatatttgtttctttgtccctctaatattgtcaagaggcaaatttttttttttttttttttagggaacgaggcaaattgaacggataatagaaaatgcaaacgaaaagaaaaattaataacaactgtcaatttttcaaaaacaaaaaataacaaatgcaaaataaaaaacgatggtttttacatgtcattctgaattattacatttaattaactataaaattattttagcatccaatattctcttaaattatgatgttgtaataatttatcaacacaaataaaataataatataaaaagacaacaatgacgtgttccaaactgttttcgagtgggacccatctgacaaggctacaaaagctatgattggatacttgttctgcacgcgcttgatcgcgagtataagacagcttatagaaaagaatatccccatagcatatataatattggtaaccattttagtaactctcttgaaaataaaaaaattcacaaactaaaacaaaaattttaattttaatttataaaaaaaaataatcgggttttgtatttcccccttctcagttccaggccccagagagagaaagagccctgagctgcaatttcatttcgtacaaccaaacaaacgaaagctgggctagcgaacctcttcacctcactcctcagactcaattaggtatcagttccgtcacctttctcttacctttctccacctcctcctttgatttctcagttcgtcttctattttagctccatcactattcgatttctccgtctcctttacaaacgtacaaataatgcatgcactggcagttgccgccattcgttgcctttacttatacatgaatattcaaaagaaattgctatttacatcaagtgtgtcgagtcgtcactcgtctgtattcgttgttgaatatgttaatttttttagcgctaaatgaagaaaaaatgcacacacacacaaagagacaaacacgtatgatatttatatcagtggttttagggttattggtttgttaatattattatgattggaatcggtttatacttatgtcgttaacaacggtattgtgtgtttcaggtgtttgactaatgacgaatgagagaattgagggtttatgagatggtttgcagatagcgataccatattttatttataagaggctgtgttaattggggcggggagttatggatctggcgtatagttttgggcagtcaaatgtgttatgctatggtgaaggaactagttataaaacgttcgaccgttctgattcacgcatcttgtcaagaaatagatattttagctgcaactttcggggtaattcacggacagctttgagaacgggtagtggtaagaaggttaagaaaactatctgtttcagtggctgtgagaaatcggattctcaaggattaagtttaaatcctagaatatctttgtttggtagtttttgtaatgtgcaaaaagggtcgagaagagtttggctgcggtgtcagaataatgagtctttgggatacttgaatgggaatgggtcaaatcccgaattctttgaaactaatggggatagctcagggatggggtctgatgatagtgtggagttgagtgtttctactgaagaagggaaagatcaagaagtatcggagacacctagtttggatgaattgagggaacttctgcataaagctatgacagatttggaagttgcacgactcaacagtacaatgtttgaggaaaaggctcagaaaatatcagaagctgcgatagccctgcaggatgaggctgcgaatgctcggaacgatgttaattctactcttgataacattatgcagatagtgaatgaagaggctatagcaaaagaagctgtccaaaaagcaacaatggctctttcgctggcagaggctaggcttcaagtggtagtagaatctttagaggctgcaaaagaagaaattgaatctccagacagttcagaagctagtggtcttgaaaaggatgatatagaagaagatgaaaaaaaggttgcccaggaagacattaaggaatgccagttgaatttggaaagctgtatggcagaactgaggcgattgcaaagtaaaagggaggagttgcaaaaagaagtggataggttgaatgagattgcagagaaaacacagatgaatgctttaaaagcagaagaagatgtaacgaacataatgcttttggctgagcaagctgttgcatttgagctcgaggctacacaacgtgtgaatgatgctgaaattgcattgcaaaaggcacagaagtctttctccacagactttcatgttgatcacacagaaaccgagctgttgtttagtgatgatgatactgctgtcgaagagaaggaaggcctgattcaaggaaattctgcagatattacagttgattgggacaaagatgttcaattcgatggttctttggttgccaagcctttatcagatattctatctgagaaaacaagccagagttttgtagacacggaagctgaatatttgagtgatcacgataatggaaaactcagtttagattctctaaaagaagctgaaacagaggtggaaaagtcaaaaactgtgcattctaagaagcaggaaactcaaaaggatctgacaagggaggcctcacccttgaactctccgaaagcatcattaaataaatcttctcgctttttttcagcatcattcttctcttttactgttgacggagccgagctcacaccagcatcagtatttaatggtgttatggagtccgtaaagaatcaatggcccaaactcatttttgggctcgttctatttggagcagggtatgtgttactattcaactttaaaaaataataacagtatgaggtgattcaagaatatgctgttttctgctcagaaatgcgccttcactttgtttatttaagtgcaaaacatttttgagactgaattacttagctaaattagcttacacagtttcctgttttctcttcgaggaagttttcttagttgcttaatcaaacgttagggctgtagaaatttaataatgtaatagtgtgtggccctatttaacatgctctgtaagtgcttctcttgcaaaaccaattaagaggttacaattttttacctttattatgcacctaatatttttcaatttcacaaatgtttttgtaccatcacagggtcacattttattccaatcgagcagaaaggggggcacagttgctacaacagccagatgttatcacctccagcattgaagaagtctcattaagtgcaaagcccatagttcgacaactacagaggcttcctaaaagaattaaaaacttaattgagatgctccctcatcaagaggcatgttgttatattttataacaattatattatttttcagtttgatgtgctctgttcctttttgtctaactttctctttaaacttttatcaggtgaatgaggaggaggcttccctttttgacatgttatggctattgctagcaagtgtagtttttgtgcctatatttcagaaaattcccggaggtagctggatttctatatgttgtttcttgaacttcatattcccgtttgatgctaacatttcattttattcaatcccaaaacaaactgcaaacctctgttgtgtcatgaacttgtaatatagtactcaaattagtagctgtcttgcttagttttttcttctcgatttatgtcatctacgtgttctaatttttagctataccccgccttttacacctcatcaaccattggctacttgataacaaaaattgatgatgttcttgcactcaaggctggctcaagtggtatgagtatgtgtgagagcacggagtggttctagtccccattatgtatataaaaaaaatgatgatattccttttattaagtgcagtctgcatttgatcatccttcactattgtatatctgatttaaaaaatttcctttatatatctcagtacaatttttcttttcactgatggctcgtcttttattgcttcaaattttaggcagtcctgttcttgggtatttagctgctggcattttgattggcccttatggcctttatatatctcagtacaatttttcttttcactgatggctcgtcttttattgcctcaaattttaggcagtcctgttcttgggtatttagctgctggcattttgattggcccttatggcctttccataatacgtcatgtgcatgggacaaaagcaattgcagaatttggagttgtttttcttctgttcaatattgggcttgaggtggggtctttttttaaatatgcttctgtatctttccattttaaatttgatttaacttatggaaaattatgtgcagtctatacgaataagagtgaaaaaaaatccattctcatacttcgtttcatttttttagctctccgttgaaagattgagttccatgaagaaatatgtttttggactaggctctgcccaggtgattattaaacttctattgtttcatcatgctgtccaccatagtcaaacactattccttgctactaatttgcaagtttgggatctttatgtttttgcaggttttggtgactgcggtggtggttggcttatttattcattatgtttgtggacaagctggtcccgcggcaatcgtcattggaaatggcttggctttatcatctactgcagttgtcttacaggtattgctttaagaaatttatcattaatttctttagggttctgaaatagtctcaactttcaatctttgatagaagaaagatccaatgtgtaatgatgaatttttcaaaatctttaacctcattatggacagaagaacttgtaagtttatgtggtttttggtctgaggcttaacttgtcaagtttcagtgatgtatgtcctttgtagaggtgaaatggattaatttcatgcggttatgttgcaggtactgcaagaacgcggggagagtacatcacggcatggtcgtgctacattctctgtcctactctttcaggttagtctaatgttctaaagttaagattttgaattgagttcagtaggaaattcaggatggtgcgtactcataatttctcaactgaaaagagatttcttttggcacaagctgacatataactctgtatagttctcagtcttcacatgtttatttccttacagaagtactagaaaataatcatatgtcatgtctctaccatatgcgccattaaagtataccatcctgtaatgtgtccctcccagtattcttgagttgaatttagtgtgttattcaaaagtattcatgtttatatatgtactctattaatttggtgatcatcttcattcttgatggaatgtatttccatccatagtgacacttatctcctgtttttacgtatggttatattttgttaatatatgcatacatattgctgctacacccgaagcttaactgattatttccttatatctggctcttttcaggatttagctgttgtggttcttcttatacttataccgcttatttcaccaaattcatccaaaggaggggtaacattgctttaatgtttctgtttttaattttacagattgactttttggctgtttactctttatatagtatttctaagattttataattatttttccatacgtttgggtcacactaagccacataataggcaactggtctttgaaacgcaagcctacagagcatgacaggtttgggatgctaggatatattttctagaagtgttaatgtgaacaacacaataaaaaatttgattgagatgtatgaagtaatatgataaaggttaagctatatattacagactactataataaaacggaaattaaaatacctgctcaagagagcagagaaataaaatttaatatacggtctgaggttcgagttcttgggtacttgcatagcaattgttttagtctttttttttcctcaaatattgtagtaataggtaaggtgccccaccctcaccacacacaaataaaaaaaaaaaagaaggaatatcatgcgagaattcatcttactgaaggttaaatatttgtttctttgctctttaggttggttttcaagccattgctgaagctcttggacttgctgctgttaaagctgttgttgccatcagtgccattatagctggtggtcgcttggtaagtctttgtatactcaagacatttattttcacgactgcaaaattgatagaaaactaagtttatgcaaatactgctgcagttttattattcattaatccagttattgcacaaacttgcctagagttctctgcatatgcgtatttgataagatttgttaaaaaatacgatgatgatttttgtaagtgtaacttacaaatattatggccttcagaattttggcagtaatggttcacaatttgagaatgctagggaatttaaattgagtggtatccatgctatgtttctatttaatactagaaaaatttctttcacctgtgaaaaactttgatttagtatgcataaatatcctattatccttggtatttgaaatggttattgttagtgctcactgatgccgtggtatattttcaagagtactcaatcttggtatattctattgggtctggaagtcataaatgaaataactttatagactgaaactagcatagtatttgagttcatctataagcaagttttatgaaaaagtggtattgggaaaggtggatagtatttaactcaaatcttcgagcattaaatttgtactttttatttttcaatactaggcgctcttagcttttgctgtcaatatgtcttatgccagacctaacttccttttgtgtggtttttcagttgcttcgcccaatttataggcaaattgctgaaaatcaaaatgcagagatcttctctgccaacacattgcttgttattctgggaactagtctccttactgccagggtagcattctctgaatttttatgttatttgtctcgtcttgaagttgcataatatatttatctcttgaacaggctggactttcgatggcgctgggagcatttttggcaggtttgctcctagccgaaaccgagttttccttgcaggttgaatctgatattgctccatatcgtggccttttgttgggtctctttttcatgacggtacgttcttcatattggcaattcttaatgtttcatttggttcaaattgattttttttaggtaatacatctcttgtataaaaattgcttagatgaaatctttaacatattgtagaagaaaaatcccagaaaattgtaagtggtattattattgttggtgtccatttaaaatcttgtaatcttccttctttttatattaaatgtgaagagaaaaatgctgaatttaacttgttcatactagacttttaagtaggaagcattttggacaagttatgccatcaatgtgttccatgaatactgtgaaaaatggtgcttaatatttactaattgataatgattatattatctttttgcaggttggaatgtccatcgatccaaaacttctcgtttcaaacttccctgtcattgttggatcattggctcttttaattggtggcaagactttattggttgctatagttggtagactatttggtgtttcaatcatatcagcaataagagttggtcttcttcttgcacctggtggagagtttgcatttgttgcttttggtgaagctgttaatcaggtttgtactgctttacacatttgtgtctggcaagtggaagttgccagtgaacattgaacgcgctttctcctctctctctctctctc

SEQ ID NO: 33207 - DNA, 3779 bp, Cannabis sativa
caagaaaaaacgtgatgcaaacttcattcatgagaaactaaattgcgatctcttaacattgctctaagaacaattatgaatgacttacagcagaggaggaaatgtggaaaaaatgcaatgctaatcctttcttttaatagaagagaaaaaaatccaatcagtaatcacctctgtttcattggccgcttcgcattgtatactgaaatccactgggttgctggactacctagtcgtactttcttctttggttgctcatcttcttctagattaatgggcgtccttcctcgtttttgccccacctattttgaaaaagcctaaaaattagtttcaaggaagaacatcaaacacacagaagagactaaatatattttgattaccttaagagcaccatctattctaattggtcttaatggtactattggctctatcaggctatcaaaatatgatatcagcttggcatagtttggctcttcatcaaacttcatatttgtaacagcttcaagaaactgcttgaatggtgctggacaaaagcagcacatcaactcaggagaaatagccatctttttcttacataccagaaagcttttgttatcaccctgcagatttagagcaatgttagggagagtgtaaccatatatcagaagttttaagcacgtttcgtaaagcaacagctcacctgataaccctgccagggtaaccttccttttatgagaaagactaatgtgtatgctaatgactcgaggtcatcccgtctactgccagttcgacctaagtgtgcatgcacacttgcatatcttattgttcccctgccaaaagcaattacatgataatggaaaaattgagcacgagaaggtttgttgcaaatataaaaattataatacctctaagtaataaaatatgcacacctgaatatgtcaggcctctgatcatattcaacatgttgaccagaagatgcatctttccatctagaggctgaaagagaatacatcacaataacaagtatcaatgccatgagcatgcagacatacaaaaccatttataagttttttgtgagaaaattcaaaaaaatgacacggttaaaaggataagaactcggaaaagaaacaatacccagtccaagatcaacaagatatagtttcttctcatcaactgttccaggttgaccaagtaaaaaattctcgggctttacatctccatgcacaaacctatttagaattagaaaatttgaaaataatcaacaatgcaattgttggaaggatattacaattgaagtgtttctagaaacatggtgaaaaatgtgaatttatgaagaacttaccctttcaagtgaagcttctcaagaattgatattgcttcaacagcaatgcaagccgccatatttggtgacatcctagtttagaaattaacaagtttagatcaactattacttataaaaaaatattcctagatatgcatatactgtgtgagtatgatagaatgaaacatcatgatacaatagagagatcttagtatcttacgactgtccgagagaattccaaacatcccaaagactgggtccaagcatatccatgacctgaaatatccagagtatgttatacaccaaatatatgattcagaaaatattctaataagtgtatcaatatcaaacctcaccagaatatagaaatctccttggcgacccttgtaatgaacccatggaattccatagcatccatttagagtactaaaagaacataaaataaaatcaattagataatatgtttacgaaaatcagacaactatcatattcgattatgaaagtagacagcaataacagtgtacttacttgtacactgtccattcataaggggggccataattgcatcccttactatttcggtgctcaaacttcaaggccacctaccaaaaaaattgtacaaacttcaggcatcttgtgattagctatctgaaacattaaaacaagattatcgtctacattcatacctcaactgcatcagctcccgttctaccactgcccccactaacccttcgaccaacatagacttgaccaaaaccacccttgcccaacttcctttctgtcttatacacaggagaatttcccacctgtacctgcaacccacaacagaaagataagacaatattttcgtcataatagcagttagatacgagtaacttcacagcccatctatgtaaaatgagaatgtatctagtatatccaagccacttcattcgtactgaatggataagcagagttgaaatgcagtgtcaagtaagataaagtcctactcattttttcaataatatggtaccacaaataatgccaatcaatttagaagcaaaaatagtttaatgcataattaagcaaacagttagtaccctatccgggacaggagttgtgcttgcttcttcttcaactcccattactttgtcagcacttctaccacccacaatttcgatatctttgtcttctacaacgtctacacaattgtaacccggtgctttaggaacaaccacagaaggtttgggttctaaatcaatcaacttagttccacggcctcgtccaactgcagtctgttttgtcagtattgccggtgactgccctttcgcaactgccttaccacctctacctcttccacctccaactctcctcctagttttattctgagcaggaagttcccagttttcagccagatcaatttgttgcggggaaggctgaagatcaccaattcgtttcgatctccgcactccagtttgcaactctggcatcctcaacccatgcaaatcacatccacttaaaacatcccaaatcccttaaaaaatgttctgcatctcaaaatacccaaaatgaaaaaaacaaagctcatcaaaaccctagtttgttattcttcacatacaaagtcctaatataaaatagccaaagtatacacttatgactgatacccatgcccagctagtcaacatagtatcaaggagttaccaatacagaaaatacaaatatcaacacaaccagtttcatttccttccctaaaacaaagcttcccaaacacccaaaacaaaataaaaataaaaatacaatctttagaaagaaaaaaagaaagaaaatccatctacaatgtatatattacttctctacaataatcaacaatcggattcaaaaaaaaaaaaatcatacacttactaccacaacacgatcatcgccccccaaaaaatcaaaatattcaaaacaaaaaaaaaaaaacaaacccactcatcaaccaaaataaaaataacaataacaataacaataaacattattcacctttcaaatcgacaatacattgattttcagtaaaccgatcatcaaaattttttaaaaaaaaaaaaatccacaaaatacaggagagaacatataaacaaaaaccgatcatctacaactacaaaaaagaatcaactaacaaaataaataaatatttaaattaaaaaaaaacaataaatatatgtatagatagatagatacctggtgaaacagatcggtttatggagaatctaagaaagaaaaaaaggatcggaaatggaaaaaaggatgatggatgaaagagatcttgatgttggtattggatgggtgttgttcttgaccttatctatcttattcttatttgctttgagtgaaaacagaggaacacaacacatacatatttgtgttttgaatgtttggggttataaatttactttcatttctatttaaattttctaaatctatttatcttcttttattattttcggttttgtattaattaatt

SEQ ID NO: 33208 - DNA, 2623 bp, Cannabis sativa
  modified_base (2557)..(2568): a, c, t, g, unknown or other
ttgtctaagttcttagacttaggcataattagcttagctctaataaactgagtcatatgggggtcatattcatcaagcaacattctacttctcttcatcctagccatgacaactcatataagtttcttacagcccaagagaagtctaattgggttatgaaaaaattcaagcaattttgaatgaacaaatcttcaattcgctaggaaagtattttagaattttaaaggtcttaaaataaataatttaaggattttggaagtttgagaatccttgaagtaagatcaacaaaggaggagaagaataatttttttttttttttaaaaaaaagagttgacgtcgagaaagaaaaaaaaaatcctaccttggagggtgaagaacactcgaaggcttgatgaaaatgaaattccaaggcattttttaagtattgggaatggagataaaagtgggaggaaggaaaattttgattgaatactctcttatttataggtgagttcaatctccgaatcctagagcaattgtgagtttttaaatttaaagcttttaagaaagaggtaaatgataagtaaaataaataaatatatcttttcccttttcttttcaagctaaattttgaaattcctatagaaataggaatatgaattcaaatttaataggtaacatcaattcctaatgctactaagatcaaagaaaaattagagatttaaaagaaaaagataaataataagcaaaagatcaaaagtcttttctcttcttcttttttcctctaatttttgattggtactatcatataggattaggattcaaagccaatcaatccttgttgcataacaaatgtaagaaaagttcaaatttttgaagaaaaaggtctaagataagttaaaaaaaaaaaggataagcttttcctctttttatttgttaattgatttttgaaaattccaaaggactaagaaagggaatcaaaagtcctaattttattggggatgcttgaagaacagaaaaaattgcctaagaatttcacaattgattcccatctggtagttttaagaaaaacaagcccgcttcacgtcatcaagtcaactccacacaagtgtaaaagtttacttagggggaaaattttaaccaaaaaacttttcctaatgatgtgtacatcaatgtttggcagatgacaagaaagattacgtcatggagttgagtagacccaagtcatagcagtcgacctaggaggggaccctagccctgcacccaggttgtctttcggagctccgagatagaagtttagacttttattacttgaatccaactcactatctttcagtattatgtaccatgacaacatagagtaatcaaatccaagcctcgagagctgaaattgcattaacctgcaaccaagaatccaacttgggcacctaggatttcacccagcgtccaagttgaccttcgtaactagggttttagtttttgggaccgttttagtgcaaatgggtcaaaccttgctttaggacatcaactagacatatcacggatatatttgaggcatcataaccaaattcagagcaagttcatttttgagcacccgaagcattcggtgctcgagcaccccagcgcccaggttgacaatttgtcaatctgagtaccttccaagtatcaaattgaaaatctttcttttgcatcttctttgtgttcatcaaaaatagggaaatcgacacttttggggaagaaacaacacttcttgggtgacagatgtaaagcccagcacccaggttgacacatggggctagcccagctcccaagttgacattttgtcaacttgggccgacttcgatgatgtttttcaagaaattttccaagaaacttctctttttctagaaaagattaagattcaattaatttcgaggaccaaacgaaacttttgaaaggctaaaagggggatatagtgctaagttcacacctggcactaggcccagtgcccaagttgataatcaacctaaagcgttggttttaattattcaaattccaaatttgatttgactaatgaatcaaaatagtcaaaaatgtggtaggagaccccatcctcaacttcaagaaccttggaagtatcaaaataagatcccgagagctcaggttagagtactaagtgcccaggttgacaaaacaaatggtctggttgcattgcattgggtgggttctgcttatccaattttgattctattttgattgtccatctagtttttctcaatagctaagatccatgaagtcaaagaagtaaaatttacgactttgaatttctcttttccaacatgggaaactcattgggagatgaagagtttcgagtctctcatttccacagaacatcgacatctccgagaattggtgacatgctttgtcgtaacacagaaatagaataagtgatgtgaaaatatcacttaggcattttgaagtacatttattggaaatttttacacttatccagcatccaggttggcatcatatgtcaacctgggcactgggatgttaacctaggcgccgggtgtcgggaatattttaccaggatctagannnnnnnnnnnntatgttgaattaacatcctaaatgtaatatcccggaaaataaataatatttaaat

SEQ ID NO: 33209 - DNA, 970 bp, Cannabis sativa
  modified_base (554)..(555): a, c, t, g, unknown or other
aatgatgataaatctaggtcatcatcaaccttattttcctcttcaagactcaatcatcatccaaatattagaagacaaactaacaatgataacaaaaatgatattaattttatttttgattttaaatgtcaaatttaatattaatatttattttataatcttaaactttcttttatttattattagtccgtttatggatctataaataggagctcattttaatagtgaagtgtgtaatttttagagagtaaagaatctatagcaaaattttctctcactcttcttctcatatttctttctataatttttgtgagaataattagcataatggcctaatcttttttagaatataagggatgattccatatgcaaagtgaagttattttgtatcttttgattcactttattttgtaatagttatttgagtagtgtaagttcattttccacttttatttttattttcttcatccatctatactgccatatatgttattagatactaaatatacatatagacttagtcaaattttttttatatatttttatttagtgannatagtaatggtagtattgctcatttctatcttttatgttcatctttatttacttattgttaaatgatgtgtaggttttgtcatactctccctatgtgtctaaaaattaataaaagtaatattaatgtttatttctatcactatcaccaccatctctatctctttgtctttatttttactaataatatatagaattagtcatactctttctatgtgttcctaattagtaaaaataatatcgatttggttttatgtttagtattttataacattattgcttgatgtataatatcatttctaggctctacatgagattaaattatttcttttatttttaagaacttgtatactcaaaatataataaactttaatgatacatcatttgtgtcaactttgtgaatcaaaggtacaaaata

SEQ ID NO: 33210 - DNA, 1897 bp, Cannabis sativa
  modified_base (864)..(869): a, c, t, g, unknown or other
tccagaatcaacaatcgagatggagttgtcattctttagattcaaaaactaaagcattaccattaagatgactgcttaactgtttttggattgttcttattgttggtttaatctattgtgaaagataatctgagtaagtggaatcactttctctctccttttctactgagcctgaactagtaggattgttagaggaattattctcaataactttagctttccttttgcccttatctggattactggagaaggatctccatgcaagtgacagtgtccgttcataagcacgcaactgagcgtccagcttgtctatgtcagacgagttccaattgttaacaatgaattggttaaactcaagtgataagctgttgagaacaaaatgaactctttgctttccagataaaataattcccaacatagctgctttctggaatttcatgttcatcatgagaaagtgtgtagtgatactcttaccaggagtcatcttcacactttgaagttcattcctaattgtatattctagatgacgattggggtgtgggttgtacactttgacactacaaatatcaataaatagaaataaattattagttcaataaatcaatacacaagttcagaaaaaaataagtaaagcaaatatgtttgcaaaaataccaaaaactaaacatatttattattttccatggtttccaacataatgaaatagtctccccgtaggcgagagtcaaagataacattagttgaatagagtagtaaactcaactagaatagagaccattttagcaaccttttattcaatcaaaataagaatccaacattgtctcggtaggcgagagtcaagattattctcattttatgagcttnnnnnnttgtttcatattctgtaagtttatttctaagtagtcagtacaggggagagtcgaaaagaaacgaaaacttataaaatacttatcatatgagatcttatagtgttaaatgctttcaacaaataaccatcaataagggggacgaagtctagcgtcttgaggttatattgaaaaccattgaccattgtaagaccaacaattgagatcgaatatctctttgattaatgctcattatttaaaataatattttttttaattaatcatttattttaatctatatattttaataatgaaaattacttcattcaagtttatccaaaattaatgaaaaaattaattttcaactttaatttaatttccaaacaataatttcaaaaatcgatttataaatgaatataaaatttcaaaattatataaaatataataaaataaatttctaaaaaatatctaatgtaagtatcttcaactaatcaccttaatttgatatttaattaaattttggaaaattatttaagttgaaaattttgttattttaaaaaaacttacattagatatctgaataactaattttctagaagattctacttaattattaatttcaaaatattcttatttaagttgatccaaaattagtttgaagaactaattttccacttaaatataatttctatgaaaattcaaataattaagtttctagaagaatctaattggttataaattattttatttaattaaatacagaaaaatacatctagtttatcttgaatagtttcattaaactaagtgtgtttttcttaattaatttcaaaataatctgatgaaaaattaattttatatatttcgaaattaactatgttgctaatcaatttttttaggttaaactagtttaatgaacctattacaattattcaattaggtaaatggtccttcacaattggggttgttcacgtgagggaggcatggtttcaatatgtcgtacctgttgggttttatgccctaaataaaactatttacaatctgattagttatca

SEQ ID NO: 33211 - DNA, 5985 bp, Cannabis sativa
ttaagatctaaatttattttttaagatttactaaaaaaaatattgaatctttttcatatttattttaagggggtacgatttgatagttatcaaagtttagggggcgaaattactaatttacaaagtcacattagcatttaaactaaataatgggacagaccctataaatttttgtaaatgtaaaaattcaaggatacttaacaattcttatattcttaagggtaaaatcaatattgtgcgagactggaattcgtgtttagggctggattaaatttatatgagatcttataggtataaggtgatccgtgctgaggatgtatttctttatgcattgattgttgttgacactatctggaggatgcgtaatgaaatggtacacaataacactcatccagatgtgatgaaatgtattgacaatatttgtactgctgttgcagagttacatgattctttcttgcctgcttctactccgatctcgagggagtcttagaatcctcctcctcaggattggatttaaactgaattgtgatgtaagagtgggcttagagactatgtgcattgttgttgtagcaatgaatcatttgggcaaggtggttcgggttaacacgtcttggttggacttctcggatgcgttatgtggagaagttgcagcctgttgcttggctgtttcgctggctatggatttagggtataagtatgttattgtagagattgactcgagacaagttattaatgcgctcaatgggaagatgtcccattgggctctagagaactatgcctcattttgtatcgagtcatctccctcttttatttgttgtatcttttttaatgttagtaggtcttgtaactatgttgcccataatgtggctaagtgggccttttcctaccaactgtatgactctattctgatctcctctttaccggaaaatctattttataataactgcgaggtctaactgttttatttgattaataaatgttcatgcttattttaaaaaataaaaaatcaatattgtcataaattaataagtaaacagccgaatatattttttaggagacaaatatgattctcgagtctctactctctactctctaccttcaatataaaaaccttggactgcaaataaaccattcttttttataacacacaatcaaatctccatttttttttatataacaaaaaccaaatctctaatttagctataaaaaatagaaaaagtattattttagtaaggtcccctcgtccctgcttggtacttctatttcatcatttcttttcatgatcattgggcattggcacattcaatattcaacagtgcgtggggacataaacgtgccgtccaacaatttgaataattcaaaatattaccgttgctcacgcaattctatttttttttttttgagtacagctcacacaattctatgactctgtaatattaaatcatttattttattattttttctttttacagaaaacaattttaaataaatattaataatcatttttaaaaaataaaaacaaaaatcaaacattctcgtacgcaaatattaattacttaatcttacttagggtaggatatataagatctttctgttatattatttaataattatggattaaaatgtgataaatatatgattacgtgaataatatatattaagtgtggtatataaatgtgtaactagggctgaacatcggggtgtgggttagctgggtttcgggttcaaaaaattgtacccggacccgactcgtaaaatggtttgggttcgtgagtttcgggttcgcgagttcacgggttcggattgaccgggttggccaactaacatacatttaataatgtgggtattaattttttattttattactaactatttttatttttattttaaaatagcagccttaagtagtggaggtctaaactgatcgcatatagtaatactaaattagaaaacaatatttaacgcttatggcttctttgttggtttttaatatattaactttataatatataacacaaaatgttatccatttattttttaaaatttatttctttatttatttttaatatattatatatgtaagaaaaatataaaaaaaaaaataaataaatttggcccggttggcaaacgggttcgggttcaacccgaaacccggtggtcataaaaaaccaacccgcgaacccgcccaatagggtaccgggttgaacccgacccgtctgaacagaacgggttttttaaacttttcgggttgagcgggtcgagtccaagtaggttggtcgggttcgagtcaaaccccgtcaaaatgttcagtcttatgtaacttatgattttaacttacacttttgtaacctacatgttgtaactcgtaaaggagttataatttgttatcacttgtaactcatgtattgatcacacattattagtataataaaagggttgttacacaatttgatgataggattcaaatggtatgaaatatagttgttacaaattatattaaaactcatttatatgagagaaataaagtattgtgtattttgaattctaagtgtgatcacctaaacattataaaaggagatctttggtgctcatttgagagagatcaagtattctatcaagaaagcactttgctagaaaatcctaaaagacttgataatttccaaagctatttccatgagagttccctgtggcgtttggttggaaggaatgaaaatataggaatgagaatatgaatggaatggaataaaatttaaaccatgcattggaatggtctttccttccatttcaaaatgaaattgtcattccaccaaaatggtggaaaggctattccattggaatgacattctaacactttaatatgtaaccaaacaaaagaatggaatggagattgtttcctttccattccatttcattacctccaactaaacgccacctagagacaggagaaaataagcttttagacaaggtgtaataccttgatcaagttatgataatccccactattctacactcaaggttgtgagtgagtgtatacatatatttatatatgtatatcttcttctacctttcttatatataacatatagtatatatatgtatatattgtatatattgtgttgtaatatttatttaatctctttgttagtccttgtattatattgcaatagagttgtaatatcttaattttcttccattgtaataaaatctctaaaactttctggggttgggtttagtcatttgaatcttttcctcttgacaaatttcagtttttatcttattttttttacttacacaattttataataataatttttattattattttttttatttttaataaaacatatgccataatttatttttttttgagaaaaattctcaaagaactccacctaagagctgaaagctcaaagaggccgatagcgaggggaatccattaattcaaggtatcagccaaaataagatctctaatataacttggttagtcaagcctccaaattatacttgtagtactagataaagcaagtttagaaagacaatcaacaacaatattgacaaatattggacaatatttaaaactcacaacagaaaaataagaacaaagcgatctaatatcatcaagaattaaacccaacaaaaaatctaaaacaagatagttattacgcttgtgaactaaactcttacagtcggtatcaagttgaacattggtgagaccaagagtgacgcattgggacaagactttttgatagcaaggttctcaacaatctttggggagacaatacatgacactaaccaggtagcataggcaagaacatctccaaaagaatttctaacgaccatgccaagaccacaagtctcctagtattgtcgatggtagcatctgtattgattttggcaacggtaagaggaaggggatccatctagcagtaagatcaatcaccaaattcggttgcttccaaagaggacctatagcatcattggcgttctcaaatgataggcctagcgatagtctgcaacccacaactcagtgagatccggaggaagcaacttgtttttgtgaacaaatttgtttctacggcaccaaatcctccaccaagtcgtgaagatcaattcaatttcattatgaggaagatgttgaacaaatttgcaaatgagttatagatatcactaacaaaagcattagtatctccaatagagaaagaaaaaaactttctagccgaatcaaggtgatggcgatcccaaagagcatgatgagttgtctctaattcattagaacacattaggcaaagattatcattgagaaactagagggagatgctcagtagatggtattatagaaaaaggttaagtatcagaagctccaatttctagagagagaatttatgaccttgtgtgtagttttttgaatgtgaaaaatgagctaatggaactctcattttataaggtaaaagaggcccacaaaaataggaaaaaaatacaaataagttattttccaccgttgatgatgatcgaacaacgaaaattaacttttgtggtgatggccaatttttagtgcctggcgagtcccaatacgggttacccaaaatttattttcgtaactctcttagggtgaattttgatgacaatagcttcaaaattgcgactagagtgtgagacatgacttgatagagcatttaaatatctttaaaatgcaagttgaatcacatcaatcaaataaaaattgagtgagttatggccattttactaaagtcagttcaggtcccaccacccaggttgacatatgacgttaacttggacactgggtaagtgtataaacatccaagggatgtcctttaagacgcttaagtgatattttgacaccacctagtctatttatatgttctggcgtagttggtcaccgattctcaaagatattactattttacataaatgagagactcgaaactctttatttttgggtgtgatggaaatgagaaatacaatgtaacgccttaaattgtaagggtgccacgtgtgtgcttttattaattaatttataataataaactaacagtttaaaaaaaaagtaaagtttaattaaaacttttagtagaaattatttaaattataactgaacttttcattcaaaatactagttgatttaaggattcccttgattataaacttgtacaaaatattacaaaatagtttattacaaaatgccatcacatttttaaaatacaataaaagaagaatcatgtccactgagagccaaaacatggcggctgatatgtatattatctggagtaagaatggcaatttgggccatttttgtgggtcgggtcgggcccccagcctaacggagcgactttggcccgaatgattcgggtcccagccccgcccagctcgatacatattatttgggtcgggcccgacctggcccagtttcagatattaaaaaaaaaataccaaatagaagcttaaataacatcattttaaacatcattataattgaaagtaaaacaataaaattggtataaatgtatcaagaaattaaaaagtggagaaacctaaagcagaaagaggttgcagaaggagaagttggcagaccaagacgaaatgtagtatgaaccctgcgtaagctaatcctctctaagctactgccttcattcgattctccaccattcacactcaaaatttgtatacgtattttacatatattagagtatatatatattaattaatcctcgaatcgaaaaagaagatgaacaaatgacaaaatatataataagtaacatcacatacaattttgctggtttatttgtagtgtttgagccaggattctcaatgtcattccacgttactctcaccaatcaattaattacacgtggattagactttgacgccctatccatatgcatgccttatccactcaaccatccaactgattcacgctagcatcacgcccttctggctcccacgctgtacttgttgggttttatgccc

SEQ ID NO: 33212 - DNA, 1825 bp, Cannabis sativa
cccccgcttatagggtccgacatctttgttgatcacacttctggttgggtcaaggctctgataccatttgtaacgtcaacgcttcaagcctctattgggcgtcccccctcgaaattatgactcttatacatgaatacatcactctgactacttcttggactaacaattagccttatagaccaatacgactgtttttagcgtgctttgtcctcactcgcatgcttcctagaaaaaccttccaagaggtcagccatgctaaaattgccccaagtcaagcacatttaactgtggagtttattcatgatgggttactagaaaataagatgcaccttgttgatataggtagcactaattaatctatttaagccatcttaaactgtgtagtctcatacctacacagtctcagaatcatcacagtgacctttttttaggtgacgtgggattcaacagcttactcggtatttctccttatggatcacgggactactgactgtcacatgtagcgtatcggctagccttacccttagcattatcaatgatacacaatattttacatgtatcgatgttaagaaagtatgtatcagatccgactcatgtcttgagttatgaagccctagaactgcagtcaaaattttcctatgaggaacaaccagttcaaatcctcgaccaaaaggattaagttctctagaacaagaccataacattagttaagatactctggaggaacagtaaggtggagaaaactacctaggagttagagtctgatggctcaatttccagagttgttcaagttagattttgaggacgaaatctttttaacatggggataattgtaatgaccgcatacttagaatatggtattagtaagggcaattagcattaattaactatatcatgggccttatttttaaaaaatagacattagagttataattttttaaatttaaaaattttattaaactaaatgtatattatatatgatgattatgcaaattaattaccaatgatttagaaaataaaataaacaattaacaaacaccatgaaaattcaaaatccccaaatattttcctattattacgaggtaggtacattagatacttggagtgtcatgattaataaaagtaaattatacaaatggattttgtatgcattgttgttaatggtatagtgagtttactgtacactcctaaagtatttggaacactcatatctctttataaaagagggccttttaaacctttttttattacttgtaattatttaaaattttataattttttttttttaaaaatagaatattttataatatataaaataagattcaatttgaatccttggatataatgtacaacacatgaagagtcaattttttcaccatccacttaaaattgctattaattgcaaacctagctactacttgtttcaattcttccttgttttatgaaagtggccaagttgtatctctcttaattccttactttgtaaacaagtagtaagctcatgattttccattatatcttcctttgtccacataggagcttaaacttcgtacaaacttcaaatgatgagaatgttgacaacagtgcataacaaggaggagcatgttctttagatttgccttgttgactactgttagttccaagtgtattgcaattttcattacagggttgtcgttctcgatgtgtactatggttgctcgatgcacactctaacctcaaggaaggtacctctacgacatcatcgactactaaatcatgttgatcatttatattcaaatctacaataggatcattattgtagaagggagtatcaaactcctcaaac

SEQ ID NO: 33213 - DNA, 2337 bp, Cannabis sativa
  modified_base (1513)..(1515): a, c, t, g, unknown or other
gtggcttatatcaatgatcttacttcttatatgaaccaccaccaacacttaagacaacacaacttgtatacatattaatgaagtacacatggatggactttagttgaagagatcatcctagattttgcccatattgttatgtataggttgaattgatataattgaaaggctatatatataaattaataatttaggttggcaatcaattcaatccatacatccccataatgacaactcaaaatagtgaaaaatatttcaaaccccatagtccacgctttctagtgcgttcatgccatatcacgttcatcacacaattcatcccaataaataataaataaataaataaataaagtagttaggggcaaaacaagtttcacacattcaacaagaaagcaagtagcttcataattcactaaattacataaacacccctattcatgagctactttaaatattaattttacaagtatattggaatattattaaagagaatatgattgtttagaaatttgtaattatatttaattttatatgaaaatatttaattagattattattaattaaattaccttgtacgaaactagtttaacattattaatatataaatttattgaattaagattgaagatagtttttgataagtagtattaactattaagattatagtctacattttttcaaaccattattaacattagagtgatgtccttagtattattaatcaatctaaatcattttaattttccaactatgtttagagtgatgtcctttttctaagtattattaataaatctaaatcattttattttccaactatgtttagactttagagtgatgtcctttttttaaatattattaatcaatttctcgtttggtacgcgtataaaggttgtattgtattaaataataaataatactacatttgaataaagcaatgtattgtattaatgtatgaccaaaaatttaaatacaatgtatattgtattatttgatacataataaatgatccatattaacttgtattataatatttacaagggattcagggtcatcactaatctcggatccggatccggacccggacccaaacccaaacccggaacccagacccgaactcggaccctaacccagaactaggactcggaccgggacccgggaaccaaacccgagacccgggacctgggacctagaccttgacccgggacctggacctggacctggactcgaaccggaccccggacccagacctgagaaccgcgacctgagacccggatccaaacttgaactcattcccagacctaaacctgggaccgggacccggactcagactcgggacccgggacccagacctgaactcgaacccaggacccgaacccaaacctagatccggatccagacgtgaacctggacccagacccaagactcgcaacccggacccgggagtcatcggacccggacccagacccaaacctgtagttggtgttgggttcgagtgtattgaaaatatattatnnntttacacaatctattaatacaactcaataccaaacatagtattgtattaaataatagtaatacaatacaatataacacaaatacaatacaatacgacataccaaacgaaccctaaatcatttaatcaaggtgtgaaccaatattgaaaaaaatgctcttcaaatacacaacaaaatttagcctataatctagctaattgagctttctctcaaaacttaacaatactaaaaaatatattatttacaatgacgtctaattttattatttttataaaatacttatttaaataaaataaataaaggatgaatttattaaagtattcattctcaaatcagaaaagatattcaaaacgtttataaataattagaaaaacgaagattttttttcttgataaattaaatgaaaatatagttcaacttattcatttcaagagtatttgaaattaaaatttaaacatcacacaataattttaaagcaatgattagtagtctttaaaattcccatcaactaatttataaatataagttatattaaaaactaaaaaagaaaacttagatgtcattagattagtgaattgtaatatctttataaaagtttcaaacataaactaaacaatagaattataatagtattagtgattgagttacagttatgtcaaactaaatatagtgttaattgaatgaattggattattttgggctggttggcttcaattttcaatttgcttaatataataattgagcttgttaaaaaaaaagggaaatttacatggtctactaatttttgccatttttttacaaaaatactgtcagacggtatttt

SEQ ID NO: 33214 - DNA, 2106 bp, Cannabis sativa
attaatttctataaataaatttaaattttacaggtattataaaaaatcagtcacccttcaaactataaaaactctcacacagcataacactttctcaggtatcatgttctttcccaaaactttttaatacatttatttttaatcttcatcttctcatttacttttgaattcaaacaaagtatggataacttttcctattgtgttttctagagaaaattaataaaatgctaaccatgaaactactaggggtagttaattttatgtaagggttttccccggattttggaaaagctggtggccgtgtgtgaattctttcaaggcaaggggcggcctaattcaacattgttttttactttgattcagtcgaggtgattttcgtttaccagcgcgtaggtggtctaagttcctatgatcgagtctttctagcccctgttttcatcaaaccttccacaacggctacaaaaatacaatttaaaatcttttgtggttttgattctactagttcttattaatttatttatgaatattagtatcctattgttattatataatacctcaattctatgaatagatagtctatccttctcttacttttatggtaaataattttttgtactaattattggtacttttaatgtgtttaatgtcatattggtgtgttattatttttttggtactttttttagtttgttacttgctattggtacttttaatgtgcttaatgtcactatggtactcaatataattggtttgtaattttttttgtttatatatataaatattttttttatgaatgacctttgtactatttattattatttttaataaataattagtttgtaattttttatgaatgatttttgtactatttattattttttttatatcttttatggtttttgttttcttttaaattttattttttaaaatgaatttttacttgtattggtatcttaatgtacttaatgctatatccgtgtggtatccaataattggttagtaatttttttttttaattttactctatatgaatgatctttgtactattttttcagtaaataattttttatactgtgacaccttaagttattcaataccatactcatgtggtagacaataattagttagcaattttttaaatcatttatcaaattaaaatttgtgggagctgatattgaaatgcaccaataaatgtatgctaccataatatttttgttattaatatgtacatatctttattaacatcgattaaaattttaattttttacatctgatatgttaatttaattagatattttatctatctttatttaaatataattgttaaaaataaaatatataattaatttattaattttgacgggagttactttggcacgttctctgccacctaatatatatatatatatatagatggagagatggtcagtacaataccctttagttggtattctcatgagcacccaattgagccaatattattatatatatattgttaaaattttatttaattattaaattatttgatgatagtataaactgtcaatatctcatcgcaccatactatatttttgtggtgtgatatttttcctttttttttcgattttgagatcaaaatacaaatttaaatattacaaaaattacatgtacaatttaatttaaacaatagctacaaaacaacattactcgcaccacaaacactcgtaattatatgatactttatattgagctttgtttctaaccattttatgttaacatttgtttcctattttactcaataaatgagaagaaatattttaaggatgtgattttttcttcttcttcattttgtcaatattaaacaggttgttttattctttattattattatttttttttaaaaaaaaaaaggaaaatccatatcaaactttgtattgaaaaaaataaaaattatttctaagaagatgaaaaaagaaaaaaagagaaaaattcaactattatcattgttatatttttctttgactaacatcaatatgaatattttatcgcaggtcaaatctatttacatagatatggatatcagggaattttttatgttgcttactataatgttgtgtacacttttgt

SEQ ID NO: 33215 - DNA, 2088 bp, Cannabis sativa
  modified_base (2056)..(2062): a, c, t, g, unknown or other
ttatatttttatcacaataaataattttttcttataaaaaaaatataataatattcaaaatttgttattaattataattgtagtttaattactcaatacttttatttttgaaatatcatacactttttgtatatttttttaaataataataatagaaatatattttgttggtaagaaaaataataatagaaagatatttttaatatgtgtaataagtttaaatttaaattgcaatattaaaaaaaattatattatataagtacatttaatataagataaaagatgaaaaatatatgtatagtgggtttaaatttaaattgtaatgttttagaaaaagaactatatttttgttatacagtcacatttaatataataataaatattatatatttaaaatgaataaatatatattaaaaaataatatttatgatgtggagaaaaaataaaaaaaaaaattaatgtatggtgtaatgtaaaaatttaaaataaaataaaaaaataaattttaattatatattttatgagtttttttatttttacactgcaaaacaatttttttgttgtatttttacagaattctacataaaaactcctattgcaaataacgtagtaacttaaatcgcaattaaaaatcatatagcaatctacataaaaattattagaaaaactattttaaaaactcaaaccgtaaattttttttaaaaaaattaatatataaagtaattcacttatattttaaatggtagctagagtagaagctctttcttttctctcccctttcatttccctctgaagtaaaataagtcaacctatataattaatataatttctatttagcatatcatatgggaaatttgttatacatatctttctcaatccaatagagaaagatattatatatacatatatgtattatggctccactatcttttaaaatttattgctcctaaatcttgctcttcctatagggcctatacacatgtgacatacatcatgtaaatatgtattgaatgaattttggtatgaaatattcttttgtgatgttataaaactatattttatgttgaatgtagatactctaagctcggattaatgtaagctataagttttaataattaataaccgttaaatcaactaaattatgatcgaattaaaaaataaaagtaacgtttggttggaggtaataaaataagaataaaataaaaaaaaaaaaaacaattttcatttcattcatttgtttgattgtatttaaaattattggaatactattctgatggaatcgtcttttcgtcattttggtagaatgactattctattttgaaatggaagaaaagaccattccaatgcaagatttgaaaaaatttagtaattttttatcaatttttttatgcatttgaaattttattccattccattcttatttctatattttcattcattccaaccaaacaccaccttagttcatatattttaatgtaaaaatgaaatgagaagagattgaatgggattaaaacaaaaatattgtggcataaaattgagcaacaatacaagacactaactcaaaacacaccaatttcgtggatatagaaaggggaatgaaatgttattaattctaactaattactacaacaaaggcacgtgatatggcacgtgtttcaacgtattattttacatgatctttaatttagtacaacaacaacaacaatttcacaggaatctaggaaaataaaaataagagataataattaaaataatactatctattttcttgtctgccttttgcttccattattgcatattataattaattgagtagacagaggagttcaaatacaaaccaaattttacatctcattttcttttagctacgtggattttagtactaaattatattttacaatgtttttacaacataaatatatttaaatttatttatgcaaaaaaaaaaaaaaattgtaaaatagagttaaaaccagactcaaaccatatgaaatactagttatataatatatatatttatttatagggatatgattttgtcccgtgatgtactttnnnnnnntgtattccgtggtacattagatgggt

SEQ ID NO: 33216 - DNA, 2014 bp, Cannabis sativa
  modified_base (34)..(34): a, c, t, g, unknown or other
atatggattgcactcaataaagaagtatcaaacncaagcagttctctatgaaaataatactacttgcatcaaaatgagggtacattggaggagatataattaaaacatatttcaccaaattcttctttatacatttcaagagaatacatattcatgttcaacatattcaatcaagtatcaatctttcagacttattcacaaagttattaccagcattaacatttgagacaacgaacaaaattcgtcgattaaaagatctccacaaatatttaaatgaggaggagttaatttacgctgcactctttttcttttgactaattaagatttttcattaaggtttttaatgaggtagtttttatgaacatccaagggtgttataaaatattatatatatataaatgtctaaatcaccaaattaattatcatcataaatgcttgattgtatttttctttattacattaatttagttttttattcttttagctatatttttgtataaatagtagtttaccctattaaaataaactactaataaatttttatttattttctctttctctcttcatctttattttttttttcttcttatctattttatattattttataacaatattcatattttattcattttatataaaaaaaatttaattaataacttaaattatttttaagaaatttctaaaatatgtctctctatgtagtttaatattatactaggatatttgatataaaattatattgaaattaatgaattaattatataaagggtaagaagggttcattgaatttgtctttcaaaataccattattggataggattacaattaatctaatattctaacataaatattgttgtgatatatcaatcaatgactttggatcagacacatatttgttttagtagcttttagggaaagtagacttaaagatcaatatggccaatcaatgaatttaattgtggtcttgtttattctttagactaaataaacattggacacccatgacatgaatgtgaatcttcaaagaatcagaagaatctttatttatttttggttagtctttttttttaaaaaaaaaacaatgatgtacgtgatcatggaccccaccaatatctcagttgacaatttcataccaatcactcttactaagtttttttttttttttttctgcttaactcactcctaccaagttaccaaccctattgactaatataaacacatattcattttgatgaaatcatcatatgcatgcgtgcttatcatcaacaatcaacaaatttaaaaggttattacaatgtatatatgcaaacacattataatctatagtgtttcttattttatttcttttatgacataaaagtaaaattttcaacttgcccatctcaaaatatggactaaccaagttcatggtacaacccatatagttgctctattggagttggacccaccttcacaaaagtccaacttagaaacatatagacgatacaatcccattttcaaagtcccaaacactcaaaagaaaaacacaagcaaattttgagtgatttttcatccctactattagtaataccacataattatatgattaaaaaccaaaactagaaagaaacatgcaaaagagtagttccacaaccataggagtcctttttctttttcttcacttttgtttagacgattttgcccctatagaaaaggacaaaacttaagtatcccttccttactttgaagattttccctttctcttctcagcccaaaagaatccaatgagggcaacaactgagaaagcactaaaacaaacggaggcaatatcgagtgacgcgtggcgccctgtgattgcaatgatgtcgaaaaggttagtggttttgccagcatcagtcgtttgaccgaatgccacctcagcattcgcggcgttgtaagcgtaggcgcgtacgaagtacgttcctagaggcacgtcgcgttccacgacccactcgaagctctgttttgaggcgctgtaaggctttgtcacgat

SEQ ID NO: 33217 - DNA, 1313 bp, Cannabis sativa
aggatgttaattcaacatacttattagtaaatctatatcttggtaaagtattcccaaaaaaccatgcatcataaaagcgatttctgatcttattgaaatgggttttatttagggcacaaaacccaactcgtacaagttcaaagtgtctgtgtctcgcaggataagtagattttcagatggaattattccttctatcaggaaatcttccaaagcttggcccttgatggatgtccttgggtgataagttatgtcgaattgccccaattcaatagaccattttatcaatcttccagaagcgtttggttttgacaaaacttgtcttttgggttgattagtcaacacctttatcggatgtgcctggaagtaaggccttaatttttgagatgcatgaatgaggcatagggcaagtttttcaagaggtggatatcttgattctgcccccaataaccttttgctaacatagtaaactggttgttggtgcgtcccttcttctcgcactaatgctacactaatcgcattctcttagatagccaagtacataaggtaaagtctctccaattattagtttagccaaaactggagggcttgacattgacagatgtagatgtttctgtttctttttctttattatgtttgtgaaggcttcctcgcactcgtttgtccatttgaactttttgttacctcgcaacacattgaagaatgctaggcacttatcagttgatttcgagatgaatttgttaagagctgccattcttcctgttaaggcctggacttccttcgattttgttggtgacaaaatttctatcaatcccttattttttttaggatttgccttgatgcccctcgcgttgactatgaatccattttccaaacgagactccaaaggaacacttctttgggttgagtttcatatagtactttttcagtatctcaaagcactccgcgaggtcttttgtgtgatccccactttttatcgacttaaccaacatatcattaacgtaaacctccatgttccttcctatttgcttttcaaacatttcattcactagtcgctgatacgttgccccaacattcttcaaaccaaaaggctaatatagccccatgttggttacgaaacttgtatgctcttgatcagggacatgcatcttaatctggttatatccagaatatgcgtccatgaacatcatacgctcgtgtcttgcagttgcatccactaactggtttatccttggtagtggaaagaaatcttttggacacaccttgtttaaatctgaaaagtccatacaagttctccaagttccatttagttttgg

SEQ ID NO: 33218 - DNA, 4276 bp, Cannabis sativa
  modified_base (1014)..(1018): a, c, t, g, unknown or other
  modified_base (1370)..(1387): a, c, t, g, unknown or other
tttgtcactacaaaacgagtttctactgtaacagaattactttctgcttcaacaggcgcatacagttttatattttcttatatataactgacatttgcaaaaacacggtttttcaaaaattgttgtaatgccagattaatctatccaaaggttggtccttctgtggcgcatttgatatcatcgtaataaatgggttcataaccataagctgctcaatactgaaggggttattaggtggtctctctcttttgcccaaagtttctttgaggtgaataaaaacccaatatctccttgattgagtctcgctctatggcttctatccctgcagtcatcccttggattctaccttcttttgatcatgtcaaactgaatgtggatggggtatgggactgttattcatgatcatgtgggtgtctgcctggcttcggcagttactcctgacattgggagttttacccctccaattgttgaagctatctccatttatcatgggcttcttttatgtcttcgcattgtctataaagaggtggaagtggaaacgtactgctaaagggtggctttgctccttgaaaagaatgaattttgctttgcaggatttggaatggtgttgcaagatatttacaatgtttgtcgtaacttttgttatgtttcttttaaattttataatcgttcttcgaattctattgctcctaatcatgcaaagatggctctctctagtgactttgcgagagtttagtggtcaggtttacctgattttgtgtaagtcttcttgactttttttggcatttgcctaatgaagatttatattttctttcaacaaaaaaaagctaagtttaagatttcttttataatttttaattagttttaaatttgaattcccattaggttagatattttctcattttttgttctacttttctaatttattgttattaattaaggtggcgtttggtaacacttttttaattaattttctgtttttaaaatttaaaaagtgaaaatatttttcaaaannnnnttctataaaactgttttcatttttcaattttttaattgagaatcaaaatttttaaaataaaaaaaatcactttaattatttttttaaatagtttttttttcttaatcaatattttggacttcgaccagactcgggcccaaatctccccacggccttgcgctgaacccagcctttgacccgaatccgaattcgaccccaaacctagacctagcttaaataaaattaaaaaataaaaatgaaaataaactttacaaaatacacttttgttttccgtttgtaaaattaaaaaacaaaagtggttacataacgcatttttgtttttcaaaaccaaaatttttaaaaacaaaaattnnnnnnnnnnnnnnnnnntaaaaaattagaaaacaaaagttttaccaaacgacacttaagtttattgttaattttaaagtattattaagagtaatttgcagcataaatacctaagttatatgccgagtagcagataaatacctaagtcgtatttttggcggtaaaaataccttccgtcgcacttctagaacttccgtaagtacccgatcgttacgtgccaaattagtatctacgtggcaacatctcattggtctagatcatttattaattattttttatttaaaaaaatcatttaaatatttaaaaattaaataaaaattatttgaaaattaaaaaaattacaaaattattaaacaaaataaataaacccatattatataattttattaattattaaaaacaaatcattaaagataatgtttaatttaaaacataaatccctacgtttacatctttcttatttttttttctcttttccctattcatcatcgtgttcttccttctcaccgtcatcatcagatcaactctattacaccacaatctaacctccctcttttaatctctttttcttcgtcatttttctctctgtatccaaattataacaaattaaaaaaaaaacccaaacaaagaatgtgaatcgctcggttgttgcctctgaaaccctaagaatctttttcgacactattgttgtgccgcaggtgtgctggaggagcttcgctctcccatcggcgcaagaacacaagggggccaaaaggttgatgatcatcgcggttgtgtgcctttctggtttcgtcaactcgagttcaatcaactcaaaaacaacccccgaattgattatcttcatagtgctgggaatgacggcgttgcccagatctctgctaagacctcatcttcaccaggtgtcccatcaaagcctctcctagatctccatcgagatgctacgttcgactctgagaagagagaagtcgagaaagagatggagagagagtgaacatgggtttgatgtatatgaatgtatacgaacatgtattactcttataaatgtatatgagcatgggtttgatgaattttttttgcccctttttcttttggtgtaactagtattactcttataaatgtatatgaacatgggtttgatgaattttttttcaaaggtatgaacatgctagcaagaagaagaagagcaggaagaagtggatgacgaagaggcattttgttttagggtttattttagtttttggattctaattaatgattttttttattttaatttaattaaaatatgaatattaaatatttatttttttattttgattttaaactatttttttgttttatttttaatattttaaattggtttacaaataaaaaattaaatgatttggattaatcacatagtgagacgtggacactaacctgtcacataacggttgggtacctacggaagttccagaagtgtgacggaaggtatttttacctccaaaaatacgacttaaatatttatctgctactcggcataaaacttatgtatttatgccgcaaattactctattattaatttagttcttttatagaaaaaaaaaaaagttgatgaataaaataaaaagagagacaaaaataaatatgttattatattgtagcaaaaacaaaaataagtttgatattatattgtagcaaataagaaaatattaataatatcgtcgactaaaaaatgttagatacgataccatacattttaaatttatgatttgttaactaatatctaacactatttaaattataatttattaattagtgactataaaaattaaaagtataaaaatatatatttatactataagaaaattattgttaaaaaattactacacatatgatataactatatatataaatatttaaaaaaaaaataagtaagatacggtgatgttatcagtttgaatgtaatgacgactacaagtaaaatacggtgatgacataaattttgaatgtagtaatgattacaagtgagatacggtgataatttataagcaagtgtttatcaatccttgtttgattttctttttaaatttctttagtgtcctctaaatttattaattatttaatattttattctttataacttctaagaattaataatatattattggaaataaaataatatatagttttttttatagagattcaaaaataagtatataagttaaataaggcttatacattaataataacataatataaattaatagattattgatatattgatactattttttacttattatcttttatttaatttttattaatattgtgagtaaaaaatttatacaaccgctcgcgaagcgcggtttattttctagttttatatagaatagatatttaaaaaaattatatatgcaactaatattttaatgccaaaaaaaaaattaaagatataatatatgtgatataaatatattttaaaacttaatagatttaatttatattctattattatatggaaaaaatataatttaaaataaaattaatcatttcgttttatatataacttttgttcttcttttaaatttgttattttatttattttaatttattgttgaagatataaaagaacaatatttattttgtttggttgttagttctgtaaaaaaaatattttttaatatatattaaataacttaatattaaaaaagtaaccaattcaaaataactgatgcagtctgtatctgtacttttgcgaattgaattggattagatttgagttattgtgtggattagattggatctaaagcacttagtgcagatagctttatatgttctcttcttaattttctcctttttcttattttttattcaatttataactattaatttactaattaatgaaaaaaaaaaaaaacatatctatat

SEQ ID NO: 33219 - DNA, 3103 bp, Cannabis sativa
gaattttaattgcaaaaccatgtataaaattctctgtgttcatactttttactttacagcttttattttttctatgtgagatcattactattaggctcaaattttgttaacgaaaatctgcgttaacaatcacgatttttcacgattttttgataacctcgttgattagcaacgagcttcacagtaagttaaaaatcacgtgaacatgcctaaaatagttagggttttatatcctaattgtgaatcccaaaaacatgtgacaaggattaccgatgcttactcaggaatactcggagatttggaatctctacatacttagaataccaggtaagatagtagtgagcacgtagagttaagcattgtggcgcttatgtttgatattatacttgtgtttaagtgagaaaccgaaattagggttattaccctaaagtgagcgattatacgttctagggttattactctagtgtttaaatgattttgaatacaatattatgttgtatatgttgagataaagaattatttgggtaaggcataattaggttagactcagtaatcagaactgagataaaccaatctaaggccttattgtaaatagacttgtgagtacaacacgtaggtctatgttaaatagacaatagatgcggtggcatcgatatttatttgaattgagactatattacatattgttatttatactatcttgttggacttggctcacgggtgctctactatgccgaaaaaagataaatcagtttgtgattagccatgagttcgagagctttgcggtgtattgtacatgttcgggccacactaaaccacaggggtcgggtctactagttgatgtattttgtattctcagttttgccgttttggtcggcatgtaaaaataacttgtaatgttttgcaaagatttttacgggatctcgaaacttgtgtatcttttgaaatatttataaaatgaaatagttacaagttatgtttttactcggtaataaatttaaagtttaattttttctcttattcttagtaatttcagtttagcgagattaggtgatgtttaatggttgatcgtagcgtgcctttcattagggcgttacaaacacaataaatctcggtagtcttattagtcatggcaggaaaggtacttcaaccctcactctatgtatctaatctgtgtaaaaagaaatttaatttttgtaaaaaaaaaaaataaaatttcattataaatattataattaaataagttaactgttaaaataattatagtaagaatttatataaaaaaaaataaattatttataaatattaattgctaaaagaggcattgttaaatatttaattaattattttaagaaaataattgaatataattaagtaattctaaaaaaaaaaatttacctattaggtcaaaaaaaatataacttatggttacaataaaaatgtgttcattaagtagtcactaataataaaaatatatattttatgcagaattaaaattaataaagtaaagtgcatttataaatttttagagtgcaaactacaaataaaatttccataaaattaaaatagaaataaaataagttacaaaaggaaaagacaatcccaataaaaataggagaaaaatcactctttattttttctctaatttatatggcttcgctagcttttctaatcataaaattttgtaaacgaataaataagaatgaatatcatatcattctcattcgggttacgcaaacgagaaatgctaaaaggcaccagtagtgcctaacacttttctatgtgtcaatatcgtcattggtccaattaagtatcggatcccatataatttaatataataacttttaggaagtatcgctagccaatcgcaatgcgacatgtcgagaaggtgctagtcactagtggtgcctaatagcaatgctctaagaaacatgcctaagtgtcgtcttggtttccaaattggatttacttactttatgttggctaggctgtcaatcagggaacagatcataattcataaatacaattctttactttcatttaaatgtaaagcagtgaagtggatgagatgttgcgttattggtaagtttcttccacatcgacggagaggggaggcagagggtgttgtcatggtcttgttttgcgtgtgacatcacatgatgacgtggggtagatggcggagctgctgcgtttaattataaacagttattaaacgagaaaagataggtagaaattgaagcttttgtttttctttctttctaaaatattgaatagttgtattgtacgactgaaggcacaagaagacgagagtggcccgcgtttgattgtttttaatgcggcgccactttcaagtcacaatctcccccacctcattcctctccgtactttctaacaaattcttaaattcttcaatgcgacctttgagaaaaagaactttttatttttcatcaaacttacacataggcccttggtagtcttctctgtgaagaaacataacagaataatatttattcatgatcactcacttccaggggaagagaaagaattttgaaatttttaatatgggctcatatatattagtgtactctttaaatttatgtttttatacttattaattagatgtaatatgttatttataaaattaaatcttgttattgcatattttatgagtgataataaaaatagaatagtgacacacattgagtaactctaaaagtctatagtgatacttcaatgcgcgtcactagcgaggctgactggaaagatagtttttagtgacactccaaacgtgtcactgaaagcttttgcactcattttctgcgcgtcactataggggtatagtgtcaggttttgtcaaactataaaagtaacagccacacacttggagtgttactatatcctatttttcttttttctttcttttttattaatatttttggagatatagtgacacaccaaatacaataattcacgtcaacacaactaataaatatagtataacaatacaattataataattaattattttaattcaaattttatatattataagtaataatttatattaattatatacaaataatacaattaaatataacaataa

SEQ ID NO: 33220 - DNA, 1532 bp, Cannabis sativa
aattaacataaaataatgcgaggaaaagattttaaaaatatagtaagagtaatttttaaaattatataagtatttttctaatagggtgtacttatcaatttatatggttcaaatagaactcatacaaacatattaatttagttttgactttataaaaagacaatatgagaaacttaaaataaaaaaaaaataaaaaaaatcaaactaagtattgtaattataatattcaatctcatattataaaaaatcttgttataaggcaattataaattaaaagaaaatatcaagacatcaatcttgttaaaatatacaaataattcatagattaactctaaataaattacaaaatatctacaaaaaaaatatactactttattaatcatttaaaagatagaaaaatataggaggagtgctcttaatttttttgtaagagagaaaaaaagttaaaaaaataagatataaaaatgtacacttattatatatattcatatatatacaaagataaaaaaaaaatagtatagaaaaaaaattgaaaaaaaaaagagagacacaaagagaaattagaaaaaaataaaaaagaaaaatagagaaagagaagagcaagaaagaaaaaaaaaagccagcaacttacttaaaaaagaaaaagaaaaaaaaaagaaccaaaattgactaaaaaatatataaaaaagacaatttttttttttgttttaataagtaaaaaactataagaaagaaaaaaaattaaaaaaagtataaatgtaaaaattaatgtttgaaaaaaaagttagtatttggtgtaaatttcccaaatagaaaaaaccctaaaatgcaaatgcaaaataaattaaaaaaaaaaaaaaactaattaagctagaaaaaaaaaacataaaatatgggtttagatattgggtttacaaaaatatggcatatcaaatactataaaaaatcttaaatgagaagaaatgccatagaagagtggcaaacctaaaagtgccatatttttgtaaatttttttataaaattccgcatttcatgtaattttcactagttataattagctttatcaagtccaatacgaggaaaagatgaaaagtttatgtttggttgtgttttcagtttttagtttttagaattgtgtgtttaaaagtgagaatagaaaataattttttgtcattttaaaaatttaatagtgtttgacacaaattttttaaaacaatttttaaatttgttcttactaaaaaaaaattcaatattttaacattatatcatgacacaaacccatttgggtccgggttcggatttaattccgggtctaggatccgagtatgtgagcaaaaatataaaatataatatgttagataaaaatattatttttgaaaattgaaaacaacagtttgatgttttctgttttctagttttttaaactttaaaactcaatttaaaaatttaatggtgtttgacacgaattttttaaaattatttttagattttttcttactaattttttttttaaaaaaactttttttaaaaaa

SEQ ID NO: 33221 - DNA, 1613 bp, Cannabis sativa
agtgtattgtttcaatgattaatgagtttgatttgtttagctttcaaatattgatgcagttatttgtttcaatgtctgagattgagattctatagtagtaattttgattaagtttgtttacaatagtaatcatatggtaaaacatgttgagaattgaaatgtaatatttacatatatctattactcatgatttgtctctattgtttatggtttttttctctgtgctgcacattgagtcatttctatagtacttggtattttttagagtagctattattggattttgaaattttaattgatgttatgtttgatatagatgaaaggaaagaagaaagtttcaagagatcatttggctccaccgacttagccaccgatacacccaatgaggccgaataagcagtctgtcaaacagtacattccgcctgcaaagacacaattattgcttggactttcagagattgtgaagaattggtctgctaagaaatcaaagagatgttatattaaactagaagtgttcgaatgagaaggccaagagtgttggatcagcgtagacgaggtggaagatgtgtgtgagttgcagaagattggaaatactgttatgtctctttggtgcaggtataatagttaataaccaagttaatatctaaactaaaaattatatttacaactgtttattaataatcttttttaatttagttatttgcaagaacacacacacttaatcttggtgggttgaggaatacatacgcatttaataacctgcttcagtagcaactgaagctggtaaactcgaacaacattcagagaatttatatcagcgattgatgggtatgcaacctgaacaatagttgatatgtctatgaaattcaaagtaagtatgtttttatattaataaatgtaacaaactaatggatcgattagtgagttgactgaattaacatgttttattctgttgtgaccactggatgacaattataatccatgccaatactcaaactgttgcatatatcgacttgacgaatgacttcatcccgactgatattataaattgtatcaaaaagtaagttataattttttaaatttagattatgttacaaatcaattcgttaattaatatattttttgtttagtgttgtggacaagtacaagatccgaaaaaatatacgaaacaagggttcagtaaaaatcaaccagcacacgtgtcgacagtagccggatggagtacaatgtagttattatgttatgaaaattatccagaattttatgacggttgttaatcctgcaagttttttaaaaaatcatgtaaacatgaataactcttcttcatttaatttttattttaattagacttttaatgtaatgattaatattttttatcttttgttttacagtttaagtcagacgctccctatagtaatgaggagattaatgcagtacgggatgagtgggccgaatttgtgaagcctttgattatagattaagtacaaggttactacttttgttatagtacatagttttatgattgttgttaacttttgcatatgtaattagtttatatttagtttacgatatacatggaatttaagttttaggatcgattctattaacaattt

SEQ ID NO: 33222 - DNA, 1186 bp, Cannabis sativa
tgtatgttcaattttttagttgtttatactaaataactggttttcgtgtttaattgttgttttatgtaattgaggtttaaattttattcttattttaggaaacttgttttaatgtgtcagatttacttaatttgcttgctttttgtaactggtatttctgtttcactttttaattaattgtttaacataactggtttcagtaatttaaatttatttatatgttaagaattctcttgtgatatgctttaaattttttttttttaatttcctgtttagtttgtgtttcaatatatctttttattgttttatttaggcatcttatgttttttttttctatattaatgaattattagttttatttaattagctatctaatatagctggtttctctattttataaagaaactagtttttatgtttcaatttatttaatgtaactagtttttacaatttaattattagtctttttttttaaaaaaaaaaaagaagctagtttttatgtttcaatttatcttttgattggtttaagttgtattggtaactggtttcccttatttagttattatttttgttgttttacataactgactttaacattataatttttaattcagttgatttaattaattagttctcagttatagttttaaatagttgattgttgtaactggtttcagtgtggcaaattccaacgtctaacaccagtgacaactcctatgtctaactccggtgacttttcagcaatgaagataactctgacgccttttttgatgatttttcgactatgataacaacttcgacaaatattttaattctatttttttacttttttttgtggctaatatttttttttagtggataatgactattttgtgtagtgttgtgcattgatagttaaatctaaagcttttaagaggtttgtaactagttttattctggtattgcatttaatttgttcaattccatacaatatctagaacacaagcatgtaaaatttgtatataatttttggtatatgtaactggtttttttttttttcattaagataacaattttagcgaatatattcttattctatttttgacttcttttgtggctaatattatgctttagtggatagtgaatgttttgtagtaggttgatggtctagtattagagtttatgagaagtttgtaactgattttaa

SEQ ID NO: 33223 - DNA, 1279 bp, Cannabis sativa
aggtggaaaacaaaataaatttaaaggttaagacacttaaatccgataatggtctagaattcatcaacactgagtttgatagattatgtaatgagcatgggataaataggcataggacatttgtgaaaacttcacaacataatggagttgctgagcatatgaatagaaaccttttgaacaaagtgaggcatttacttcttagttcgggcttgggatagccttattggggagaggctttagctactgcatattaccttgataataggagccttaatagagtcatagacttgaagacaccttatgagaaatggtatgggaagataccaaacttgaaacacttgagagtgtttggatgtgcaacatatgcacatcaatccaatgataagcttgaggctagatctgtcaaaggcacttttctaagttatcctataggcacaaaaggttatagaatctgcataaaccagaatgggaaaactaaggtgataatttctagaaatgttgtatttaatgaaaatgatttccctcacttaaaagccgagaagggcagtgtgttacctgatgcagattcatctggcaagaggaaatatctaatagagtttaaaatcaagctcaaaggatttgaaccaagtgagaagaatgacagcacagacacaactccaaatgagactgaggatcaaccatatttgtctgactatcaacttgtgagataaaaccagaagagaaatttatattctagcaaggtttgtagaggctgatctgattacttatattttatcaatagaaaagtagtgtgacatactagaactattgagtatagaagaggcttgaaatggaaaatacaaggagtggtctcgagttgtggatgatgaattaagctcgcttagaaagaacaagactttgatcttggttccaagatctgaggtcaagaatgtgatatcattcaaatggattctaaaggctaaagaaggggtgatagaggatgagctagtaagattcaacgaaagattagtttccaaagatttcactcatgtggatatgataaattacactgaggtatctcacctgtagtgaagtataagatcattagacttatgtggtcaatggaaactcaataaggtttagaagtggagcaacttgatgtcaaaattatgtttctaaatgtttatatagaggaagaagagatttacatggagcaaccacctggattttaggtggaacaagatggaaacgagttggtttgtaagttgaaaaggtccttatatggccttaagcaatctcc

SEQ ID NO: 33224 - DNA, 1000 bp, Cannabis sativa
  modified_base (948)..(953): a, c, t, g, unknown or other
ggagtaacaagtgttgtgctgggctatagatccaagaacagtctcggacatagacgaacgaagccagcttagaaggagttgatctttccttctccagacaagaaattctgggttagcagccccagtaaccagtgttgcaggtggagcaatacctgtaagaagaatatcgtcaaggccatggccaatgactatgggaatgacttgcgatttccacgcaagaaagttggtgcgatccaatttgactgtgagggaggaattgagggaatgttggaacagattccatgaagaagcagaggaagcagaagctgtagtggtggtagtggcagagggattttcaagaacaccaggatccatgggagactaacaatgtcgatggcaatctgataccatatagaagctattaatacaagactatcaatgaacacaaagatactttgggtacaaagtcttgcaaagcttgagccatgaaaatggccttaggatctttatttataggcggagagattacagaaaggagagttgttacaacagttgagactgtaactaactttgacagattaaaccagaaaataacagaaaataacagaagaggactttaactaactttgtcctgtaatacatacaaatattacaacacaaactaaaaaagactatacattattaagagctttcttttgaaagataataattgtagtatgaacaatctaaataaaaattcaacaaaaaaaaaaaattaaacaacagtttagcacttaaaaaaaaaaatcagcatagattgaaaaaattataaaaaatttcatcactatataaattttctatactaatgaaaatatatcaaactttaagaagatttgagactaaatgatctcttaattttagaaatttaaaatttgaactctaagcaataaattaacaatatataaataatatatatatatggaacacttnnnnnngggtaatacccattgatgggaactaaaaaaaattaataaggtaataa

SEQ ID NO: 33225 - DNA, 3648 bp, Cannabis sativa
  modified_base (634)..(635): a, c, t, g, unknown or other
gtccaagtctggtaacggttctaggtccaggtcgatgtcttggttccggtcctattcttgggtcccggtctacttccgatttttgttccaatttcgagtcacagtgtactagttaaggtccaggtttggatctgggactgggttcgtgtccgggtctgggttcaggtcttgatctaggttcgggtccgaggctggttcccagatccagacactgactacatgttaggtccaagccctgggtccttattcggatcccgatctcgggtcccagtctagtttaattttgggtgccaggtcacgagctcggtcttaggttcaagtctgtgtctggggtcgggtctttatgtcacggtcatagttccgttcctaggtccctatcctgattttgggtacaggtctttgttctggtctagatttatttaggtcccggtctaggttcgggttaggtcctagtcccagtttgggtttgggtctcagtatgggttttatttgggtttgggttcaagtcttggtccttgtcctggtcctggtcctaaacctagtccggtcccagttctagttgtcattctaagttcaagtttggtttagcgttcgagtcttggtccgagtttgggtttgggttcggatctcggtnnaggtctagattgggctctgggtgttgattagggtcttgggtctgggtcaaggttcgggtctgagtcccaggtttcgggtctgtgtttagtttcaggtgtaagtcctaggttctgatcccaatctgagttcgaggttgagtcccgggcttgggtccaattttgggttcgtgtctgggttcgggttttgtcctattatgggttcgtgtctgggttcttatcctggtttgggtcgaaggtcgtgttcggttcccgagtcttggttttagtccagttcctagtctgtgttcgggttcaggtctcagtcccactctttgtctgggttcaagtttgggtccttatcagggtttggattaggtcaggtctaggtccttgtgaaggttcgggtcccaagtctcatgtcccaatcctagtcaagatcttagtccaggtcctggtcatagtgggttatggtttgggttccgttgtcgtctcaagtctgggtcctagtcacagttccaattcaaattcggggtccgggttttgttctcggtctaggttggggtcggggtccgagtcttggtacgggtgttttggaacttagtctgggtccaggtctaagtctgggttcaggttccatgtttcgattctggtttgggtctgggtcggtattcgggtttgggtctgggttcgtgtccatgtccaggtccgaatcctagtataggttaggggcttgttctgagtttaggatcgagttctgagttcgggtcggggttgaagttcgagtctcagtcctcgtctgggtccaggaccgagttcgggactgggttcgagcccgagttctggggcagtgttttggtcgagttctgggtcccggtccaggtccaggtccttgtcacggtcccggtcttgttctagggtcctggtcacgttctggttcaagtttcggttttgagtcccaggtctgggtctgggtctaggccctagtccagcttcgggtccttgtccgagtcccaaatcaagacatctactatgggtcttgtccaagcccgggttcttggatttcgggacaagatctggatcccaaccacgagtccgagtctagtttccattcatgtcctaggtcccggtttgggtttgggtctagatctaggaccaagactagggtccagttctgggtcacgatcccagttctaggtccccagtcatgttcaacgtttgggtctgagttcaggtctgggttcgggtcccaagtcccggtttgggtttggattcaggttttggacccaatcctagggtgggtctgtgtccgagttcaggtcctagccagttacagttttgggtctgggtcaaggtcttagtgctggtcctgttcttggctccccatgcgattctagttttggttccaattttaagtcaaggggtacgggttagggttgagttttggttcgagtttaggtttgggtcctgatttgggtctggggcgtggttgaggttcgggtttcggtctcggttaggatccgaatgttggtccagtttcaggttcgggtctaggtccaggtcccggtcccgttccaagatcccggtccagttccagttcaagattttgttttggttcccgaatgtgggtttgggtcttggtatgtgtccgactcctggtttgagttcgagtttgggttcgggttttggtctaagtcctagatctagacattgactacttgtcgggtccaagcatcgagttccgaatcccatgtctcgcggttggtcctaggtccatgtttgggtctggggtcgggtctcagatccctatccaagttctgaggccaagttcttgtcctagtttgggggcccaattcccaggtctgggtcccccatctatgttcggttcctaggtcccagttcgggtccaacttcgttttcaggtttgggtatgggtctagtcagagtccaaatcttggtttgggttcgggtccgagtttgggtcccagtcccagtctggtccgggtttcgggttctaggtctgagtcaagttcttgggtcctgggttcggcccttatttttgggtcttggtttggtgtgtacctaggtcccggtcttggtttaggtcccaggtcacacgacgcggtctgggtccaagtcccggtatggttctggtctgagtttgggtttagattttggccttgttacggtcttttatctgtgttctattcccagtcctagtctgattccagtttcgggtacgggatcaagtcagacatgaacttgggacccgatcccacacccaaactcggacctagacatggatctggatacgaacctagacttgaaccctgacctagacccatacccactaggatcgaaacttgggagttggattcggaccgagaccaagacccaaacctggacccgtacccaagacttggactcagacgtggacccaaacctagatccagaccgggatctggacttggaccaagacccaaccctaaactcgaactaggactcaaaccctgacctagacagagacccagacccaaagccgaacccagacacggaatcgaaatcggaactgggactaggacctgaacccaaacatggacccagactagtacctaggacccggacctcgatgggggaccttgacccgggcctcagaacacagacccggatcggaacccgagacttagacctggacctaaatcaagactcaaccacaagactccaacctagatctagacccagaccgggatcagaaactcgaacacgaactcggactaggacttgaaccccaaccgggtcctagactcggactaggacctaggaaccagactaggatggggacctggatccgggacccgggctttagaaactagcgccgagacctaggacctgaccccggacacagatcctaaactcggactaggaccaagacctaggacttgaagtggaactagactgggacttgagaccgggatcctgatttagacacggggcttaaacctaacccatagttgatgtttggatgtgggacccatac

SEQ ID NO: 33226 - DNA, 4648 bp, Cannabis sativa
tggtaataaataaaagatttggacatccacgtaattaatactatttataacaattaactttaatttgtttgattgattgattgatttttcctatataaatttattaactttaatttatttagtatcctaatcaattttctatgtattattttgtaagtgtgcttaattgtttatctaaattgggtatttttttggggtgatctcaaattgttttgtcaaaatttttagagtaacatgatattgatctcatataagtcattttgttttaaggtgatttattttttgactatgtatacttttttagttagacaattagcttactggttggacatctcttcgcgtcgacgtttgttctattataattcatatcagtctatcaaaagaatttggtaaaaaaaaaatacatatattatattttgggatcttacaaaaatactattttttatcagttttatatttttattgtcacgtaattttttttttacatttttagtataccaaattttcaaaaatactaagttaaagtttcaaaattacaaaaatactgtattacagtaaaattaaaaaataatttaataaacaacatgaaaacaacaaaaatataactacaaagcaacaaaaaataacaaaacaatgatctaattgcaatatgcaaaacaatatcaactcctaaagatgtttttgtatcacgaattttatttttttacttagttttgacaacttaatttatctttttgtactactacattatttttttttttcataaaatttgttgttacaacttttttttctctttttttttttttttttttttgagttagtagtagttaaaatggtagattattttttaaaagttaaataagtaattacattaataataaaaataataaaatcttatgatttcaaaataaagtatataatataatgggtaatatataattaatatgacaatatctactactgcacattgtatcaattataaaataaatatttacacaatatactaatttttcttcaaaatttacatttatattttgacgaaaaaatttttacatttatatttttttttcttttttactctttttcatttattaaaatttctataaagttttttttcttctttatatctctttgtattttttttttcattgatttttttttctttattttcttatgtcacttggttcactcttttttttttctttctcttctctctctatttatcttttttatattttttattttccaattctctttctctattttttttttacactaatttttttatctttatatatatatataagtgtatatttttatgtatttttttctaacactttttcactctcacaaaaattttattttattatttaaaaaaaatacaaacacttattatatttttttttctctcttttacattttcatactattcacactcaaactattacatgctatttttccttaattaatcacattttattaaaaagtcttaattattttcttttaacatttactaaaatatgattattttactttcacacttcgtctcatatttttttaacactatttctctatcttacaaaaaaattaagaacacgcctcctatatctttctcttttttgcatgattaataacagtagtattttttagatgttttgtagtttattcggagttgatttatgaatgatttgcatgttataacaaggttgatgtcttgttatttttctattaatttatagttattttattgttattttaatgttgttgtttaggtgtgttaattcgaaaatcatttattggtgacgtgaacatcaatatttgacgcatggcaagaaagatgacatctcgaagttgagtagtcccgagccatagcagtcgaccagggaggggtccctagcccagccctcaggttgactttaagaactccataatggaagttcggacttcaataaatcctttccaactcaatagatttcagcattttgtaccatgaagatatggagcaaccaaatccagaccccatgagttgaaaagacacgaaccaacacctcgaaggtcaacctgggcacctaaggtttcactcaacgcctaggttgacatccttaactagaatttcagttttcaaaaccgtcttagtataaatgggtcaaactttgtattggaaaatgaactagatataccacaaacatatttgtggtattagaatcagatttagagaacgttaattttttagcacccggagcacccagcgcttgggcacccatcgcccaaattgacaatttatcaatttgggccacttccaagtatcagatcgaaaatttgactcattcatcttgctcgtattcatcgaaaatggggaaacaagtacttttggggaagaaacaatacttcctgggtgccagaatcaaggcccagccccaaggttaacacttggggctggcaggttgacattttgccaacttgggccattttcgaggatgttttccaagaactcttacggacatattcttctttttcagcaaagattaagattcagctacttttggggaccaaatggaacttccaagaggtctgagttaagagccaacgcttaggttgacacctgacattgggcccgccgcccatgttgacacattgtcaacctgggcaatttccaatcaatttctagaaaaagtgtttcgattattttttggtcatcataaataacgaagatataagcaaactcggtgagaaaaatacaaacccacgggcttagaaattgagcccagcgtccaggttgacaattaacctggtacactagtttcgatcattcaaataccaactttgttatgggaattctccccgaaatggtaaaaaatggggtaagagaccttgtcctcaagttctagaacctcgaaagtatcaaaacaacatctcgaaagctccaaaataagcacccaatgccttggttgacaaatagcctgttgcgttgggttctgcttatccgattatgattccgtctcgatcgttcatctagtttttcataataactgggagccatgaagtcaaaaaaatcaaattcacaacttcacatttttgcattcccaacatggtaatttactcagaaatgggttgtagtaacacctctgagaattggtaaccagctttaccaaaacacaaaaatggactaagtgatgtcaaaatatcactgaggcattaaaaaatacatcctcaagatattttcccactcacccagtgtccacgttgacgttatatgtcaacgtgggcactgggactaggaatggacacagggcggggaattggcggggagtattccccttgtccctattcccattaatgattttaatccccatccccgcttattccctattgggaatagggcagggaaccctctaatggggcagggacgcgacagggaatcccctaataaaaaaataaaatttataataaaaaattaaatatataaaaatattaaattatataaaaatttaaatattatacaataattattatccaacaaactaactattatctaaaatacaacttaaaattcataaaaagaatactaatatactaaaaaaatacaaacatacattataaattataaaatattattaaaaatataaaataaaatactaattgagttcctgtcggggcagagagtgatccccgtccccgccccatttaacattcgagaacaaaaagtaatccctatcgttaccccgtttcccatttagacggggaattcctgccccattagggacaggtcctctcaaaaccccatcccaatgggagaaatttgcatccctaactgggccatgaacaactttcagtaaaatagtcataattcactcaatattgatctcattgacgcgattcaacttgcgtttcgaaactatttaaacactcgatcaagtcatgtcacatgcttcaatcacgattctgaaattatcgactccaaattttaccccaaaataaattacaaatttaagctataacttacctagagcgggtcccgccatcgcgacccatgctccgaaaattaacaattaacgctagaagttaatttttaccgttagatcatcatctacgatcaaaaatagcaaatttatattatttcatagttttagatcattttattcctgttttcaatgaccacattcacctataaaatgagagctcttctagtttatttttatttagaaaaatagtcataaagtcagagcatctctctctaatttatctctctaaaaattaggacattcagacttagctatttttttgtaatttcatctcatgagaataaaaactcgaagtagacgtagctcattactgccgcgatacaaggagtaaactactgtaaattgttgtgtctctctatatatacttaatatataactcattctcgtcaatctagtgagtaggtgtgacttaggaatctctatccatatttttaagtcaacaaggtattttatagtttattttccgttatttttatatatatatatatgtatatttttttttgtatagttgatgtttattttatgtgcattttttaaggtgtatattgtaacaccccgatttcccgagatgtcacataggatagtccgtataaaataatttaataagataaagacaatcaaatact

SEQ ID NO: 33227 - DNA, 1994 bp, Cannabis sativa
  modified_base (1372)..(1373): a, c, t, g, unknown or other
gcaatgcaatacaggattattagactaaagtatcaacttgcctaattaggcaatgtgatgtgatgaagatggttactttatgaggtaacatatatataatttatgatattaaatgaatatgattcgtattattggtagaatagttttgtattaccaaatatttgtatactgatgcttatttatggcagatgccagtagtaatttggattttatattatgaacaatgcgtgatggtttgattctaattgtgtataaatgattatattcgaatactaaactgtatgattattattattgattttcttgctaagtccttgtgactcacggatgctatgtggtgcaggtaaggacaatgaaaagttagagcttccatgaggtgactaccttctccagcaatgtacatattgaccccaccgacctgtgtgctgagttgcaagagttgttttggactggttgtatttgctgtattttgaattgctattgtctataatcttttgggtaaaactttttatagcaaggatctccgaaatacgatttttatgctgttataatgtccatttttagtattttatttaagttaagtttttaatattatcacggtttttaataattaattattctattagtattaaactagtttataaaatcacacatgtggtgtccttatggaataggacgttacaacttgatatcagagccaagttagttttgaaggtcctgaagactggtcgaatatgtacatttgctgcgaagacaggtcgactcatggtatggtaagtgtttatgttattcactatctatactaagataattatagtgtatgatgggaaaaaagtagcatattgactatctatactaagaatatgcgtatggtatatgtattttaatattaatatttgtttgagttttaagtgtttgtaagatgtggattaaatgtgtgataagttatacagtaagggcaattgaattgcctgattagcgagctatctaggctcagggtaaacggtaaggaagagaatcctttattgccgtaatactagaaacatgtaaattttactatgcaggatatgataagacaacaaggtataatagatccgagatttgaaagaacaacatgctcatcttatgtttgttcttgtactagcgacacttcctgttgtaccaatggatgtggtgaaatatatggagtcaaattactagcagatcagggagtaaaaactaaatgaaccaccaattatgggacagaacaaaaaggctccaggttgaccagactagtggtcaaggtgagaacaagagatggtgaccttatcctgagtgtcaaagatgtgaaaagcgccatttgggctaatgtagagccagatcttgttattgnnggggtagtgggtcatctgaaaagagcctacccacagttaagaaagactgatgttaaagaagaaaagtgtacaagtcatgcccaagggccaattatgattcaaggggactcgaatatcggtccttcggccaactcaagttagaattttatgggcaatattatagttgttgtttcaattgatattgatattaaacattgtacactcaatgaggggatattaaaagatctgaatgggcagtgcggtatgttatttagtggttactcatctgacagggtagacagattagaaaaatgacaatatgagttaaatttgctaatattcccaaatggaatataggacatgagtagctaatggaggtattcatataattgatttgggggaaacgaaatcttttgattaaaagtgatctagagttagtataagtgagacaatttatgagtattgtctaaaaccctaggtgaattaaaggcgatgattgtgtgggtggatctattcactactagggggcatgacactcagagccctgtgatctgtgtaggaaagactgttgcgatatttagcacacgcaagtgtacgtatcgtttaaagtagtagactcactaggagtgaggtcgatcccac
